United States Patent Application Publication US 2007/0067865 A1 - sequence listing, part 66

SEQ ID NO: 421376 - DNA, 222 bp, Oryza sativa nipponbare
ggaaaaaaaatttttaatttttgggcgtaagggtttttttttttccatggggcgctttttaaaattttggaatacaaaaaacaaaattctttgcccgttttttaaaaattttttacccaaaatttttgggggggaaagtaaaaataaaccccccaatttttggaaaagggttacttttaaaaaatcttgattgtccaaattaaaaaaattcaaaaggggccc

SEQ ID NO: 421377 - DNA, 316 bp, Oryza sativa nipponbare
gccatgtaatttatatgcgttttcaatccaaccaaaaatatgttagaagatcctcatcatgtctgaaatcaattacagaacatgcattcatacaaaggcatctatataatgtattcatacaagtaaccagcagaaaacgaaaatcatcaaaagtaggctacacaaacacaatttctctctaggatcagcacatgcatctgtacaacttgtctatcttcagcaaaatatgaagctttgtatcttcagaagaatattgcacctacaacaaaaatatgcagcttctgccaaaaacatcctggtaattgcactctatatt

SEQ ID NO: 421378 - DNA, 289 bp, Oryza sativa nipponbare
  unsure (1)..(289): unsure at all n locations
gggaaaaaaaaaaaaaaaaatttaaaaatttttttttaattggattttatataaaaaaaaataaaaataaaaaaaaaaaaagggggtttttttttttaaaaaaattttttttttttttttaatcaaaaatttttttttaaaatagggttttttttgaggttttattttttaaatggggttttttattttttaaaaaataaaattatttggaatatttttaatttggtaaatttaaaaatttttttttttgnggaaaatttaaaatataaaagtttttttatatttaaaa

SEQ ID NO: 421379 - DNA, 153 bp, Oryza sativa nipponbare
ttaatcaaatggagagtatatcttttcttttattcccatatcgaatggtacaaatattaaactgtctaagaacataactcgaatccgtattaaccaagagttaagaaacaaataaattcaaacaaaatacgcctcttacaacaacatcatttt

SEQ ID NO: 421380 - DNA, 318 bp, Oryza sativa nipponbare
tacacataatgcttgttattttgggcgcaatcatcagacgctacaaattgcaaattgcttacatgatacgctacttcaacaaatctacctgcattacagttaggcgagaaaaggattaactatgttacactactgttacaacttacaagtgaaccgatctgcggtcgctaaatctgactttcttcaccaactccattcgaatgtattgccagcagcactgcattgaaccacctctatgaacttgaatctgcattcttagctataacaaaactatcttctaggctcttatccaataggggtgtcatttctgtcactact

SEQ ID NO: 421381 - DNA, 346 bp, Oryza sativa nipponbare
cgagcgtaggacccggatacctctagacgcgctcgccctttttttttttttataaacgttacaaaggccaaaaaatcaacttcaggttaagaaaactcacatggataaggatcaagaaattccacacacaaaccagcaacacaactactaggtagcagggtaacacaagaaaaatatcactagatatttgagacagtaacattcttagatagatcagaatttccgtcttttgtcacattcagaggtcatagtccacccaaaatatcaagaatgatgatgatccacatgatccaaaattccaaatgcagcctgcatgaatcgcttgcacagctctggatgatatttt

SEQ ID NO: 421382 - DNA, 370 bp, Oryza sativa nipponbare
tactactaattgattgattggttgattgattgattaaggggatatatgtgaatgaagaatcaggcccagactctcttcttggggataaggtcgaccggcttgaccttgtctattccagccgcgaccattaaatcattgaccgtgaggccgcccgccgagggccttttcaactccgcccttacctgggtggcggcctcgaaaaccaccgtagcccgggccccggctacctgtgacgatgaccggttagctagcaccaggctccttgcatcccgcctgcttttacacactgaatcttatcatctgcacctgcctgactttattaaagcccatgattcgggctaattcattatggtcccccttttttggcctc

SEQ ID NO: 421383 - DNA, 52 bp, Oryza sativa nipponbare
gggggcgcttaatcaaacgcgtgggctaacactttacctaaccctttgatca

SEQ ID NO: 421384 - DNA, 126 bp, Oryza sativa nipponbare
  unsure (1)..(126): unsure at all n locations
ctgcagtaccggnccgttatttccgtttcgacccacgcgtccgcccacgcgttcgctcatgagtctgtggtcccatgtgcttccagccagtcaggttgctttctagctgcgcatttatggtcccac

SEQ ID NO: 421385 - DNA, 92 bp, Oryza sativa nipponbare
cccaattcccggccacgcgtccgcccactctttcgcccacgcgtgcggaaattcttagcttataatcaggcgaggtgctagctagctaggag

SEQ ID NO: 421386 - DNA, 145 bp, Oryza sativa nipponbare
cgccacgcctaccctcacgcccacgcgtatcgcccactcgttccttccttatcttcccaaagcctcttctcctcggtgcggggggcactttgacttgactatgcggtcacacaatttttcatctagttcacccccacctttcttc

SEQ ID NO: 421387 - DNA, 157 bp, Oryza sativa nipponbare
ccacgcgtccgcaaaacgaacgtcgaactcgagcggcgaagaagaagagagagagagataaggcggcggcagcgagatggcggtgactatccagtccgtgaaggctaggcagatcttcgacagccgtgggaaccccacggtggaggttgactttttt

SEQ ID NO: 421388 - DNA, 211 bp, Oryza sativa nipponbare
ccacgcgtccggccgtcgaagagaaggatcctgaaccagcaccagcgccagcagcagcaccaccacctccaccagtcgaggagatgatggatgctgtaccaacttcagtaccagtaacggttggagcagcagtggcatcatcgtcagcggatgacaacaacggtgcagcaccgcatcttgttgtttttttttgtattgttatacttctttt

SEQ ID NO: 421389 - DNA, 185 bp, Oryza sativa nipponbare
ccacgcgtccgccggccatccccggaaacgagcggccggtggacgcggcggatactcttcttcctcctcccctctcctggtcaggtcactggccagtggtcacagctcgccggagaggaagacaagcttgtggtggtcgccggccgattggcaatcattcggcaacgacgaccgatgctggttca

SEQ ID NO: 421390 - DNA, 247 bp, Oryza sativa nipponbare
ccacgcgtccgcccacgcgtccgcgcgccgcgcactccttgcactagcccatggcgacggctatgatggctgcgaccgccacctcgtgctcccctcgccgcgcgccggtcgtcgcgtcgtcgtccgtgcagccgcccaggcggcagcagcagcagcaaccgcggaggggatagaagcaaatgccggagctcgaggcgacggtggacgtaaccgtgtcctagaaatagataatagcagaattatctca

SEQ ID NO: 421391 - DNA, 155 bp, Oryza sativa nipponbare
ccacgcgtccgcggacgcgtgggtttaggttaggcacccttactggcagtagacaagtggagccaagggggaagagcgtgggttctgcaatatacggttagcccacttcaattgatctttttaatgattttatttgttttaaaacttaatttttt

SEQ ID NO: 421392 - DNA, 147 bp, Oryza sativa nipponbare
ccactcgtccgccactcgtccgcggacgcgtgggaaaaaaaaaaaaaaaaaaaaaaaaaaaaaaaaaatagaggggagaaaaaataaaaaaaaaaaaaaaaaaaaaaaaaaaaaaaaaaaaaaaaaaaaaaaaaataaaataggggg

SEQ ID NO: 421393 - DNA, 479 bp, Oryza sativa nipponbare
ccacgcgtccgaacatgttcttgcactgctcgaaacaaatttagcctgttgtgatgcaattctttgttctgaaacagagtgaaacacaaattcatctaaaaccagcataaaaaagtaatttcattaagtccatgcatgtttcctacattcataaagaaaaagcagggttgattttctttagaatggatacaacctacgttgattgtattacataagtttcaaaattgcaaacactactttcaggcatccaagctgaggtgaatcacatgagacaaaatggcagtcttgctttcaatgaaagccttgttgctggtatatttcttcattttgccggtgcaagacccacactggtcttccagaccatggaatggtagtgcatcaatagggctgcagcagggtgacacaccagcaccacggttattggattcaggagtttgccaaggagcatcaattaaatgattagcttccacctttaattt

SEQ ID NO: 421394 - DNA, 194 bp, Oryza sativa nipponbare
ccacgcgtccgcgaaccggcagcggcagccatgacgccctccgccctcgcccacctagcctccgcctcgccgctccccgccttctcccccaagcccagggcgaggcccggctcggcggcggggcccgcgctgcggcggctggcggtggcggcgccggcaccatgatcgttctattgtattttccacatactatg

SEQ ID NO: 421395 - DNA, 337 bp, Oryza sativa nipponbare
ccacgcgtccgcccactcgtccgcccacgcgtccgcccactcgtccgcccacgcgtccggtcagggaggggtgacccagatgtaaaaagtaaagggagtgcccttgacagcagaaactcgtacagtgagcaatcaactgaactgacaaacacatgtagttagatgcactgcacagcacgtaaataggactactacccaatttatttggtcggtgccatcgttggctgctgctttcattacatcttttggagctgcattcactggcgtctttactgcaagctggagcctgattgactttaaaataaaaaaatatatatttaatttattattaattaat

SEQ ID NO: 421396 - DNA, 416 bp, Oryza sativa nipponbare
ccacgtgtccgcccactcgtccgcccaatcctatcggaggaggggagcaacggcagtgcggcgctcctcctatctacattccacttgagttttttgtacgccttactttttacttttcaatttgattcttgtttttttctattcttttttttttatcttactttttatttttcttttttcttttttattttttttttttattttttttcgttttcttttcttatctttatttctttttttatttttatttttatttttctttttttctctttactttttttttctattttttttttctttttaatattcattttttcttttcttattttttattattttttatttttttttttttttttttctttttttttttctattttattttttttttttttatttttttttttatttttttt

SEQ ID NO: 421397 - DNA, 147 bp, Oryza sativa nipponbare
  unsure (1)..(147): unsure at all n locations
ccacgcgtccgcggtacgcgtgggtcggacgcgtgggcccgcggcggcgatctctctctaccccgatctcctctcgccgtcggcgtcgcccgggtcgccgccgccctccgccgcgcagnccgcagctagtaggtgggggggttagct

SEQ ID NO: 421398 - DNA, 185 bp, Oryza sativa nipponbare
ccacgcgtccgatcgaaatctgattatttatatgatttttttctctgaaggtttctgattgcttgttttgggtgctagcttacactgctaaattagcatattacatgtgtttggcatttcttattttcttagtatctgtataaaaagacaatgtaaagcggttcattggatgcgagctttatgga

SEQ ID NO: 421399 - DNA, 236 bp, Oryza sativa nipponbare
ccacgcgtccgcgccgccgccgctgctgctgcttacctcctccgcgccgcgcactccttgcactagcccatggcgacggctatgatggctgcgaccgccacctcgtgctcccctcgccgcgcgccggtcgtcgcgtcgtcgtccgtgcagccgcccaggcggcagcagcagcagcaaccgcggaggggattgaagcagctgccggtgctcgtggcgacggcggccgtggccgtggc

SEQ ID NO: 421400 - DNA, 474 bp, Oryza sativa nipponbare
ccacgcgtccgcccacgcgtccggcagaatgaagttggatcaagttctcatgagagcatacttcatggtttttcggacggacaggccaaattattccatgagatgcaacggcgtgtgaagttagggaaattacccattgagatgaatctgaatcacacaaagctgtcagatcctctagctgagaactctggtgattttgaaagttcaaaaccgaacaagctaccgcactggcttcaggaggctgtgcgtgcacctccatccaagccacctgaatgtgagctaccagcaactgtttcagctattgctcagtctgtgtgcctactacttggagagcaaaaaccagcaatacctccattcccgattccaggacctcgtctctctctccccaaggacccaaggagtgctccaaagaagaggagagttcacaaagttcagcaagcttccttccctgtagatcattccaaaactacagtt

SEQ ID NO: 421401 - DNA, 207 bp, Oryza sativa nipponbare
ccacgcgtccgaaagaattgataatcttggtaatgtaattgaatcaagaaaagatggagttggtgcccctaagattgaaagaccactgcataaacatggtggaagacttgaccacaacgaagtttactgtggatcttgttatggttctgaagagtcagatgatcagtgctgttacttctgttaagacgtccttgttgtcttttttga

SEQ ID NO: 421402 - DNA, 279 bp, Oryza sativa nipponbare
ccacgcgtccgcccacgcgtccgatggcgctcgccctcgtctcgccaatggcggctctctcactccactccgggaggatctcagcggcggctatcggcggcggcctcctctctcgcagggcatccccgatgggcgccgccgtcaccccgttcctccaggagctccttcgacttctacctacttcacgttatccacccactactcccccgccgtgctttttgccgagggctcgtctataccagaccttctaccactaacgccttattttgtctggtcatt

SEQ ID NO: 421403 - DNA, 381 bp, Oryza sativa nipponbare
ccacgcgtccgcccacgcgtccgatattttttgatgactatttaggtgacatgcatgaaacgaggggatatcccctcgagggatgaatttactttcccgttatatatgtccatgactctacttttcatgatatatgctgtggtgtttggcatcccacatggaagctatccaattattgtccaaagagatgcttgtatatcctgtaggatatagactaataatagggaggtgagagaactattttgggtcttgggatccagcatacatctgaattgttcctgtcaaaatctgccagtaatttttttttgaaacagacacgatgcaatgtttcatatttgtatagccagaaaaatctgacagtaatagttgcactcttgcctg

SEQ ID NO: 421404 - DNA, 63 bp, Oryza sativa nipponbare
tttgaggacagacagaaattacttaagctagaaaaatactctgtcgaccacacacacacacac

SEQ ID NO: 421405 - DNA, 122 bp, Oryza sativa nipponbare
ttgaagagggaaccatacgtatgaggttggggctgcaatttgaacatggtgggagcatcgccggtgacatatggaccaacatataaacaccgaagcgcctgatggtcataatggccatggct

SEQ ID NO: 421406 - DNA, 272 bp, Oryza sativa nipponbare
tgtaaaatgtgaacacgagtagaatcatctgggtgctgattggttacacaaaacaaacaggactgatagtgcccaccaccacttgctctactgcatggcctcttgtacaacaccactcaccggatgtattcaacttaggttcatccgctaaacacctacaaagtctgtcatgctcaatgtaccaccagccacctgcgtatggtaatgagtcgaacaaataaactacggaatgtgcataatgtaattgaattctaacttactacaatcaacaa

SEQ ID NO: 421407 - DNA, 326 bp, Oryza sativa nipponbare
  unsure (1)..(326): unsure at all n locations
aaaaaaaaatcacaacacctttttttatttatcaggttcaaaaccttcacaaaaatacacacttccggtacaaattttacccttttttcaatacttgtacattcattcacgcggtccaaaaaaattcgttcatttttatcgggcacgttcgttcattttttggaccgggttcacacacccacacttttttttaaaaacccccattgtngtaaacctaacttgctttacttaaggggattcgtttccattggaacacgggggggggggggtttatttttcggggaccaaatttgtggggttagcccacacttttttttttaccgggt

SEQ ID NO: 421408 - DNA, 253 bp, Oryza sativa nipponbare
ttgttgagtggggaaaaaaatactttatgatgaaaaatcaagcgatttgctcttttattgatcttacatattggtgctcaagtgtgtcaacacagtagtaagcaaacaatctggccattaacgaaaaagcgagggtaactaagcaatttctgggactgtcaagaagtactaattttattgcccttgtagactcgtgtaaaaacgcagtagtagattgatggcaccatggtccataggcacaagatcaccgcaa

SEQ ID NO: 421409 - DNA, 321 bp, Oryza sativa nipponbare
gaatttaaattctcactaattacgagtacacacatacacatatgtcatgtccgtaggtggataaacaccatacatatagtgtatactaacaatcatcgttttttgcgattccatcgttctatgtggcacaatgattcgaaccagactgccaatatgaagcccactgtgaaccccaggccagaaaagatgaacaaaaggatcacgccaagtctgtcctgccagaaactgttggtacctgaaggagctgatgcacttggagatgttgagcctggagtatcacattgtttagagagtggctttccacagaggttgacattacct

SEQ ID NO: 421410 - DNA, 326 bp, Oryza sativa nipponbare
gggggcaaatttttttattttttttttttataccttttaattttaaaacccaaccccccacaaaaaaaaattaatataagtgggtaaaaaaaaaaatttcccccctttcaacaaaaatttcatcttttaaaaaaataaaacgcaataaataccttaaaaaataaaattcaaaactctaaatcataaaaaataattattccaataaaaatttaaaaaaaaaaatttccctaatattaaaaattaaactttttcctctcaaaaaattaactcaaccccctatttttggatttgccaaacttctccataaaaaaaaattaaaatttttt

SEQ ID NO: 421411 - DNA, 373 bp, Oryza sativa nipponbare
accagtaatcaaatcaatatccatgagaaaacacaatcatttggcatgcacatggcaattatttgggcagcacactgcacacatcaggtttggtaattctatcagctgcctgcctagccttgcctctctctcttattttaaaagaaaaaagaaaaaaaaaggcagctgcctgaagctagcttcatcgagtacactggagatatagatcggatcgaatcactgtcgatcaggagcttgaagcatttgaatcatcatcatcgacggaggaaatccgcgaaccagtagctggacttcttgcgaaacctcgcgagcgtggcgcggtcgacatagatgaggccgaaccggtccttgaacccatcgccgaactcgaagc

SEQ ID NO: 421412 - DNA, 400 bp, Oryza sativa nipponbare
gcttttaaaatgcgcttgctgcctaacaaaacaaacggggacggtcatttaatgagttagacaggaagctcctcatatgtccataaacctaaccattctttatactaaaccatgaagggatccatagaacttctcctactcaaaagaactatttaaattaggagacatagctcctgcatcctttttacatatcctaaacaccacccattttaaccaagagggggcctacatagctataaaccaaactcccaacttaagctggaagtgccttgcgggtacattttgcggccgacgaccggacaggcttggactttgtcttcaccttacccgccggagacctgtttgacttggaaaccaccttttttttcctggccttgcacttggtgccagcgggggtggc

SEQ ID NO: 421413 - DNA, 206 bp, Oryza sativa nipponbare
cccaacccttccccaaccccttgggaacccctttttttaccccgaaatttccgacccgtaccttaaagggtaccaaattttcctttaaaaaaatctattaaaaatttgccaaaaaaaaagaaaaaattttttcttttgaaaaattttttccccttaaaaattcaaaaaaaaaaaaaacccgaaaaataaaatttaaaaccttgggg

SEQ ID NO: 421414 - DNA, 281 bp, Oryza sativa nipponbare
  unsure (1)..(281): unsure at all n locations
tttttttttattttttttttcctttatttattttttttntagggagagttttttaataaatttgggttctataattaaaattattaattaaaaantattaatttaatnnaaaaaaaaaaataaataaatttttttataaattattgggtgaaaaaaaaaaaaaaataccaccttcccaaaaaaaaaccccaaaaaacttcccccaaaaaaatataaaaaaaaacgccctcatattctcccccacaaaaaaaaaaagggggttgttatttattatccttcgc

SEQ ID NO: 421415 - DNA, 186 bp, Oryza sativa nipponbare
agaaacagaatccaatcacaaacatccattcatcaacacaaaacattggattcaaatccacggcaataacatgaaactagaaaaaaaagaacacatatcgtgcgcggaaatcttgatgcgggcgcgcaccctctctagcgattagagagggttcgacgacgctcttctgaggcgttaaagaggagg

SEQ ID NO: 421416 - DNA, 180 bp, Oryza sativa nipponbare
aacaaaattccgacgccgctttttttctaatattcgttacaaacaaaaaattcacccaatcccattcatcaacaccgagacaacctacaaatttgtaaatatgaaaacaaaatccaccttattatcccaacttacattaacaaatggggtgcgtccttattaacactctccattttttat

SEQ ID NO: 421417 - DNA, 354 bp, Oryza sativa nipponbare
aaactatgcttgaattattgcacgcatgctgcttttttagtatagttctgtacctcatgcctgtctttttctaacataatcagccgaatcgtagaccgttgaatttccatccaaggacatgggaatacgaatcaaaataaagaacggcctcttactgggccgcccaacaaggctacatgtacgtgggcttccttgtcagccgtagaactccatgggccgtagcacacatgcatcggcccatacagttatgggccgtcacagcgggccgtcattagtgttagtaatgggcccttggaaccagaagcgggcacggagagcccacgcgccgacggtgagcaacaacacgccggcgac

SEQ ID NO: 421418 - DNA, 360 bp, Oryza sativa nipponbare
  unsure (1)..(360): unsure at all n locations
actaggnaattttacagaacgaaaattttgatggattttattgccggagaatgaggacctcgcttggaaaataaatgattgacatgggcaaccaagcatgggcacacacatgcgtatgtcaccatgtgaaaagtgaaagccatggagcaacttatacacacaagctaataagctataccttggcgacggtggggagctgcaggccaagctggcgtgcgaagcccgcggcgccgaggagccgcgcgccggcgccgtatacggggacctctggcaagtccgactccggcagcgcctcggagatgaacccccgccggaactctacggtgccctggtctgggtgggcgaccattgttgtgattg

SEQ ID NO: 421419 - DNA, 235 bp, Oryza sativa nipponbare
aaaaaacataaaaagatttaactaagtttaaaggaggattttacaaataatttgcaaaccccaatttttttcaatttctaaattttgggtggatcatataaaatttattaaagttttgcccaatttttgcaaacttttttacattgagcgatggaaaaaaaaagttttttaaaatgggggtttgcccattaaaaaacccgggttaaatttttgggcttaaacccaaacttttttt

SEQ ID NO: 421420 - DNA, 433 bp, Oryza sativa nipponbare
gcaacaaacagtgtagaatatatacatgatgagctagaatgttgccaaaccattcataaggtttgtgttggtggtaaggaaactagagttctacaacaaataatccaacccctgtaagcatccacattcagatgtcatcagtgactagatgcaaagcaatccaaatactggcatgtggcatctgccaatttcaccacgaatattgggccatccttggatgacagaaattctgataaactaaagaatacattttgcaggttcaacctactgaaagaactgcagctgcatacgaagtttgatgccaaggttggtcagattgcaagatcttcaatcagcacagtggccccccttcaccacttgtaaggatcaatagtccactttgctgtcaaacagtgaaacttacaacccacacgctctacaatcaattttagta

SEQ ID NO: 421421 - DNA, 410 bp, Oryza sativa nipponbare
tttttaatttctatcatgcagctccggaatactaaagtacactgctgggggttaaccatacaatgttttgacaaaaatcagtccctgtaattaaattccatgagtgtaaacatgtgggttcatgcaatttccaaaaactaatactgatgcgtcatgcctttcgatttcctggttaccgaagttcaatgtctttttttcaaccatagtggtcgcatctcgcatgtcttcacacgaagttgcactgtttcatttttcttgtcagaagctccagcagatctgcagactttcagatggagtatattgtgaataccaataagaaagtgttcaagggtggcacaacatcaacattgtatttcaaagtttggtctcaatccctgcactataaatttggtggtttcggtagcttagta

SEQ ID NO: 421422 - DNA, 306 bp, Oryza sativa nipponbare
ccacgcgtccgaccacgcgtgcgacaaacgaaataaatatacgtttatcaccatggctatctacttggacgagatgagcccttgcggcgcacatgcacttactaccgaaacattgtgaacggggggcttcattctaaggtacaaggaccacctaccctctgcctggacaacaatctttccaccattattgacttacgcatccaatatattatactaaggaccacttcatccagctctatccatttactgtattcaataattccgagacctttaatctcttatcaccacatactagggaagaacttt

SEQ ID NO: 421423 - DNA, 323 bp, Oryza sativa nipponbare
ccacgcgtccgcccacgcgtccgcccacgcgtccgcccacgcgtcctcccaccgtccgcccacgcgtccgcaggctttgagtgggcgcatcgacgaacacacatacacttgcccaatctatggacgggcaacatcgtcaaacattatcgccactatttcccagtttgtcttaatctttttttaggtaacaacaaccaccaccattaccagatgtcgataacgatgcactagacgcgtattttattggtttatgtataagttttgcattggctgaaaaaaaaaaaaaaaaaaaaaaaaaaaaaaaaaaatatagaaaaattagg

SEQ ID NO: 421424 - DNA, 324 bp, Oryza sativa nipponbare
ccacgcgtccgctaatttctagatcgacacctgccgcttctccttttaacatagcccacgcctccgtggacagtttttaatttaacacatcaatccacacccatacacttgaccaatttattgactgacaacatcataaaacattatcacctctatttcccagtttgtcattaatctttctttatgtaacaacaacctccaccattaccattattccgcttacaattcactagacacgtattttattattttatattttatgctttctttatcctctatttaaacaaaattaaattaatcaaaacacattatttatcttttttt

SEQ ID NO: 421425 - DNA, 410 bp, Oryza sativa nipponbare
tccctggtctacccactcgtcctcccacgcgtccggctatgtggaggatagtacgaggtttgacaagggggaggggagtgccggaggcttttctgttgttcgtttttttttcctcccctcttttttttttttttttttttttttttttttctttttctcttccttcttttttttctttcttctttatcttttttctttctttttattttttttatctattattaactttttatttatctttttttactttttttctatttattcattattttttttttttctttttttttttttctttttttttattttttttttttttttttttatatttttgatttttattttttttgtctatttttttttcatattcttttcttttatcctatttctatttttttatttctcctttt

SEQ ID NO: 421426 - DNA, 64 bp, Oryza sativa nipponbare
ccacgcgtccgcccactcctatttcgagcgagtgcggtggaggttcttgtgatgatgccactga

SEQ ID NO: 421427 - DNA, 56 bp, Oryza sativa nipponbare
  unsure (1)..(56): unsure at all n locations
cacgcgtccgcggacgcgtgtgcggacacntgggctttattttttaacgcaatcag

SEQ ID NO: 421428 - DNA, 152 bp, Oryza sativa nipponbare
ccacgcgtccgccgctctcttcggcgaggcgcggatcaccatgctcaagactcgcctcgaagcccaagccgggggagtggcactaccgcctctttacccttcctatcctctcgttaactgtattaactttgacaaaatattcctctacgcca

SEQ ID NO: 421429 - DNA, 255 bp, Oryza sativa nipponbare
ccacgcgtccgacacaactatcacggacagtagcgcagagagcgtagctagtacatcagagtgacaaccgtaatgtgtaggaggtacagcgtattgctatttttctataggacaagttagatcaaactctggaaacatttgattgtagaaaaattaatgcgacttgaaatatgaaagggatggagtacttaccgggtgtgtgtatctctggcacgacgcggacaccgcggttcatggcgaagtccagaattgagc

SEQ ID NO: 421430 - DNA, 129 bp, Oryza sativa nipponbare
ccacgcgtccgcgcagagcgatgatgattatgagccaactcctgtctatcatgtagcctataactcatttgaggcttgtgatctcccatctgagagtggtgcatcccacaatgaagaatctgaaaggca

SEQ ID NO: 421431 - DNA, 139 bp, Oryza sativa nipponbare
ccacgcgtccgcccacacgtccgatagttctagaccgtttccggtctatctagaggacccaagctgacgggcgcctgcatgccactgaatagctcttatcttgtgtaacctaataagaatttaatggccgactctttac

SEQ ID NO: 421432 - DNA, 268 bp, Oryza sativa nipponbare
  unsure (1)..(268): unsure at all n locations
ccacgcgtccgtgcatggaagctgtggaacgaggacaaggcggttgatttcatggacgcgtcgctcgccggcgactactcnaacgaggaggcgtgggcgtcctttcccgttaggcttgtgggcctgccaggaaagccccagcctccgccggccatttcccacggggtgcccattcctattaacgaccaaatgcagcttgcggaacccgcccaacccgcgcttttcccggggccggagattaaaaagggctcgggcttcgatttcttgc

SEQ ID NO: 421433 - DNA, 436 bp, Oryza sativa nipponbare
ccacgcgtccgcgcacgcatgctcacacactaccacactgtctcctactttttccaccattgccttgcccacgcatagttccaccaccaagtgccacctcctctccacctgggcaccgtctaagcccagctcatccaccctctccatgcccaccatgtggacacccacgctcatcatatcagcgccgaagacagctccccgagcccgcgcacccggcgatgatcgcagcgcgcgagatgaacaaggcctcggcgtcggacctctacatggcgatgaagaccttcaccaccaacacgcagtccctcaacgacgtgtccatcttcatgatccatccacgataaaaaagaagatagaaaaaaaaacgtcgttttttttcttccttttttatttctctctctcattctctcaaactgtgtttattacgagagttttgaat

SEQ ID NO: 421434 - DNA, 272 bp, Oryza sativa nipponbare
ccacgcgtccgcaacatctagttcacgaatggcgtgtccatgttctagtttggccagcatttccacttccacgcaagattccgtcgccaagtgcacgaccttccctgcctctaaggaccgaagaatccaacctcatacaccctctccatgcccacctggagggcacccaccttcctcagagcggcggaggaggatcatcccgccgcggcggctacggaggagaagaatccagcccccgaggtgatcgtgccatcgcatgttgaccccaacac

SEQ ID NO: 421435 - DNA, 160 bp, Oryza sativa nipponbare
ttcttcattcatcttaattattctttagtattatctccttttctataattcttctttttttccatttaattatctatacctttctgtatttaccttttcataatcctctattcaattatttttattatatatctattttatttttaatttaatactttat

SEQ ID NO: 421436 - DNA, 55 bp, Oryza sativa nipponbare
ccacgcgtccggtaccttacgagatatatttgtgggctttttggttttctaacct

SEQ ID NO: 421437 - DNA, 304 bp, Oryza sativa nipponbare
ccacgcgtccgagaagacatatttttccccattttgtttgcaggctctgcactctcaagaaactaccttgcacagtgcgtggaggcctgaagaagatgctcactactaatgtcacaatccacatgaatcatctatgcaggtcctgcactgattacaactgcatggaactggcagtacaacctgatcttaatggtctatttggcagtggagcttcattgtaggtaaagaggaacacaaacatattagaataattgtggagacacaatcaccttccttatttaactgaataccggcttgtttcttg

SEQ ID NO: 421438 - DNA, 181 bp, Oryza sativa nipponbare
ccacgcgtccggcgccgtctagagggcgcggtgtcggtggtggaggtgggggagggaaggaacttgctcacggagcgggcggaggcctgatgacgatcctcactactaatgtcagaatgctcatgaatcatgtatgcaagagctacactgactacaactgcatggaacatgtacaccaacc

SEQ ID NO: 421439 - DNA, 278 bp, Oryza sativa nipponbare
ccacgcgtccgtaaagaaaacggaataaacatttccgctggccttggacatgtcccagcaaccaccttagctagtctgggcatggacgccgccggtgctcgccctcctcgcttgctctggcctcttcttcctgttccgccgcgcccagggcggccccggcgctggacctggcggacgctgcggacccatgctcttcgtccgcaccatgagcatgttccaggaggtgcccgagactggcgtcaccttcgtcgtcgtacgcggcgccgaccaggccatgc

SEQ ID NO: 421440 - DNA, 361 bp, Oryza sativa nipponbare
ccacgcgtccgagctagttacaatagaaagctgccctctccttatctcttggccaaagaaaaagatgactagcgccctatttttctatttttcccctcccacttcatcgatcactttgtcctttttttcctcttccaccgcacccattgctgcccctgttcttaaccttgctgcctctgtttacccatggacttcgtccgttccaagagcaagttccatggatagtcccaatacttgcattaccttctgttactactcctactccgatctattcaagatttatttttatgatgtcgttttttttctttatatcccttacaatggcactcttctttctttcaattttctttaagttttcttt

SEQ ID NO: 421441 - DNA, 91 bp, Oryza sativa nipponbare
ccacgcgttcgttgaaatcatgtgctgtcaccactttttgcatttgttgcaacaacttgacttggtgcagcgtgggcaaagcgttgggatt

SEQ ID NO: 421442 - DNA, 338 bp, Oryza sativa nipponbare
ccacgcgtccgcggacgcgtgggttcagttatggttttgatgcttatgatcttcgacagtgtctctggagcggggctggtgttacaaacttggggttcacattatgagggtacaaagctgacattcgaaaacaatttgcaatggtgcccagaattcatcgatgttgtcaacctgactcttggtcagtggcgcctggatgcaaacttctatgcacttattgtcttgcttcagaactcaccgagactagagaagtttactctgaatgttgcgaagagcattgcagataaatctccaagaattggttgcgagcttatggtaagaacatttacgtttgaaca

SEQ ID NO: 421443 - DNA, 56 bp, Oryza sativa nipponbare
gatttccgggtcgacccacgcgtccggcgacccgtatctgttagatccagacctcc

SEQ ID NO: 421444 - DNA, 236 bp, Oryza sativa nipponbare
ccacgcgtccgcggacgcgtgggctcagaaattgcatccaacagcagctgccatagttgcaagtgagctagagctcagagaagaggaggaagaagaaggcgtcaatggcgaccaccatagctgcgatggccatgcttaagccgtccaagatcgtggcgcggtcatcgccggcgccgtcggggagcggcagggtgcctagcatctcgctcaagagcctggccaagaagggcatgtcg

SEQ ID NO: 421445 - DNA, 221 bp, Oryza sativa nipponbare
aggctaaatttttaaatcgggttttttttttttatatggaaaaaaaataatattttttttaatttttttagtgaacaaaaaacaaaattggctataatttaggttgattaaacctatttttcccaatcaaaaaaaaagaaatttttttgccacaattcctttcaaccaaatttattcaatggtaaagttctgttgccattttaactttactgataataaat

SEQ ID NO: 421446 - DNA, 72 bp, Oryza sativa nipponbare
ataaacattatccaaatttttatttgtaaagttttagattaatggtattaatatttttaaagagaaataatt

SEQ ID NO: 421447 - DNA, 325 bp, Oryza sativa nipponbare
ggaggggcaaaaaaggggagggcagttttttttaggattgttaaaaaggctggaggatttttacaaaaatttttttaacgggggggaggggcctttttattttacaggcctaatataaaaaaggggtgaaaaatacatttgggggggtttgttttcttaattgttttaaggacgataaaaaccttttaaaaaaaaaggtttgaaaaattgttttttcccaaacacaaaaaaaagggggggttggggacaaaaataacaaaaataattgggttaaacccaaaacacctttaaagatttcttggggaaacttttttttgaacttttt

SEQ ID NO: 421448 - DNA, 120 bp, Oryza sativa nipponbare
cccagccaatgcaaaacttttccataaaccaataaaatccgcgtttagtgcatcgttatcgacatttggtaatggggggggttgttgttccctaaaaaaagattaagtcaaactgggaaa

SEQ ID NO: 421449 - DNA, 265 bp, Oryza sativa nipponbare
ggagggaaatttatgggcatgtacaatttggccgtaaaagaaagaatacaacggttttaagcaggggttttttaagtccacggggaaaaatcataggccggcaaattactttgttttatacgggttttaaagaaaaaaccaccaccttttcattttttcacacaaagtttgttcaagcagtttaattaatttcttccacatgtacgaaatgcattctttttttatttcgggatcaaattaaaataattttttggagtttcagttt

SEQ ID NO: 421450 - DNA, 390 bp, Oryza sativa nipponbare
cgccaagtgttcgaccgaggacctcggtgaacaccaccgtgccgacgcccaaagccggcgaacctctccctctcccctttccgttcctcccgcccgtcgcctctccttgcccctccccgccgctgaccacgactcccaccttcccttccgcggcgaactgggctgcatccttcgacgccacgtcgcatgccaggtactcaaactcctccccggtcataggcaccgcctccttggccaggaatagggccggcttggcaccggggccgaccttgatgttgagcggtcttcccttggcggcgaacacgaagccgaccgggaggtgccccggccttggggccggataaaacaacccacggccacccggaccagcttcgggacttcccttcccct

SEQ ID NO: 421451 - DNA, 367 bp, Oryza sativa nipponbare
ttatttgcaattataaatttataatcacacaatatatctgattgttcaagcaaaagggacaaaagactactaacattactttcgaatgatgtacagatgaattcctggtcacagttctaaagctaggcctcttgtaccccaaaggccttctggatttcagctatgactcggtctgcgacatcgggaccaaacatcctcggcaaatttgaagtcaggtcgacctcgattgacttggaccttacaatttggtccctctttatcatgttttctctctcgccttcttccatctctgaagtatgatcagcacaactatcaagccaaatttgaagaagtgccctagcagcttgtgctagttgaccacgcacta

SEQ ID NO: 421452 - DNA, 381 bp, Oryza sativa nipponbare
gaagatactctagtatttattcaaaaccatatttatcatcggtgtagtacatgtacaccaataaaggggtgcaaattctattaatggcttaaggttaggcaggcatggcaaccaagaacggtgggttcgcagcgttgctgttgcagctatcgttactgatgagctcgcaaatgccggtgcgaagccacgaatctgtactatacaaggacagtgctaagccgacaatcatggtttgtaatgcgtcacaaatatgcaggcgtgtgttcagctgcggtcacggtcatggcaggtcaggctaacaaggcgacctttttttgatgtgcggcgtacggcggtgtcgcggacgaggctggcgatggtgttgacgggaagccttgatgt

SEQ ID NO: 421453 - DNA, 491 bp, Oryza sativa nipponbare
aagcattggatgcaacttggtttaatttgatgttaagaaacacaaaatgatgcatcccaacatgggtttcaaatggtttctctcatgcggtaccaaacatccgaagcggattattcaccaaatggctgcacaggcaataattttgctgttggatcaaaggtttgattacccacggctatccaaataaaatctacaggttcaaaatggagagttgatagggtctcgctgcagtgccttttgcacaagctcggtttgctcctgcacatggacggagtaaaaacctgttgtggtggctgtatatatgtccctttctaacgtattgatgacgtctatcgttctccttccattctcctttatttgctttttatatgattgtgttattatttactttttcctttattttatttattttttattttctttatattgttatatttgttttttttttatacttctctaaatgcattttttttttttttatataaatattt

SEQ ID NO: 421454 - DNA, 391 bp, Oryza sativa nipponbare
  unsure (1)..(391): unsure at all n locations
ataaaaaaaaaaaaaattttttttttaattgttaaaaataataatagagtaaaaaaaaaaaaagggatagagggtttttattaaaaatttattgaaatataaaatatttttttaaagttgtttttttttaaaaaaaaaaggggaagttattgtttaaaaaaaatttttttttttttttttttttggagggtttttttaaattttaagaatttaaaaatttttttttttggttttgaaagattttaaaaaattttttttantgtggtttattaataattattaaaaattttttttttgggtgtatttaaatttttttttttaataaaaaattttatataattaatatattgtggnttttttttttatttttttgtgtaatttttattttttt

SEQ ID NO: 421455 - DNA, 406 bp, Oryza sativa nipponbare
agttgatgaatggaaagaaattctgttgtacaagggataaataggttcttggttgaacaactgctaatgtaaccagagattaggagtagaatgacacattactcgatttgttcagttgaaaactagcaagttattggatgccattcctagagaccagcaaaaatgcaggagaccttaaaactctactgtaaccagtgaatgtagcagaaagcgagttgattcttcaatgggatgacaaacaaatgcatgatcctttggcatttcatctctcctcataccgaataaatgcaggtaactcgtccttgtattggccccagtgtttgatatcaaactgaacagaagccatgccattactagcaaagaaatctttcacactgatgaccttgggatcatctcaagcatttga

SEQ ID NO: 421456 - DNA, 336 bp, Oryza sativa nipponbare
ggggccctaaaaggtttaaggggttggggggattttcaaccgggtacattcgcaggggggttaaatctgggcccttttcaaaagggggggtttgcagggcccacattcctccgtgccgtgaagcttaccaaaagcccctgggggttcattcacttgtcgaagttacccttgggccttcccttgaaccccattttgcccaaggggagcccccggaacagcccaaggggccacggttccaaccccaaccagaacgggaagttttgcccccgctgctaggggaaatgggaaagctccttgccctttcttgaaaaaaaaagcccctcgagggtttttccc

SEQ ID NO: 421457 - DNA, 134 bp, Oryza sativa nipponbare
gggaacccaatttttttaacatgcattcccactgttccaattcatttttttgtaaacattccaaaatttttgccccatggggccccttgcttttaacattttttttttcggacccctgggcggacccctgggtt

SEQ ID NO: 421458 - DNA, 243 bp, Oryza sativa nipponbare
tatatcaaaacaacatggatgtagagtgtttgtaaaatattcaacaagtattcttgcaccctgttacaggcttacagctaacccacctgtttgaaatttaataacccagctaactaattttattgatcttcaatttctcctattacttgcaaaaaagcaacaagaatgaagcatatgcactgagtagtctgtgcaatcatatatttcaattaaaatgccgaaatttgtgaacagaattgtgat

SEQ ID NO: 421459 - DNA, 344 bp, Oryza sativa nipponbare
agtaatataataataattgacactcatccattcaaaacaaattcacaacatgtatcctctcaaggaacaaacatcacagaatttcccccttcttcctttataaacctagacaaaacttattctttcccagcctcacctcacagtatatacattacaacaagatctaaaggactacatatcctcctacctctttgttcaacctgggtatcaaaatcaaacttcggtcaaaaatcaagccgcaaaaagcctcctcaccacaagctctacaaccaaccgaccaccaaaatgagacatggaccaaggaaacggcaaaaaggcagaaacttggcatcaagcaccaaatg

SEQ ID NO: 421460 - DNA, 165 bp, Oryza sativa nipponbare
caaataagaagaagagctgtactgaatttttgttcaagggaagagaggattaggaacaggattaattaaagcataagtccaccacatttcacgtcactaccactttatttcactacaccaccctgaaaacacaccacgttcacacatgttcggatgcaatcttta

SEQ ID NO: 421461 - DNA, 138 bp, Oryza sativa nipponbare
ccacgcgtccggtcacgtccaattgggacggacatgtcaaccttgtgagcgacatgactagctgctacttagcaggagtgattaggtacccgtggaggctgagaatgatcagctgcaccggtgccaccccaagaggac

SEQ ID NO: 421462 - DNA, 151 bp, Oryza sativa nipponbare
  unsure (1)..(151): unsure at all n locations
cgtccgcccactcnttccggacgcctggggaaaagntnatagctttttttttggccagccaaccaaccagcttatgggacaacgcggatcccatctcaaccaccaaaccctaccttgatcgtcagcgcaatcacttactaagccttccctc

SEQ ID NO: 421463 - DNA, 70 bp, Oryza sativa nipponbare
gcgacgcgtccggcaaaagaagaagaagaagaaagaagaagaagaatatgtataccgctgctagcagtgt

SEQ ID NO: 421464 - DNA, 384 bp, Oryza sativa nipponbare
  unsure (1)..(384): unsure at all n locations
tttttaaaaaaaaaaaacccttttcacaaaaaaaaaaaaaaattatatttttttttatttttttttttttttttttttattttatttttttttattttttttatttttattttattatttttttaattattattttttatttttttttatttatatattttttttataatatattattttttttatttattttttttaataaaaaatttttttttttttttttttattttattttttttttaaaatataaattatttttatattttttttttttttttatatttattattttaattattttattttttaatatattttttttttaaaaaattttttttttacancnncaaaaaattttttaaatttttattttttatttataat

SEQ ID NO: 421465 - DNA, 394 bp, Oryza sativa nipponbare
ccacgcgtccggctagagctcagagaagaggaggaagaagaaggcgtcaatggcgaccaccatagctgcgagggccatgcttaagccgtccaagatcgtggcgcggtcatcgccggcgccgtcggggagcggcagggtgcctagcatctcgctcaagagcctggccaagaagggcatgtcggtgtcgtcgtcgtcggcggcggcggcgcccgtggcggcggcggcgatggcgggcgcgttcttctcggcgctggcgtcgacggacgcggcgctcgcggttcatcttattctggactttttttttgtcgtttgtgtggggccgtctctctttccttcttttttcactattttgttgatctttttttcttgtttctttctcttttttcatctcttt

SEQ ID NO: 421466 - DNA, 77 bp, Oryza sativa nipponbare
ccacgcgtccggtgatgaaagccacacgtgtatgcatttggaagtatagagcacggggaaaggagcatacgaggggg

SEQ ID NO: 421467 - DNA, 208 bp, Oryza sativa nipponbare
ccacgcgtccggccgcacgtgcaacgacgcgtgcgcctgcttatatattctacgtggatgacatcactcggcgtcataaggttaacaggtgagattgtgagctatgcacaaagtgattgctccactcggccctatgcatgtcatgggcttgtttgtagctaacgtagcataaacaaccatcgagataggtgccacgatttctggagaa

SEQ ID NO: 421468 - DNA, 214 bp, Oryza sativa nipponbare
  unsure (1)..(214): unsure at all n locations
ccacgcgtccggcttgtgtagcaaccatctgctgaatcgagcaatgatgttactggatgaattagctgcagcnggttgtgctcctaattctgttacatacaacacattgatggatgggatctgcagcgatgttctagatcgggccatgattctgactggcagactgattaagttggcttttcaacccaacactgtcacattaaacattttgttt

SEQ ID NO: 421469 - DNA, 291 bp, Oryza sativa nipponbare
taccgtctcgattcccggtcgacccacgcgtccgattgttcacgtgagctaagagggggaggcgttgtttatacactgagatatatccgcgtagtgcaaggctgatgggtgcactaagatcattccattgaaaaaacgtaatgttcaaaacttgaatagcggagaatatggtggctcttggcacggcagaatcagctataactactatgaattatggagacagtatattcaggtatgctcatccattggattattaaagtgcgggattggtagctacctgccaccagtcac

SEQ ID NO: 421470 - DNA, 399 bp, Oryza sativa nipponbare
ccacgcgtccggccgctcaagcacatacgctaccgctctaagcttgcatccgatgtgccggcggcggcggggtggctatataatgtgaggccagtcatcacttccaggatctgaacaacagcgaaccaaggatggaaagcgatcttcaccagcgagagtcatgtctgccgtacgtcccaacgcatcagccgctaattaatcctattgcatatactttgatctataggtgtatagtgaaatagttattcgcgccatccatcagctctatgctagcgagtaaggaggcttatgtagtgaaagaactgcagattttactgaagtgatcgtgcacctcgatgtatacagcagtgagacagaagattaaccatcattccctaatgcctactaatgttaactatg

SEQ ID NO: 421471 - DNA, 464 bp, Oryza sativa nipponbare
ccacgcgtccgcggacgcgtgggtttgccactagggtgatgaaccctaacgcagccgagtttgtgcgcagggcaatctcggagtcctaatggcaacccagcatctccaaacggacctctagcatcaccaggtggcactgaagcttcacctcatggccttccttctccctcagacagtatagtagaatcacctgcaactgcatctccacaagtttctgaaattagccagaccagtcctgaaggaaatgatacaaccagtggggtcgatactgaaaatgggagtgaaaaacaggacactgatggcaagaaccatgtggaaagtaaagacggcgaaggggagcctgagcaaaccgaagcttccaaaggtgatggagatggtgcaattaccccggaagatggttcagccgtgactgaaaatccaaagtcctgggcagactacagtgatggagaagcttaggctggtga

SEQ ID NO: 421472 - DNA, 298 bp, Oryza sativa nipponbare
atatatatttattaaatttttaatttaatttattaaaattataatattattatattaataaataatttacttttataattatatttatttttatttatttaaaatattttatatatttttattttataatttatttatatacatatataataatatattattaatattatattattcacaaatattattatacatattacatatatttatattataaatatatatatatataattaataattaatatatttaacatattactatatatattatttattaacatatttaaatatatata

SEQ ID NO: 421473 - DNA, 151 bp, Oryza sativa nipponbare
ccacgcgtccgattggtatctgacaccctcgaattgctctatccccactatacctaacatagtgcttcaccgtggcgggcaagtacgcacactgaaagttttcttcccagatccaggtcacatagataggtacgacctgtggcctacccat

SEQ ID NO: 421474 - DNA, 315 bp, Oryza sativa nipponbare
  unsure (1)..(315): unsure at all n locations
ccacgcgtccggccggcgccgtcgggctcgtgcggtttttttcntcctgtccgttttgggtggtttttttttctgtntttttccccttttttttttttttttttttttttttttttttttttttttttttttgttttttttttttttattttttttttttttttttttttttttttttttttttttttttgttttcttttttttttttttttttttttttttttttttgttttttttttccttttttttttttttttttatttttgtttttttttttatttttgttttttttttttttatttttttttttatttt

SEQ ID NO: 421475 - DNA, 473 bp, Oryza sativa nipponbare
ccacgcgtccgggcaatgataacacaggcgatgaggatgtcaaaggttcaaaaggcaagtctaagcaaaaacggcggcgcctagggaatgatcgacacaaaaatgactgtgcatgtgctgtttgtcaagttacacgccgcaaaaaggaaaaggatgaaatcttggctgtcattgaaaacgatacagctgcagtgaatagtaacatttctgaccagcaaatcatggaggtagactcaggcattaataacgctggtagtcatgacactacctctagtcaggagcaaccaccacaaactgatatgtacagaagaacagtggtagcagatgattcagggactctgatagaaaatcatgtgaaattcttcaacaaccagccactgccacatgattatgaggatgaaggctccagaccatactttgacgaaaaagaagaggtagactatacggatttgatcagtcaggaggaacataca

SEQ ID NO: 421476 - DNA, 436 bp, Oryza sativa nipponbare
ccacgcgtccgaatctagctcagcactcacgttctgtaatccatgcatgctaaacacccgatctgtggacgcaccagcaactatcagcaaagcagaaataaggcgcaaccgtgttgcagctgtctcttcagagctagtctgcccactaacctgcagcccatttccatcgtctgccctcccgacctgcaggtgcagtgacgatgatccatgtgatgccatagaaacacaggatggttccgaggtgcaatctcctcagccatcgcactgcgcaagcatggagatggacaagagggaacagcaggatcttgaccggactagctgctcaggcatgttctggagccgaagaagctgccacagggaggagcagtgtaatgcagagatcaatgcttgattgtttcttctttctggttggtaatatatctggattcatagcagc

SEQ ID NO: 421477 - DNA, 474 bp, Oryza sativa nipponbare
ccacgcgtccgcccacgcgtccggacaatcaggcgatgaggaaggttcccatataaatgaatgcttaaacagaaggggaggcgcctagggaatgatcgacacaaaaatgactgtgcatgtgctgtttgtcaagttacacgccgcaaaaaggaaaaggatgaaatcttggctgtcattgaaaacgatacagctgcagtgaatagtaacatttctgaccagcaaatcatggaggtagactcaggcattaataacgctggtagtcatgacactacctctagtcaggagcaaccaccacaaactgatatgtacagaagaacagtggtagcagatgattcagggactctgatagaaaatcatgtgaaattcttcaacaaccagccactgccacatgattatgaagatgaaggcttcagaccatactttgacgaataagaagaggtagactatactgatttgatcagtcaggagggacat

SEQ ID NO: 421478 - DNA, 339 bp, Oryza sativa nipponbare
ccacgcgtccgcctgctcccacttcacttggaattcgaaatccacacgatcgcggcggcggcggcggcggggatggggagcaccattaacgtggcgtcggccacctcgaggttcctgctggccggcgggaacggcggcagcggcggttgcggggccagccgcgggagcttcggggtgaacagggtcgggagggggatggtggctgcacacttaactggagaggagagaggccagttcaggttgctggatattttgctatgtcggtgagttgctgagttgcacatccactttgtatgtgaatttggtggcaaaaaaaaaaaaaaggggggggttccataa

SEQ ID NO: 421479 - DNA, 399 bp, Oryza sativa nipponbare
  unsure (1)..(399): unsure at all n locations
ccacgcgtccgcccacgcgtccgtttcaaaatatcaagcgtcgaaaagttaatctctaaattgagctatatggtgggatggcgcggtttttgcgatcctgtacgctcggccattagatgcatgtaacaaactcccaggagaggagaataaaaggagaagatgaacccagaaaagctgtgcaagtttcaagcagcgcatactctatctcagctagctgctctgttttctgaatttcttcagtctactgtagcgaaacctacaaccgtcagataacacagcaccggtgagattgagagtgaaattgaatgtggtggagcatatttcctgacaggtcanaaaaaaaaaaaaaaaatattaaaaaataaaaaaaaaaaataaaaatttatataaattttttaa

SEQ ID NO: 421480 - DNA, 251 bp, Oryza sativa nipponbare
cgcgtccgcggacgcgtggcggacgcgtggggaaaagtttaacgtagtttcggcggtcagccaaccaaccgacctatctagtcaacgcggatcgcctctcccagcaccaaaccctatattgttcgtcagttcaactacttacaaagtctttcattttaccctgtttttgctgctcgctccgggattcttgtctcgtctgctcttcgcggtcggtgtcgcgccattagcaaccatggaggtcttgaggaggg

SEQ ID NO: 421481 - DNA, 458 bp, Oryza sativa nipponbare
  unsure (1)..(458): unsure at all n locations
aattccgnggtcgacccacgcgtccgcagatcctcgacgcgctcctcccgctctaccttaacagccagatcctccgcgcggggggggggtttttcccaaagagttctcccccccgataagcccaattttaaggtctcccgaacaccctttttggtttcgggggaaccctttcttgggttaaaaccgctaggcccgggccaaaatcaccggcgagaaccttgagatcggtgccggggccgacccccttgcctaaatccaatcaacttatattctttatcccatccaccttctttgagctggtgaggttgctcgctgtatatatactactctattcttttttacttcctttttctctcttgctattgtgtctggaatttctgtgatagcacgaaaaaaaaaaggaaaaaagatcgatccgactcgatcgatgtaattgttaatcgcgcgagatacacaag

SEQ ID NO: 421482 - DNA, 303 bp, Oryza sativa nipponbare
ccacgcgtccgcccacgcgtccgcccacgcgtccgcccacgcgttcgtccacgcgtccgctctatgtaattcttgtagaggcaggagggacttgcgatccctacttatatattcaggaggctatattcagttatgtttatgcttataggattaggccttgtgatcttggtatctcttcttttgtatgatatttgtatactgcacactatactggagatgagagatgccagtacagcttgtttgattttttgttctgtttgtgaattgctgagttgaacatccactttgtatgattttggtgcc

SEQ ID NO: 421483 - DNA, 140 bp, Oryza sativa nipponbare
ccacgcgtccgcctgactccccaactaactaacaatggtcttactaccaggcaggcggacctactcctcggcggaggatatgtcttctagagggacagacggctgtctctgtcaccaacgttagctcaaaacacgcctaa

SEQ ID NO: 421484 - DNA, 84 bp, Oryza sativa nipponbare
tgctaaatatcgttcatcttgtacaacgtacacaaatatatacaatgttccatgacatccgtaagtggcgtgcacacaacttat

SEQ ID NO: 421485 - DNA, 79 bp, Oryza sativa nipponbare
accgacgagagggcggcccggaggtttaaccaaacaattccggacccgatccagcaaaaaacaagctttccctaaaaac

SEQ ID NO: 421486 - DNA, 334 bp, Oryza sativa nipponbare
ttttatggcccagaatatcactatcacctataatcaatttaacatcgacactacaaagaaaagaatggcgactctaaagttccaaaaacatgagatcctctatgtaccaaatctgacatggctcactggaaaaacctccccgaagaaaaaatgggaacagggaaatacacagttacaagccacactgtcgatacactctgagtgaaagtgattgcacgatgctttatgatcgacttttctcccaggaagaagaagcttcaaaaccaggaccacagcagcttaagcaacaacagcaggacctttcgctgttagattggacacagctatttggaac

SEQ ID NO: 421487 - DNA, 92 bp, Oryza sativa nipponbare
tactaaataccatttaacttttccaaagtacacaaaaatatacggtgtggcgagtaaatccgtaagagctgtgcacacaacttatttgtcca

SEQ ID NO: 421488 - DNA, 139 bp, Oryza sativa nipponbare
aaacatccatcttttgggttgcaatattgtctgggcaagtgttgttggaacaacacccacaaatgctgccttttgaggttccatgtagactgactcccatcctgggaaatgtattgccaatccagggatgacatccttt

SEQ ID NO: 421489 - DNA, 346 bp, Oryza sativa nipponbare
ccccaatccaatccaattttccatttcttattttccgcccaatccaatcaaaccaaataaatttcacagaggcttcgcaatttcacatgggggcaacttgtttcaaaaacaaaacaaatccttagccccagtcttcaccggagggggggggctgcccccccccaaagccgggggggggggccctttcccccgccctagatccgggggggggcacccgcccccccccggttttggggggggggggggacaccgcccggggggcccccaccgttttagccgttgttgccaccgccctccccttcctttaggccaaatttaggggggggcccgagccagggggcccccc

SEQ ID NO: 421490 - DNA, 301 bp, Oryza sativa nipponbare
acggggccaaatcacaaactttttacacaactttttttttttttttttggacatttgtttcgaaaaaaatttgtacaggtttgcgcaacaacaggaccaacgggtccttttttttttaggggatgaacagcaacaatttcgatcaggataacctgtaaaatcaattttcaaccctttccaatgttttttgtaccaatttggggaaaggaaccgggcccttttttgccgggtttgaaaaaatatctttttagcagccaatgtcgaatttatttttctcggataaaaagagaggagctttttt

SEQ ID NO: 421491 - DNA, 312 bp, Oryza sativa nipponbare
aaaaaaagcaaaccttttattttttctttccgggcgcctttttttccccttgggcaaattcattttattttttaaagtgaaaggcccttaaatttggcacacaataaaaccaaaatttttcaattatggtgggtttaaaaaatgtttacccggggattgcttttaaaaaaaaaaatttttttttaaaaattttggggggctccccctttaaaggagaaattttcccaaaagaaccccgaaatttccccaaaaaaaaaaacccccgttaaaatttcccacaccctggggggtttaaatttttgcccttttttt

SEQ ID NO: 421492 - DNA, 182 bp, Oryza sativa nipponbare
  unsure (1)..(182): unsure at all n locations
ttacagaaaaaattaatncacatacaacttattttgagtgagtgtaaagcctccaccggtgcgattccactctacaagagcaaagccgtcacccgtccctatcgctactcgacgtgagtatagtagttacaaaaagtgaatgtgccccgtacgcacgcgcgtgctttcgtctcacacgagaa

SEQ ID NO: 421493 - DNA, 267 bp, Oryza sativa nipponbare
aaaagaaaactgtaaccggggggtgcccccgttttatttaattcccaaagagcaaaaataattttatttatacatcatgcatattaaggacaagaagttttttttttccttcagtaaatcgagttacaaattgttgcaacaaataattagcctttcgattggttggttaattaattaattaacagggccttttaattataactgctcgatcagccacgctgaggcaaatttttttttttttcttctggggtagggctcattttgttt

SEQ ID NO: 421494 - DNA, 323 bp, Oryza sativa nipponbare
gggcaagaaacttggtatatttttttccttttccttttcagcaactaacacagatggcaccatttactgggatctgggatttaaaacagcaacagatccgagtcctcacttagattacagaccgggggacaaaacagaccacaagatgggggtcaagtgcccaagagagcggggcccccacatgagagcttagcttccgggggggacctttaagactaaaagctaaagggaggaacatccgaacacttgcagggggcagcaaccagcaacgtccactttggttaggccgacttgagaacttttcctactacctggagcccttc

SEQ ID NO: 421495 - DNA, 242 bp, Oryza sativa nipponbare
gtaagatccagacacttcatgttagtatgtatgcttgaatatttgaatgtacatttggtggtttcagatccaattgtgctaccaaaatttcacatggaaatctaaagtattagaaatgtagtatgtaatctccagaactcactactcatccctaaaaatatggaaacaacaaaacttagagaagctattgagaacacctagcaaaaaaaaatacaaacaaaacaaaaaccgcgtgcattggc

SEQ ID NO: 421496 - DNA, 101 bp, Oryza sativa nipponbare
gactaaaaaaacagacccgggggattccggtattgaaacaacaattaccatagccaggtacagataagagcaacaatatacattaggtttaatattgaaag

SEQ ID NO: 421497 - DNA, 157 bp, Oryza sativa nipponbare
aataggaaaaataaagaggccttatggaatgtacaatacttgaggggaggagtcctcactccatggaggtcaaatatttattatatataaccacccataccattaaaaaatcgtactacatactgacatccacaattctaaccctatcgccctctta

SEQ ID NO: 421498 - DNA, 123 bp, Oryza sativa nipponbare
tataggaaaaacacagagggctgatggaatgaacaataatggaactgagcactgcagactacatggaggtccaagaatgattgaagaaaacctgccagaccattaccagattgtactatatac

SEQ ID NO: 421499 - DNA, 442 bp, Oryza sativa nipponbare
gcacgcgtacgtaagcctgtataccgtacagcctccgtcctttttttttatataaacttcattcctagcctctattgaatcaacactacggggatgtcaaataagcatgatatactatcaacaacccactactatcctgcttaaccaaactaaaaacacctaactcacaacctttatagcttcccaccctaattttgctttaacaatcatatatactaaacatcaacattttctaccctctaatcattaaaaaataatggcacagaactcgcaccctaatgaccaattgaatgccttctctgttgcatagcaaatgtcgaaacaccgtttactgcttatactggcggaatcctatacatcttttttctaattgaaaaggatcactgcgcaaaggctaataccttacaccaccataatgacaacctacatgcatcaatcttta

SEQ ID NO: 421500 - DNA, 250 bp, Oryza sativa nipponbare
tacagaaagacgatagcaagactctgttgattaaacatactgggaatggcaccggagcgtgatatcccacaaaacgcgacactgattcctgcctagacaactaaaagagcacttggtcaaaatgttgattgcccaccggattcattgtgaattgctcatctcacgcacaacctgtcctgataatgatggctgtttttattggaaaatttaagtcatgaacgcacaccatgatgaccaattgactgcctac

SEQ ID NO: 421501 - DNA, 259 bp, Oryza sativa nipponbare
ggggaaaagaggggggtttttttagttttttttaccaactcccccaatttcttttttttttttcaaggcccaacaaacaaaggttcttttggggttaatatgaacttccaaggatttttgggccttttttttccaaaaaaaaaagctttaataaaaggggggggggggtttggccccttttaaaattttttttggaaaagttttatttttttaccccctttaaggttttttaaaaaattaagggtcttggggggtgggg

SEQ ID NO: 421502 - DNA, 326 bp, Oryza sativa nipponbare
atcacaattatcttgatacaaatatgaagcttacagccttacacatagataattgtcatacaatagacaggtatctcccaactaatttcgtacctaaatcaagctatagcctctgagctcaaagatatgtttcaactaacctgttttattccaaccagctcccgtgacttcagggtacagctttctttcccaaagtcacaacgctgccttgagcttcctttacacgaaacggctgctgctaagcagccattggagggacaaaactcctaccgtttcattatcgctgttatggccgcatgcagagggcttcccttcattgaaacctg

SEQ ID NO: 421503 - DNA, 244 bp, Oryza sativa nipponbare
gctttaattctttttgtagctatatttgaagctgtccttgatcttgccttttcacagagagattggttcagtggttctttgctctcttttttttaccctgcttttggcacatcaggatggtactaatacaattccatccggtgctacagatcatgagctcatgatttgatggtggtatgatttttttttcttttcctaactctcgatgactctacacgtttggcataaccgagttatcctgttc

SEQ ID NO: 421504 - DNA, 304 bp, Oryza sativa nipponbare
ccatatcctgaatattccacgcatgcattcatgtttgcatacataagatgcacatatatactaaacagtacatgacacctagtacatgatttcttgtgctaataacatactacacacaactacatgttcatgatttaattttgtggcagctagctggctagctaatctatatatgatgcatgcttacggcacatttatattaatacgaggattgaaaaagagctctcaatgggatggagccaaatcaaacaagcaagctagctagctagagagctcatgtgaagagctagtcatgaactctagc

SEQ ID NO: 421505 - DNA, 186 bp, Oryza sativa nipponbare
  unsure (1)..(186): unsure at all n locations
cggaatattccacgcaggcagncangccngcatacggaaggggcacacaaagactaaacaggccatgtcacctagtacatgattncctgtgctaataccaaaccgcagacaacttcttgtaaacgatataaacttatgggaggtagctggttagcgtatctaaataagatgcatgctcacggttca

SEQ ID NO: 421506 - DNA, 213 bp, Oryza sativa nipponbare
aaaaacaaaaaaaaaaaaatcttccaaaaaaaataattttttttttatacaaacggggttttttttttttaggggttttgtttttttttttacgcccataaaaaaaaaaaaaaaaatactcctttttttaaaaaaaaattaacttttttaaaaaataaaaaaatttttggggaaaaatattctttttttattacccttccggggggagattta

SEQ ID NO: 421507 - DNA, 88 bp, Oryza sativa nipponbare
ccacgcgtccgtccacgcgttcggatagaggatgcaaaatctggatttagtggcagaaaaaaatagaaaaaggggggctggctcgtta

SEQ ID NO: 421508 - DNA, 150 bp, Oryza sativa nipponbare
  unsure (1)..(150): unsure at all n locations
cacgcgtccgcttggtcggcaggatcggctcgccggcgaaccgtctgttccggtgcatcgtccggtatngtacaaggagggcaggtgggaccacttcaacttcgagaaccaactgctgatgaaggtcgtcgagttcctccgccaccagga

SEQ ID NO: 421509 - DNA, 243 bp, Oryza sativa nipponbare
cgcgtccgcccacgcgtcactgaccagcagctcagcctcattactcacgagcaatcagctagcgagctgatcttgatcactacacctccatagatcttagcttaattagcttagattatacaagtggtcaagtcaagaactgtaccaatggcatcatcaatggcgcctgcagcagcaatggcgatcctccttctggcgcttttcatgcccgccacgctgtgctcccgcttagggccgttcttg

SEQ ID NO: 421510 - DNA, 243 bp, Oryza sativa nipponbare
attccggctcgaccacgcgtccgctcctcttcacaagcaagcgcgagaggagacacctccatcgatccatggccgccagcgcggccgccgttgcggcgtctctgtccccggccggggggctcgggaggccgctggctcgcgtctcgtcgccggcggcgccgatgaaagccgcctccccggcggcggcacggcgggccgtcgtcgtccgggcgctgtcgtcgggggagccggtgaggagggaga

SEQ ID NO: 421511 - DNA, 54 bp, Oryza sativa nipponbare
tcccgagtcgacccacgcgtccgcccacacatacgaggacacgtgaacggataa

SEQ ID NO: 421512 - DNA, 75 bp, Oryza sativa nipponbare
cggtcgaccacgcgtccggagccctcccgccctccagcagccgccaagacggacgaccacccagtctccgcgtcg

SEQ ID NO: 421513 - DNA, 407 bp, Oryza sativa nipponbare
ccacgcgtccgcccacgcgtccgatccgatacagatctgcttacgtagaatttttacataaagaatcagctgagacgtgctctttcattgaatggaacatcattcatggcacgcatcctcaaggtactatggtcaatgaccaagctttgtccttttactttctactccctgcatcccaaaatattgtaacctggtactggattattggacacaacttagaactacaaatctggatagagcccatgtccagattcgtaatactaggttgtgtctaatctagtacttaggtagctatattttgggacggagggagtatatctctctactgaaaggggagtttgaatatagagcacaatcctgctaaccaaaattcagagcttaatccaccttatgtttctgaattagca

SEQ ID NO: 421514 - DNA, 145 bp, Oryza sativa nipponbare
  unsure (1)..(145): unsure at all n locations
tcgatcgatgttctactacacgcctgtctccatgcacacccgactcgctgatgtcacacgatgcgggcggtgccacgtcccaagcacttcnacggcgatcgtcagcggccggtgccgcgacaaggtgttcgagttcgtgaagctg

SEQ ID NO: 421515 - DNA, 168 bp, Oryza sativa nipponbare
ccacgcgtccgcccaccatgcgccgacgcgtgcatggctcaaagcacctaggtaggacacttatcgctccgagcgcgctgtcacattgcacgctatggtcatctcatgctccccgtgagatcggcgaaccaatggcatcacttactgcaccatgaatcgatcagactg

SEQ ID NO: 421516 - DNA, 186 bp, Oryza sativa nipponbare
cgcgtccgcccacgcgtccgccacagttagcgagcttgtcgttttcgtcggagaaccccacggggacggatcgttgtggcgggaaggaccgcctccactactacagcggcgaaaagaaggaaggaggcggtggattcatggagaatgtgaattgacttgatgcaccatattgttgtgtatatttag

SEQ ID NO: 421517 - DNA, 430 bp, Oryza sativa nipponbare
  unsure (1)..(430): unsure at all n locations
ccacgcgtccgtcgaaagtagaatttgtgaagaactctagtgcacgtccattacatagctactgcagaaaaagatgtgtaatattagttcaccatattttcttcgatataataatactacacgtacgaaaaaaaatattaacatgggaaacacacacgtttctggcccaccccatgccatttacgcttaggcccttcacagtgtgtttgcgtggtgagtttctttgtgccgccagctcaaatgaatgcctacgtggcgagtaattgcgcatccctgcagagcatctcacctccacgcagggagatgagttttctcgctcttcgtgagtccacacatggcccacaaacgaatcgtgcctgcgttgttggggtcgagcctncatctcgtcgtcttctcgcgccacatcgaaaaacctattcccaaaatcacc

SEQ ID NO: 421518 - DNA, 121 bp, Oryza sativa nipponbare
  unsure (1)..(121): unsure at all n locations
acgcgtccgcccacgcgtccgcaggttgagacaggttcagctattacatggaagtacccaagtggggaggttcttggggatgatgcggtntaacagccactctccttacaagagccaaatc

SEQ ID NO: 421519 - DNA, 171 bp, Oryza sativa nipponbare
ccacgcgtccgctcttttggatttgcaactgaccttttgtgctgttttcctgtctgtttgtcatatggtattcgatcattcgcggcatatctttagtgggagaaacatggaacatgctcatccccggtagttaaggatgaattagagtatttcaccactgtttgacttatt

SEQ ID NO: 421520 - DNA, 144 bp, Oryza sativa nipponbare
  unsure (1)..(144): unsure at all n locations
ccacgcgtccgcccacgcgtccgcgatcgcagcgagacccaccctcaagctccaagctccaagaaccatggccgccacctcgctgtcgccgccgaccggggccgggctgcggctggcgccgtnnccgggcgtgcggtcgccgtc

SEQ ID NO: 421521 - DNA, 198 bp, Oryza sativa nipponbare
  unsure (1)..(198): unsure at all n locations
ccacgcgtccgcccacgcgtccgtggaattcgaaatccacacgatcgcggcggcggcggcggcggcgatggggancgaccattaacgtggcgtcggccacctcgaggttcctgctggccggcgggaacggcggcagcggcggcggcggggccagccgcgtgagcttcgcggcgaacagggtcgggaggaggatggtgg

SEQ ID NO: 421522 - DNA, 214 bp, Oryza sativa nipponbare
ccacgcgtccgaagaaatactccagggacgaacgagagagcttgcctagctgcacagatggacccttgcgcgacggcactgctaaacaccacattccctccgttacagggagtgacatccagcgctggactgcggggcccaagccggtcacgggatttatggtcaagcccagtcaagaagaggccaacgacaacgaggatgcagaacccaacgc

SEQ ID NO: 421523 - DNA, 237 bp, Oryza sativa nipponbare
aattgccgtgtcgagcccacgcgtgcgggatgccgtcaacattcatgatggactacctggcaaagaagtgagaggccaactgtctcagcagcagtcatgtttcatccatcggtatcagaaatgtagctggatggatggtttcagattcttacctttcttctcgtttacctctgtggcaggtttgggatcacaacatcccagatatgcatggttggtgaccgtttggataccgacatc

SEQ ID NO: 421524 - DNA, 307 bp, Oryza sativa nipponbare
taacatattattagcataagatgcattaataattataactaaggcactataatagaggggctgtatcagtttagctgtaacatctacaactagggttgggagagatcatttacatacttagactgtcataaccaacttatcactagcatcagggcttctatgaattccatcgtccggtgcatcctttggcccagtagacggaagttcactatcatcagttgtttgaaccttagaatgcgtcatacttacagtcatctcgctcatcacttgcaacctcagtaccttgaatagcgagatctagtggctg

SEQ ID NO: 421525 - DNA, 297 bp, Oryza sativa nipponbare
ttgaaggatccacacagaaaccgatgacctggctcaaaagaatggtacctgtgacaatctgcgcgtacgttccataccagacataatctgtgattaaatgatgttgtgcaaaaaagaaactgacactatcttgcagagacttatgggcttatggctctaccaatgtctgcatgaatacgcatgaggagctgtatgcaacatatgatttgacaaattcttgtggaattcaataccagaaacagtgctattgttgtactcacttatgaactgatagtgtgcatggggggagaaaataaa

SEQ ID NO: 421526 - DNA, 468 bp, Oryza sativa nipponbare
aatgaactccatcaatcatcacatatacccaaagatgtcatatgatacaacaaatttacttcttctaccgttacctgggatactactgcagaaaacaacgcaactccccgtaatggaaaaggaaatcgtgtcagaacgtgaaatgacactcgctacacaaaagcctaaactaaaattggccaaaaatttgccaatatccaatgagctgtattctcctgtccaatgtccaaaaatccaacgctttgccagggaaactacatctgacaaaattcttcctgaactgatcccctctgggaactgtatatactatttgccatccaagtcatgactcacgacgactccggttctgacttcgaaaactcctgaggctcactgctggcaaatgctagccagacagcagtacccgtcaggtaaaaaaatatccaaggtgcgaaaagtgatatactccaagaatgagttgtatcaaga

SEQ ID NO: 421527 - DNA, 430 bp, Oryza sativa nipponbare
ttagcgaaggaacatttgtgttctccagctgattattccagtaaaaaagattccgaaaccggaatgaataacaattagctgtttgagcaatgatgctttagatgcggaagtccgcttcaaggaagctgtggttgtgtccttcggtgccaaattttcagtgagcacaacgccgtccaaactggaaggttgattttattcactgttcgatggtaccgcttgtcaggcatgatcatgagaaaagaagtcatcttcacagctgttgtcatgcttcgacttcctgtaccttgagtgattcttttgaggcgataacatcctctaggtcttgtggcgataacagcttcgtggaaggcttaaaccctgtgtcatcagagagcactgcctctggttctgtgggttcgactgtgaagtggtctccgagggcagaaatgat

SEQ ID NO: 421528 - DNA, 316 bp, Oryza sativa nipponbare
acgcctcatgaaatcgaattaattaagccaacacaaacacgttcgtacacgtggagaaaaaggtttatggaggtggactaccggttttttggagcatacaaaatttgaagccatgggttttatggtatacgtcacagtttcccaaagaagcagcttttttgatcagggccgtttgacggggtcaaagttggagacggggacaacggggcccacgatggggaaaagcacaacccccccggacgcgatgcttaacaggaagtttttgggggaaggggaaagggccggggccctttttgccactttgggcaccggcggg

SEQ ID NO: 421529 - DNA, 241 bp, Oryza sativa nipponbare
acaaaatgataagagaaaaacatatataatttggcgtgtctcattacaattacatgctctagttaattagaacagtaagagaggaagtgaataaaaaaaaaggaaaaagaaataaaatagaaaatgctcgttgttggattgctttgtcctttccattggatgatttgtttaatatgtttctttattttttctataatttcatttatttatttcttagttttgatttttttgttttaattca

SEQ ID NO: 421530 - DNA, 383 bp, Oryza sativa nipponbare
gggggcccaaaaaacacccctacccattatatacatatgggagggggcccatgtttacatatttgtttgggcccatcctaattcgggcaaaaaccaaaatacttgtttttaaaaaaaggtcctacttctgtgctacaaaacaacaattttcactttaattaattaattataagccgataaatcgggtctttttacaacccatttagagtaaaataatccggctgcaaaggacacggtaattttttaggaaaaaaaaaaggcccccccccttgtaaaaaaaaaaaaccgactggataattctttggctggcaaaaaaacccacgcaacgcctttggtttaaaaatttaccttattaaaaacccttcgccatggccttttttttt

SEQ ID NO: 421531 - DNA, 76 bp, Oryza sativa nipponbare
agagggtaaatcactgcagattttctattccattcgaacgaacgaaccagtagttcatacatccccggacgcgtgg

SEQ ID NO: 421532 - DNA, 378 bp, Oryza sativa nipponbare
  unsure (1)..(378): unsure at all n locations
gagaaagatatttttcgatggtttgggtattgatttgttgttgagcgagatgtagggaggtaagagaaaaaaaaggagagattgttcatggattaatgaatatgggaaggagatggaggggattatgggttaaaaaaaatagattttggttagggatgaaagaaaaaggggaagaggttgaattgantaagtaggaatataaattgaaagttatatggggagggggacgggaatgggttgggggggataaacaaagaggggaatgagtttgaaagggataagaaaccccgtgacccggggggttgcctttaaaaacccaccaatggcggggggccttccctgggaaaaggccagataaaataggacttgccgggcgga

SEQ ID NO: 421533 - DNA, 300 bp, Oryza sativa nipponbare
gttagggaaataacacttcaaatcagctgagcgaacccttgaagatgatgctgatacagatagatgcacattgaattttgttcatatacatgatgaccatacaaccttctagccttatttagaaataagaatcccgcgttagctcaaacactaactagtacacgcacagtgctctgtttatttacctctttaactacgcgaaacagacacctacacatggagggatggcagtggaagaagatggacagggcgcactgacacacaaagacccatggtactctcttgggactgcacaccatg

SEQ ID NO: 421534 - DNA, 106 bp, Oryza sativa nipponbare
attctttcttaaactaatgcaggtttctatggaaaggatatcaaaatttaatagtctctacatcctctacagaaggagcaaagctttggttcgaccttccagtagg

SEQ ID NO: 421535 - DNA, 353 bp, Oryza sativa nipponbare
ggggtagggttaacaagtctgctaaaacatagaggattaaaatgtttaaaactgtacagtttgaccggtcccactttttttttacaccaaatcaaatgcgaccaatttttaactcccgacttttttttgtacagagggggttgaaacttgaaaggaagacttggggggggagacctagcaaactcccaactttaaattccaagttatttttttgttcttaagggggcgacatcgtttgccacaaaaaaaactatgttatgcgccatgccacaccaaaaactttgggagttaaccaatttttttaatttttatacactttgggaaggaaaacttttttttaggcagttaaaatt

SEQ ID NO: 421536 - DNA, 285 bp, Oryza sativa nipponbare
ttttttttttttttttttttttttttttttttttttttttttttttttgttttttttttttttttaatttttatttaaaaaaaaatttttttataataaattaaattttaaaaaataaaaaaaaaaaattaaaaattaaaattaattaaatagaaagggagttataaaaaaaaataaataataatttttttaaaaaaaaaaaaaaaaaaaggttttaaagaaaagagggataataaaaaaggaaaaaaaaaaaaaatgaataggaaaaagaatgggtggggggag

SEQ ID NO: 421537 - DNA, 277 bp, Oryza sativa nipponbare
gagttaactaaaaccagttacttggcaaaccacacgcatacaggattgatgaatgatactgaggatagcacggtttcattacattacacatatcaaggccttgctacacgtataggccgcgcagcgactagctgctcaatcaatcgctatcacacgggtttaattcaccgttcgtacgcacatacacacaccacattgatatgggtggcgcttattgtcgcctaatggaggtagcgcaagttcaagggtagatggtgttcgggatgttgatgtcttc

SEQ ID NO: 421538 - DNA, 344 bp, Oryza sativa nipponbare
gctattatatcttattatatcttacttgtgtacagctgctgtcctgattgtagggaaagaggttatcaagcaacagtaagtactaaacatgaatacccctttaatgacaatggtattccacagggtggatgagtctttttttttccctctactcaacccaccaaatcaaatttccactaggaaatccaatgtgacaaaagttctctgaaataaaagcttcagcattttctaacaaccatgttgtaatcttgaaattttggctcttttcttctcttgaactaatcccaaaattattatgtaactgaaaattttcacttttgggatttggatgtcaagtatttctt

SEQ ID NO: 421539 - DNA, 465 bp, Oryza sativa nipponbare
acaaaatgaatgatgattttattcggaagtataaaaccagacagtaatacatgatattgatgtcgggtgaacgcaaaatttcctttttcacaccgtcgaaaagttacatctttcacatatactcaacacagatttgccactgttcaacaaactgaaagtggctctttatctcacatactttcacagacaaatccaagcagctctcttggcaaaatgaacagacaaagtgtcatgtactagcttctgcagcaagtgtagctctgactccatcttgaaatgaaattggcttgataccaagcatttgggttagtttggtgatatccatggatatgtctggtggagaagctacaccccggtcaaccgatgaagcagatacagatttgattatagaatgactatatccacgaacatcagcaacagattcagccatctgcagtcttgagactctatctggtccaccgacat

SEQ ID NO: 421540 - DNA, 327 bp, Oryza sativa nipponbare
aaaaaaaaaaaattttaaattgaaaaaaattttatacggttttgaaacaaattttaaaaaaatggaattattttattttaaaaaaataaaaaaagggttttattttttttgctaaaaaaaaattaaaaaaaaggggagggtttttattatttaaattttaaaaaaaaaaaatttttttttttttaaaaaggtcaaaaaaaaggggcttaaaatggggtttgaattccggtttttttggggttggttttgttttttgggccggggttttaaaaaaaatttttttgggggaaaaattttttttttttgccgggcttttaaagggggaat

SEQ ID NO: 421541 - DNA, 400 bp, Oryza sativa nipponbare
caactccacagtgcatgttacttcttttgcatggctttgattggggcgagctagtgtcgagactacaaagctcacaatacaggtgaccaagacaatgaaggtgccccagcccaataaattaattcccccagctacccttctcctctctcttccctatcggcatcgcctccctcaacctgttgcccaccgcctgagctccctctccttcgcctctctcctccctatcgccatcgcctctctcaaccaggcgtcacggccgcaaatgcaccacttctcgaagaagaggaagtcgtcgtcgtcttcctcgtcatccgcacatggctccgctctgtctcctgggcgtggaaaaggaagttgccgtcgttgtccaacccgtcgatggcgaagtcaaggatccacc

SEQ ID NO: 421542 - DNA, 197 bp, Oryza sativa nipponbare
tactaggcaaccccacaatacacaatggttaaattcaatgggaattggcaggggtccttaaaataaaacaatttattccgtggttccacccttagccgccgaaccacccagttgttaatttaatcgttacccaacggtttaatttaaccattattaggacacaccccaaccaaacttattttggtgggttttattgg

SEQ ID NO: 421543 - DNA, 283 bp, Oryza sativa nipponbare
ttaaaccaatcgatatattaatattattgatgtaatttaggcaaaagagtgatgcatacagcagtgagtgagtaagtaaaatagaaatccctatgctatttattccttgctaggtctaggtggagttgcatccaatccacatggtacaagattagattagagcagcagagtgaggaatctgacggggaacctgggatgaaagaagaaggaggaggcaggtggagctagggtttaggagggggatccttcaggtccagggcgtggttgcgcttgcggcggatga

SEQ ID NO: 421544 - DNA, 442 bp, Oryza sativa nipponbare
tttttttttttttttttttttttttttttttttttttttttttttttttttttttttttttttttttaaaacttaaaacccttcttttatggggggatcgctaaaaaaagggtaagggttatttttggaaaccttcaacaccattgttaaaaccccccaaaaaaaattatcagtctatcccacttgaattccccctaccgggttctgggaaaaaatactggccctggtttgttggggggggggggcaactgtcaaaaccaaatccttttttgggggaggatccgccttttttggcttttttttcggcctcgcgaataatgcattaaaacctgcccccaggttagcttgaaattccaaatcaacttttcttgcagttgcaggagtcaataaaaatcccccttcaacgatttttggaattggtttaaacaacatgggcccccct

SEQ ID NO: 421545 - DNA, 382 bp, Oryza sativa nipponbare
aaagacagccgaacacgccaatagagtatggaaacttgtattacaagttagtaaacctaacctccagaattatatctggagagctttattttatcttgataattcgtatttttactcttattcctaaacgtagttctaacacctggatcggcctgcttagttctaatcggttcttgggtactctcatagatccattgtctagcctttatccattgttgccgcgtccggaagagataggaggatggtgttcaccgccgggacctggattttgagatagaattcgaagagaccgtgttgatatgcctgaagcaaatacacggccttgatgcttctcctcgccggcgacgagctcgcctccagggccagcgccggcgagcacgca

SEQ ID NO: 421546 - DNA, 257 bp, Oryza sativa nipponbare
tgaaatggaaaccagaggtatcaagtttggtctgagtatagtattacatataagtatcgtttttgacgatttgtacaatatatttattacgatgtgtatgtgcatatgattagcctggtgctagcattcacatatgcatgctcttcaacctatgttgatacatacatatgtacatacatacacagctgatgttgacacaaacaagatgaaaaaaaaaaactgaagcaacaaactgggaaaggggaaaccaatgcaag

SEQ ID NO: 421547 - DNA, 393 bp, Oryza sativa nipponbare
cacatccatttcatgccctatgattagagcactttggccgctattccaataatttttattaaccatggcttcaccgaacagacatgataaatgctactgaaaacacatgtttccatacacaaaaaacgatcagagccagacaaaaccgaatgtagtggctgtgcgagaaattaaagaggggatgaacattccgggtgcacaccaaacagggcgggcgacatcatagaatgagcgctgacacaggtaagcctggctgtatatgacgcgcaccatttagacgccatcatagtccgtctactccttgaccttggacgcgaccaatctgacgagctgctcctgcctgacgttgacgaagcagaatttccggacgaatggctcatggaaccccttctt

SEQ ID NO: 421548 - DNA, 295 bp, Oryza sativa nipponbare
accaaagaaaaagggggtaaaaagggaaactttttataataatttttttaaaacatttttgggggggttttttgaacacactgggaaaaaattttgcattatggggggaacaactcccggttaggaaaaaagtggggggatatttttctggggtttactaaaaacagctttcaaattttttgaaccctccgggccctacggagaaattccccacgcgtttaaattgatgatgggggacaattttctcagggtgttttttttaaaaagggttggggtaaaatgacaaaatgaacgg

SEQ ID NO: 421549 - DNA, 341 bp, Oryza sativa nipponbare
aggccagaaaaaaactttattggccataacaagccttttttaacaaattttcaaacaagttttaatagcgccacgggttgccacaaattattttaggcccgaaaggccttaaaaataaatccattttttacgggaaacaaaacccaaatttccaaaattgcccgacattttatgcaatttcactgggccagcccatggtcaaacaatgggctaaccaagaccccaaaagggggggcaaaactggaacatcatgatccttgcgataagggagaataatatccagtattggtcaaaaccaaaaaatctttggtgattcccaaactagcccgaccccgggggct

SEQ ID NO: 421550 - DNA, 165 bp, Oryza sativa nipponbare
ccacgcgtgcgcaccacctgctcccacttcacttggaattcgaaactcacactagcgcggcggcggcggcggcggcaagatcgagcaccattaacgtgtcttcccccacctctagggttctcttaaaaaaaaactaatgttatataatgttggtacatgaagatt

SEQ ID NO: 421551 - DNA, 332 bp, Oryza sativa nipponbare
ccacgcgtccgcacgtcctgccctacttgccgggactccattctcttcgtccatggagtcgtcgccggcggccgaacagagctagtaatataatttcttgaacagaagaggtctaaaatgtaaatagaatataggtggtaaagtactccaaaattgggattgcgtaaatgcaagggattggacacaatgtttgaagtgtctctgtcacttggattatccatctgtttagctgtttctatgagttttctcctttaatttgtgtgctagcacatgatatttcccccaagattcgctgttcgtttgttctgggcaaaataaaaataaaatttcat

SEQ ID NO: 421552 - DNA, 299 bp, Oryza sativa nipponbare
ccacgcgtccgcaaaatttgtccatgaattgttgtcgttgctgcattaacttcagatcaaacagaaggtgtatgagtcatttggacatatttctgggagaaattcttggagcagtttacatggttgaaggatcaggactgaaaccttcagtggaactcaagccagtaagtgttattgccaacacaaacaaaagcacggacgggcagattgtcatcagcaagaatagtgcaaagctggtaagggtattgagcgatttcgatgggtgaaatatatagcaaaacaattggcaaaattctttt

SEQ ID NO: 421553 - DNA, 105 bp, Oryza sativa nipponbare
  unsure (1)..(105): unsure at all n locations
ccacgcgtccggccaacagtgcgtggaaacgtggctggctatgtgcattgaatgctgcggcccacaacgcngggtgtgagattaactactagaacctatcccaag

SEQ ID NO: 421554 - DNA, 214 bp, Oryza sativa nipponbare
ccacgcgtgcgctcgagtcgccgccgccgccgccgctgctgctgcttaccactaccgcgccgcgcactccttgcgctaagccatggcgacggctatgatggctgctaccgccacctcgtgctcccctcgccgcgcgccggtcgtcgcgtcgtcgtccgtgcagccgcccaggcggcagcagcagcagcaaccgcggaggggattgaagcagatg

SEQ ID NO: 421555 - DNA, 344 bp, Oryza sativa nipponbare
ccacgcgtccgccacgcgtccgtgcggttgcgcgggaagctcgcggtcgagggaggccatggcgttcggcggcaggaggggctcgtcgcggtggggcctcccggtggtgaggtcggaggcgctcggcaagctgggcccctcgttcggcatcggcgccggctgcggcgtcggcgtctgcttcggcctcatcggcggtgcaggaattggggctggattccctggtttgcagttgggattgggagctggtgctggatgtttgataggaataggttttgtctatcgtttttttatcggtatttctttttattaaaactattatattttttacatttattatttattat

SEQ ID NO: 421556 - DNA, 217 bp, Oryza sativa nipponbare
ccacgcgtccgcgccgccgccgccgctgctgctgcttacctcctccgcgccgcgcactccttgcactagcccatggccgctgctatgatggctgcgaccgccacctcgtgctcccctcgccgcgcgccggtcgtcgcgtcgtcgtccgtgcagccgcccaggcggcagcagcatcagctaccgctgaggggattgaagcagttgccggggcttcgtg

SEQ ID NO: 421557 - DNA, 304 bp, Oryza sativa nipponbare
ccacgcgtccgcccacgcgtccgccccgctccgcgccgccctcctcctctttctctcctcctcgccgtccccgcgtctggcgctccccatgaacccctcctcctcctcctcctcccgcggcgccgcctcctaccactccaaggccgccgccttcgcctccccgcagcctcgcggcggcggcggcggccgaggggggcgacgcggcggcggaagaggccgcggcggcgatgggagcagaccgcatcgacgccctcagccgcctcctgactcggattttgctgcacatggtgtttgagctgaacct

SEQ ID NO: 421558 - DNA, 187 bp, Oryza sativa nipponbare
tgcggtactcggtctcgaattccacggtcgacccacgcgtccgcgcgcgtgcagctgccgttgccgacctcgctctctctcgcaggccaccgcgccgccgctcgccgccggcgccgcacgccgtactgggggggagagggatttcgaaagatgcctcctaagcgttagacttagatgtcctgtactt

SEQ ID NO: 421559 - DNA, 355 bp, Oryza sativa nipponbare
ccacgcgtccgcctcaagaagctcaccgccgccggcaagcttcttgaggttgccggagaggagctcaccgccgccggcgagctggccaaggtcaagaactccttcaagctctcctccacccgccctgccgctccggccgccgccgacgccaagcccaaggccgcccccgccacgaagcccaaggtcaagaccaccaaggccgcgaagccggctgccaaggcgaaggctcctgctaccaccaaggccgcgaagccggcgaccaagaccaagatcaaggtcgccgccgcgccggcggcgaagcccaaggcgtctcccaaggcgaaggccaagaccgccacctcgccggtgaagcccc

SEQ ID NO: 421560 - DNA, 67 bp, Oryza sativa nipponbare
atcccgggcttgcattgtgtttgatcctagatcctgaggaggctgacgtgcacggacttgggttgcg

SEQ ID NO: 421561 - DNA, 440 bp, Oryza sativa nipponbare
ccacgcgtccgcggcgccgccagggcctcctccttactctgtggttttttcaggagctgaaggctggtgctgaggcataccgaatcgttaaccactctcacctcattatattttcttacaaatatatataactattaaatttttttaaaataataatttaacatttaatattctattttatttattaaaattaaattaatattatttaaactatataattttatatttatttacaattattaataatattatatttattttttatacaatttattataattaatattcataattatatttttattttatttatataaatttttatatatataaacttttcattatataatttattatcacatttatttaataattatattatattatatatttatttatttatttcttatattatatattaattcttaatttttttttat

SEQ ID NO: 421562 - DNA, 317 bp, Oryza sativa nipponbare
ccacgcgtccgcccacgcgtgcgctgaagaccatgatcacaaccagcatgcgatatcaggctcagatgttgccggcagggacgtatggactgatatggtacaaggacactggtcagcatgtaaatggggaattctatatggctggggtccacgccaacagcttactggaggactacagtgcagagtgaatcgcgtgcatcgcgcttacttgactctggtgcatacggagctgtctactacgattatagaactcgtttgggcacatcagacagctggatatctcagcgatcctctacttcaccataagaaaagggttg

SEQ ID NO: 421563 - DNA, 136 bp, Oryza sativa nipponbare
  unsure (1)..(136): unsure at all n locations
ccgacccacgcgtccgcgacgacgacgcattccgaattattcaagaaatttaagaagcgaacagaggangaagaggaaagatggcttcgtttgcatccacggcggccccttggggatgcgtcgcccgagctcggcg

SEQ ID NO: 421564 - DNA, 295 bp, Oryza sativa nipponbare
ccacgcgtccgcggaataaagcaagctgagattaatctgtaaactctatcctctctctctctctatgacatgacggctctgggcaagcaaggtcctccagttgagcatgggtccttgccaccaaatgtgaggagctcccgtcaaatggtatgatgttaatatacctttcagcttgcaggcgaggtgggatcttctggattttgccctgatacaaatgagatggtgtgagcagcttgaataagtttgatatatctaatactagtcccatcaatgtaaatgaagacaatggacctcg

SEQ ID NO: 421565 - DNA, 452 bp, Oryza sativa nipponbare
ccacgcgtccgcccacgcgtccggataattgctcctgtatttttttttttgactggagagcactggtcagtcttcagagccattgaatcaaggggccagagttggtttgaacttgatgcctttgtggcagtttccttgtcctgtgtgtttgggctgctcattagcttctttggtttcgcagcaaggaaagcaatctccgccacggcttttacagtaacaggtgttgtcaacaagtttctcacagttgcaatcaatgttatgatctgggataagcatgcgagttcatttggtctggtttgcttgctcttcactctggctggcggggtactctatcagcaatcagttacattaaaagggaattcttcagtgcagcgtgaggctgtagctaagcaagggaaggctgataatgatacagctgagttagatgaggagaagcaaagcttggtatcatc

SEQ ID NO: 421566 - DNA, 443 bp, Oryza sativa nipponbare
  unsure (1)..(443): unsure at all n locations
aggcgacgacccacgcgttcgaccgcgcgcgccacggngagcttgcctacccattcagccatggcggcctccctggtcagagacttttccatgggctgtgacatttccacttgcatcgtttgtgaggaaacttactgaaacagtgtggcagaaaataagtgatccaagaagtatacagggcatactcaagcaagtatatgctgaccactcaacgaatgtggacatggtgttctcgcgtattatagagacaacacaacatccagcagctgctgcatcatttgcatccattatgtgtgctccaaagggacaaatatccttcgaagaagctctatcttagtgccaaaggcagggtattcccatatctcttatgtatgggagagaagatccctgngttagacctatttgggggattaaagtgaaacagcatgtgccagaatcaccgt

SEQ ID NO: 421567 - DNA, 242 bp, Oryza sativa nipponbare
ccacgcgtccgcatcgatctcctcctcttcacaagctttcgcgtgaggagacacctccatcgatgcatagccgccaccgcgaccgccgttgcggcctctctgtccgtggccggggggctcgggaggccgttggctcgcgtctcgtctccggcggcgccgatgaaagccgcctgcccggcggccgcactgcgtgccgttgttgtccgttcgttgttttcatgcgtgcccgtgaggtttcattt

SEQ ID NO: 421568 - DNA, 420 bp, Oryza sativa nipponbare
ccacgcgtccgcatacaatgacgtcctatcatacggccacgcttccgccacgatgatgccacatggggggaggaccaaggcaacccgtcacatacccaccacgtaggacaaaaccgcctctaaaactagattcgcaacggattacagagccggggatgaaatatacccggctacacggttgaggaatgctattcatacacagccatgagtacgagggagagatagtggacttacaccactccatgtccgtcgagacacccgtgttcggatggacccgatgtaactcggcatctgcgaaatgggcctgacctgatgcgaaccatatgtcccttaataagccgtcaacagagtgggccaaactcggaggaaaaaagaaaaaacaaaaaacgagccccgtttctaccgaggacagtggccaac

SEQ ID NO: 421569 - DNA, 54 bp, Oryza sativa nipponbare
ccacgcgccgccggacatcaaagcaaagccgcaggttattttttgcagaacacc

SEQ ID NO: 421570 - DNA, 323 bp, Oryza sativa nipponbare
gacccacgcgtccggattgagatggcggcgccagatgtcaagtacttttttttcgtcggtagcattgtctgaggaagggtagacttgttacccgatactcccaacccccccaaccttcatattcattcttctcaccttattaacttcagcgttacttcgacggcacctgcttttgcattttaagcttcttatgtgactacatctctaacatcttcatgtttccgatgaaagcttactacctcatttacagctaaacattcaacattgcaaatatacccataggccaatctctcattattatgttgctttgctgtttcttatac

SEQ ID NO: 421571 - DNA, 245 bp, Oryza sativa nipponbare
tcccgctcgacccacgcgtccgtctgcttctgcggtcatctactcctttttcgctatcctactgctccttgctatggtcctgcctagcatccacgatcactctccctccacccctttacttttacatccactctaccttcatccctccatccatttatcccttttcctgcacatatctcccctgtaaaactcctccatcatcccttcttaccacatcaaccttcacctgtgattctagatttcaa

SEQ ID NO: 421572 - DNA, 59 bp, Oryza sativa nipponbare
ccacgcgtccgaaaaaaaaataaagcaaaaaaaaaaaaaaacttttttttttttaaaaa

SEQ ID NO: 421573 - DNA, 417 bp, Oryza sativa nipponbare
ccacgcgtccgcccactcgtccgcccacgcgtccgagccccgttcagcgccctgtacgcgccgctcctagggttctgcgtcttcaccgggatacccacctccggattcttgtggttcaaggccgtgcagacggcgaacaaggaggcggaggagcaggatcgccgggacggcttctcgtgactgattcagcatatgaacatacgcatttgcagagtaattaaagtttgtgaattactgcttgtgattcgtggtgttaattaagttggtgacgctgaagaggggagacggatctgcgtattgacgcaatgaggagatgaattagcaaggaagaaatggcgatgttcaattgtacatcaccgaagggagctagctgttgaagtgaaagtgtaaactctgccttggagttgagaaatattg

SEQ ID NO: 421574 - DNA, 458 bp, Oryza sativa nipponbare
ccacgcgtccggtgctattttgctgtggttcatgaatctttgctttacctgtaaagctgtggttgatatagttctttgggagctggattctcttggtaattaactcaatcacctctgtcattggtggattaactgtcttcatgcacctttacgccatacatgctttatgtagtgtgtaggcctcagggataaaaatgtatttaacaatatggtgtatatacaagcttaggcaaaatttccagatacaaacttactcctttagccttctcctaaaaattgcttactattatttccctggagctgtcctcaattttctcaacaacgctcatattctagatgtattagttatagcaaataatgtgattgctcagcaggaagttcaaggatatctgaatatttgttggcaaatgatgtgttcagtcctaagaatactcttgcactgtttcaagctttggttc

SEQ ID NO: 421575 - DNA, 458 bp, Oryza sativa nipponbare
ccacgcgtccgatgagatggttgatgatagctaggctatggcttagattatagacaagatctacatattgagcagcgagacaagcatctacgacacgaaaaataccaccataacagaacatggcttatcaaggatgctcgcatcgcaatcgaatacgcacatcgagtgctagagtggacttgtcgccaagacacctacaacaacactataaaactcatacttgagagtggtatccagcatacttatacgcctctacctgttacaatatcacattcaccgtctgcatcgccaccacctacatacggagtttatcattctacagatcaatctacagtgaatgtatgtggacaagtttctatcaatatagcacatgtgtcctagagatagattttctttaccttgcaatatccaacaatttcaatgttattttagtggcgtttactatacatattcaacca

SEQ ID NO: 421576 - DNA, 412 bp, Oryza sativa nipponbare
ccacgcgtccgctccctctccctcaacaattctcttctcctctccacccctccccaccggctcaggtccggtcctccctcccaatccgatcggaggaggggagcaacggcagtgcggcgctccccctctctccctccccactggaggagggggagcgacggtgacagcagcgatgcagacatgggggacgcggcggcggcgtggacggcgacgtctgcatggatgggccgacgacggcggtggtggcggctccccctctctccctccccgctcctagatctggctggaggagggggagcgacgacgacgtggatggcgacgacggcatggatggggcgacagcggttgcccggacggcgacggcggtgcggacgcggttcccctcccctccctgtcctagatccggccccta

SEQ ID NO: 421577 - DNA, 304 bp, Oryza sativa nipponbare
ccacgcgtccgcccacgcgtccgggattgaatggctgcttatacatatgtactgtgaagaattaccgtgtgtatggatgcaggggcagatatactttgggggtggcgggggctcaagcctctactgttagtaccaggactatgagagttctacgaaacctccactaaattttttattttgccatacgtatatgagaagagggttatagttttatttaattagtttgttcagattccttgttattttttcatggatctaccaccgtgtttatgaataaattttggtactcctacctattatggcc

SEQ ID NO: 421578 - DNA, 229 bp, Oryza sativa nipponbare
  unsure (1)..(229): unsure at all n locations
ccacgcgtnccggtgatcttctcctcctcctgagtcgtcgtcgtcgtggtggtgctcgtcctcctcggcgagagaggcttcggggggcgggagatccgggcggcggagatggcgaagggagggggggcgctgctgccgatgtccgcggaggcggggaagggcaacgggggcgggggcggcggcggcgactatgccgcgctgttcaaggggtccgccatgacgcggcgcg

SEQ ID NO: 421579 - DNA, 485 bp, Oryza sativa nipponbare
ccacgcgtccgcccacgcgtccgcaggacaagaactgggatcggacccagttcttcaaagccgacctctccccgctcgaggtaacaacaatttaacagcaagttgttcgcttcagtttctgaatttttacctgaacaattataccgtttcatcatcatcaacaacaaaacggagattaattgcagttgattagtcgtcgcgtacttgttccaattgaaaaacagttgacatttcacgtgttgttcaatcgtttgtgaggataagaaggaaactgctagtgtcactgtcaaagaaacagagttttgcgagagtatatatcttatctaggggacgatgttaacgtgtacggttgcaccagtagtaaaccacgggtagtatttttctaatggaaattaattctgataagggtcattgggtgcattattagctacgcaaacatcgtttcttttttatctgtcatactgctcacgtactgtttataagag

SEQ ID NO: 421580 - DNA, 467 bp, Oryza sativa nipponbare
  unsure (1)..(467): unsure at all n locations
cgcacaacatgacgattttgagtcntggcaacgaattatccgctgggatgcagtttttgctaatggtgaatggctttcccactccccatctcaagctgtagtttacagggagaaggcaattgaatctgctaaagctggtggcctgaaagattacgaacatttggaaccacataggatccgtcatgcattacgccttgttccaatttttgaggcttatgccatctatgacccaaaaattgtatattgccagcgcatgagctaccttcttgcacctttacttgccgtactggaagatgacaatgaagcctcctgttgctttgctggttttatgaggaaagcccgtcatattttcaggcttgtgaatttggcattcgcatggcttctgtacatggtagccaggataattaaattcaaggactttcatccatacagacattttgagatgctcaatgcttaggtctgttttt

SEQ ID NO: 421581 - DNA, 198 bp, Oryza sativa nipponbare
cacgcgtgcgcccacgcgttcgattactcgtgagttcatacactcatcttgttgatattttactgctgtttgcgggcaggcgcacagcttaccaacgattgattacactcttgtagttggttctaaacgaaagcatgtaccaaggagatttaaccctacctcttgttgtgcatgcagtaaaaggtggttgtgtgcttg

SEQ ID NO: 421582 - DNA, 367 bp, Oryza sativa nipponbare
ccagcgcgtccgcccacgcgtccgggaaaagaagatgtacatctgatattagtgtgaactgctctcgtagctcttaggatgccaggctaagctctgctaagctctatctgatttaactcctgcacaattgggcagctacttttgcttctccctctggctttggtgttggaaattcttctgttccgttcctgccacaccaaccaccaaggttcttgcattcatcttccttttccttccatactttggctctaaatctcattaggtcttgttcttctgtttcctagttgcctccaaaaatgtaaatgtgaagaaatagagcatttgtatccaatcttcagatgcttactaattgatttccctttaaaaa

SEQ ID NO: 421583 - DNA, 479 bp, Oryza sativa nipponbare
ccacgcgtccgggagaaggcaaacaacacaatgtttttcaaccaagcaactatttactctactccaagtatctaaggtcagggtaggctgaagaatcattgtagcgaatggattatcaacaatcagatggaatttatgacatgccagatgaaccattgtttacactaaatttgaggttgagccacagcaatgacctggatagagttcataaatctttcaccagcaagattgataaggcccgaacgtatctcacgggtaggttcagaaggattgtcaaggtcaaaggttctaagagaaaggagttcgttcttacccctgaaggccctgatgtttttaccattgctttcactgatggtactaacagagtaactgccataattgaagagagaaatatgtggttgagaggtttccaaactgcagacggacacatttttgagtttaatgatgaacacggcaatgaatggaaggttgcttatctg

SEQ ID NO: 421584 - DNA, 221 bp, Oryza sativa nipponbare
  unsure (1)..(221): unsure at all n locations
ccacgcgtccgcccacgcgtccggcagctgccatagttgcaagtgagctatgatcncatagaagaggaggaagaagaangggtgaatggcgaccaccatagctgccctcgcaatgcttaagccgtccaagatcgtggcgcggtcatcgccggcgccgttggggagcggcagggtgcctagcatctcgctcaagagcctggccaagaagggcatgtcggtgt

SEQ ID NO: 421585 - DNA, 361 bp, Oryza sativa nipponbare
ccacgcgtccggggcagtgaagggagtgctccaggatgtcacttcccttaatgattccaagctagaatggatggaatagggtttgaaagattggaagatttgtctggccaaaatcaactcttattgctcgtaaaagatattgttaatcattttgattgattccaccagtcagtaccctatgttttacaaacagttatacatagaagaagaaaatgtcaacatgtcaataataattcaccttacctagaggctagaagcaggtagacttgggatccgttcagtacttttggcactgtatattctattttgttcttttcatactgctgcctatggaaatgttgtacattccttactgaaaaat

SEQ ID NO: 421586 - DNA, 70 bp, Oryza sativa nipponbare
tacggtccgtgaatccgggtcgacccacgcgtccgcgacgacgcgccgcccgccgcgctgccggcgggac

SEQ ID NO: 421587 - DNA, 377 bp, Oryza sativa nipponbare
tccctggtcgacccacgcgtccgcccacgcgtccggtttcctagttgtagttgcctctcttttcccgctaatcaaatcccaggaccgggttaacaagggaaagagagacagcaagaagaaaaccctcccgtgcagatcagatcggcagattgcttcgaagcaaacctttgactcctcgaccgatcgagcaagcaagcaactcgacctacctatttacggatcaccacgcgctcggacggatcgagcacggatcacctacctattgatcgatttcgtccgaagcctgcggctgtgtgcaagcatgctggagctactgctggtggggtgcagcatcgtggtgctgctccttcacggtgccaactttctttttcgtgcgc

SEQ ID NO: 421588 - DNA, 284 bp, Oryza sativa nipponbare
ccacgcgtccgatctccagtaagattcaagggttgtacgcagccatcatctcaaaagtacaacattcagtgggtgggggtcttggggaaatataaacatataacaaaacaagtacgtacaagaagagagtccacaaaataacagacatcgttcctaagataccctactaaaactatggggtgcaggcacaccagaagctgggcttggaccaatgatccaccaacttaaatgattgtagacgcagccacataagtttttttggttgccatggacagttattgggc

SEQ ID NO: 421589 - DNA, 167 bp, Oryza sativa nipponbare
ccacgcgtccggcaggtgcgaggtgaacgagtccatgctggattctgtgaccgtcacccacgccccgctcacgcgccggacaccgtgctcgaggtgagcggcggcagcgtcgccagcaacggccacgtgtcgctccgcctggaccgcgccggcggcgtcggctccgt

SEQ ID NO: 421590 - DNA, 262 bp, Oryza sativa nipponbare
  unsure (1)..(262): unsure at all n locations
ggcgacccacgcgtccgcccactcgtccgggaataatggctcccgcctctttccttancaatggccctcgcgccgccggggggcgatcaccatcaccatcaccatgtcccgcagctgcagctccctccgtctgtctccgtctccatgcccctccgctccggtttccttggccgtgcactgtctgctgcggcccacccacagccgctgcgtgccgccgagagccggcgcagcagcgccttgaccgtgcggatgtcaggggacg

SEQ ID NO: 421591 - DNA, 498 bp, Oryza sativa nipponbare
cgacgcgtcacgagctacagctattaatatctcctactgcaccttttgcaaatcatagtgcaactaagcatctccctgatttttgtgtgctctcttttcattttagaatggcagatgagtatgatcgcagcagctacagaaggtctggtgctgatgacgaggaaggtggctacaacaagaccaacactggagattatggccgcagcggtgacgactacggtcgtgacactggcctcttcaacgagtccggcaacgacgacaatgagagtggctacaagaacaccaacactgatgaatatggcagcactggtagctacaacaagtccaacaccgacgacttaactggcggcttcaacaaatccggcacagatgactacagtggtggcggcggctacaacaaatctggcgccgacgactacagcagcagcggtggctacagcaaatccggcactgacaactacagcggcagcggcggctacaacaaatccggcaacaatg

SEQ ID NO: 421592 - DNA, 51 bp, Oryza sativa nipponbare
ttgaaaaacaaataaaaaggaatcctattttccatatatgaaataaatccg

SEQ ID NO: 421593 - DNA, 394 bp, Oryza sativa nipponbare
ggcgggtggctccgaccacgttctgctccgcgccgtcgctcggccgcgtcgggtggccgcggcgggagggtgccgcctggctgctgtcgttccgcgccggcccggtttcttccccgtcgtcggcggcggcgggcgatccttcccaggcgctctccgcgctgctcccgctcgtcgtcgccgccaccgccgtcgccgcgctcggcaaccccgctaccttctcatgggtctccaaggagtactacgcgcctgcacttggcggcatcatgctctccattggcatcaaattatccatcgacgacttcgcgttggcattcaagaggccggtgcctctgacgatcggctatatggcgcagtacattgtgaagccgctgatgggcgtgctgatcgcgagggc

SEQ ID NO: 421594 - DNA, 270 bp, Oryza sativa nipponbare
cgcctttgtcctttttttttttttttttttttttttttggcattcacaggcacactcacttaggcaagggccaagattgatcgatcgagggacaggcgcctgctttagccatggagcagggtgttttaattttacacaatacgaaggatgcaaaaatgtgcttcaccattaaaccaactttttgtatttaatggcaggtctcaaataagatgaactctgttttgtcctaccaaacaaaatattttcttgaaaaaaaccggaaggtctccc

SEQ ID NO: 421595 - DNA, 152 bp, Oryza sativa nipponbare
cgactgtatatactctatgggaggggtttactataaaaggacacccataggcccccaatcgaccaccttcttaattaatcgataacccatgggtttaatttaccttttattatggccactcacaaaccacattcatgtgggtgggtcttctg

SEQ ID NO: 421596 - DNA, 210 bp, Oryza sativa nipponbare
  unsure (1)..(210): unsure at all n locations
tattcttaccgcgttttcgttcattccaagttttcaaccggggccggaggaaaaattacatcagaaaggttgctacatatcacccgaacatggaatacgccatcaccagcttgataattggacttgaactacgacggcttatattagcacgagcagtacatggccttagatnggactcatctcttattatatgcacacatagcaatgctg

SEQ ID NO: 421597 - DNA, 115 bp, Oryza sativa nipponbare
tttaatggttaataattcacaagtaggaccatatttatccataatagggggccatgcaaccgtatttactatgggtaaaagggggggaaaaaaaaaaggatgaaaaccaattcac

SEQ ID NO: 421598 - DNA, 235 bp, Oryza sativa nipponbare
atctggctgaggggaaaacatttattgtccattttgaaatgggatacatttgcctttttttttcaaatttacatttttgaaggcccctttgaaaccacaaaacaaccccctatggtattttacgccaaaatttggatggaaaagggaggtgatttcctcaaccttttgttgctggggtgtcaggaactgtcccaaaaaatttccaacccctaagcccgagggggaaacaaaagtt

SEQ ID NO: 421599 - DNA, 132 bp, Oryza sativa nipponbare
gggttggtgttttttttaagatttttgttattttattatttttttttttttttattaaaaaaaaggggtttaaaaaattttccatgggcacaaatgtgaaaaacaaaattacattatacattgccgaatcaa

SEQ ID NO: 421600 - DNA, 354 bp, Oryza sativa nipponbare
  unsure (1)..(354): unsure at all n locations
gggggtgggttttttaaaccaagcaggcagcctgtttgtgcccttgtgcaaatgcattttatttatacaaggggaagggcctcaaattagccaccacatgaacacacacatgttccattatggatcgatctacaagtgcattaccgggtgatgcacttacaaacaaaagatttacttgaagaagtacgggaggtcnagcttttcctgggggnatggcatgggntacatacttaagcgccgtaacgcctggatgagccttgggaaaagcaatggctagcgaaggggttatactttaaggttgaacgtttgtactcggacctggctgaggcatttcttaccccttttacccgaaaa

SEQ ID NO: 421601 - DNA, 184 bp, Oryza sativa nipponbare
gggggggcgtcaaaaacaacttaagatttatttattcttaagtgcttgttgatacaatatcaacatggatggtacattgccggtttcttttgaacaaacattaaaacaccgaatccccttttgggccttttgccgattctagcctttttttgggaggacattgccaaaaacaaattttgtcaac

SEQ ID NO: 421602 - DNA, 99 bp, Oryza sativa nipponbare
  unsure (1)..(99): unsure at all n locations
atcgcacgcatgcacgcgtctctgatcttctatagcggccacccttcttcctttttttttttttttctaatgccacacacaccatgcnctttttttgct

SEQ ID NO: 421603 - DNA, 406 bp, Oryza sativa nipponbare
tgttttgaatacctagatttcgtttcatttctgagagagaccttacggctcaaaaatgatacaattgtacagatttacaggctgtaacaagttgattccattgtttttttctaaaaaaaagaatggcatctcctaccaaactatatatgtatggctataaagggataaactcccccatgtaatttttttacagaataaaagagaggtgacctattcactctatcccaaaaagagttcaactctagtgatgaatctagacaaggacagggggtgtgtgtatattaatccctagagttggacactttttgggatagagggagttttgtcttgccatgcttctggtacagattatgagcttccagcaaagccaattggaatgatatgacaagttgacaattatatcatt

SEQ ID NO: 421604 - DNA, 143 bp, Oryza sativa nipponbare
  unsure (1)..(143): unsure at all n locations
ttttctattttttcttctctttttctctttttttttattttgggtggggttgtcatagagcgaagagnnctcggaacacgacatttttataatntaattttcccccccattaatcccttaatttacctttacaatcatttttt

SEQ ID NO: 421605 - DNA, 166 bp, Oryza sativa nipponbare
tttatttttattttttttaatttttattttttttatggtatgggttttttattgttggagttattaaattatttattttaatttttttatttattaaatagttataattttttattttttttttttttttttgtgggggaagggagagaaaaaataattggattta

SEQ ID NO: 421606 - DNA, 324 bp, Oryza sativa nipponbare
ccacgcgtccgcccacgcgtccggcttggaacagaagttgggtaatacccctttctcccaaaataaaaaagaaataaaaggaaaaaaaacacttatctgtttcagttctttgttcttttcactcaatttaaggaaaccggatgtactacacacaagaaaatggctgttgtggattgccagctcgtgtgatcttctgtactagatggccatgatatgatactgctctttatgttgaacgtagcaaacaattaatgcaaatctcacgaattaaatgtagacatttctgtaaccattaatgggtcatctcagtggtgcaaagatact

SEQ ID NO: 421607 - DNA, 230 bp, Oryza sativa nipponbare
ccacgcgtccgtcgttgtttactttgcttaatttgcttgccctcatcctcatggctgcggcggcggcggctgcttctgcttcccatctactgctgccggcgcacgcctccaccttcccacacgcaggacgagcacgtacgtcggaactggcaccggccccaacggcaggtcagatcatgtccgcgccggtgcctccaacggcgggcatgaccgaagatgcaagaccacta

SEQ ID NO: 421608 - DNA, 85 bp, Oryza sativa nipponbare
tccgattcccggtcgacccacgcgtccgtccactcgtccgttgatctatatcctacaacttttttttagaggatccaagcttacg

SEQ ID NO: 421609 - DNA, 329 bp, Oryza sativa nipponbare
ccacgcgtccgccaccccttcgatcccgcgtggagatataccgaattcagatggacattgacttcttgcgtacatttcacatgagatgcacggagagtgtactcctgaggccgtatggtgctgaccgttgctggatagggaagagcacatgatatgatctcatgcaggatgggccacgactgtatgttggtagatttcacatgctctacttaatcttgatggttagcgtcaggtggccattgataactttaactttctcaacattgcagcgtactgtcatgcagctagggagctgccacatgtgaagcactagctctagctgcttgaca

SEQ ID NO: 421610 - DNA, 351 bp, Oryza sativa nipponbare
ccacgcgtccgcccacgcgtccggttgtctagctattatttgtggggaataacggctcccgccagggcgcggggcaatggccctgacgccgcctccttcccattaccatgaccataaccatgtcaagcagctgcagctccctccgcctgtctccgtcttcgtgcccctacgctcagggttccttggccgagcactgactgctgctgcccacccacagccgctgctcgccgccgagagccgccgcagcagcgccgtgtccgtgcggatgtcgtgggacgggcccctctcctcggtccgccttattatgcagggccgcaacgtcaagctgaatgagaaggtgaaggagcacat

SEQ ID NO: 421611 - DNA, 232 bp, Oryza sativa nipponbare
atccacccaaatcccaccccaggtaattactttttccccaccaacaaaccgaacatcttagcaacgactactactaccccccgccgcgtcattccagttccggtcccgcctacggccacgactcagcccctccgccgggtccctacggccaagcgcctcctccggctgatccctacgctcgccaacccggctttccacgactacgcttaattcttctacggcgtatggggga

SEQ ID NO: 421612 - DNA, 80 bp, Oryza sativa nipponbare
ccacgcgtccgataatactggttaacataaggccttataacacacggaatgaattgtcgcggctagggtgacagataagg

SEQ ID NO: 421613 - DNA, 414 bp, Oryza sativa nipponbare
  unsure (1)..(414): unsure at all n locations
ccacgcgtccgcccacgcgtccgctcaccttgcctcgccctcgccctcgccaccatccaacgacgtcgactcgtcgccggcgacgactccggccgcgcacatacgcctggtaatacgtactacgcgggaaccaaatcttacgcacgcgcgcacgaacgcccatggggctccttgaccagctctgggacgagacggtggccggcccgcgcccggactccggcctcggcaagctccgcaagtactcctccttctcgccctcctcctcctccgccgccgccgccgnccccgggacggcgccgccggatgcgccggccgcgacggtgacgcgcagcatcaccatcgtccggccgccgtcgctgtccgtcccgtcgcccgcccggcggcggcggcgagtacagcttgtccgtgccgttc

SEQ ID NO: 421614 - DNA, 435 bp, Oryza sativa nipponbare
ccacgcgtccgcccacgcgtccgccacgcgtccgcccacgcgttcgaaaaaaaaaaaaaaaaaaaaaaaaaaaaaaaaaaaaaaaaaaaaaaaaaaaaaaaaaaaaaaaaaaaaaaaaaaaaaaaaaaaaaaaaaaaaaaaaaaaaaaaaaaaaaaaaaaaaaaaaaaaaaaaaaaaaaaaaaaaagggggggggcgttttaggggttcaaattttatttccggttgtttggaagttattattttttttttgggggaactaaaattaatttaatgggcggggttttaaaaaggtggtgatgggaaaaacttggggtttaccaaattaaatggttttgaaaaaattcctttttttccaagttggttttatagaaaagaggccggaacggtttgtcttttcaaaaatttgccaatttttaaggggaaaggggacccc

SEQ ID NO: 421615 - DNA, 162 bp, Oryza sativa nipponbare
ccacgcgtccggcaccggacgaacaccatgccgccgccgtcgtcgcttccgtccaccgccgccgccgccaccggggccgctgcgtttctccggccgtcagcgcgcgcgcatccagcaagcgccttcggcccgcccaacgccggcgagtgccttaggcgcttg

SEQ ID NO: 421616 - DNA, 230 bp, Oryza sativa nipponbare
tcccggtcgacccacgcgtccgaaataaaaaataaaaaaaaaaaaaaaaaaaattatattaaaaaaaaaaaaaaaaaaaaagggaaggggatggactgtctagatggcgagctcccgccggcggcgctcctcgatttgcaccctttaggttcttctttctcctgaacggtattctttgtcttgtgggttgcttcctatcgccttgcctggcaaggccctgcctggctcct

SEQ ID NO: 421617 - DNA, 403 bp, Oryza sativa nipponbare
ccacgcgtccgaaactattcccaaaaatgtataattagtttacactttacagtccaattcatgtactctagcaattcaatagccaatttgtttggattatagcctacatctctcacatttctggttgcattctgattggcatactgatttcagcatatactttgttttaatttttttttgctggcctgtaaattcactgcacgcctcttttcatttagtagttatttagtttaccatttggctgcaatttaatacatgctatgctgtgcaccatcttgcaattctgaatctgagtaacccaattgagcaattcactcttcaacttgtgtttgggacatacaatttaaatttgaaagagattcatacgcaacaattttattcactactggttgacagataagat

SEQ ID NO: 421618 - DNA, 206 bp, Oryza sativa nipponbare
ccacgcgtccgcccacgcgtccgcccacgcatccgcagttgcttcctcagggggtacgtgtccacgggggccttcctcgaggaggtcaaccacccctcccgtgacagctcccaaaacgagctcaagggcatcctcgaggtctgccactggccgctcgcgtacatcgaccttcaggcgctccgacccgttgagcactcatcaacgcg

SEQ ID NO: 421619 - DNA, 177 bp, Oryza sativa nipponbare
gtcgacccacgcgtccggttggaggcctgccgaatgggtctgatgggatgaaagggttggggattggcctggctggcgagaacaatacaggggatctgtatccccggaattttagcattgcaaacagcactatggagcaactggcagagctattggtgtcggaagaggtgccaagac

SEQ ID NO: 421620 - DNA, 58 bp, Oryza sativa nipponbare
gcggcgcacgacccacgcgtccgcaagaactaaaaaaaaaaaaaaaaaaattaaattt

SEQ ID NO: 421621 - DNA, 132 bp, Oryza sativa nipponbare
  unsure (1)..(132): unsure at all n locations
ccacgcgtccggaaaattttgtacctttttacacacataggtccttactgtgggttctcaggatgctttcaacaagaagggaaccttcntcatgtttaccttgcttcattggtacatagagtcctcacccct

SEQ ID NO: 421622 - DNA, 304 bp, Oryza sativa nipponbare
ccacgcgtccgcccacgcgtccgccggagttgatcaagctgttttcaaggctgagagaaatgaagaaggaaaatgctggcctctcggtaatggacaccactaggaggagtattattgctcggatgaagcaactgatgcctatatatacccaggttgctacactgtttgcttaattgcattacacctctccttgaatggctgacaataggtgtcatcggataggttcttgttttcgaagatctttgatcgttttgcatttgtaaacgcttttccgttttttcttcttctttcgctttatttctct

SEQ ID NO: 421623 - DNA, 340 bp, Oryza sativa nipponbare
ccacgcgtccggggacgcttgtgcatacgagggggctgcaatacgaaattgaggagatgtatactaatatcatggctgtgcatgccggcagcgtaatcattaatagggaaaagtgattcgacggctcgggaaggatattcgtggtccaccagcgaggacataggatattccatatgatgattgcagagattggcattccgcatgctatgtgggggggtgaactgagaatacaacctggagtcatggcctatgagagagcgagagctgctggctagccattgccttagaccgccttggtagcgcatatacattcgacagccagtgacattatgggaaaggg

SEQ ID NO: 421624 - DNA, 193 bp, Oryza sativa nipponbare
gccgcatctgttttacctggtgccgaatggaagaaaagatggtaactcagggcaactagggcagcttgaagctttaacataaaagcagagtttgggaggaatactggctcatcaagcggccggtttccaacattcttgcatgattcgcctgcaaattgacaggtcatctattatatgaggcagcggggaaatg

SEQ ID NO: 421625 - DNA, 261 bp, Oryza sativa nipponbare
  unsure (1)..(261): unsure at all n locations
ccacgcgtccggtcgccggccgctttccacatcaggtcgttccttctgcggcaggccgtcgtgcgcgcgtattgctgctccatgtgctcatcctcggacgcgtcgtccgcacctcaacgcgcagcttcgacgaccgaccttacaagtccacctatcctgcagcacggtggcccgccatggtcgttggagtaacatggagcttgctcggccgacgtcattatctacgaagctgngacgcggcatcagcgatggagcagcgct

SEQ ID NO: 421626 - DNA, 120 bp, Oryza sativa nipponbare
cacccaacccttcctccaccccttccgggggggattaccaaattcaagggctaacctaaaaaggtgacaggggtgccttcttaactttgattactaatttgaaaaaaccaattctaacac

SEQ ID NO: 421627 - DNA, 374 bp, Oryza sativa nipponbare
ccacgcgtccggccacgcgtgctaccacgcgtacggggagaggtcttgacatgcgcacattgatcgaagtaaggagatcacaactggcatataaactgtgtgatgagatggcttctgagatgttcagggagcatgcaatagacagttagcaaagaaaacatataaacagtcttgaacaacttgaataacacagcacaggttgttaaagaagacgagaagcatcctctcatttaatggtatgcttacagcactgatgaatattccgggagaagaaaggatcgacctgccttcttgggcctattacattcatgtgagacagtgatcatgaaaagagggttgaggatctaaagactctctatactgcctatgcaatg

SEQ ID NO: 421628 - DNA, 310 bp, Oryza sativa nipponbare
ccacgcgtccagcgagaccacgtgcaatcatgaagttaccggagaggctacctggagtgcctataatagttactgaagaacctacaatcagcccacaagttcttgcattgtctatagcctcatttgcgtgaggaaggccatcggagatgttggtcaactgcttcatgtgattccatgtatttaaccactgaaatccttcaagagaggaatttccggaatccgagctgtttgaagctgaagcatctgctggtatcacttctactggtgtattaactgggatttgaggccactgaatttcccaatgaggtcg

SEQ ID NO: 421629 - DNA, 402 bp, Oryza sativa nipponbare
ccacgcgtccgcggacgcgtgggcagctcgccatttcgacatggcccccgccgccgcatcatcgtccgcgctgctccccgaggggaccttttacaccggccggcccgtagcgggccggaccgtcgggcagcgccttcccacgagggtaagccggcgcgagctaagactactacagctcgttctagtgccgactgcctattcgttggcggcaggaggcggtgagcggaggccttccgcacgtccgcgatgggagcgcttgtcgagaaacgtgatgtggttcttctaggtgactgcaacagcttgctagtggacacggcacagggccgtctctgtaggttctttcaagggagaggaagacaaacgggatcttgcgacatctgtgattgcaaaggcaatagaaaa

SEQ ID NO: 421630 - DNA, 347 bp, Oryza sativa nipponbare
ccacgcgtccgccggagctccgttggcccgacggccgccgccgccgtccagtttgtcgtacctctcgtacggtccttagccggcgctaccttcttggtcggaccgctcgggaccgtgagcctgcctgccgcccaagtatgacgggaaccctcgctcgcgtaagaccgcggacaggtggggggccgggtccagaccatgcgcgacgtcgatccggtcccgaactaaggcaacacgacgggcggggtgatccaaaactaccacgactggatgacgcacgggaggcccatcatggagttcttgctgtggcggaggtgtaccggtgaccgccgcgaggggtgccagctgct

SEQ ID NO: 421631 - DNA, 391 bp, Oryza sativa nipponbare
ccacgcgtccgacctattgttgctactacaacatctagctggagtattcgaagaggacgaggaggttgagaaggttgcgacggactgagcgatggctacgagcgtgctgacgagctcttgcgcagcgaacattccgatcatagtacctgatactgagggatctagcacaccgaattgccttgcctacaacagcataaggggtgccaaacacaactctgtaccttggagttatcaacctgcctgtatagctcactactggaaatattgttgtctgcattctaattgaacaacttaattggggcctacactggttacatatgagatggctacgatagggaatcgcattcacatgttaacgacattgctaatgagcacactattagccatggat

SEQ ID NO: 421632 - DNA, 130 bp, Oryza sativa nipponbare
ccacgcgtccgcatgtactaacgtgtgaggataataaaagtttagaacccacataccatgtatctatcgtgtaatcgtaaaaaaaaaacttttaataaaacaagagaaggacggccacgatgttaggatg

SEQ ID NO: 421633 - DNA, 82 bp, Oryza sativa nipponbare
acaccacgcagctgagtgaggttggagcgtgcgctgaccatggttgtattaaacccgtgcgttcttgattaattaagcagct

SEQ ID NO: 421634 - DNA, 103 bp, Oryza sativa nipponbare
ccacgcgtccgaggacgcgtgggtgagagctgttctttcttgcttgcggacatggcagtatttttgcggggggtggtcaccctgatgcatccggccaagctcg

SEQ ID NO: 421635 - DNA, 73 bp, Oryza sativa nipponbare
ccacgcgtccgcttattcgtactattacgcatgggctgacgcgttgtttgactgagtatatttgtgcgggtgt

SEQ ID NO: 421636 - DNA, 346 bp, Oryza sativa nipponbare
ccacgcgtccgatcagtccctaagctacgaatgggagcctgtgaaacgggcacttctttctgggaagggtggagctgcacaaatcagcgggtaccggcacggtgaggtcgcgactataaatggcgacccctgccgctttaatgtgtgagactgggaatgtggacctcatgactcatggtccatctgcacttggttcagacgcaacgccttagcctgagctagacagagaggacgtcgaagctgtcttgttgtaccacggctgctggtaccaccagctactttggcagcccgttcgagatgttttaaattcgaccatgcctgagttagtaatagcccaagaacctct

SEQ ID NO: 421637 - DNA, 390 bp, Oryza sativa nipponbare
ccacgcgtccgcccacgcgtccgcaacaaataaactgatagttgaattgattgaaactatcaactctagggcatcctaattagtttatttttgatattccattggatcacgcaggtaccacagtcctatgttcttgagttgagccttctatttgtgcgtagtaccacgatatggattctacaatatatttttactgcaatttgttttttctcagtcattctggaagtgtagaagatatatatgctcttgtttctttgacctaggaatttggaacagttgtgttgacctcttcaaggtgtaatattacaatgttcgctgcagatacctcattacattggagggggagatgttccctttctatatttgttgtgcttgacaaaagcattcaac

SEQ ID NO: 421638 - DNA, 403 bp, Oryza sativa nipponbare
gctccgaagccttggtttccaaatcggcacgagaaaaacatgaagtaagcatcagagacgctgacctgcagttttggctgatcacacggtctcgcggtgccttcattcaaaactcgaaagcttctacatgctgcaaacctacaaggaacaagtgtattgagaactgcaacaaaaaaccctttacgttgctaaggtctgcaacaccagcagtacttgttagcagtgcaaaaagagcaggaaagctgttagcagtgcaagtatgtttaggaccagtaatgactaagctaccaaaaaactcaattagtgaaatgcatattgtggttaaatttatctgttcgataaattctgtagaatacatctagaataagagccaggaaaagctgaaagtctggagatttggcat

SEQ ID NO: 421639 - DNA, 126 bp, Oryza sativa nipponbare
tttctaaaaccaaaagtgggtctttttttattacttttaatacttaacacactcttcacacacacacaataatttcattcacattatacaattagatacgaacaatctacctaacttttatataac

SEQ ID NO: 421640 - DNA, 335 bp, Oryza sativa nipponbare
tcaaaactatcactggatggggcttaagaaaacaatattttgcataaactggtccgcaaaataaaaagcaactacggcggacttcttcttcctcctccgtcctaaccaaccaaccgttggttcccaatcatcgactgaatcgagcatagatgacatgaatctcctattctgcactcaaaaaacataaatgcccacgttctcttaaaaggaaaaaaacaccctcctaaatagccgcgattagacgtccaaatcaaaggcttctcttgagcttcatgactccctttgggacctccggtcaggggcacaagctccattcttctattgctcattctttt

SEQ ID NO: 421641 - DNA, 352 bp, Oryza sativa nipponbare
tgaacacgaatagggcctgcggtattataatggcattttctctaagtcccatatatattgatcgagcccccaagagaaacccacacctcagtgtgcccagatttcaaggcggatatgccagctacatactgaaactagatagggaacaggcgacggcgttatgatggcacctgaatgcctcatactcgcatggagagaggatcaaatggcaactcttctcagatatgttggaggagactctgacttgtttgggctcctagccaactcattgatcaagaatttacttggtgtgagatactcaagccttgacatatgcgatgatagcttgtgcttcgtacttgaacagttcaaa

SEQ ID NO: 421642 - DNA, 331 bp, Oryza sativa nipponbare
ttaaaatctttcaaacttgggtagggttaaaaaaaaaaataaacgatttattcacccatactaatattttttctacaggcatatgatttctcatattccatagaaaaaattttatacctcccaccggattatgttatattgaagaaaaatacaccacacccctttgaaaatttttaagaaaacattccccaccaccgccttggtaacaaaaattacagaatgggcaaaagaacactattctcctataaaatatgaatcgtgagattcctttacatcatttcttagacttcataaaccccctatattacgtatgcgttaacacacaccaccc

SEQ ID NO: 421643 - DNA, 382 bp, Oryza sativa nipponbare
aaaggaaaaaagtgcacatacctccctgaactttgactgaaagtccatcaaaatatgtctgattggaaatgcacaaattgtagtactcctaagaagcagtaacatcaattgcattggcaggtgaaatgctggaccttgaccagaagcttggattgaagactcaggggctgcattttcattgaactcaggtgattgccacgataactgatggaaacggcactgtagatgtgggtgacaaagcgactcggaattacggttctaatcgtcctcttccctctgctgattgtgcatcatctgatagtgaatagcccagtgtcagggccatctcgataccaagtcatacattctaatctccttggttggttgagcgactcattgggaa

SEQ ID NO: 421644 - DNA, 284 bp, Oryza sativa nipponbare
attgtttttttaaatttgggtaggggttagtacgggaaaatcaaccctaaactaagctaaaggttggtgtctttggaaccgacaaaattaaattaagacacgaacgtgatagatacagtaggacgatggcatgcaatgggttggtcgggaggtagagactaatattacgctttggtgggcaatatcggcacgacaaagtgatgcgcgaccatacagatctggatcttgcctgtggacggcttgggaaggtagactgggaagtacactttttatgggcacctttg

SEQ ID NO: 421645 - DNA, 331 bp, Oryza sativa nipponbare
ggttggggtttttttttttttttttttttttttttttttttttttttttggggtgggttatttttttttttatattaattttttgggaagggaaaaaggggggaggctaaaccttaaaaaaaaatgtaaaaaaaaacaggtctttgaaaaaagttaaaaaataaaacttgggtaaatggtattgcccaatggaaaaaaacaaaatttttttggtggaaaaaaaaagggccttcaattttttaaaacccttaaaaaaacaaaaaaactaattttccaaaaaggggcttttaatacaaaacaaaacttttaaaaaaatttttaaaggggcccc

SEQ ID NO: 421646 - DNA, 378 bp, Oryza sativa nipponbare
ttatacataaggatgtgattgatgaaactgctatgattatgacatgacttcagaatttatacataaacaaccttgccatgaggcaccagaagcatctcaaggctcaacctactttccaatttatatccctacaatcctgcctaaactgaaattacatcaatagggtagtatgccttcttgcgtcgcacaaaaagtggcaataaggataaggattatgtattatctttctgcaaaactagaaaaaattatgtactgccaggaaaagtttttgcagctgcaaatgaccagaaaatatgaatctagtcactcaatcactcatccttacaagccaccaaccttgccagctgcaggtttgttctgtttcatcttggcaatgct

SEQ ID NO: 421647 - DNA, 366 bp, Oryza sativa nipponbare
  unsure (1)..(366): unsure at all n locations
cacgcgtgcgtaagctnggatcctctacagcggccgccctcnccttttttttttttttttttacacaaaaacagtggggagcggttttcactaagatactaactcacacggcttttacaaccaacaaccatgctggctgctattggatcacatacataacctacatgatccctaaaatccacaattaaatacatgcacacccccggggccacaccttacacgaccgctccatcgacagccaaaattccttcttgagcctatgcatatctcaaaatattaagggctgaccattcttctaaacctggcaacttcttcgattgcattacctgcaaaccgagatccgtctattgttgctcctactctagg

SEQ ID NO: 421648 - DNA, 378 bp, Oryza sativa nipponbare
  unsure (1)..(378): unsure at all n locations
tttaattaattatttaactgcttgatgatctgattaactagttaaacacgcactaattaaaacacacgtaattaattaacggaccggccggctaggctagctagttgtcggcgacgtcgacggtgcggatgagctccggctcgccggcgaccatggcggcctggcagaagacgagcttgatctcgccgggggagatgcagtgctgcggcacgggctccacgtcgcccccgcccgtcctcgtcagcgggcaccgctgcttgaagtagctcgccggccccctgcacgccacgacgtcgccgccggtgtcgccgccgtacacgcgctgncccgccgngcacccggcgttgaggtcggccgtgcagcccagcgccgggcaca

SEQ ID NO: 421649 - DNA, 286 bp, Oryza sativa nipponbare
ggaaaaaaaaaggttaaagttttttttttttcaaaagggagtttggaatttttaaaattttttaaaaagggggttttttttttaaaaaatgggtgcccaaaaaaaaagggatttttttaaaaaaaaaattaaaatttttttttttttttaaaaaataaaagggggaaaaaaaaaaaatttttttgggaaaaaaattttttttttaaaaataaaaaaaagggttttaaaaaatttttgagccaattttaaggcaagcttaaagtgaaaaaaattaattttttggaaa

SEQ ID NO: 421650 - DNA, 317 bp, Oryza sativa nipponbare
acaatggcagagctcctggctttggttaaaaaaaaaactataagatagttacagaataattatacaatagttacatttgaaagttatccatactaaatactttcgaatgttatatagtgacatccaaaataccatgctctccctaccaggagacataaataaaaaaaaaacggctgtagaagatacaactggctatcaacttcaaaatttgctataccctacttctcggccgtgttgccgggctgtaggagcggctacgcgatgcctacacccacgtggagctgcgatgccgaccggatcgccgacttgttcacgtc

SEQ ID NO: 421651 - DNA, 327 bp, Oryza sativa nipponbare
  unsure (1)..(327): unsure at all n locations
gaactttancacatggagcgatgcgatcatactatcaaatcacttggaacacacatttacatgtatcacatataggctcatcacgtgcataagaactcatacgctgtatctgctgacagacatacacatatggatcacagctaacatagatcgatcagaagtgcagtcttacagtcttacacacatatgcgcgtacggtcgtacatacttctatattacaggactgatatttgattagagacaaacacggtgggcttattaatggaactttaggctggagaggatatgaatcgggacagacacttggaagtggtaactctagatctg

SEQ ID NO: 421652 - DNA, 408 bp, Oryza sativa nipponbare
ttatatctaagcaccactggggaggggggcaaataactaattattcctcattaacacaaagggtcatcacaaagtacattggctatttggcaaatatattttgttagcaatactgtggtacaagcaaacatctttgtgccgtgcttaacacggttcaagaatgaaaaaaaaaaggcgtacagtgtcaagcttgctcactttgggctgggtgaacaacacacagatacttaacgcaaacctgtagaaatgtaaactgcctaagaagaaacaaagtaagaactaaaagcatgacataagtcggtggcacatggtctacacgacctaattttacaggtacatgctatttgatcaaaaaaccctttaccctgaaaaaaacatatcgccccaaagctccagtttttttttttt

SEQ ID NO: 421653 - DNA, 68 bp, Oryza sativa nipponbare
gaacccaacaaaccatttcataaggggggaaaaaaaggggagccatctttaaacattaaaatagatcc

SEQ ID NO: 421654 - DNA, 97 bp, Oryza sativa nipponbare
  unsure (1)..(97): unsure at all n locations
aaataatatatatggggagggattttntagagcgagaacactgctgttaccatgagatagttaatccccctgtaggactggcataaaaaattaccac

SEQ ID NO: 421655 - DNA, 551 bp, Oryza sativa nipponbare
  unsure (1)..(551): unsure at all n locations
ggggggggggccgcccccccccggtgtgtgggggggcctcttttttgcccccccccccccaaaaaaaaaaaaaaatttttttttttttttattcaacaccccccccccccccgcggttattttttattttatacccccccccccgcccgcctcttctttcttttttttttntnnnnccccccctttttttataaccccccccgggggggggggggggttttttttttttttctccccccccccacccctccctttttttggggggggaacgggaaaaaaaaaacccccccttttncaaaaaaaaaaaaaaatttttttttttttttcttggtgggggggggggggggggggggggggggcgagcacccccccccccccccgggggggggggggggtgttttttttttttttttataataaaaataaaaaaaaaccccccccccccccccccggggggggggtgtgtggtttttttttttttttttngggttgggaaaaaaaaaaaaaaaaaacaaaaaaacaccccccccccccccccccccccccccggg

SEQ ID NO: 421656 - DNA, 54 bp, Oryza sativa nipponbare
tccgtcgatcgtcgacactcgcactcactcatgtcctggatgttgcctcgtctc

SEQ ID NO: 421657 - DNA, 544 bp, Oryza sativa nipponbare
ccacgcgtccggagccatggcacgccatctagctggcgcctgcgaccgtggccgtgctgatgctggcgcatgatatcgtgcgaaggtgttgaacggagtgcatctcaactctgtgatgatcctgagtgtaacttatgcctgatcaatgtcaaatatttccaaatgaacttgcatagttcatattaaaaataagatgaaatttcaattgacgtgcctacagccaaacaaagttgataaggcattgattgtataattgcacgatcttactgcatttgcataagcaagctagcataaacctacgttgttggccatgacggcatcacatgaaagtgctgatgtagaattctatgctcatagacatgcagcctgttcaatgcactgaagcttcttttaatctactatccttttaaatctgtctattctgaccattatcttgttgatgctactattactgcttgcatgcaaatcccatttaaggatgatatcctaaaatattaccactcttaattcaatgaagataagacctattgacatgtggaatcca

SEQ ID NO: 421658 - DNA, 110 bp, Oryza sativa nipponbare
ccacgcgtccgcccacgcgtccgacgcgtccgaggaggtgcggcagctggaggagcaggccgccgccgtgctgaaggcggcacgcgccgagatcgccgcggcgctcaaca

SEQ ID NO: 421659 - DNA, 420 bp, Oryza sativa nipponbare
  unsure (1)..(420): unsure at all n locations
cgtacgnggacgcgtgggcggacgcgtgggccgactcgtgtgtggcggtggggtcggtgtagagcggatgttgtaggtgcacagggcggaggaggtcgacggctctagtgatgaaaaaagaaagagagggtggtggtggttgagttagcgaagagtcacagcgtgaacaggagtcgtatatacctgtgcatggtggaacttagatgcaattgaggggacgtggacttactacttgtatagtgtaaaagtatacgaactcgagttattngacttagagaggatattactttcgagagatagtttagattataaaatggccccaagaatgtgcattaggaggagttgatcgaacatgaatggttaattggacacgttctatagtagtgtattaagcactgcgggtatgatgatttatattag

SEQ ID NO: 421660 - DNA, 359 bp, Oryza sativa nipponbare
  unsure (1)..(359): unsure at all n locations
cacgcgtccgccacgcgtccgtgatatnctgacgtgatagcttctaattgtttccaatggcatcagaacacttgccagataacgataatcttcgtacattctaggacaagtactcttggaaaagccagcgctggttccttaagtgctatcaagttcactaatagccaagtgctaacaacttcacggttctagcttatgaaagcaattatcggatttcatttttggattagagacatgtacgaagattatcgttatctggcaagtgtcctgatgccatcggaaacaatctgaagctatcacgtcgagatattcacggacgcgtgggcggacgcgtgggtcgaccaggtggttccggaccg

SEQ ID NO: 421661 - DNA, 106 bp, Oryza sativa nipponbare
ccacgcgtccgggaaggaccaaaacatactcaatatagtccttagtggcgaggctcagtgtgctcgacaaattgtaactgtttccaatggagaggaaaaagatatt

SEQ ID NO: 421662 - DNA, 621 bp, Oryza sativa nipponbare
  unsure (1)..(621): unsure at all n locations
ccacgcgtccggctgctggccctggggtacagagacgtactctaaaaaaccttggctgcacatcaatatctgatgttttgccttctggctgttcttcagctaattctattcataataagagggctgaggttatgagaaacagggcatttgacggagagagttcttctagaccaaggggcttaaatggacactctagtttaggccattcacctgccatgtattctggtatcactggtcctagagtcagaactgctgaacaatcagcttctcagcaaacacggactagtagcagaagtattcaggagtctgcagattcttcaaggattaggcgaccttctactcagcatgccagagtaagggtgccaaatgaaagggaggatagcgtgtttgctcttcgtgaaactcttgcaagggatcgccaaccagaatgggctcatttctccttgggtgaagctgccccacggagatcgatgaggcctttttctatggaattaccacatgagatatactcatctagtcgtcaaggctcacgtaatcagacagcaaggagcagatcaagttaccgccctgacgaaagccctncacanatgtntcatggtttgctggtggagagagagaact

SEQ ID NO: 421663 - DNA, 63 bp, Oryza sativa nipponbare
cagcgtcgcatcttaccctcacccctttcagcactgaccaggcgtctcacgacatcactctag

SEQ ID NO: 421664 - DNA, 344 bp, Oryza sativa nipponbare
gactacgcaaaatagaggaatacgctatcgattaatttcactgcaaagagcacgggttcattacatcacacatattcatacgctgatgcacgccttgtatccttagcgaccaggtggctaactgatcgggatcacacagctatcattcatgactgattggtacatacataaaccatactgatatgggtggttactattgtggactaattatggactgtgactatccgcaacagagtgtaccgatgctgcgagagttcactcgccgcactaggagaacgtgcatgagcaggtggagccagactagcagacttcgatcgactggacaggagggacttactttgaga

SEQ ID NO: 421665 - DNA, 401 bp, Oryza sativa nipponbare
  unsure (1)..(401): unsure at all n locations
gaaaccaaataagttggccaatctcatgttacttggccgntaatactagtactactccgtcgagtacacaatgaatgattcactgctatctagtttgtggttctaataaatcgaatacattatactcttcatatgttccttgtataaacctgtttgtttgtggttctgtgaatcaaatgccatatacatgacattcgtgtttgtgctcctcatcttgcaatttcatagcaacatttttctactcagtatgcctagttgtcatggtgttttcacttgctgaattgcttttctacatatttttggctcttcttgtactgtatgttcagacttgcctttaacatggataattgaagtattgaactaacatgaaaaatgtgatgtcctatgcttcttgatcaaca

SEQ ID NO: 421666 - DNA, 347 bp, Oryza sativa nipponbare
gaaaccaaataagtggggcggtctcatgttactcggccgattatactacccctacttcgcttagtccacaacgaatgctccactgatatctagttcgtggatctaataaatcgattacatcatactcttcatctgaccgctgtataaaaccaaagagtaggtggtgctgacaatcaaatgccatatacatgacatttgggttcgtgctcatggtcttccaattgcataggcacattgttctactgctgatgcccttgacttacggcacttatactagctgaatcgatacattacatatatctggatatctttggactgtttgttcagactgaccgtttacatgcgta

SEQ ID NO: 421667 - DNA, 383 bp, Oryza sativa nipponbare
tgaaggatatcccaaatagagtcggataaaattacatggctcaagaattacaacccaggaattacattcagaatccaaaaataaaaattacatggaaggtatgatacaaacatattctaaacctctatacagaaattgaaaacacaaacgagactcacatttttacacccgatatttgggggggctattgagcaatatcttgattgacgctactgatatgcgctcaaaaatttttttaaaaaacgggcaacccgctgatggacgggggttctttaacccttaacaattagatctttttttgcatggctttttaagcaattatagttaggatatcacatagcttgtaattttcgtaaattctgtcatattaaaagcatgtacca

SEQ ID NO: 421668 - DNA, 509 bp, Oryza sativa nipponbare
tttgagcaaaataatctcttgaatttcaaaaaaatccagtcacattctgtacttgaaagtttgcgaatccaggctatacagctcgttgtttacaccgtgccctggattcacctcaggtcaaagaggatgaacatactaaagaatggcagcacacttatgaacaaacaaaacaaacgacaaaaatggtgtcatctctgatctaagctacaactaactaaaaatttttgctgttatagcttccataacagcagtattgatatcatgagaccgctgcatgaacaatgccatggcatgatcacttgattcacttcccaagctttgggagtgtgagagacactgacggtgtctgaaaccccatgaactgatcccttggtgacctcctgatctccgggctcgggattcggaggctggcaaccggtaggcgtcgggagacccatgtagtgcagcctaggtgacagcctgatctttgggcttggccgaggagacggtatcggcagcctgtttgtagt

SEQ ID NO: 421669 - DNA, 233 bp, Oryza sativa nipponbare
gttaaaaccacttaaataaaatttggttgataaaattttttttttttttttaattcccaatttttgtccaaggaacaaattcggtttatattaatttttggtttttaaggggcgggggatatttttatcatttttaacggttttaaaaaaaaattttttttttttttatgagggaactctttatggtttttattttcccacattttttataaaacccttaataaaaaccgggg

SEQ ID NO: 421670 - DNA, 356 bp, Oryza sativa nipponbare
taacatgtgactatgatgcgctcatgaaacacagtatcatatatcagtaatatacatgcatatatggacaacacatttagaataaactgaaatctacacaaatggaacaggcaatagaacttttggtcatgacagacaggacgtgggaatcagataacgtgcattactttttatttcattctaaggaatgaaaccacatggtgaatgaatccttccttcaagacatgcatgaaatgccttatacagactgtttgcattggcggatcattatttctaccagccttaacttatagagggcggtgagataaccacgaccgcttggaatccattacacgctaagcttgatagacaatgga

SEQ ID NO: 421671 - DNA, 363 bp, Oryza sativa nipponbare
  unsure (1)..(363): unsure at all n locations
ggcagggctatatttcaactcagttcaaatccttacatgatcatgcacttatctatgcagcgccaccaatgaatttagatacatctagccctttatttctccagctgttgaaacggcatgtccaaatcacgtatgttatatactacttactgcagaagtctatgcacatctatccttcaatgatcttcacaggagtcccatatgaattctgtttaactgatagtagttcaacgtccagctcaatagttgcatttggaggaatttcctgaacgcccttcttcccataagccagctcaggaggaaccccacgcgttcgcccacgcgttcgcccacgcgttcgcccacgcgttcgnccacgcgtac

SEQ ID NO: 421672 - DNA, 412 bp, Oryza sativa nipponbare
tgaacccaactgatccatgaacaggttgaaacaccgcagatccattcagatttcattgtatccatccaagaggagaatgagcactaacagtgtggagggtcttccatgctgccaggggcgagcatgtcattcgcgccggtgcacacgtgggaggctcgtgcacggactgcaacgaggactagacctaccttgctagtagacagtagcaggtagtaacccatggagttgcagattaacagcatcgctgatgatgtggatcatggccaaaaagattcttattaacggcttggatgagactttcacttggagattactctgataaaccggctcacggaactaaatgcgcccagtacattgttcatcaacgatggtgccttgtcagaatgctcatcggcggcttcaaaaattaatc

SEQ ID NO: 421673 - DNA, 315 bp, Oryza sativa nipponbare
agacactaacagggattttttatttattttattataaaaaggttacttaggggttaaaccaaaaaattgattgattaaccccgccctttaacccggcctaattaccgtttcaaaaaaaaccaatttaatcgccaacaaacgggtggtttttaattcgtccacctaattacaattaaaaaaacgtagccccaggtttagctttaactttttttatgcaacttttttagtaaaaatccaaaaaaaagcccggtgtactacataacatatggccataatttacacagtggctagacaccttatttttatgcaggctta

SEQ ID NO: 421674 - DNA, 315 bp, Oryza sativa nipponbare
tttttgtaaattggggtggggaggaatcatagaaggtttcttactatattacatcatccaatcggggccacacatacggagtccatttacttacctacaccaagggggggttccttccgaggttgttccagaaaatgggaagggggggtggttttcttgagccggctgatttttccgtaccaaaccctacacaggaaaaatacaggagcgggcctgatggggttctaccaccttatgatgggattgatttgccccgtttctggtcttaattagttgatattttcccgccctattttttagaaacgaaaacctccc

SEQ ID NO: 421675 - DNA, 353 bp, Oryza sativa nipponbare
tttttttttttttggttgggtttttttttttttttttttttttttttttttttttttttttttttttttgggcaattgggaaaaataaaaatagacaggcgctcctaaaattacttgcataaacaaatattccttttttaaactaaggggggggggggggggccaaaaaaaaaaattttgggaggcacttttaatgctaaaaactgtcccaattgaaatattttgccaaaaaaaaaaaattggaaacccgagctaggggccccttttggataaaatttttggggtaggggaagttatttttccctgggtgaaaaaaacaaaatttcttcaagaatatatttggttttcgcacc

SEQ ID NO: 421676 - DNA, 325 bp, Oryza sativa nipponbare
  unsure (1)..(325): unsure at all n locations
gggtnggggcgaaaaaaaagaaaatttccatacatttgaatcacccaatacagcttgtgctcggccatgcattttcggttggattgaatagcactactaggaaaaaagggttttgccggggccaaaaatagttttttcaggtgggggaaaggacctcctattctctaagggttgcaaaaattattttctctagggacacctgcatcttcgcaggcgggagattcacccgtctgggaaaaacattacagcgtttaaaaaagggggtgcgcccgatgggtctcctcttgcattcggcggggtccctcacaaccggggcggacgcgtg

SEQ ID NO: 421677 - DNA, 249 bp, Oryza sativa nipponbare
ttttaacctcttcagtacgctttttttttaaattattttttatatcaccttttctttacattacaaaaaattatacttttattcattcataattttctaaactaccaaatccttaattaatcataacacacctttttaattccccacaaaactcccacacacaaaccaaactcatataatatattttaaacaacacttataaatctaaaaacatccctacccccaacatacaaatatttttttactaaa

SEQ ID NO: 421678 - DNA, 145 bp, Oryza sativa nipponbare
ggacagaaacaaaagtaggcggggtaagcactgatcccacccacaatttacatgatcaatacatcgtccataacacaggcacttatgcttcgaatacacataggagaatggattcgggggactagctcaatgaattcgattagcc

SEQ ID NO: 421679 - DNA, 58 bp, Oryza sativa nipponbare
cggacgcgtaggctgacgcgtgggcggacgcgtgtgcagacgcatagttagacaccga

SEQ ID NO: 421680 - DNA, 336 bp, Oryza sativa nipponbare
ctattcacaaacgaatgggggtggagaattttaagacgcggaattcacaccatacaaactttccgtatacaaaacttaattattattaagtacaacaaatcttacattctttcatctatcctataaggttatacacctaaaccacacaaataacatatgcacgagccctcttacttcactaacaaatcaactggtgcttaagtagccaaccatccataatgggatcagtatcacttgtcagtttccactacgacaacgtggccggccatgagcttacatgaagcggccaacgcccagataaacgccctttgcaggatcttcaccacgagctctact

SEQ ID NO: 421681 - DNA, 245 bp, Oryza sativa nipponbare
  unsure (1)..(245): unsure at all n locations
gggggggggggtatttattgaggtgttttttnncccccatcaattcaatccaaaaacttaaaaaggccttttagtttagggcacaattaactggggttggttcacaaccaaatttttatgggggcttaggggggggcccggtgaaaatttttaaaccaaactttaattttttacggggacctgccccccaaggggggttcttttttgggcccaagcttttaaacttaaaaatcccaggggggggg

SEQ ID NO: 421682 - DNA, 375 bp, Oryza sativa nipponbare
tttttaactcaagactttcggagttagataggtggtggcatttaatactaccggacaaggacccctatttgatctctttttcaaacctaaacaacagaattggactagtatatgattttatttaccagtgaagggttccattcctaaagataacggattgtatgtagcaaggtagcatatggtgatgatcagcttattaaactggtgtagcaacagcccggagtggcgtagccaactctagtatcatcccgaacttctgcggcatgttcaccccgttcttctcgacctccggtagaagccttcactcaaaccggtgcagcaacgacgcgagcatcaggtacaccatgcgaacagccagcggtaaccccggacaga

SEQ ID NO: 421683 - DNA, 337 bp, Oryza sativa nipponbare
tctttttggagtataacttggcaggtggaagttctactttaactacaacccaacctgcattacatgatgtgagtctaaaacaaaaaaacccctttttttttttcaaatttttgcccacttacctccccccgctgccgtttaactttttccaggccaaccctggaacccgcccgggggctcttccatttccaacatttctattttaaacccccgtttttgtttttgaaaaagtttactccccaaatgggggggtccccctttcctggttgcttgggcctaaaaaacaaacatcccctttttttttttttgacccttggcaacctccttactctcaatg

SEQ ID NO: 421684 - DNA, 466 bp, Oryza sativa nipponbare
tttggaatcttccagcagaaaagcatcggaattgagcacgataattgcacaaaactaagattaacagggtagtatgttcagttactaataacatattcaactcacgaaaacatgtgagttcccaaaatcccacctagccaaaacactggtccgatggcaatggacccgggagcgacccaacctcgaagaactggaacccgaagacgacagcaatggcagcggcagctagatacgacacgccctctgcggcgccgaggagtccgaacggcccggccgggaggcccgaccctgtgcgcaccttcgtcgtcagcgaccacccaatcagcgccgccaccacaaggtagctaacaccctccgctgcgccgagagcgccaccggggccccgtgggagggcccagcccgttgtcttgagcgtgtagagggaccaggcaacgaccgagctagacgccagcccggccgcaccggc

SEQ ID NO: 421685 - DNA, 316 bp, Oryza sativa nipponbare
  unsure (1)..(316): unsure at all n locations
ntcgaacccaacgcgtcncgcgcgaccgccgtgcgcaagacacgcagacccaaccgcgcgcgcagtcgcctgggcagaacgatggtccggtccaagctggagcacagcatcaagttcatcaaggccggatttggctaccgtgagaaccaccgacgcgtcggctactacgatggccggatcagcatgctgcggaacctgaagatcgcgccccacaccatctggaatgaacctgtccaggcgaaggacgtgggcccgaacgcggaccatacaccattcgacctgatcatggagttccacaacgactaccgggggcaca

SEQ ID NO: 421686 - DNA, 314 bp, Oryza sativa nipponbare
  unsure (1)..(314): unsure at all n locations
ntcggacccacgccgnntccgctatgctagctcgattcggtnctactggccacttcacattcttcttggctcgcnttcgctcgatcgattggcttacaangagtttcatggggccactatatcaatccggtcaaggtctcataatgcagagggagccagaatatggcttattggcggcgnnngcggcggcccccgggtctattcatgggcaatcacccgatgctttcgtggcngtnacggcggtcaccgggcgcatggggcggcgtacccgggcttctngccgggagggccatgggntnacctcgcnncttcgt

SEQ ID NO: 421687 - DNA, 146 bp, Oryza sativa nipponbare
ccacgcgtccggggcaccgagctccgcctcggcctgcccggctcccactcgccggaccgatccccgcccgccggcacgctcgaccttctccccgctgccaagggcgccaagcgcgggttctccgacgaggcgcgtccgctgccggc

SEQ ID NO: 421688 - DNA, 463 bp, Oryza sativa nipponbare
ccacgcgtccggtgaaagaacttgatgtatctttactgactgaacttacggggcatcaaactctgccaatcaacttgggtactcaaccatacatgcctgatgataagttatcagctcttccaatcagcatggccagtcaaccatatatccctgacgataagttatctatctatgagtttgaattggatgagccccagcagtatctaccagaaaatcaacttgtcatccctgatcctcttgtggagtttttccagtcccatggttctgcccttaccatagatcaaaacaggagaatcctcttcaatggaaatggagatgatatgagatatttactttcgattgtcttggcattcaatatgtctaaacgagaaataagcagttgcaagacagcatatctagttccatattttgaaaggaaaaggcgatcccgagcaagcagccatgcattcaattcaaaattagc

SEQ ID NO: 421689 - DNA, 413 bp, Oryza sativa nipponbare
ccacgcgtccgattacgcgtccgaacacgcgatcgtccacgcgttcagaagaagtgattacatgaacaagctcgtatactgtatacctgggatgaagtctaagacggatgaatgctgccgctctatctgtattattgagattagagagcttgaagagagcttggcgtttaaactacctccgtcacttgacattgttatgcatcgtgcttatgttacaacaaaggagcgagctgagtgttgcccttcaccagttcaggtaccttctacacctaaagctgaaactggggtcttcccaaaatcttcaggggggcctgaccaggcgttcgatcttgattctgcacttgtccaggtagaatttgtattttggcgagatcacaaatacttaccctgggagataagttactacgagtttg

SEQ ID NO: 421690 - DNA, 413 bp, Oryza sativa nipponbare
ccacgcgtccgctcacgcttactgccgtgcatacaatacgccatttcacacaatcagttgcatacgcggtagccattgggatacaaatgcttgagtacagatgactggtgtggaacaatcgggtgtgcaatgatgcccacttactcgagcttgtaatgtactaccagggactcttctaccacatgcacatgaaccacttggtcacacacttgaatctacgagagatctagccagtcgagcaccaccttcaccttcataagttgtggcgatgctatcatagttcaatatgtagctgatatctggcagctttaccgcatgtcgaagctttattgaacctatatgatgagaagcaactccttgaggcacttatagactcattaccaaaaacaggatccactaatgacgagattgtt

SEQ ID NO: 421691 - DNA, 289 bp, Oryza sativa nipponbare
ccacgcgtccgatggcgtgcagggccctcgcgctcctccccttcacctccccgccagtggaaggggcggccggcggccggcggcgtctcccctccctccctaccctccagatctagccggagaggggagtgggaggccggcggccggcgggaaagggcggacagcgtcgggcgaagcgcggagcggcggccgggtggcggggcggccggaggcagatcccctacctcccttcccttcaaatctggccggaggggggtggcgtgcagccaccatatttgggggaattctg

SEQ ID NO: 421692 - DNA, 84 bp, Oryza sativa nipponbare
ccacgcgtccggaaactcgtccggcatgtgatagacttcgaggaggacgagaggttgctattcgacccggagggtaacaccaag

SEQ ID NO: 421693 - DNA, 265 bp, Oryza sativa nipponbare
ccacgcgtccggacgcatccgcacccgttgaaaccaaaccaaccaaccaccaccacccgccgccgcagccgccgacgccgaccgcctcgacccccatccccatggcgtcggcgtcgcggctgctgccgaccacgccacctacccactccgacgcataccctgctgcccgccaccgacaccccggcctcggcgccccgcgctgccgccgtccgatcaacccgtcgcgcctgcggggccgcgtccccatgggggccgtttccaccac

SEQ ID NO: 421694 - DNA, 314 bp, Oryza sativa nipponbare
aatgtgaatggggaattcacttattattgctatcaaatttatattgattacaagattaaacattaagctcctcttctccacattgttcgttataccatctggtcgagcttgggcgacgactgcttgtgtttgcaggtatccatttcggagtaggaggaaatggtcacaggcctgtagacgaacagtaggtagaaaccggcgaccgccaccgtcgacgtcatgccccagacggcggccctcatcgccggcgccggcatgaccgccggcacgcgccacgcgaaggcgacgctcagcgccgtcgacagcgcccacac

SEQ ID NO: 421695 - DNA, 406 bp, Oryza sativa nipponbare
atattgggtttgtggttaaatttattatttttatttttattatttattattttaatatttttcttttttttttattggggggaaaaaatttgggttgagaaaaaaaaaaaataaaaatattgtttttgacgtttggcccaaaaattttattaccatgggtatttgaatataataagccggggggtattattaaaaataccattcttttaaactaattatgttacattcttttgtccaaacatacccccctgttgttgacacaaacaaggtgaaaaaaaaaaacttggtcaacaaactgggaaaggggaaaccaattcaggggggcccgattttaattttaaaagtttcaaaaacagaaataaataaaggggtttttttttaaaccctttgggggacccctttgttt

SEQ ID NO: 421696 - DNA, 244 bp, Oryza sativa nipponbare
ataccctacaacctccgccctttttttttatttttaaaacccacagcggtcctgtattacattaaaatagccctcacccaacaccatataatcgtaacacataccacttttacatctaaccaaaaagaaatcagctctaacaaaaacaaactcacatcactctcacataaaataaaaacactaccaacaaacattctactcactcaacaatcacttacacatcatcccattaaacatgaacaat

SEQ ID NO: 421697 - DNA, 166 bp, Oryza sativa nipponbare
acactaaaaggttaaaaaaaattttccttttaaaaatgatttttatttttatttttaagtaacaaccaactacaatctaattttttttcgggatggaagtctaaaaaaactaccctccaaaaaaaattacgcctgaaaaaaaaaaaggttaaaagggttatacttt

SEQ ID NO: 421698 - DNA, 224 bp, Oryza sativa nipponbare
acaagggaggggggtccttgttaacttgggtgcattcatacaataacacaatatgaatgaacgcaattgaaagttctatacattcaactatacaactggtgttagagccagatcacggtgaaaagggaaacatgcagtcattattttttatagcgatttggagattttagctctcaggtcctcttcaaatttgaaaaacttctaccctcttatctcttactgaa

SEQ ID NO: 421699 - DNA, 222 bp, Oryza sativa nipponbare
aaaaaaggggggggggggctttttggttattgaaaattaagctgtttttttttttttgccggcccgaaaaaacaatcctattttaatattggggaagctttaatttacaataatttaaccgccttgcgttttcaagtgggcaaaactgaattttttccctcggggggattacaagggatttccaagataataaattagttaaacctctttttatttacatta

SEQ ID NO: 421700 - DNA, 149 bp, Oryza sativa nipponbare
  unsure (1)..(149): unsure at all n locations
ataatcttcncaagggccgggggactaccaggtaatttaaaaaaaaatgacctgggccttcgttttatatgttaaaagttggacttaactaccaacaaaggttacgcgtacatagcactctctccacattgtacaatatgttcaagtgc

SEQ ID NO: 421701 - DNA, 424 bp, Oryza sativa nipponbare
ggaggtaagagcaatggggtctctaccagaaagaaaaggcttcaaggccttttatcatcttatacactgatgaatataaatagaagtagtacattgtgtaacctgttaggtcattttgatttaactaatgatacaacaacacaagcaggcagaggagagcacacccacacattagagtacaagcagccgcctcttggctgaaacacaagctctccgatgagccaattttatcttcctcccaactttattagctgaattctctggcgcagtgaagtaaaagtatctagcaccacaagaaaaacagaccaacatcttgttgggagggatactaacacatctttcaattcttcggtcataccatatatagtggcacgcctactgcaacgcaactttaagtgatcatcacacccactttgcgcgcgaa

SEQ ID NO: 421702 - DNA, 111 bp, Oryza sativa nipponbare
agttattaatttcaacacgggtggggccattccagggaatttccgtccaattggccttcgccattggttcccaagctaaaaggatgaattaactttccaaaaaaggtaccc

SEQ ID NO: 421703 - DNA, 471 bp, Oryza sativa nipponbare
aaccaacaatatttattcgagtttagattggcagactgtgcacaggcaaacccagatacaccaaaagtacacatgggctgtggttttgtactgccaaaaaaaattattttcattatacaaaaaaaaaaaacgccacattttccaactttaataagaggcaacggaactactactaattaactacaaaattttaagccacagaggaagccacaagcacctccctttgtactactagttaactacaaaattttaagccacagaggaagccacaagcacctccctttgcaaatgagccacaaaaaaggccacttgcaagaacaaatatatatagaggcatgggtgtgcacgcatgctttacatgaggaaggaaaactgtacaccatggtctttgatcttgctctcagcattctcagggcagtttcaccaaagactacgtagtatgtcccctgatgttatcattcaccaaagaac

SEQ ID NO: 421704 - DNA, 377 bp, Oryza sativa nipponbare
aaactgattaaacacttcggaaaaggtatcaaaccgtgctatacatcggccacttaatgaaccaggttcacactctacaaggactcctgggctgactccacagtcccttcttagtacacctgcatcatcacaagcctactcaatacataaacaagagaggtaaggtgtgttacagaacattctaatgattccaaatacatgtcagacattgttacactataacagcctgaaaagaatatcactggttgcagagagcagaattatacatacaagagcataacactcatagaagcatttttgaggcacctagagaatgcatctctctgaaaagataattgaacaacattccaatcatttcttgaccttacttactccct

SEQ ID NO: 421705 - DNA, 380 bp, Oryza sativa nipponbare
  unsure (1)..(380): unsure at all n locations
gaaactgattaaacctttgattcaaggtttcttaccatgcaatagtgcagccaattaatgaacagtaatcatgcactaaaaggacacatggtaagacaatggtgtccttgctttgnggaactgcataaacacaagcgcagacaatacatntccccctccaaataagtataatacagacatttgtaatgctaccaaatacatttcagaatttttttttctatttttgccttcattgaatagcaccgcttccagagagaggaattttacatacaagaggataacaatcatagcagcatttttgaggcacctagagaatgcatctctctgaaaagataatcaatagcatgccaatcatctcttgaccttacttactcctttta

SEQ ID NO: 421706 - DNA, 212 bp, Oryza sativa nipponbare
  unsure (1)..(212): unsure at all n locations
atcaaaacaaacgatgcgagcactcattcatattagactcttctcaaaantacttcatcatccaacaccctacattaatacactataacacatattatatacctcacttcatacatacatttctggatcacacacaccatcgaactaccaaatttctgtacatacatacatacatcacatatactcttacgcactggtcatacatacataat

SEQ ID NO: 421707 - DNA, 336 bp, Oryza sativa nipponbare
tttttatttatttgtttgtgttttttttttttttttttttttttttttttttttttttttttttttttttaaaaaaaaattcacaacccccttttttatttatcaggttcaaaaccttcacaaaaaaaaaaactaccggtacaaatttaacccttttttaaaaaattgaaaataaatacacccggtggttcttccaaaaccccacccacaatttggtcctcccaaagttaattcctatggcccaacccttcccctttccccccatgaattcttattttttttttaagaacccccgcggccgccttttttttttttggaagaaaaaaacaacccctt

SEQ ID NO: 421708 - DNA, 301 bp, Oryza sativa nipponbare
tttggaaaatttaataatggattttgcccttttaaaacaagggcgccttgctaacacatgcttttattatttaaccttgcatttacatccaaatccttccaggcacaccatcgttaataaccttttcttttccttttccctttttaaaatactttattgccaccaataaaccaagccctaatgtgtcttttaccacacttaatattttcacccctggaacgtacactttggtgcttcaaattttcccctcatttattttaacttatacacaccagaaccgctttcttcttgggggaccata

SEQ ID NO: 421709 - DNA, 250 bp, Oryza sativa nipponbare
atttcttttttggggagggggaaaatatacgcggccgaaaaaaagacctttgacatacaaatataaacaaaaaggccgcctaattttgtacttgattgaccgcccctcaacaatgcctcaaaataactaaaagaggcgggccctactattttcgcctgaaatgtgctgtgtcaacattgggcaacagatatctctgcctaatcaaaagcgcgtggggccaaaccgtgtcttgcaacagggaagatctttt

SEQ ID NO: 421710 - DNA, 474 bp, Oryza sativa nipponbare
ttctgaaatattgtgatcagcaaccatactaacatggacacaatgaagctttgtaggaaatatgtccagcattacatgttggagtacaactgctgacaagtatctcatctatctgtattatgatacaacttccagtcaacatgcaattagcaggtgctctttttatttcgaaatgtttcatttttgtaaataaaacaaatgcttctcatcatccaattcagttgtatatcccaaaacagatgcccagggtacaacatttgcctattagctataaaacaggcacctaacatttaaccgtgaatatattaaggtctatattcagattgcctgcactggaccctttattgtcattttcttgtatcactgccgtcagcttccttgtagagtttgtgttctccaatatactggatgacttcatcacatacaagatactttattgataggcatttttttatgcattctcttactctagac

SEQ ID NO: 421711 - DNA, 94 bp, Oryza sativa nipponbare
gaaacaaaagggcaagggcctcaactaaacacaatccacttttatttttacaaaactctcaacataataaggtggctgattccaacaatacaat

SEQ ID NO: 421712 - DNA, 226 bp, Oryza sativa nipponbare
gcccaaaccctgggtttgggtgtttattaaaaagataaagcttttttttttcttttttgtcacgaacaggcaagtcaaataaacacaggcgattacacggaggagatatatatatatatatatatatctgtctttttatatataatttgatccacaaacactgtaaacaattcttcttggaatctcctgacgaacagcaaaatttcagtaactgttttgaagggaa

SEQ ID NO: 421713 - DNA, 465 bp, Oryza sativa nipponbare
ccacgcgtccgctaccttccgcggttcacagttcacactgcctctgcctcctcttcttcgcctacaaaaggattttggaccgcacacggttcgcgtgcgtgcgtgcgtgcttgcttgctgcaagaaatgagctgcttgggttggttcaagaagcggaggtcgtccaagagcaaggaatcgtcggggaggcggggctcgacgacgacgacggtgtcggcggtgagcacgagcaggtcggacgactccggggcggtgaggccggcgagcaagtcgacggggtcgacgtcgtcgcaccggagcatctcgtcgctgtacgaggagcgcggccacggccagctccgggacttcgactacgacgagctccaggccgccaccaacggcttcagccgcgcccagaagctcggcgagggcggcttcggcagcgtctacaagggcttcgtccgctcctcccccgccgacggcaag

SEQ ID NO: 421714 - DNA, 476 bp, Oryza sativa nipponbare
ccacgcgtccggccgctcttcatcccggcggcgttccggcaggtggaggacttctcgccgcagtggtgggacctcgtcaagaccaccggctggtgtccgcgaccactggttccactgagcaccaggaggtagacaagataggcgactgcttcgcgctgcatgacgccgccggcgacgacgacgacctcgccggccttctccccgacgacgccttcgacgacgacgacgacgacgacctcttcttcgaccagacccataaccttctcgtcgatcccccgcagccgtccgccgctctcaagactgatgcggtgctcaaggcgctaagcctggtgtctcccaagggcggctacgcaaccgcggcggctccaggagaagcccctgcactgcgagaagcccaccaagtacgccggtagcccgaggagcggcggcgctccccgcgtcatccaccagcctcgctaggctgcgatggctaggat

SEQ ID NO: 421715 - DNA, 540 bp, Oryza sativa nipponbare
ccgtccgtattttcccggtcgacccacgcgtccgggcgtggtgcgcggagcacgggaggtcgtacgcgacgcctggggagcgcgcggcgcggctcgcggcgttcgcggacaacgcggtgttcgtggcttctcacaacgttctcttctcttgtttattcttatctttctactctatttctattttactatttttatttattaatttttcattttgctatcgaattccttcttattctctatcatttatatcttacttttttttaatctcttatttttttctttattcttttatttatgtacttctttttctatttttttcttttttttatttattttttttttttttgattttttctttttttattatcttttttatgttatcttgtatacttttttctttaatttctttactctttaacttaatttttctttattatatcttatatcatttatttcctttcattattattatttattttatttttattttttattcatcatttgtctttcattattattctattttttttttttcgtttc

SEQ ID NO: 421716 - DNA, 352 bp, Oryza sativa nipponbare
ccacgcgtccgccacgcgtccgccacgcgtccgacgagcgggtgattctgtaggtatttatgttcaagtcggtctgctaggagatgccatttttacttgctaccaacattgttcaattgctagtgttattactatgtgtagccgttttatttattctaaaggctcccttgtttcttgtggtggttttcgtttactgtgtaagccagtttgctgctgcgtaaacagcttgataagtttagaaggatagagaatttgcctttctttaacctgagaccacttcgaattatttttggagcaatgtatactaatactgtattattcagttcaaattggccctacgtagcattgtcct

SEQ ID NO: 421717 - DNA, 220 bp, Oryza sativa nipponbare
  unsure (1)..(220): unsure at all n locations
gggaaaggacaccncagcggcggccaggccaaccccggcgggcgaccccgccgagggngccncggacgcgccgcagccggtcgagcggggcggcgacaccgccgncagggcgagcgggcaggnnncnncnccaccaccggagccggcgccggcggngaggagccgggggnacaagcagcgcggggaggacacccacgggcacaaggcncnagggggccgg

SEQ ID NO: 421718 - DNA, 367 bp, Oryza sativa nipponbare
ccacgcgtccgagccatctagaaacaatttgttttaaattgggacgagatgatgttgagaagctggaatatgtatttattttggatcagtacgggaacgcctactgtggtaacagaagatctcgatttgtggtcgagtttatactacactacgtcaaataacaagtgttgctactagctgtgactgtgagtaataccgatacattacattacattacatacatacacggtgattaaaacaaacaagcagacatttttaaaaaaaaaaaaaaaaaaaaaaaaaaaaaaaaaaaaaaaaaaaaaaaaaaaaaaaaaaaaaaaaaaaaaaaaaaaaaaaaaaaaaaaaaaaaaaaaaaaaaaaagggggg

SEQ ID NO: 421719 - DNA, 476 bp, Oryza sativa nipponbare
ccacgcgtccgcttgttccttttcactacagcctataatcttttatatttactttctaaagtgaactatcccatacaaacactatcaacataaaacagtttataaatatgctcctaccctacctgtcagccactcgtccatcatttcagcttcccacactcccatctctctccccccaccaatttctttgatcttcctccattccataccgacacaacaatatacatctttctcgatgccagcactaacaacacgagcctagcagaaagccaccttaatgagggatcgaccagcctcctacctctctatattgaaaccttaatttgggatttgtcaactacccaatgcctcttccctctctctttcccatctgtagttgcaactgtgtactccgctctattttgtaacggacaggatccccttctctccatgaacccaagcctcaacttcatctggagaagccatagcgaagtatg

SEQ ID NO: 421720 - DNA, 436 bp, Oryza sativa nipponbare
ccacgcgtccgctcaatgtggtctgtggaagcgcaaaattttatattttgatggcctcaaagatttaccatgtaactggtacgcgtgctgtttttactatctacttcaaattttgatataatttgagacagaaattgctgatgtacatctgtagctttgacactggtttgtgtaccacgatgcatgagatgtgaaattcttgagtaaaaaaaaaaaaaaaaaaaaaaaaaaaaaaaaaaaaaaaaaaaaaaaaaaaaaaaaaaaaaaaaaaaaaaaaaaaaataaaaataaaataaaaaaaaaaataaaaaaaatataataaattaaaaaaaaataattttggggggggcccttttaggagacccaggtttctgttccggggtatggaagttaatagtttttttatggggcccctaaaattaaattcatgggccgg

SEQ ID NO: 421721 - DNA, 446 bp, Oryza sativa nipponbare
  unsure (1)..(446): unsure at all n locations
ccacgcgtccggttaggccggtcgccggagctggacgcgtggtgtttccccgtgttggccgcggcgggttcgcggcggtgagggcgagcgggccggcgacaccgccagacatctaggacaagatgtcggacagcatcggacaagagccaaggagactacgcgcgggacccgccgccagcgtcgtcgtcgctcggggaagaggagcggcggcggaggaggaggaggagggaagaagggtatggagaagacgaaggcggcggcggcgagcgggctgaggaaggtgaatgtggtgacggtgcatgggttccagtggatcaaggacaagtaccagcagaagaagtccggtggcaagaagcacggcgaccagcagagctcggagatcgccggctactgatcgttgataccacatcatatcgttgatgatgatttgaggtgttcttnctttt

SEQ ID NO: 421722 - DNA, 486 bp, Oryza sativa nipponbare
  unsure (1)..(486): unsure at all n locations
ccacgcgtccggctgcgcgtggctctacaccatgatgtgcccaaacattcacgcgtgcgccatggcatacggtccagccatggcacaggcttgcggaaagacacaacccactaagagcgtgagctgacctgtatacccttctaatccatacgtgctcagtgctgtgcccactgatgacagtctcattgcaactgatcttctgatgcacatcacgcagcatgctcacgccaatgctgatggtagatcatcgtttgacacactgattcgccaacggactcaatgcgagtctgnccaggtactcgtagtcaaatttacaagaactacactataactcgccttccatgcactgatctgcatgaacgcataccaccctcattgggccgcttcgtcatgcacgaagatcgtcgattactctcccaatcaaacaattacgaatgctagggagatagccaacaaagctcacattgtctattatggcatatacta

SEQ ID NO: 421723 - DNA, 461 bp, Oryza sativa nipponbare
ccacgcgtccggccaaatactcctgttggtcatccaaaagtgaacccacaattggagtggaaacccaaatcagtaagccccagtcctgccaatcatgcagataatgtggtacattctagtgctgcatcatctgttgatggtaatcaggcacacatggctggtttgtctaagaagctttcacaaactaatgtttctgaagatgagcatgtcatcatacctgcacacctcagggtaccagactcagaaagaacacatcttatatttggtaattttgaatgtgatgttgagtcgaaggcttttacattagctcctgatgcttcaactaacagagagtttaatgcccattcttcttcaagatcaactgatgatgtgcctcctactgaccagacggatcttgttggctcttgtgtcatgcttccgaaatcagattcctttgtttcagtttccgaatatcagcaccc

SEQ ID NO: 421724 - DNA, 316 bp, Oryza sativa nipponbare
gtaagaaaggcatggcagattaaaaggaaatgcatcacatattacaaatacatcacatcacaaaatctcaaacaaaaaatacatcacaaatcctaaataaaatacatgacaactcaaatacatcacagatcagatccaatatcacatacatcacagatcaaatccaatgaatcacaaattcaaataaattttccgtttaaaaaaaaatccctcttccaataatatagcgacttcaacctaaaaatctgcatgctgtatgatacagatccaacttattttcatatgcttgccagtcaatttaccatatcacttgggg

SEQ ID NO: 421725 - DNA, 168 bp, Oryza sativa nipponbare
  unsure (1)..(168): unsure at all n locations
cgtcgacagccctctnccttttttttttttttttcaatatcaacaggggcggggtattttattattaatgttgcacaccataagcatctggtctgccaccctggatctattacacccaacaaatatcaagagggtttttttcaataatcttttacacttttacacaat

SEQ ID NO: 421726 - DNA, 504 bp, Oryza sativa nipponbare
gcacaggggaaaagaaattgatttaaaaatagtagcttgaaatcgctatgaaaatgtacacataaagacacccatttggaacacaaaaccttcgcatggtatggacagtaaaaaaaatgagctcccaaagaatggtgctctagctataacttgctactgatttcctgattttgtcggttggatttccaggattccagtttccagcagattcagacagcggcatcttctttgctatcctccacaggcttctctgtagatggggagctcgtctcctgggtgccagagccggttgagaccttcacagtggcaggccttagcagcctctcccttagaaggaacccgcgtttgacttcatgcgagacaatcccagccttgaactgatgagattcctcgcgtgcgatagccttcatgaatcgaaggatcaaatggcttgccaactgtttccacaactcctacacctaagcttctcaatgtctctactaactgcttgtatatgccttgata

SEQ ID NO: 421727 - DNA, 379 bp, Oryza sativa nipponbare
  unsure (1)..(379): unsure at all n locations
accaatcaaatcaaatgtattctcatactactatcctcatcctaaataagcctaaaaaatagaaaggaaaacaaaaaacaaaaacgccaagaatccaccaactcgtctctgtgtctctctttctgtacttttctttcttcattcatgccgtgatcgatgatagcagcagagtgcaacctcacctcctcctcgccggctgcggcgcgacgtcgaccctcttccccttgccggaggcggcggcggcggcggcggggggaggaggagggtcggnctgcgactggacggcgcggcggaggacgtcgacgacctcggacatggtggggcgctccttggcgttcttgaggaggcaggactcggcgagcttggcgatgtcgcgggc

SEQ ID NO: 421728 - DNA, 501 bp, Oryza sativa nipponbare
tttattatgagacggatggagtattattaaagagcatggaagcactgtcactctgtcagctgctctgctcacggtaaaaccattcagatagtactgcattctatcaaggtcaggatgcctgtccaatggaatttctagatatgcaagtttcgaattctaaatgttgtacagtaaagtagtaaacaaatatagttattccgtgaaaagataaatctatgttacaagaatatacagactcgaagcaaaacatctccatgctgcatgatacagctgaactgtatttgcagatgcttggcagtcaatctaccatatcacttggggcctgaacgcaaagaattccagcggaaaggacctctcatacctccaatgtggggtggcccctgcatgatcaaccctacacagacacaaacaggagcaattggcgaccaaggagagtactgctggcctggttgacagaaacctgttcaaatgatgccggtaagcgagttctgggagacactg

SEQ ID NO: 421729 - DNA, 358 bp, Oryza sativa nipponbare
ttaatcacaaagggtataaattactcatcagctaggcatatgtcacatgatgttcttgagcatcctatttttttctttggcaaaacaacagatcaaatgaacgtggctataggaagaagaaggcgtgaaaagaatttcacagggaactataaggcaagcaagataaggcacagatcgatacaccacacctatctatctaccagcaccagccccaggacctcgggggctcgtgcttggattagttcatcaagctgtgatgctggcgggaacctgtccagcgcctcctgcaacagcttcttgaacctgcacatgttcatattgatgttctgcttagacaggtacgccgtcttgagcgcgt

SEQ ID NO: 421730 - DNA, 250 bp, Oryza sativa nipponbare
  unsure (1)..(250): unsure at all n locations
ataaaacaaaaaggataaggtgtttattaaatatggataaaaaactaaataatanaaaaaattntcctctttttttatacaaaacaacaccaacaatttttttttccctaactttaagacccccccccacccccccccaaggtggtttttccccccccaaaaaaaaaaaccccccccccccaaagtattaaacccccccccccccctaaaaaataaaaaccccccatcttctatcccccctccttttttc

SEQ ID NO: 421731 - DNA, 378 bp, Oryza sativa nipponbare
tttgtatttttgaagacagttcatcacaagactacagtgatttattacaattttcactaccatgcctctacagactacagtgttataagtattgtagaaaaacagaatatgattacaaaaaatgattgtgatagagtacattaattcccagctggatacaattcacatcaaaattgcaaagtcaattctctgtctcgttgtatccgattctccatgcttcgatggggatggatcaaactccagatatgaattcacgcaaaataaaggaaacatactggtattagaagtatatatataaatttacacggctaccaaatgcattttcccatatgatcaaatccggttttcgcaggcagctgggtgactcatgcctccccc

SEQ ID NO: 421732 - DNA, 306 bp, Oryza sativa nipponbare
aaaaaaaaaaaagggattttttttttttttttttaaaaaaaaaaaaaaaacctttttttaaaaaaaaaaattttttctttttttttaaaaaaaaaaaaaacttaaatttttccttcccgttttttttaaaaaaaaatttttttttttttttttaaaaaaaatttttatttctttttgggaaaaaaaaaaaaaaaagtgaacccccttattttaggggggttttttttccttttttttttaaaattaaaggccgccccctttaaaaaaaaaaaaaggttttttttttaaaacacctttttttttttt

SEQ ID NO: 421733 - DNA, 365 bp, Oryza sativa nipponbare
catctaccgccctctttcttttttttttttttttagataaaaaacaaaacttggggggtaacaatatggaaggcacatatctatatccataatcaccattaaacaaacaaaaatattttttcccaaacttttgaataaatctttctctaccacaacaaatccaaagattttcaaacaaactagtacattaacaaaacaaacattaaaataaccatcaccttcaaaattcacccaccttaccttttttcaaaacttttgctacacttacaaaactttaatcaattaacaggcttattctcaactttttaagaataatactcttttccattatccacatctttaatattgcccccaacctccatctc

SEQ ID NO: 421734 - DNA, 238 bp, Oryza sativa nipponbare
  unsure (1)..(238): unsure at all n locations
gtacacaccaaacagggcaggggtgtatagaggttatgattatccacaattcatagntatttaccctcaaagagcacacactacattctcaaggtagttggagggggaaaaaaggagaaaaaaaaatgctatcactttttgacgaactggatgccgttagcctgggattacctcttcatgaatcgcatgaacctgtcccactcccgcggcgtgctcattacgaactctacctcaatta

SEQ ID NO: 421735 - DNA, 358 bp, Oryza sativa nipponbare
caaccatgagtttttttattttataatcatacgggcccagttttttaatagttaggaaaaaaaagcccaaaactttttgggataaagaaacaaactgaaaaattgtttaatgaataacatgctaaaagggagttttgttacttccccacatagggaagaaacacaaacggggagttggtttttattttttaaggctttaaaaatgggtatcaccctaattttttcccgttttttttaaaacaaaaccttccaagggcacctttttggcctggtttggcctaaacctctttaagggctttttcctaatttttttttttttggaaaaacccgagatcatttttgggggactttttttttt

SEQ ID NO: 421736 - DNA, 207 bp, Oryza sativa nipponbare
  unsure (1)..(207): unsure at all n locations
ctcactaaatccgcgtcaggctaaacataaagggtggtttntcctcacccctataaatnttacatcaagtgctgcacaatacatatatatatgttggtggctgtctttataaactcactaactctgtatatatatcatcactagctctaaattaagactctagcatcttcttttattacttgaacgaacctcctaaaagcgacaccc

SEQ ID NO: 421737 - DNA, 252 bp, Oryza sativa nipponbare
tgactaaaaaaatacaaccggggccttcataaattgcataaacatatgcctaacccaccatctactaaaatgtgctattaccactctcacttcataggatcattcattcatgcaaaactctaccatacactcagcccggtccacataatcaaaagacgaacaacaaactgcgcacacaactaaacaaggggttggtcataatcagatccaagttgaaccccataacatggctatataacaccatcactgctt

SEQ ID NO: 421738 - DNA, 398 bp, Oryza sativa nipponbare
ttactgcaatctggatgcacggctgatagaattgaatggccaaaaaactcacagaacatggatgcttcaaaatttccagttaatttgacgccctcattgttacaagtgtaaacagaatctgaactactgttaacaataatgttgagtagcgaattacaggtgggcatttctaaaagctatctccgccttggcggatcagaggacctacgctgctttccatctgtatctgatctctccttcatatctgactgtttaagttttgtcttcatgtcgtccgcatagcgccgccaaatagactcccggtctttacttgccagtttgttgtacctaggatcagatcttagaagaccttttgcttcggtccaggagttaattgcagtctttccttcatctgttgt

SEQ ID NO: 421739 - DNA, 328 bp, Oryza sativa nipponbare
taaccaaacttttggattaagttttatatcatattatatatcatatattattaacatatcccaaatcaaatctttattctattattataaaaaaaaatccaccatctctaatcttaatcctaccttatttttcacaaaactattcaaaaacccatatctaaatacaatcaaccttatcaaccccaccttcctttccatgtcgtagcctttaataccgacaaaaacataaaattattccttctcaacctgctctagctccttcatcacctaaaaaaaatcatttcacccccacataaacatttttcacataaaaaaaaaccaaacattt

SEQ ID NO: 421740 - DNA, 416 bp, Oryza sativa nipponbare
tttttttttttttttttttgttttttttttttttttttttttttttttttttttttttttttttttttttttttttttttttttttaaggaaaaaaaaaattttaaattttaaatttactttcaaaaatttttttttttaccgggaccaaataaaaaaaaaagtttttttaaaatttcccccaatttaaaaaaaatttttttttttaaaatttgtgggggggggtaaaattaaaattttttttaaaaaagttttccaaaatttaatttaattaccgttttttatttaaattaaatttggtaaaaaaaaaattttttttttttagggaacctttccccccttttttttaaaaattttcccaataaaattcccctttccgaaacccaaataaggggcgaaaattttctttttcctttt

SEQ ID NO: 421741 - DNA, 471 bp, Oryza sativa nipponbare
  unsure (1)..(471): unsure at all n locations
tttattataatttatttttgtttttttattttttaattaaaatttttaattttttaattatataattaataaaatatttttttttttttatataattatatttttttttttttataaattaaaaaaaaaattaaaaattttaaaaaannanaaaaaaaaaaattttaaaaaaataaaattaaatattaaaatttttttaaaaaattttttaaaaaattnaaaannataaaaaaaaaanttnnnntttttatttaaattaaaatttttttnnnacaaaaaaaaaaaaaattttattcttttacacaccatttataccaccctctttttttccacaaataatatttccaaaatttactttaaatttaacaaatttttttttttantaaatattttaaaaacaccctcctttaaaataaaaaaaaaaatttctctcctttttaaaaaaaaaattttttttnnctttttaaaatt

SEQ ID NO: 421742 - DNA, 331 bp, Oryza sativa nipponbare
ttaagtataggtattattatgcggggatattaggatgagtttgaactttgaagtgcagggataggcgtggtgtggttggatgaataaaatgaaaatggaattaattaatagtcgtcgtcgtagccgccggcggcgtagtcgccgtctctgttgagatcggacttcaaattcttcgccacgccctcctagaacttgtcctccaggtagctcgagccgtcggccagcgccagcccttccagtacgcccgacgtcgtgcccactctcagctctgttccgattcagatatagctctttttcttcgggtgatccacaaccacaggggccgcacctg

SEQ ID NO: 421743 - DNA, 370 bp, Oryza sativa nipponbare
ggcaaacaaacatgcatatatggagcggtacagagaacgacacattatagacctatatacacgcaaggactgctgaaattatcatcaacgatgagacgtggtgtggacgggacctaaccggcaatgtacgagctctggtggggggcgggcttcttgtcacccgacttggtctgctggtgcttgttcttgatccaatgggacctatgcgccgtgctctccgtcactttcctcagaccgctcgccgccgacgccttcgtattgtacatacccttcttccatgctcctcctcctgcggcggcggttgtcttccccgacgacgacgacggcgggggtgggtcgctgccgtagtcccactggttcgcccacgacg

SEQ ID NO: 421744 - DNA, 303 bp, Oryza sativa nipponbare
  unsure (1)..(303): unsure at all n locations
tcttccaccctctcccttttttttttttttttaccacaaaaaataggcggatggttttgcttacaaatattatcatatacaaanactaacacattccaaaattatcaaacataaaagtttcatacaaatatattcaaacaaacacatgttaaaaacctttttttttccatttcccccttgaactattcgtaaataccaccattccaccaaactcccctctttcttctactacaaataatcttttcaacccactaactcataatttattacaaagagattagcaaacatataatttttaaaatc

SEQ ID NO: 421745 - DNA, 357 bp, Oryza sativa nipponbare
tacttgaaatgatatttctattaacgcggatgactaagtctatgaaatcgaagaggttccccgggtactccgggattgctgcgattattgtcaccaccttaatctctccctaattttagtatacaataaaaaacattggagcctcttatgactcagatcaagattgtagagcgtgatatgaattgaggatgagagctccttcaataactatgattgacggtggatgagcatgctagtgatcggaaatgccctgcctctgccatcaggagtaaatcaagagcgttcatgccgaaccctgagatcagacagcgatgatcacgattcggccggaacctggcttggcccaactggcaccaa

SEQ ID NO: 421746 - DNA, 394 bp, Oryza sativa nipponbare
atacttgtgtttaggcgaaacttaaaattggggggaaaaaagggattgatttgtctcctctgcaagtattttttgggtgttttagctgctgcgtatgaatttgaatcaatggaacaaatcacaaaaaatggtgagggggttttgatggaataatcattttgcggaggctcctctccatcatcttgttgtactgcacttgcagcgagcgaggagatcgttttgcctttgcaacttcaccggtagagcggctatcgcttgcaactcgcactttcgcttaactctgaaacctgaaactttttttacagggaacagtaaactgaagaaacaatcttcacaagactgaagaacagatcaggaacaaccaaagaaggcgttttttttcttccccttttat

SEQ ID NO: 421747 - DNA, 350 bp, Oryza sativa nipponbare
cgtccgcccacgcgttcgtggacgcgtgggcggacgcgtgggtctgcccgggaatgccgagccaaggtacagcgggcgacctagctatgtatatggtgcgtagcattattaacagacatggaaagaacactaataagtatacaccaagaccaaaaactgccacaaacaaaagatgtagaggggacaatgcaacagaaagaacagcaaaatgggttacttaacaaattataacatacactttctgctatttttttttcctgcatacaaaatatcattaacacccaaacaataatgggtaaactaaataaattaatttaactatagtaagaatgatattctaaaaaagaagg

SEQ ID NO: 421748 - DNA, 71 bp, Oryza sativa nipponbare
gcggtgtaggtcattcaagcttacctacacatgcatgctattttatatctcttttatagagacacctaaat

SEQ ID NO: 421749 - DNA, 374 bp, Oryza sativa nipponbare
ccacgcgtccgcaaaccctcacatcacacgcagaaatccgcattaacagcccgccatggcgttcacgctgaccaacgtgggcctgtctaccccggcggcggcggacatgctcctcgttaggccggtcgctcggagctggacccgtggtgtttcccacgtgttggccgcgccggtttcgcggtggtgaggccgagcgggccgtcaaccccgacggacatgtacatcatgatgtcggggagcatctacaaggctaatgaggcgtgcgcagtggacactgccagcgtcgagtgcgcggagcaatgagacgaggtgaaggagctgctcgcgacaggcatccactcgcgcgacatgctcaaggagaccttctatcctct

SEQ ID NO: 421750 - DNA, 437 bp, Oryza sativa nipponbare
ccacgcgtccgccagtttataaggtcacaaaaactgtgtatgcatccccaagccgtgtaaattttcatcttgatcgaagaaaggctgtggaaactgtacctgcatatcccaatatttgtttctcagttgatgacttcgatgatacttttgatgctgttgttttgtcagaccccgaacattgctattgtgtgattctcaatgcacatgatggggcagcttttcctgaagacactgaatcgaagaatgccagctcaaatctactaaacactgggagcaaccaagaaaaaccaccaaagagaacactcttctcaggctacgttagctaccaaaatgttcgagaagcctacaatgctggcagatcacaatttgggagcttactctcactcgggcatgaccaaactaaacttgataaactttatatgaggggccctgaaaga

SEQ ID NO: 421751 - DNA, 392 bp, Oryza sativa nipponbare
ccacgcgtccgccacgcgtccggatgccttgagctgaaatcataatccagaaacgctgttttgctggtgacttgcagccttcctttgttcggtgcacgttgctattctgttcagctctgcttcccaacttgagcgtgccttgtaatctgatggcaaggcgacgccatgccatgccacagtccactggtgtctaaccaccaaattgtactcgttggaagagtgacccatacaggctcaacgggagtctgaattctgatgtccctcatacagccatacaggagtagtaggttggtagtctgaaacttttgttttgctctgatgatgtacgtgaagaagtggtgtgtttcccttcttcgacctatggttcttttatagtactggagtagtacagt

SEQ ID NO: 421752 - DNA, 431 bp, Oryza sativa nipponbare
ccacgcgtccgtttaactgtttggcacaaccttgttgtccttgagtcctgaaaactccagcaaaatattgttgtgattagaattaggtacaggcatctgattaagttattgtaaatcacatccaccatctgatttggtgaaggtatccctaaaacaaacaacatggatacaaattaatcaccttacaaaggatgattcctctatcttcacagagaatgattcctcttatctttacaaagttaaaaaaaaaatacatcacttgcagcaaaaagagtttcttctctacatagttcaaatatattatgctgaagaacattattatatagtacaatttatatactttggagtcatatattagttttgtgaaacaatgaagcaaatgtaatccatctaataaaatgttttatgataccatttacttattatttata

SEQ ID NO: 421753 - DNA, 337 bp, Oryza sativa nipponbare
ccacgcgtccgccacgcgtccgcgcagaaatccgcatcaacagccagccatggcgtccacgctgaccaacgtcggcctgtctaccccggcggcggcggcgtcgtccctcgttaggccggtcgccggagctggacgcgtggtgtttccccgtgttggccgcggcgggttcgcggcggtgagggcgagcgggccggcgacgctctcggacatctcgtacaagatgtcggagagcatcgacaaggcgaaggtggtgtgcgcggtggacacggcgagcggctagtgcgcggtggtctgttactagctgtacgacctgcgcgcgtaccgcaccgtcgttcgc

SEQ ID NO: 421754 - DNA, 387 bp, Oryza sativa nipponbare
ataaatcaaagtgagatccacgaatctgtagaaaattcactacaaatcttcactcacataatacaaatacacagcgagcaccacaagcgttcaattatgcatgcagttgtgtcatattacaaaggttctaggtacaggaatgtttccatgcctggccaatccatctatgatcatcatcagatcatcaccatatccagaagacgttgcatcctcactaatacttcatcttcccctcgcactcgatctcgacatcatcttacatgaatatgacttacttcacgcaacaacacaagaggtttaagaccaaatcatgcaccactcttaatcgcaccataaaaaaccaacctagtatagatgttatacattctcaacaaggttttgtttttt

SEQ ID NO: 421755 - DNA, 415 bp, Oryza sativa nipponbare
tcaacggataaaaaattggagtgtatatagtctactgtggatgtatgtgtatcagtgtatacagtacccataccgaaatgaaaaagccatgaagaaaaatgaaaaaaagaaagtatgtttttccccatcggaccatacaagcaaaacgccaaattggactagtgactacagatctttgctgaaaacaaataaagattcttaacgaacactaaagatatactaaaccaagcacggtggtgaccacaaggaacacatatatttgttatcaaatgcgctaaatgggccctagtggtctagcagatcaaagccaatgtagcgagcacaaagcatttgggaccacggccctacgctgctcaacattgcacgaccaactgacctggaatcatcgaaaccacaccccactaaaaaatcccca

SEQ ID NO: 421756 - DNA, 413 bp, Oryza sativa nipponbare
taacatagatggacaaaaaccgcattgggaatttttgcatggagccaaaaacagtgatcactgttcatacagagtgatacttcaccagtctgtcacaatacctacatcgactaatattgctaactgaacaaactcctcaagctactgagctatgcacacacggattaccaaaacatgactgattgtggagtcatactgcccaatcgggcatcatccatagtcactgatcagcagtgcacaccgtgaggcgctttacccgaggcaggagcgtggggactcggtcgtttggaaccaggtcatgaaagccatcatggccaaaagctgataccttccacagaatctgataaagccaagagatccacctaatactatcaaataatcgagcaccggcctgctccaactaacaattacta

SEQ ID NO: 421757 - DNA, 342 bp, Oryza sativa nipponbare
  unsure (1)..(342): unsure at all n locations
ggtcaccgcgccaccgtacgcggcgggggcgccgcgccggcgggttctcgccgctcgtccgctgggccgcggcgcctngctcgcgctcgcgccggccgcacgcacgtngtcgtnctctgtgacgggacctcgccgcggcagctgggaggacgtcgccaggcgccaaagcggccggaccgaggtggcgagcgtcaaccacgacgaggcctgctagcttttgagcggaccagtcctcctggtcttttgtgaccttggccggggttatggcacccaaccctttttattccaggggcttttaagccactaaaactcttagctgctccttcctctcgatgtcgtaag

SEQ ID NO: 421758 - DNA, 287 bp, Oryza sativa nipponbare
ataattaatttatattttttgggtttttttattatttttataatattttttttatttattatttttttatatattaaaacataaatacaaatttttaaatttataaaaattgcaaaaaaaatacatacatcaataaaaaaacaaaccaaaacttactgaactaaaaacacacactcacaaactcataaataaactcacatttaaaaataaaacctagcttaaataaaccaaaaaaattttcatatacaaaataaaagggcacgcgcttaatttaaatagaaaaattt

SEQ ID NO: 421759 - DNA, 98 bp, Oryza sativa nipponbare
ataataaattttttttttttgtggcttttaaaaaatagaaaaaaactccctataaaacacaaataaccaataattttcttatcataaaaattaaaacc

SEQ ID NO: 421760 - DNA, 101 bp, Oryza sativa nipponbare
  unsure (1)..(101): unsure at all n locations
ttttcagctcataatggtttgagataaataaacagctgatccancacagtaaacataaagttcagaggtccaaattgctcatatccccttggctcacacca

SEQ ID NO: 421761 - DNA, 407 bp, Oryza sativa nipponbare
  unsure (1)..(407): unsure at all n locations
ggggtggggttaattattttgaggagtttttttnncaagggaaaaaaaaagttattttggaaatgcccttttttttttccacaaatttgaattgagaaatggggggataaaagtccatttaataatacatgcttgcttgatttaccagttttttggcccttaaaattaaatcctcttattaagtccttccttttggggatacagatcaattttatttccgaaaaaacccataatccatttggttaaaaaaaattaattcaggctggttgttccccacgtccaataattgggccggccttttttatacaggggttaaggtttttacccacacttccccttttacaaatcctttctggcaatgacggggcgcgccaacaaacgcaccggggaaataagggaattttggg

SEQ ID NO: 421762 - DNA, 230 bp, Oryza sativa nipponbare
  unsure (1)..(230): unsure at all n locations
tatgacttcgcattcactcttacgtgagcttaaatcctctacatctaccccccttttttttttttttttttaaatatatatatcctnatcttttgtgtatttcataaacatatgccccacccaacaacatatactcatatcaaatactactcttacataaattcccatttatatcaatttaaacaaaaacaaaatcatttcacaccctttaaaatcaaaaaaccatgaac

SEQ ID NO: 421763 - DNA, 307 bp, Oryza sativa nipponbare
tattatttttttttttgttttgttttttaaatttttatttttttatctttttttttttttttttttatataaatatttttatatttttttttcaatatatttttaatatttgaaaaaaaaaaaacctaccacacccctaaaaaattaacattcttaaacacctaaacaacaaagtcttttaaaaaccccttaactttttttaaaacaccaaacacctaaaacttttttgacttactcttatatacaaaaaaaaaaattttttccaaccacaaaaaagcgttccataacatccccttttctagtttct

SEQ ID NO: 421764 - DNA, 441 bp, Oryza sativa nipponbare
  unsure (1)..(441): unsure at all n locations
tatgacttcgcatgcactcgtgcgggagcttaaatcctctanatctnccnccctttttttttttttttttaaacactataacttanacagcattgtgattatccaaaatccacatcccctacatcaccacagantaaaaataatttctcattatcactcgaacatacaatttttcatataaaacacatacattctacaaaatttaaatgaaatactacaactaaatcaattctcttaacagtagaccaactagaacatgtaatgctaactacacaacacattctgccaccaaaaatttataacttttcctccaaatcctatattccaatcattttctccttaaaacccttcctctttcagatatcctccaccatgttttaatccttccacccaactttaatattatcaaatttcattatatccccaatttctaacacacac

SEQ ID NO: 421765 - DNA, 318 bp, Oryza sativa nipponbare
ataacaaaaattttttatccttacaatttaacaaaaatttattcacctttatttttcaaaaacaaaaacaccacaaaaccccaattaataaaaatcacttaaaatatcccctcaaaataccctcaaaaaaatttattttttatatacccaaaaacccccccaaacctccacttttttaaaaaaacacaaccccaccctttatattaacaaattttaatcccccccccaacccccccttaaatatccgttttttatttaataccaaaataatcacataactcaccccccttatttttaagatttttaaaatatttaata

SEQ ID NO: 421766 - DNA, 487 bp, Oryza sativa nipponbare
ttaacaaaacaaacatgacttggacttagatggcattgtgaaatgaaaacatgtgtcaacaacaaaaactatagtactacaattcagggtgtaggttactagctcaacaacaaaactgcagttcagaattgcgtgatggctagtacatgttgcaagtggcaccaaaatcgttacagctgtacccatagcggaacattcttccgactgattaagcaaatatccctacaaagtcgctaagaaaccaataaaagaatattttctgtcaggggaatgagaaaccctaaagaatagcctcaatcctttgcctcttgtgatcttacaactgacaagtagatatgcctctgaagattaccacagggtcaagatgccatctccaggcaaagattaagtgctgacttaactagatgaacgttcatgtctcacacaaacaagatcatctagcttgtttccatccatcttgtacagagatacgccggccatctggaca

SEQ ID NO: 421767 - DNA, 135 bp, Oryza sativa nipponbare
gtatgacagaacctaaataacggtgtgttggtactaattccacgcaccagctacatgatcattacatcctccattacacaggcactaatgcatcggttacacatagcaagtattgacacgggtgactagcttaac

SEQ ID NO: 421768 - DNA, 430 bp, Oryza sativa nipponbare
gctgggttaacactacgtggggtcgcgtatttacatgtaccccaccgcaaaacagaacaaaatagcaacagtgaagagtcttcctcatgacaaccaaaaaaatatatatttacattatttcatcgcctactttcaacattgtacaaacacacatgaaaattctacaagttttaatctgtttaaagtacacatgtacatcccaccactgcttctctgctcactgttttcttacactatatcgagcccaagggacacaaactttcccacaatcatgcacatatatcattctttctcgtgcacaatgggaattcgcagtctctcataggtccaccggaggggtttccttgtgtaccaggtcatgtgcaatgtagtcccaaggaagagataccgacatcagacaacatttcagaggcagaagctcatgatcaaa

SEQ ID NO: 421769 - DNA, 349 bp, Oryza sativa nipponbare
  unsure (1)..(349): unsure at all n locations
cacgcgtacttaaactctcatcctctanagccgcctccctttttttttttttttttttgtctaattcttgggtggggttttaaacaatttaatttccacaaaaaagaaaaaggttctttcttaaaactttaaaacctaacacttaacaaacttttctttctcaaaataccaaaacaaatcttttaataaacaaacatttaattggttacccaaaacaaaattaaactgtattacaacctgttcctcctaaaattaacattaacattctttaaacaataacaaaagcaccactacttgaatttcactaaaccatctttatatctgttacctagttaacgaacttaattag

SEQ ID NO: 421770 - DNA, 127 bp, Oryza sativa nipponbare
accttaaaagggccttggttaagggggaaattgggactaatcaagccgggccaagaatatttatttgtccccaaaacataagggattttataaccaaggcattcatacccttggggggaaaggggga

SEQ ID NO: 421771 - DNA, 459 bp, Oryza sativa nipponbare
ggttgttgtttttttttttttttgtttttttttttttttttttttttttttttttttttttaattttttctttttttttttttttttttttttgaatacataattaatggtacacttttaattttgattttttaaattgatgaggagtgagcttttttttaaaagatgaaggatatgactctaatacctagttggatcgattttggtaagactcatcaaattatgggaggaaaggaacttttacagtcggcccctttttatattccagtctagggggttatatcttgggatggggcaataggaaacaggttattttttggtttaaattcgaaatgttttttgaaacaaaattgttaggactggttttgatttttttaaacttttgcgggggcactttttttccaaccaaataattcgctttggttttatgctttggagggtaatggaaaaggttttttt

SEQ ID NO: 421772 - DNA, 323 bp, Oryza sativa nipponbare
ttgaatatataaatatagactgggtattatatagacatacattgttcaggacctgaaatgatcaaagctttttataaaaccctatttcaattttctaataaattaaactagctagacaagcatatgtttttaatcctcgcttttctacatagacatgtaatgcatctgctctaaatacaccaaaagttaatgctgtgcattatccatataacaaaattcttcaatttttatctgatatattatcagacaaagcgcttatttactttttgtttaaatcaaaacataatcaaagggtttatactcttattcactactacttttct

SEQ ID NO: 421773 - DNA, 82 bp, Oryza sativa nipponbare
  unsure (1)..(82): unsure at all n locations
tttggggaaatanttggttagggggggcattccaatataaatgggcctgatattgtgtctggatgcttggtaaatcatcata

SEQ ID NO: 421774 - DNA, 143 bp, Oryza sativa nipponbare
agcccatatctctatggaatgtgcttaatcaacaaaaacatgccatccccagataccgattcatcgctatctttttcacctaacaaagataacacataacacgcacacatgtttaatagcaagccctatgactaccttcttaa

SEQ ID NO: 421775 - DNA, 333 bp, Oryza sativa nipponbare
  unsure (1)..(333): unsure at all n locations
aaataaaaatatattttttataaatttatataattaaatattttattaatttttttattaatttattatnaattaaaaaagataaatataaattaaaaggaaaaaaaatttacaaaatgaattttggccccaaaaaagggaccaaaaaaaaatttttccccttaaaaaaccaccaaccaaattttccaaaatttccttccccctctaaaaaaaaaacactctcccccaatttaccccaaaaaacccaattcccaccccaaaattttatccgattcccccatccccccaaccatttgggccctctataaaaaaaaaaataaatctccccccccc

SEQ ID NO: 421776 - DNA, 330 bp, Oryza sativa nipponbare
ccacgcgttcgtctacgctttcgtccactcgttctcttttttgtttacggttgcgtgattttttgcgtatggggttaaggtttattatggtctggttattgtagtctttttatattttttttattttttatagattttatttatttttttttatataactttttttttttttttttttttatttatttttttttttatattaattttataatttattttttttttttattattttatttttttttatttttatatatttatttttttttttatattatttttttattatttttatgttgtgtaattttttttacttattttttattattt

SEQ ID NO: 421777 - DNA, 228 bp, Oryza sativa nipponbare
ccacgcgtccgcccacgcgtccgtccacgcatacgctgctaccagagaccgggacgtgtcagttagactgctggctcctatcaagggctagcgacaacccaaagaagtgtgattgtgtgtaaacatattccatgtgtaaatactgtcatgtgattgcctacttacagcggataattacctacgatgtgataataccgataccagcttgagataagggcggacgatatg

SEQ ID NO: 421778 - DNA, 450 bp, Oryza sativa nipponbare
ccacgcgtccgctcctcacgcgcatcgcgtcctcaccctcctctcaccgccgctgcaccgcccccgcctctctccccagtcaggccacttcatctgccagcgaggagaccaggggcgtcgaatccggtgaccccctcctctctacaggcgattctggccgcccggacgaaagggtcgtgagccaccaccaccatcttctccaccctgctttgtgtagtgccagatccgctagcaggccgtcgatacggcgcttcgtctccccccggtggatctggccgctcagagcttcactggcgccgaggacagcgagctcgcacggcggctcaggggccccgccgtggccgtgagggagcgccttagcttcatgaacgagtaccttgccgaggaccgcgaccccgtcaggtgctaggtcgtcgccgccgccgtcgcgttcgtcacgctcatcgtatt

SEQ ID NO: 421779 - DNA, 423 bp, Oryza sativa nipponbare
ccacgcgtccgtgcaataagacggatgttaattcacagagagtgttgcccaatacgaatggaaatggaaatccaattcacttttctgatcttcaagagaccattgatgctaaggctacatgtgctgagcaatattctgaaaagtcatctattgccagtttggaggattctaaaaatcctgtttcatgccatgaaatgtctgcagtcatagtaaaggatgtggtatcttcgggtaaggacagttcttccttgaagcaccatcttgaagaagggaagtttaaggaaatgcttgctgaatcggcatcttctgagcttcacttgtctggttgggtggatgatgtccgtaatttcatgcacactataaagagacgccgtctacaaaatacaggcacgcctcaagatagtgacacaatgagaaaggagc

SEQ ID NO: 421780 - DNA, 109 bp, Oryza sativa nipponbare
ccacgcgtccgcccactcgtacgcccacgcgttcgcagacgcgtttgcgaacaaggaaacgaaggggaggagcagtcatctcttcgactttggaagacactatttctgc

SEQ ID NO: 421781 - DNA, 233 bp, Oryza sativa nipponbare
  unsure (1)..(233): unsure at all n locations
gcctgcagtaccgtccgtnatcccgttcgaccccgcgtccgtcacnctttctcgcatctcatcntactcacatcattctattatgcaagaagtgtgttggcaactataataatatcaaacattactcttttggattgcttcctataataatatagatgcaactattttattgggctattgttgataatatatcaaatatataaatatggctatatatattttatttttacatt

SEQ ID NO: 421782 - DNA, 302 bp, Oryza sativa nipponbare
ccacgcgtccgcccacgcgtccgaagaaaggatcagccacacatgggattaactgatcactcactcatctaatgaaagcttagaccatgtagggcatgtgctgatccttcaattgctctgacaagagccagcgcttgaagaaaggtaccagctattgcgttgtactgacggagccagagcaggcagataggggcggctgtcgcgtcgaatagaacggggctgaagtgcacaccaggtggtctgcccgactggagtacggcaggtgaagtacgaacaacctgatactcaccgctggagtacct

SEQ ID NO: 421783 - DNA, 255 bp, Oryza sativa nipponbare
ccacgcgtccgagcactcctccgcttgtagagagagcatctagcttggcagagcaagtatgacgacgagcggagagagatagcccatggatgatcctcacactgttagccaagtactgaaaagcatctatcaccactaaaggcctaggaacctggatgctacttctatgacaaagccgaaccgatgcacagctaaaggacatcatcagtgaaggccacactgccaggagcggcaacatataaatgaaggccctct

SEQ ID NO: 421784 - DNA, 160 bp, Oryza sativa nipponbare
ccacgcgtccgcacctatcgaccacgtcttccctcccccgcggcgaagcaatggcgacctcgtcgccgccgtgcgcttgcgctgctcctctcctccgccgccgcctcctccccgctccgtcccgcgcgccctcccccgaggcgccacctcggctgcgcct

SEQ ID NO: 421785 - DNA, 363 bp, Oryza sativa nipponbare
ccacgcgtccgccctagctttcgaaggagactggcgggggggggcgctgcgtgcggcgtgcggtgcggcggggggcgcggtgtacggcggggggtagccggcgaccgaggcgcagtcagccaggcaggggcggatgccggctggactcactggcgcaccatctgctagggtggctgctgagcgggcgcacggccgtggaggcgtccacgcaggaagaggaccactcggcttggcgctagggcgcggggcagcggctgactcttgaggcaactgctcggggcggtctgcggcgacagctgtattgaatgccgacgtgcggcctgatgcgacagctgctgtgcgatcatggacgacatgatctac

SEQ ID NO: 421786 - DNA, 349 bp, Oryza sativa nipponbare
ccacgcgtccggccacgcagaggctggtccagaggaggctccacgaccgccagcgcgcgcttgcgggcgcgcttgacatggtgctgaccatcacgccgacgtccaccggcgcggccctggtcctggcgctcctgatggcgaagctcaaggggatggtgctccggatgccgcccccgaagccgtccccggacgagctcgtggtgcacctgttcaagcagaccttcaacaaggcggtgaaccaggcggtgcacgacaggttccgcgacaggctcaagggcatgctcaagggcttcgacgaggccttcgacgtccccgacttgagcggctcctacaggtgctgcaccatgta

SEQ ID NO: 421787 - DNA, 463 bp, Oryza sativa nipponbare
ccacgcgtccgcggacgcgtgggcgtggccgccatggacgtcgtggccaagcgcggcggggagcagccgggcctcgcgcgcagcctcgtcatgctgctcgccaacctcacccaggtcgactccggcgtcgcggccctcctccaggttggagatgaaaagatgcaaggactgtatgttgcaaagcttgtgcggtcattctgcaggtcatccagtgagtctgaagaggaagatatctttgaacatgttgcttctatattagtgaacatctcaaaggttgaagctggaaggagaatactgatggaacctaagagaggccttttaaaacagattatacggcaatctgattcaacaaaccaacttagaaagaaaggggttgttagcaccatccgtaactgttgctttgaagctgatacccaaatacaaaatttgctctctctagcagaatatatttggccagctctac

SEQ ID NO: 421788 - DNA, 327 bp, Oryza sativa nipponbare
ccacgcgtccgcccacgcgtccggggatgatggggacggaggctacggcgacgacgacggtgagcggcggcagtggcagggcggcgccggcagcgctgtgcctgcaggcggcgcgcggcgcgtggtcgcggacgagcaaggtgctcgacgtcgacgccgcgtcgcccacggcggcgccgttgctcgggtccttcgtcggcgtgccgttcctctgggaggaggcgcccgggaggcctaaggtggtggtggtttttttagaacatttttttgtttattcttgtctttttatcttattttctcatattgttgttatcatatttctttatt

SEQ ID NO: 421789 - DNA, 84 bp, Oryza sativa nipponbare
ccacgcgtccgaaaaaaaaaaaaaaaaaaaaaaaaaaaaaaaaaaaaaaaaaaaaaaaaaaaaaaaaaaggacgggcgttaagg

SEQ ID NO: 421790 - DNA, 410 bp, Oryza sativa nipponbare
ccacgcgtccgatttgtgttttctattttcctttgaaatggacatatgctgcttttgattataccatcaccagtgcagtactgttttcaggggaaaaaaaaaaaaaaaaaaaaaaaaaaaaaaaaaaaaaaaaaaaaaaaaaaaaaaaaaaaaaaaaaaaaaaaaaaaaaaaaaaaaaaaaaaaaaaaaaaaataaaaaaaaaaataaaaaaaaaaaaataaaaaaaaaaataaaaaaaaaaaaagggggtggacttttttaaaaaaataataattatttaattgaaccttgaaacttaataatttttattttattgtactaaaaaaaaaaataagtcaactgtttttaaaaaatctgaattttgaaaaaaaccgtgtttacaaaaaaaaaatctcatttaaaaaaatac

SEQ ID NO: 421791 - DNA, 352 bp, Oryza sativa nipponbare
aaacaagtaggccaattattaggggacgaaaaaacgatgacccaaagtaaggtagtgctgctccgatagccctaccaagatctcgcttacatatctatcgctggaaaaatgatattacaagcgatatgaagctcttgccaacgtcatgcaagcgaagctctctttacaagtcattctcagtttgtcacacagaatgcgaggactgaaactgaaactccttccagacatcaaacgaagctagcctgattttctaaggaaagagatggacaccacgaggatcgccagccctgccaagatgcctacgactattgccacagtccgcccgacgtgatcatgcgaataatctagcgac

SEQ ID NO: 421792 - DNA, 488 bp, Oryza sativa nipponbare
atttttaacgaactcaagcagttagaatgatttttggcataccaaccctctagatgactcagaggagacgatgatgcgagcataaacaacagatgtacacactacagctgacacgaaaaaaaaaatggagaggtactatgagatcataagaaagcctggatagtagatgatttacccatattgttcatagtgttgcttttacagtgttaattaatgatcaaaagtcgtgccccaaattcctccaggagggatcgatggtttgattcctgggattcttggtaacctcgactaaagaaaagaatgaggagcagtcagtgaaaatcttgccctgtcagctgtgactcattgttctttataagccagatgccttccaataaaaagttgaattgttttggcacttgggggacctatgtagaggttctttggcagttctactggggtattatcaacactccctacacctaataccatgagcgtgacgaacgcgt

SEQ ID NO: 421793 - DNA, 292 bp, Oryza sativa nipponbare
caataaaaacactcaggttagaggatttatgcaaaccctgtaactgttccctttcatatacaggccgatcgcatcatgtagcttattgcgaaggccatgtcactaccgaacaaaatatagaaggtcaatcattccaatactgtacccaacacaaacagttttgtttgagggtcctaacttccttagcatatgaacactcacggacatcaacataccttgtctgtgtcgttactacagcctaatacgaatgcgttcacctactcagactacccatacggtccaacgaccagat

SEQ ID NO: 421794 - DNA, 122 bp, Oryza sativa nipponbare
  unsure (1)..(122): unsure at all n locations
tttatctcaagctgggtctgggggcatcacatcaaaggtatatnaaacgctgctaagtagggcaccacatggcagtctttacacatggaagatgtttacacacaaacacaccggacgcgtga

SEQ ID NO: 421795 - DNA, 419 bp, Oryza sativa nipponbare
ttcacaaaaatttcattagtatataatacgtaaattgtagtaatgttataaattcggcagagtgacggtttggcatgacaccaacgaaccagatggttacatcttacaggaaggaagcattacaagtcattcgctttcatttgggctggccgatggctctgttggctgcgcagcatcttcagatgccgtctccacggtctctgcagagtcatttgaagttggtaaatttgggtcatcatcacttacttcctcgtcccagtaaccctccagcaacttcatgactaacttgtaaatggcatcattgtcgacttcctgcagatcttccagtttatccaaacccccacattctaaaataaactgtgcatacgggttcaccgtggaaccctgcccctgcttccccactgcacccgcctgaagta

SEQ ID NO: 421796 - DNA, 294 bp, Oryza sativa nipponbare
tttttgtaaaacatattatcaggaaccggttacacattcatttcctaccaaatcacaacttatactcctagtttttaatataaaccttatcaaaagtcacgatttacacacatcaactaaccatagtcatcctaacgattctccgtatgacaaatatgtactctttcatttagcaaaatactctttgctacacatcactttttctttacacccatcacccaaataaatactttcaccaatgctaattctcctacaagcacttcaatcataaacccgagcatagtcctaatgtat

SEQ ID NO: 421797 - DNA, 391 bp, Oryza sativa nipponbare
ctagcaaaaggaacagggattggatacttatcacgagaagttcactgaaattacattcttaggagaagcagcgtatacacacggataaaacacggagaaaatctttacgagagatggttggtgtttgggaggcaagaacgggctgcggcgtggcgctcattacacgtatgtgagcaccttcttgacgatctagccactgagggaggcgacctgggcttcgagcgcctacaacgacatacttctattgggcctctaggttgcctgagaggcttccgaagaatgagctcaatcgtgaacgggacccatcactagtgtggcactctagctgtcgggcgcgttcttggggcctgtaatcttcagcctggtggctctggacgggtccctcttttcc

SEQ ID NO: 421798 - DNA, 440 bp, Oryza sativa nipponbare
ttattatatttattggggtttgtttttttattattataagtttattttttttttttttttttataaaaaattaatatttatttaaaaaaaaaaaaaaaaaaataacgagagaaaaaaaaaaaggggaaacaaaaaatatttaatgaaagaaaaaaaaaacgcaaattttagaaggttggaaaaaaaaaaaaaaaaaaaggggggtaaatgtgaaaaaagaaaaaaaaaaagaggaaaaatttgaggtaaaaaaaaaaaataatcttctttaaaattaaaaaaaaaaaaaaaaacctttggcccatttttaagaaaaaaaaaaagaaggggcacaatttataaaaaaaaaaaatagaggtccaaaaataaaaaaaaaaaaatttacacttaaaaaaatttttaggaaaaaaataaaacaataaaaaacaacttctgaacag

SEQ ID NO: 421799 - DNA, 374 bp, Oryza sativa nipponbare
actaaacacgacttgggtattgctacgaaacataccactatcaaatctagcagactctttgatccaaagagcaaatgcatttcatttatacaatggagaaggcactgacataaaccattcagtctacacactactgttgcataattgaactagctacacatgtttctccatcttttacacttacataatactaaactactacacaaatgtctggacgttttacacctacacacataattcgggtcactcatcgcctcataagactctcaataataagtcaactattaacttatcacacacttctgcgcactcttgttggccggctccttattggggcctgtaatcttcagcctgctgcccgcggacgggtccct

SEQ ID NO: 421800 - DNA, 94 bp, Oryza sativa nipponbare
  unsure (1)..(94): unsure at all n locations
ngactcanaaaggacaattcagggctgcgttgtttgcagaagcagggggatatttaactatttacagaattgttgtatggagcttacatgttta

SEQ ID NO: 421801 - DNA, 237 bp, Oryza sativa nipponbare
atatattaatattttttttttttttttttcaccaaccccacttaacatttctactattgtttttgaaaaaaattattataaacaccatttcttcttcaaaaacaacaacttaattttttttgctgctcaaaaaacacaaacaaaccctctagtctaaataaaaacctaagagccatcctaatttgcttctccaaaagagggaagtcgacacatcttttatgcaacttgaaaactcca

SEQ ID NO: 421802 - DNA, 465 bp, Oryza sativa nipponbare
aacaccatctatgacctctcacgcacccttccctcagacttaactctttacctctacaccccctttttttttttttttctataatgaaatacctaatatcatcggtgtttatacaacatgtacttcattcacttttcaataatccccccaccacttctttcatcttcttttccaactatttacatataccccaacctcttcattaactaattcctcatcccaaaaaaattcttcttcatttaaaaattcctaaaacacagtccctcaattcattttttattcacgcactttttgtcttacgcctatttctttttcctcacactttcataaacaaatttttttataactcactctatatttctctttatcccccccccctattccctttatacaaaattaaaccttttaatatttcctacaccactttcctaatatacctctctattctacccaattctctctttt

SEQ ID NO: 421803 - DNA, 210 bp, Oryza sativa nipponbare
tctataaatgccaccgtatatgtctttggcccaaaaagaaaaaaaaaaggtgattatgttacattcccatatctatggccctgccataccttctttttattcaaacaaaaccattttaaaaatctaggcttttgttccctaaaccaaggcccaaaaaagcccccccccattttttcttttttaccaaaaaatggcaattggcttttttct

SEQ ID NO: 421804 - DNA, 516 bp, Oryza sativa nipponbare
  unsure (1)..(516): unsure at all n locations
tttttttttttttttggttttggttataaatttttttttttttttttttattaattttaattttaatttttttttttttttatattataaaaatttatattttttttaatattattttttttatttttttaaaaaaaaaaaaaaaaaaaaattctttttaaaataatttataatantataaaaaaaaaaaaaatttatattataaaaaataaaaataaattaataaagtgccaaaaatttaccactctcttaattttttctttcttttaaaaatatttcaaaaaaaaaaatataaaatcttttaaaataatattttttaaaaaaaaaaattaataaaaaaaatttttttaaattttttttcggcctatttttaataaaaaataggctttataaaaaaaaaattatctatcacaaacaattcataaaaataaaaaaattttttataaaaaaaatatttttattttaataaaaaaaaaaattttttattaaataaataaaaacaaataattttttttt

SEQ ID NO: 421805 - DNA, 356 bp, Oryza sativa nipponbare
ctctgtctttcttgccctaaaagccaccattggccgctgcctctactgggaacatacacgccaccatcccatagcctcacaccttctcaactatacacactccataatcatcacacgcacactgacttattaccactgctttactcaccgaaaatattacaaaccacacatagagagacggattacttatatgcaaaaactctagacaagatagatgatactccaaaaggatgcaatcttagaaatggagtacttacactggatcatttacaattccctatccgataagaagagtagagcgacaagggaccaaatgtacaaacctgccgttgcccactgggtagcctgacgcgtgg

SEQ ID NO: 421806 - DNA, 342 bp, Oryza sativa nipponbare
ataaaaaataaaatttttttttaaacactttaaccaaccctttatcatacccaaaaaaacaaaaccctaaacctcaacaaaaaaaaaaaaccttataaaaaatatcaaaaaaccacacccaaaaaaacaaaaaaccccccaaatttcaaacaataaatccccctaaaaataaaaaaaaaaacactcccgtcaaaaaaaaataaaaaccccaaaattaataatcagtcgaccaactacaactaatttaacctcaacaacctcccccatcataaataaaaaaaactctaccaccacttcataaaaaaatttcacaaaccaacccaacaaaaacatctttctttt

SEQ ID NO: 421807 - DNA, 404 bp, Oryza sativa nipponbare
ttgagtacaaacacaatatatggggctcgtaatttacttctgggagttacgggaaacatgaaattacagagaacagtaaaataaaggagaacccattgttcttttcaagtatctttgatcaagttactaaagcatatgcacaaagccgtaggctgatcagtcaaagccttcaagatgctcccaaaagctccttgatatcatacccttgcagctgaagaaaggttaacagtaatattactcccgagttccaaaatgcatgtattgtgataggagttagaagattatgggtttgagcatatgaaaaacccaacgcaacaccaagtataaacaactgtgggaattgtccaggtgtcagatgagcaaaggcaaatagagcagcactgacaagtatgcaaactggagta

SEQ ID NO: 421808 - DNA, 189 bp, Oryza sativa nipponbare
ctcctgctcgcgattaattctaacattccccttattctttctaactcttcctccaatattaatccaaagaaactatatcattaccaaccatcttacattaattatctactacttaaacctaacacaaacactccccccactttataataccactactccctctcacataacatctccctccaagaatat

SEQ ID NO: 421809 - DNA, 422 bp, Oryza sativa nipponbare
tttagaagggcatatatatatatatatatatatttctctgttctgctcttgcctctgtctacaaaattccacgtattctttaaaagcaacggaagctaaataacatttgtgggtgggtgtggggggtaaaactcatctcgttctatacagattgctgagactaagatatcatatatacctatgtaagctacgaagagctgatgatagttcgttagcattctatcattacctactttacatttcaactctgacataattcgcatgttcaacaatggcgatcctcgtactgcagctcttgttcgactatgatatgcattctacatcaccattgatgttgcaggaaacagcctgtccagtagggtataaacccctccacccagtagaaacgcaccactgattgggtttatccatgcagaatacct

SEQ ID NO: 421810 - DNA, 335 bp, Oryza sativa nipponbare
ccacgcgtccgattatgcaagaaggaaaacaaggagaggagcatccatgcaatcacacgcagcagaatccacaagcacgttcctggggacgaggatagagcaccctgcaccgcacagaaggaggatcataacccggttcggattaagcccccggaagaagaccccgccgaagaaaacgccgagaccgcccgcgccgacaacaagcacaacccgtgagaatccctggcccgctggcagggcaatacctgcaccggtcagtcgaagaaggctacgcgttagaccgggaagaagcatcgtaagacctacaagatctacatgttcaaggtgctcaagct

SEQ ID NO: 421811 - DNA, 295 bp, Oryza sativa nipponbare
  unsure (1)..(295): unsure at all n locations
ccacgcgtccgcccacgcgtccggtccattggagaatcgatcgttgttgattgacgaggacgtacggacgttgatcgatcgacgaggatggtggagctcgaatcgcaggaggcggtgacggtcgcctccaccgccgacatcgccgtcgacgtctcgctccggcttctcgccgccgccacgtcgctcgccgccgtcgtcgtcgtngtcgtctaccaccagctgcgctggggcatccgggtcgactttaccctttttcaagtttgggttggcttcatggcgtagaacctggtttcca

SEQ ID NO: 421812 - DNA, 342 bp, Oryza sativa nipponbare
ccacgcgtccgaaagatccaacgagaaaagaaggaaatgatctgaacattcaaggctcaaagcccatgtattcatttgaagtcgatgtacttctatactgcaccattcattcatagctgacagaacgaatcatcccccaccatgctggtagacagatgcaagcctgatcgtgatccatggggcatgatgtactgggcattaaaacatgatccaaagatagagctatgtacctggtattaaattgaaggcaagtgaatgtattattgggcctgctggatccaatatattaattacaaggataatgtttgcccgaacctacaggagggaaaggttatcatcgag

SEQ ID NO: 421813 - DNA, 248 bp, Oryza sativa nipponbare
ccacgcgtccgcctgatccaaaggacaaaaagcctgagtaatgggatgaccatcatggggtactgttcaaacggggagtggtgccacttccagaatacaatgtacattaaataacgtcatgataattaatatctgtaactacaagggaaaagaggcgatcccatacctagtgagtcgagattgcctacaccacctatacgtatatgtgctgggacatcgttgagcttgctgaatagatgtttgtcagg

SEQ ID NO: 421814 - DNA, 364 bp, Oryza sativa nipponbare
ccacgcgtccgcccacgcgtccgcccacgcgtccgcccacgcgtccgcccacgcgtccgcccacgcgtccgcccacgcgtgcgaaaaaaaaaaaaaaaaaaaaaaaaaaaaaaaaaaaaaaaaaaaaaaaaaaaaaaaaaaaaaaaaaaaaaaaaaaaaaaaaaaaaaaaaaaaaaaagaaaaaaaaaaaaaaaaatagtctggcagcacatataatttaaagccagctggcgtatttaatgaagaggccggtaaagatagtcgtggcaacaaaaaaagcagtctgaatggagaatgttacgcgctctgaagcgaagaattaagcgcggagggtcgtggaggtacgcgcaaaaaaaacgataca

SEQ ID NO: 421815 - DNA, 342 bp, Oryza sativa nipponbare
tccgtcacgcgttcggaacacgttatcaaacacattcttcgactggtgctttacacgatcaacaggtgctagggcggacatgtccaacgacgagaggttcgacgacatctgccaggcgggcgccaacgggtttatcatagctattgatcgtgtttggattaaatcgtggtttccgcatctccacctacgccctcttttggatccgccacttccatcgtccgcgccatcaccctctccaacttcacccgcttccccttcgccatggaattcgagaggcaggatatccacagggctctggaggagctcttttatttctttatttgttgttcatattttattttt

SEQ ID NO: 421816 - DNA, 428 bp, Oryza sativa nipponbare
ccacgcgtccgtccttctcggcgtgttcggccgcatgtggtcgctctacaccgactacaccttcacgctcgcgacgacaacaagttcagcggcctctacctctaacgactggatctgacaattcgacacagagattgaacaggggatagagagactaaccctacactataacaagactgaaaccaattctgtttgaatcctccgatcgcgcatgactggacacgcggccagacgttattattttgcattatgagatggtgtcgataccaagtgaggacaccacttagatgagaccctgtactgatcctgcctgtagatatgttttttgtttggcgaatctgcaaatatgcctgaacctgcctatgcctctagtgtacatgtcacaattggtgtaagtaattgggagactgcatggatattttgaaact

SEQ ID NO: 421817 - DNA, 75 bp, Oryza sativa nipponbare
accaatccaatgatattattttcagcggataaaattcgatttacattacactactggttagtcagatgtttttaa

SEQ ID NO: 421818 - DNA, 65 bp, Oryza sativa nipponbare
aaatcacagggggcctgaagttaattcctgctagaacaaaaaaggttcaaaatcatactacacac

SEQ ID NO: 421819 - DNA, 426 bp, Oryza sativa nipponbare
cagtaaaaatttgagcgcgagggaatcatgaaatattttgctttctttcagaacatctcctctcctcgacgaacataaaaaaggaggctaatggaagagctaacggagtaatatttactgatccatgatagatgaaccaaagaacagtcaaaaattaaatggcggcttcagctcaatttcgaccgcccattgtgttgtctaattttatcctttttgatcccttttgcttctgatgatcttttcttgttggggctgacgcatcatgtaggaatgtgcaactagcaccatttcgacaacccttcgggctgttaaagtatgcacacggtttcatcggcctcaccttgccatctctgctcaccatagcagcagcaccgttcatggcatcaataccggcattttgtggaggaccaggttgggcggtacata

SEQ ID NO: 421820 - DNA, 468 bp, Oryza sativa nipponbare
tttagttggccagtttattttgtggtgaatttcctgcagatagaaccttgtggtgtacaaaaaccgatccaaagaacatctgcctgggttcatctggtgcccaacatagttctttcaaaattgttacaggtcattgaatgatgacatgagcactgattgcagctatcgatgcctcaaaaaatcctaagctattattagaggggcatcaagcgtacagagttatcttgaaaggagaggctaaatggctatggagaagagaaattccaccgaccgcttcttcatcgtcaatctccagctgccgctggccttcgcgagccattttgccgcttcgcccaagaactcaaccgctgggcgctaccagtcgtcccacaaccatctcagtcggaagcgctgggttgcttcgtcacctttagctgccctctacctgcaacagcatgcagcacggtggatccacggaagtcgagatgc

SEQ ID NO: 421821 - DNA, 393 bp, Oryza sativa nipponbare
tttttcgctaaatttaaatcggggggagctcacactattaacaaatacaacaaccaaatcaacactcattcctaccctatatttgggtgcgctaataaactaacctcctaaaccttactactactactaaataaggtccaactctttatattttctcttcaaaatttaccaactttaaaacctaatccaacgtgacagaaatacaaaaatggtctatacatattagcacaacacttttgcttcttctattcttttacatattcaataatttatgcacaataaatcactaatggaaatggccatgcactcattattccaaaacaaaataagtctttcattatatcaactcatgcttctcatacttagcgaaattagtttatatttttaaaggct

SEQ ID NO: 421822 - DNA, 332 bp, Oryza sativa nipponbare
acactgggttgttttttttatattattaattatttttattataattttattaattaaataacaattattaattttttttatttttttttttttttatttattttaacatatatttacttaatacttaaataacataaaatatggacaacaacattatattattaattgataaaataaaaaattcatttttattaatcaaaaaatttataaatatagaccttactttatttattaaataaaatcaaactcctaataattttctataacaacttttttctttatataaaaaaaaaaaattattacaaaaccaaaaatttttttttttaaaattt

SEQ ID NO: 421823 - DNA, 375 bp, Oryza sativa nipponbare
  unsure (1)..(375): unsure at all n locations
ttttgccaaaatncggccagagggtgggcttttaattattatcagtacccaccatgcaaaatattacattagctgggctgtaatgaaatacaaggtacagagatctatctttggacatgttttgatgcaaagaacttcattccacatggatcactatcaggcctgtatcacaacaaaaggattattggggctggtaacattgtgagctcaggatattcgcgtaggttagaagctcattgtcttaaagaaaatatattatctttggagcttaaatgtgcagatgattatcttattttcttgttgaaactttcggacgcggaggtcaagctacgaatttctgtatgcagcttggacgagttcgagatttacatatta

SEQ ID NO: 421824 - DNA, 443 bp, Oryza sativa nipponbare
tttgagtaccaactttaattgtgttactgagtcaaaggatgctagaaacagaaccgttcaatttgctgttgaggattcgcctaaaatctagtacatctaatgtgaaaagttttgttgtatgtaaactagagtacacgatctctcttctacctgtagacaagagaatatctcattcattcagttacatttgtccaccaataattttccatgcttttcaaggttgaaaagccaatccttctccttccttcagcattaatagtcatcttttgacggtaatattacagagaagggtggcactctcagttaatcctcgagcttatcctttaggttaattcttcatgaagatattcagggttccaagttgtatggcttgttcagaaatcagaaggttggtgctgccgatatcaggtagtgctatgataaatctgatgtatcgtcggact

SEQ ID NO: 421825 - DNA, 189 bp, Oryza sativa nipponbare
  unsure (1)..(189): unsure at all n locations
aaaaaaaaaaaattattttttttaattataaatttttataataaataaaattttttattataaaataaaaaaaaaaaatantaaaaaatttaaaaaaaaatttttaaaaaaaaaaaataaaaataataattaattttaaaaaaattttaataataaaaaatattaaaanattttaaaaaattttaaaaa

SEQ ID NO: 421826 - DNA, 345 bp, Oryza sativa nipponbare
  unsure (1)..(345): unsure at all n locations
aatanaaaattaatttatttatttattatattatattattatttttttatattttaaatatatatttaattattatattttttaagaaaaaaaaagaaaaagttttggcacacaaaaaaaaaaaatgagaaacattagcactctcataaaaaccaaccataacccccccaacccccaaattcacactttaccccttcccaacctaattgggaaaaaacacccccaaaaaaaaagttgcccaacctgaaacccccccccccccataaggcccttttctttttttccattttacaaaccccccaaaactccgacaaaacctcccccaaacacacctaagcccccttt

SEQ ID NO: 421827 - DNA, 505 bp, Oryza sativa nipponbare
ttaaaaaaacaatgaacgatggattaaaaagggaaatacctaacattaatttaaacttattttggtagacctgtttttaaacaaaataacaagcatgcccgcgcattcacgcgggctacctttccagtttgctttctagtttgtagtaagtacttcttcccttgatgaaatttggtctgctttcttaaccggctggcgaaaaaaataatctatcaccataggccaagcaagtattgccatccagcctgccaaccgtattgagcaccctgtccacacatcatccgctgtcaccaaaacgcccctgctgaattgaattgctgatgatatcatcgggtgtgtccaacggctccagcacatgaactgcaccatcgctcatgccgactgcaaactggttaggcttccagggatgcgcagcgacaaccatgggatacacaatttcaccaccgcttgaaactgaaaatggttataggcagaaggggcaatcctgcactgtaacatgagagat

SEQ ID NO: 421828 - DNA, 386 bp, Oryza sativa nipponbare
ggttggggtttttttttttttttttttttttttttttttttttttttttttttttttttttttgcaaaaacatggagtttttttagtagtacattgggttcacaccaaaaattggggtgtttaaaaaatcaaaccaaactgcccccaaatttaaaaattacttttgtttgtaaaaaaaaattggacagggttaatcggaacaaaaccttttttttttatccaattttactaacccttgttaaaatttgtttgaacagccgggaatttgtactttaaatgcacactggtccaccgaaaattggggtttttaatgcctaaaaaaaatgaaaaaaagggtttaatcggggtgggggttatgggaattaaagtttaaaaggggacttttt

SEQ ID NO: 421829 - DNA, 226 bp, Oryza sativa nipponbare
  unsure (1)..(226): unsure at all n locations
attattatttaatccttctataactcttgggcggactcttttaaaaaatcaaaaatatcncacacatacataaattattaccagctttacatatacacaatactattatagcttctcataaccatgattatatattactactaagataaatagactattcatcaaaattacatataatatacaaatcctatgcataaaatgtaaaaccatcaatccctaatcagtt

SEQ ID NO: 421830 - DNA, 311 bp, Oryza sativa nipponbare
gaatacaaaaaaataaaccttggatgcggggaaatcaaggaacgacttttccttactggtctaattttatgtcaacaaagaaccacacgccacacacatgctgcactgattttgacacaactgatgattgattgattcctggataaaagaactggataaattcacatcatcacctaagactgctgcctctgacaattctgcgccttaaccactttgtgcgcctggcctgcaatgacagttgccgcgtgatgtggcggatcagtgtgcttgcgcctcgtgcgccgcgtctgtagaccgtacctgagactgtt

SEQ ID NO: 421831 - DNA, 110 bp, Oryza sativa nipponbare
  unsure (1)..(110): unsure at all n locations
tattatttatttttaatttttgttgggttnngagttaggtacactagtgagtgatgtttttattgtatgttcaactctggataaaacgtcttagttgaacacaatgtgtt

SEQ ID NO: 421832 - DNA, 216 bp, Oryza sativa nipponbare
ttatatttaatatttatttatgtttggtttttttattaaaacatttataattttttttatatttttttttttttattaatttataatttttaatttttattttttttttttttaattattatattataaaatttttttagggaaaaaaaaaaaaaaaaaatatttttttttattaaaaaaaaatatgttttatataaaaaattgaaaaaggacaaa

SEQ ID NO: 421833 - DNA, 246 bp, Oryza sativa nipponbare
  unsure (1)..(246): unsure at all n locations
tttnnnnnnnataagtatccggggtgggggatttgtacaatatatttattacgatgtgtatgtgcatatgattagcctggtgctagcatttcacatatgcatgctctttatagagtggtgacacatacactaatcattatagctaaaacatgccgacgacacactcgacggaacacggtcacatatgtttatgtgcgcgaattaacgcatttatcacacgggacattatgacacagtagtaattat

SEQ ID NO: 421834 - DNA, 93 bp, Oryza sativa nipponbare
gccgcggccgagctagatccatacacagaccgcctccctttatttttttttaattataaaaatacctcgatgagacgctttttaaaaaataat

SEQ ID NO: 421835 - DNA, 371 bp, Oryza sativa nipponbare
tattggcaatgcacaacaccaaattgcatagaccaggtatagaacccgcacagagagacacactcacggaacagatcttgccctctatacgatacgcagagcatacacacacgcgtggcagacgaagacgtacatacatgccgctcacgtacatacatagactgaacacgcgtacgcgcacgcacactattcctgaaagacacacatgggaaagaacatatctagcttaggtgcaggacatgtgtgtgcatgacaacactgtgcggaggtgctcaatcgtgggggacgaagttaggggtgcacgatcaggccgtggtgctgacagggccggatcagtgttcggtgcggctctcgaggcggcccttgcttga

SEQ ID NO: 421836 - DNA, 404 bp, Oryza sativa nipponbare
aatcgtaatcaaacgtatgcataaataaaggtaatcatacatcaaggtgaaaaaaaatgtatacaaatgtgtcatcgtgagacctgaaaatgtaaaaaaaaaaggaaaagaaataatctctgaacctctacgtagtctacagaagcagtaacaaaaaatggaagatacacagctagcagaagacaaatacacacacacatcgcagcaaaactacacacccgtaggccgtagcgcaaggcacacgtcgatcagatgctgatcaaactacgcgcgcccgttgccgttggtggcgccgtacggcgacgacgacttgtcgctcttcttccgccggaggacgatgacccaggtgatggcctcgagcaggagcgcgacgccggcgagcgtggcgaggatggcaatgtagc

SEQ ID NO: 421837 - DNA, 451 bp, Oryza sativa nipponbare
  unsure (1)..(451): unsure at all n locations
ccacgcgtccggtgtgggctgtataataattaattacagtatgttcatgtaaatttgtttgtttgtttgtttatgttgttcgatatgtataattatgtacaataattaatcgtggagaggctcactaaactcataaaaaaaaaaaaaaaaaaaaaaaaaaaaaaaaaaaaaaaaaaaaaaaaaaaaaaaaaaaaaaaaaaaaaaaaaaaaaaaaaaaaaaaaaaaaaaaaaaaaaannaaaaaaaaaaaaaaaaaaaaaanaaaanaaaaaaaaaaaaaaaaaaggggggggggtttaaagagataaaaaattttattgggttttttgggaaataaaattttttttttttgggttctaaaaaaaaaaataaagggcgtgttttaaaaaatgtgtatttggaaaaaaccccgggttacccaaatttaaaaatttgaaaaaaaatctcctttt

SEQ ID NO: 421838 - DNA, 469 bp, Oryza sativa nipponbare
  unsure (1)..(469): unsure at all n locations
ccacgcgtccgcccacgcgtccgcgacttccttccttccttccggttgcttccgccgatcgacttctcgccccccaaatcgattcgccccccgcctcgatctatcgattccgcggcagcgccccttcgatcggttggagatggccaggacttccttcaagctcgagcacccactgggtttgttgcttcttctctctcgccccattacctctttgccctgtcaatttgttgcgattaggttgcaatctgtgattcgatcgatggtgtggtggtagattgattgcgagtttgtagatgggcgttttataatcggaactagctttgcgtttttgtgtggtatatgatgatctgattgtagattatatatgagtactacttttgtggagactgccttgtgtgtgggattggtttgtcgggcgtngtgtttggtgttggagtatgatttggcccacccaaggatggattttttc

SEQ ID NO: 421839 - DNA, 158 bp, Oryza sativa nipponbare
ccgtccacgcgtccggtgacgcgtggcttagattgctgccatattggttctcggacgatggagtggggccaattctgcaacttaaactccttgagcatgaaacatcttatgccaacttcgtactccttatcactatggctgacacaacggagcgagct

SEQ ID NO: 421840 - DNA, 311 bp, Oryza sativa nipponbare
ccacgcgtccggcgcccgccgcgctcgccccgagaggaccctatggcgacgcagctctccgccaccttcgcccctgccgcgaccaccaccgccacgcccctcccggcgccgcagcagcggctccggcacggccgccgctgctaccacgcgctgtcgctgcgccctccccgcgcggcgtccggcgatgacggcgccggcggcgaggtggagcccgctgccccggcggcgcccgccaagacggccaccgccacggacgacggcggcgacgacttcgaggagcgcgttctgcgcatcaagtcccgcgtcgggcc

SEQ ID NO: 421841 - DNA, 401 bp, Oryza sativa nipponbare
ccacgcgtccgatttaaaataggtgcataaagctgactgcatgcatggcaccgatgaataactacaggacatcaggagggtagcagcagccgtactagagatgtcccccgaggaagtggtggaatcacctacttcatagcaagaattggcgtgccacgccaatataaaccttagctgcgtctgcatattgccctaccacaggaatatgcctgtccggaggaccgtggcgaggacagaatgcctgaaccacatactgcgcaaggaggcgcataggcgcagcggccattgacacgctttctatagttcctggtctcatggcagctgttggcattggctacagcgtgtggtttgcataccggtacctgattgttaagcctgaacgggaagctctttttggaaaa

SEQ ID NO: 421842 - DNA, 160 bp, Oryza sativa nipponbare
gtcgacccacgcgtccgaaaaaaaaaaaaaaaaaaaaaaaaaaaaaaaaaaaaaaaaaaaaaaaaaaatataaaagggaccaggatgaccttcccctccaaagaatccaatcttacattctctagcatgcgctaattatagctctcttgtcggtgcactt

SEQ ID NO: 421843 - DNA, 318 bp, Oryza sativa nipponbare
ccacgcgtccgctcacgctcgcgccgatcggatcggttcgctacagctagccgggaaagagcctcaccatgaccacggtcgcattctggctggccacgctggtgcacgagttcaggctgctcctctcgcccgacccgacacacagcgtctacttgcagaaggtgctaatgctgtcgtgcgagacggacacccacttggccgagacagacagtctcttgcgtgtggagcgatgacttgtccaatctacctaatcagagatgctccatacatagactactcgatggtgcatggtactgcatccgttctaaaaaaaactga

SEQ ID NO: 421844 - DNA, 396 bp, Oryza sativa nipponbare
ccacgcgtccgcagatttgccttgccgctgcgttgctgaactcttcgctgatgctgccccgcggcggggggcggcggagtcccggggagttgggggcgctgcctgggtggacgccggccggggagcccgaggcttcgaggaggaggaggaggaggaggcgagccagccgcctcgctcaaaccccgtgccgcgcgcgggcgggggggcatatcggtcgcgccgcgggtggagccgccgcgcggtcgcgagaacggcaaggatatcttggtgatttagttgtccttaccagtttcatcaagaataccatcctctatcagtttaggaaggttcatcctgagtgcaaagatagctgcggagtaagttgagaacaaggcaatacggacacccattgtggta

SEQ ID NO: 421845 - DNA, 260 bp, Oryza sativa nipponbare
ccacgcgtccgcccacgcgtccgcgcacggcgccctccgctcggctgacggcgccctcccctcagcgccctcctcctctcggtcttctccctcgctctcctctctctcgtagctgaggcggcagtcggcgccgcaagaggggaggcggcaggcaacgggtggcggcggcaggtggagatggtgcggcccagcggcggcaggaggtggcatcggcagcaatggccgcgccctcccctccgcggcagcggcgggaggagcga

SEQ ID NO: 421846 - DNA, 372 bp, Oryza sativa nipponbare
ccacgcgtccgcggacgcgtgggtcgccatcctcgccgacgccgacgccgacgagaccaaccaccatgtcgtacagctacgcctcgcggcgacgtggcgggggcggcggtggagggatggccgcgacggtgcttgcggctaaggtggcgttcgcggcggcggcggtcgccggggctggctccttcgcgcgcctcgccgtgccgcagctcgtgtccgtggccggcgccgtgttcccgcgggtgtgggcggcggcgagggtgtggctcgtgccgccgtacctgttcgtcaccgtgcacctcatcatcctcgtcatctggaagctctccgaccacaagcactttcaggcgcagcagcaacagctcaaggatccat

SEQ ID NO: 421847 - DNA, 340 bp, Oryza sativa nipponbare
ccacgcgtccgcccacgcgtccgagttgggctcctttacgatgcaagttcttcatttgattggtaattaataacagatggttggcttcggatcggctagtctcttccacagccgagtgcatgccatctttgagatcaaagtgatgaaactatacaacacatacaattgtctctcgtgtcttttgcaagctgtgtgtacttcccttctcttggagatggggttgcgctggggttgcatctcagccaacgacagttcatttttcaggttggtggtgtgtaaagccatcaatgaagtttcaaaagagatgcgcaaaggactaaactcattgattattctagta

SEQ ID NO: 421848 - DNA, 295 bp, Oryza sativa nipponbare
ccacgcgtccggagtagtcttcgatcggaagggaagcgagcgactaagctaagaacgtaatcgcggagtgcgagacgtgaactgtcatgcgctcttgaattttatttcaattcttttaaaaaaaattgggagtgatttgtctgttgctctcgatccattgagagggggaagaatgtgtaagcaagatgacaaaacggcctcgcgctatctccagtttcttgcactcaaccaaggggactaccaccgctagggctctgctgctctctggtgaccattcaagaacgcacaaatcttg

SEQ ID NO: 421849 - DNA, 434 bp, Oryza sativa nipponbare
cgtccgcccacgcgtccgaaacaatctttctaatatttcaaattttctatttctatttgttcgtgttgtcaataatggtggcaaatacctcaaagtaagaaccaaatggaacatcatgtgcctgatgctttgtctcatagatctgaaatgagatagtaagtcataatttcattaaagaagaaaaatcaagaaaacctgattcacagtggacctatctgttactaatttaatcttaccagatttgttttgttctttgagaaagaagcacgttgccattctgtcactgcagtatctgggggacataaaggactgtggcatagagacctgaacattactttccggatcttgccgccatacttatctgagggggtccacttgctaagcttgagaacgaaaaatcaatacacttttaaattaaaaaatgttggttatgc

SEQ ID NO: 421850 - DNA, 466 bp, Oryza sativa nipponbare
ccacgcgtccggtacgaagcaccataaaaggtaaggatgtgctccatgtaaggactttggagttgctggcatagcagagaattgaatgactgcttttctaagtgcaagcaattgtgttctttgggttttatactaattctcaaacttgatgatattgggctggtcgcctctatattagctaactcaatagagcccttttccgttatagcatctttactttccaaattttttaatttgtaatttctttttatatgagcaattggtactatgaatgtacgagacatatggtcctacatcctgtatgtctggggaacgggaattggttgggaaaaaaggttaccatgtggacttatttttgttaggcccatgttgttcaactagccctgatagtttcctaaaactttgtttaatttaagaagctatgtaatgattctatttttggggtacaagatattggcattatggt

SEQ ID NO: 421851 - DNA, 51 bp, Oryza sativa nipponbare
  unsure (1)..(51): unsure at all n locations
ggggggtgggggggggtttntgngnttttttttttggggtttttttttgtt

SEQ ID NO: 421852 - DNA, 379 bp, Oryza sativa nipponbare
gaaaccgtgacgggcggtgcaaaatagcatcaaacacaatacggatacacattctcccgggactccatggtgcaatatgcctaagggaaggcctgacttaagacgaacacaagacttacaaccattctaggggtctagcacaaccatgacacatagcagatcactcgagagcacaaaaatgagtgtcaatgctcgggactctgcgaccgcgctctctgagttcgtacggctgatcacgtcatccatcctcaggatagtcatggccggctgcgtggcaaactgaataatctgtactaacactcaatgctggctcaatgacaccatattgaaggctgacgcgaatgatacctaccgaaaggccaggaccgatgctaggaaa

SEQ ID NO: 421853 - DNA, 378 bp, Oryza sativa nipponbare
  unsure (1)..(378): unsure at all n locations
tttttttttttttttttttttggtttttttttttttttttttttttttttttttttttttttttttttttttttttttttttttttttttttttttttttttttttttttttttttttttttttttttttngggaaaaaaaaaaattttttttaaaatttttgggaaaggggggaaaaaaaatttaatttttaaaaaaaaggggggaaaaatttnaaagggggtttttaaaaattttgggttttttggggagggggtggttttntgggattttttggagggttatttgaggggatattattttttttttttaggggggttttaaagtggggggtaaataatgtaaaaatattttttttttgagaaaaatttttttttt

SEQ ID NO: 421854 - DNA, 165 bp, Oryza sativa nipponbare
  unsure (1)..(165): unsure at all n locations
cccaaaaccaatttttttttttaaaaccaaccttntttttttcaaattaaaattttaaatttttttttttaattaaattaattnaccatattaaataaatttattaaaattctttttttttaatcaatttcaattatataaattttttttaaaaaaatttttttt

SEQ ID NO: 421855 - DNA, 354 bp, Oryza sativa nipponbare
acagcttaaaatatgctggggacatcttttgtgagcttacaatatatacacaagacagcattcgggaacccatgggcaacagaaccagaggcaaacatgacagctgaatcaaataatcaacttttctagatgcggattttgtatacagagggagcttatgtcatatgttacaaaagccctgcctatgttagcatactaatcctacaggacatatcaagcatgaatgttcgctgcagcagcaatcttgcaacaaaagcttgaaacctaacctgctctagagccagggagagttgtttttctcccggcatgttttcaaaatgaaaatgcccatgcatgtatatctatgaaatgata

SEQ ID NO: 421856 - DNA, 373 bp, Oryza sativa nipponbare
ccgcaagcgcgggccttttactcacatggttaaccgaatttcaatatttcacaacacaatttgtcgataaagtacagtaactcaacgaggtatatgggtaaattacaaaaaaagaagcatatcctacaaaaaagtcaaatagaaacccccatgtgccaatcattcaccggtagccggcggcttggtcgccggcggcccgggccacacgctgatccgctccttctcgtacttgacgaacacggcgcccgccgcggcgacggtgtacacctggaggaacagcgtggccggctggtggtacttgacgagcgccttcccggagccgagctccacgagcagcagcgccgccaggccgaccgccgcgagcgcgccgttg

SEQ ID NO: 421857 - DNA, 339 bp, Oryza sativa nipponbare
attatattcatttaaataaaaatttttccaaaaaaaaacataaataaaaacttaaaaaaaaaaagatcaaaacacaatcctaaaaaaaatactaatccgataaaaaaaaaaaaaaacatacgaccccaaaacaaaaagttaaaacacatgaaatccaaaaaactgaacaaactaaaataaattgcgaagccttaactgccaaattaaaaaatgaaaaacctaaagcgccaaaaaaaaaaaaaaaattcccaacccccccggaaagttttttttaaataaaaaacaccgggcacatttttatttaaaaaaaataaaaccgcccaaaaaaaaaaattgccc

SEQ ID NO: 421858 - DNA, 316 bp, Oryza sativa nipponbare
ggcagtaaaatagatgtgcagtgccataccattgagactaatttacagagcaagccgagggtaatatttagcaagagaacagtacaaaacaaaaatatcacactcagtcacctcatttcgccagcatacacacccttgtggcctttgtgccggtgcaggctgaccaggcgtccaaaaagcatcagcacttcacatcctatatatgtagtggcaggagcatctaaagcatatgctacaactactccctccgtacaaaaaaaactcagcctagaagggaatatgacccctcctaacataacgaatctggactaagcgt

SEQ ID NO: 421859 - DNA, 373 bp, Oryza sativa nipponbare
  unsure (1)..(373): unsure at all n locations
aaaaaaaaaaaaaaaaaaaaaaaattttttaaattttaaaaaaaatttttttaatttttaaaaaaaaaaaaaaaaatttttttaaaaaaaaaaaaatttttttttaaaaatttttttaaaaattttaaaattttttttttttttaaaaaaaaannnaaaaaaaaaattttttttaaannnaaatttaataatttttttttaaaattttaaattnnaaaaaattttnaaaatttaaantaaaaaaatttttttttaatttnaaaaaaattaaaaaattttnnatttttttttttttttaaaaaaaaatttttttttaaaatatttttaaaaaaaaannnnaaaaaaaaaaatntatttttttttaatttttttt

SEQ ID NO: 421860 - DNA, 398 bp, Oryza sativa nipponbare
ataactcgaagaaaaccaattattctgttttttagttacttgctactatgccccctggctacagagtaaggtatacatttgcgaacaagcaaaatttgtggttaacacatactgctttgtaacgacattagcatgcagcttgagttcacttgccactgaaagaaaaaaaaaagctatgggtgtatgatctggcaagtttttttgtgctctatacaactgcagaaaatatttaataaaagaatcaaaaatgaaaattgatgggagccgtgaccgtgatcatggcagcaagatgccacctcttgctcaaaatggagattccagtggctgtaccaagacagatgatgcatacaaaaaggtttcctgcacctgtcgacgagctgcgttgtcacaccccggat

SEQ ID NO: 421861 - DNA, 324 bp, Oryza sativa nipponbare
gatctaataacacacgaatcgggggctatatacatagatcaagatggactaagcacacagaaacctctgattacataaaatgcacataccttgggcacacatcatttgcatgcaaggcaaacactggaagggcccgcacacgcagaattcaatcgaggacacacagtacgcacgcacataaaaaccaccgatgaactttacggacgatcagacgcatacaacagttcgagccaagaacataggtggaaggtacatctgatgaaaatggacgctaactataggcgccactgagcctagagggggataactacgatctggaacgat

SEQ ID NO: 421862 - DNA, 534 bp, Oryza sativa nipponbare
ggtggcatggtcattgacggtgtggctgacatttaaacaacacagccacaatgtggcatccaaacagtatagatataatcacaagcacacccactacccaccagaattaactccataggaactttggacaattagcactgttataatcagtaaaagagctgtaggaaaaggaaaggaggagaaagagaaagctaagaacaaaatgccaggccaccacagctgataaaggagagcctaacaacaaagtaccaattcaaaaaccatcacttcagcacattaaggtcatctgtctagcagcttccatagcaccaccatccaccatccatccattcattctggaacttccacatcctgaagatgatgatacgattagcccggcttcctccgctccggcgatctcttcggcgaacaatgaaaaaccaaagatgatgaaaatttctatatgtattgtacggcggaggggagtggatcggagggagcttattgccggccgaaggagtggcgattcttcttgatgaaatcgtcgaatcgccg

SEQ ID NO: 421863 - DNA, 409 bp, Oryza sativa nipponbare
acccaaataatccatgttcagggtgtaaatacaagtagtacaatactctacttttgtgttcagttcagttattctgtctaaacaccacagcagttaaatggttcacgaaagaaaaggggtggaagttagtaaggtactagtacactactactagcaggcatcaagcctgcgcaagttcatgagggaaaagaagcagacacacatgaaataaagcagttcatgagggactagtaaattcagtcgacttgctttcctcaccaatgctcgaggtcaacctttattggcatttaagaatccccacacttcatgctgctactggtactccaaatcttgtacaatcagagccacatctggaggtggaggagcaagcaatacatcttcctaaccacatttccttttctctataggg

SEQ ID NO: 421864 - DNA, 420 bp, Oryza sativa nipponbare
ggaaatgctaaacatgcagcagtggtccgcacatctgggaaatgaacttgttccatgcatgcatgtgttttaaatccgtttcacaaggttcatcagagagtagcacttacggttcgaagtagacgatgatactgttgtaagaaaaacacaacagcaacttattccacaatggaaaaaaaaaccctctatatactactcccgcaaaaaaaaaaagtatgtttaacacttcaagcttttctttctcaaaagtaaaggaggtttgtgcttcgtttcattgagaaaaataaaaaaaagggaaaaataattacaaacataaggaacaaattaaaatggccacactcacataaactcgttacccagaaagccatcattagtcgtccaaattaattgacctacatacaaagaaagcttacagagcgc

SEQ ID NO: 421865 - DNA, 303 bp, Oryza sativa nipponbare
tttttttttttttttgggtttgttttttttttatttttttttttttttttttttttttttttttttttttaaaaaaaaatcaaaatttaaaaactggaaaaaaagaaaaaaaaattgggaagaggtaaaaaaaaaaaagttacggggggaagaaaaaaaagtgttaaaaaaagggggtttttaaaaaaaaaaaataaaaagtttaataaaaaagcaaaaaaatgggcaggaattaaaggaaggaaccccagaacgtttttaaaaaaaatgttaatatcccgaaaaatttttgtttgggaaggg

SEQ ID NO: 421866 - DNA, 443 bp, Oryza sativa nipponbare
  unsure (1)..(443): unsure at all n locations
ttttgaagtattaattcctgatattacaattgcttatacagtatttcatactcatcagaattgactcttcctcatgatgattcatgtttcttatgctgaaacattccatctgtctcttgtacttccagattgttcaccaaagttattcttgtgctctggagaggtctttcctgcaccatgggcgtatgtacatctccttatggcatctgtgcttccactccaatgtattctccaaacagttgaatgtaaagtacatggatctggcttgatttctcaggaagaatcaggtacaaattcacatcattctggaatagaaaccgcacatttcgggccctggagaatgctctgcagagttacagggcaaccttagaagctgaaaaacaggtatccagaaattattctagcttgaatattntcttgtgattttgcaaaaattatctgag

SEQ ID NO: 421867 - DNA, 81 bp, Oryza sativa nipponbare
  unsure (1)..(81): unsure at all n locations
gtggnngttgggtttttttttttgttngntttttgttttgnnggggtttttggtttgtggggttttttttttttttttttt

SEQ ID NO: 421868 - DNA, 249 bp, Oryza sativa nipponbare
ccacgcgtccgcccacgcgtccgcaagtagggtgttgttagtttttgctggaaaaatgttgaggtagtcttcatagttcatactcctgtttcaccttaccacagagatgattttaggagggagctagagctatagctagcaatctggtcatggtggttcatggttcttccggtacatatgtggtggaagcagcgaaagactgggatttgtgctagatttttcttcagttaattaaaaagtgtgactttt

SEQ ID NO: 421869 - DNA, 82 bp, Oryza sativa nipponbare
ccacgcgtccggcttgcctgatgagggcaagaaaacttacatggatccgactctctgggaggaatgaataaaaaggatgagg

SEQ ID NO: 421870 - DNA, 545 bp, Oryza sativa nipponbare
ccagcgtccgccagcgtccgcccagcgtccgccagcgttcgcacacgttcccacgagtcctcccacgagtcctgtgttgttcgccgcggcttcttcgcggtgaggacgaccagcccgccgacgacgccggacatcttgtacaacatgatgtagagcatcatcaaggcgaaggaggcgtcctccgcggacaccacgagcagcgagtgctccgcggcgtggtacgacgaggaggagctgatcaccgcggcgagccaccccccccacaagatgatggagacctcctaccagctcgtggactactgctgggacgacaaccagaccaccgagtgccgcacctactacaactgatgattaccaccatatgatggctgatatttctgctgttaataataataaactgctgtgaaaagatgattattcgtagaagacaacagagagtatgttggaatgatggtatttactgctggtagatggaggaaatgatgagaaaaaggatgtttacaccagttggtttggaggaataagtatggtactactctgctgat

SEQ ID NO: 421871 - DNA, 83 bp, Oryza sativa nipponbare
  unsure (1)..(83): unsure at all n locations
ccacgccgtccgtgcagttgcagagatacatggnngtgactatgaatgtacttgcagtggggacctactgtacatcaaagagc

SEQ ID NO: 421872 - DNA, 331 bp, Oryza sativa nipponbare
ttttttttttgcccaaaaaaaaaaaaaagggggggggggttacccccacctttgggggggttttttcacagggggtttttttttttttttttgggaaaaaaaaaagggggggggggggggagtaaaataaaagggggggggggcacaaacaaaaaaaaaaataatttttgtttgttttttttaaaaaggaggggggggggggggggaacaaacaaaaaaaaaaaaaaaaaaaaaaacaaacacctctttttttttttttttttttttttccacaaaacaaaagagagagggggtgttggtcctcccaacaacaagggggggggggggcgcc

SEQ ID NO: 421873 - DNA, 88 bp, Oryza sativa nipponbare
ccacgcgtccgcccacgcgtccgaaattcttgcacacgcgcagctcgagccatggccggagtgagcaccagcgtcgtcggcctcaagc

SEQ ID NO: 421874 - DNA, 311 bp, Oryza sativa nipponbare
  unsure (1)..(311): unsure at all n locations
aaagggggcttttttttaaaaatttnccccaacgtttttttttttgggtttaaaaaaaaaaaatttttttttttcacccccccccccccccccgggggggggtttttttttttttctccccggagttttttttttttaaaaaaaaaaaaaaccannnnnttgtgggcggggcgcccccccccccccccccaaantttttttttttttttttttcttcccctgggggtgggtggggctttctccttttttttttttttttttttaaaaaaaaaaaanaatcccccccgggcgggggggttgttttttttttt

SEQ ID NO: 421875 - DNA, 511 bp, Oryza sativa nipponbare
ccacgcgtccggcaccgtgttggtagcaatcatgtggtgggacatggagctcacagcatgatatgtaccagtgcactacacgtacgtacccactgtctaacctaagggaagagctggtccttaagagattgagatatactatgcaaactacatgacacagcgcttacagaaacactacccagtcttcaattcgcgacagtgaacgtacatacctgcacagattgattatccagtgaggacgctttaagactactgctgtgctagagccagacgatattgcttactatcagacggactatggatgccatgcacatactatgacagggcctacaccagacacactcaatacagagcctattgcacatagcatgcacgggcagactatatagggtgtgcggtgctctcatgcatgtcaggaacagccacagcatgcatcgaatgcagcaaagtagatgtgagacatactcgcatttaagagtgctatctcacaagacctaactcttgatgagca

SEQ ID NO: 421876 - DNA, 186 bp, Oryza sativa nipponbare
ccacgcgtccgcccacgcgttccggaaaaaaaaaaaaaaaaaaaaaaaaaaaaaaaaaaaaaaaaaaaaaagggcaggccgatataaagagaaccaagattaagtacgcgtgcatgcaaaagacaaaaatatatatgttgggtcacctaaaataaataaaatgtggggggggtttacatcagggga

SEQ ID NO: 421877 - DNA, 171 bp, Oryza sativa nipponbare
cctgggtcgacccagcgtccgcccattcgtccgcggacgcgtgggggcggggggacgacgaataagaagggcggcgtcggcggcggcggagacgagcgggtggtgcaggtgcacagcgcgcaggagctcgactgcgcgctgcgggcggtgaaggagcggctggtggtggtg

SEQ ID NO: 421878 - DNA, 490 bp, Oryza sativa nipponbare
  unsure (1)..(490): unsure at all n locations
ccccccccaaaaagaccaaaaattccccccccgcgaaaaaaaaaaaaaaaacttttataaaaagggccccccaaaaaaaaaaaaccccccccccggataaaacccccccggggggggaagaaaacccccgggccccccccaaataaaaaggggggaaaaaaaccccccttctcccccccgcgggaaaaaaaaaaaaaccccccccccccccccccccccccccccaaaagaggcgctcaaaaaaagagaagaaggccccccccccccccgagaaaaaaaaaaggggggggggtgggggcccccctnnnnnnnnncacaaccaaaccccccccccccccccccctttttttttttttttttttttttttttttccacaccgcgggcccccccccccacaaaaaaaaaaaaaaaaaccgtgggggnggggggttgttttccccccccccccccccccccccccacacagaggaggggggggggccccccccc

SEQ ID NO: 421879 - DNA, 584 bp, Oryza sativa nipponbare
ccacgcgtccggaaattctcagcttatagtcaggtgaggtctgagctgaggttgagagatggcacaggcaatggcctccatgaccggtctgacacatgacgtgcgatctggccggccgggaccacaggcgcgccggcagggacaacagtctcgagagcgacaaggcgctcttctctaacatgatacacgagattgccggcggccatgggtatcctcctcaccagggataccctcctcagggctacccgccgccggcgggagcgtacccgtctcctccgggggcttatcccgctcctactggggcttaccctccaccacctggggcataccctccacagcatgggtaccctcagcctggtggctaccctccacctggtggttacccccaacatggtggctaccctcctgcgggctaccccggatcatctgggcaccagggcggacatgggagtagcggtggaggacacatgggagcaatgctggctggaggcgccgatgaagctgctgcagactatggggcacacaagatctcttctcatggccatggtggacacatgggctatggaggacatggaggctatggt

SEQ ID NO: 421880 - DNA, 357 bp, Oryza sativa nipponbare
tgagtgctgccgcgtcgtagctggatcttgagggcgccttttttttttttttttttttttgggtggtttttttttttaacttaaaagcaactttttattactgaagaaaattgccaaatcagttttttgtgttcaccaattgtccggagaacctgaacactgccgattgtgcttagttagtcctctaaaatatttgggtaggggaaacaggggttaactatgaaatcctaaattttcagaaaaactaaaacacctattgggacctgggcggacctgggtgaccggaattcggaccggtcctgaggggtccagttttctataggagtgattaagttggcgaatatgggataggtgttc

SEQ ID NO: 421881 - DNA, 322 bp, Oryza sativa nipponbare
aaaaaaaaaaaaaaaaatttacgggtttaaaaattttgaaaaaaggggggtttaaaaaaattgtaaaattttaggaaaaacgttttttaaggttaaaaatttttaaatgagggggggaaaaaaatttggggggaaaaaaaaaaaatttttttttttttcaaaaaaaaaattaatcaaccggtttttttaaagtttggggggaaatttttttcccttaaagggggggtggggcttttcgggattaaaaaaaattgaaacctttttaaatttttttaaattctgggttttcccctaaaaaagtttcccattttttaaccaaaaa

SEQ ID NO: 421882 - DNA, 86 bp, Oryza sativa nipponbare
  unsure (1)..(86): unsure at all n locations
attnccgcatgctttttattcattcctcccagagagacggatccatggaagttttcttgccctcatcaggcaagccggacgcgtgg

SEQ ID NO: 421883 - DNA, 425 bp, Oryza sativa nipponbare
tcccaaatctagatcataatacattgccggtcattatttattccaatggaactttgcaatgtcacaaatgttgcaattcacatcgtttgaacagtctttcgtgtggcaccagatgcatatcggagataggttactattacatggcccccattcataagctaaaaactctatggatactttctcaaccaaaagcctacaaatgtacacttccacaaatggagctaacagtggcagtgtggcacgtatggtgaaactgctccacataaattagcaggtgaacaacagatttaacggacttcaaatatcaagccacattcacctccacatcactcccgtatacctgataagcatctcaaaacatcacatttctgcatgtgtcagtctgtccgtgacgccaagggggcctgctgttccttggtttgcaa

SEQ ID NO: 421884 - DNA, 311 bp, Oryza sativa nipponbare
aaaaaaaaatttgggttttttttttaaaaatttttttttttttggacttaaatttattttaaaaaataaaaaaaaattaaacttattgataaaaaatttaatataggggtttggttagggttttatttaataaagggagttaaaaaataaaaaggggctttaaaagtggtgtatattttaattaaaaatgggggagggtaaaaatttaaaattttttttttttttttaaagttgtgagggggcttgttttttttttttttgggattttttggtaaggggaaaaaagggatatttttttaaaggtttaaaag

SEQ ID NO: 421885 - DNA, 439 bp, Oryza sativa nipponbare
tggagtttactctttaaaacgatatatagatagcacccccaaaatacagaaacaaaagggatacaaagaaatacaagatgaaaatgaaataaacagtagtgacaacaatataatggacttcagatacaccaaaagcatacttctgtgacaactttttgagcagacataaccaaatttagttacatataattgcttacccagattacttggttgctcgaatttcatttaggcatagctgtgcatgccttctttatagcaatcaattctttgactacatcatccatcttcattctttcccttggtgattccttgcagcatcctagaccaagtcgaaatataggataaataactagttctaccaattcttgagtgtttccattgtaggttgcgctagcatccaatatttccagtagattgttaggataggccatcttaacat

SEQ ID NO: 421886 - DNA, 119 bp, Oryza sativa nipponbare
  unsure (1)..(119): unsure at all n locations
gggtggggtttttttttataaaattaattttttttaatttttttttattnaaatttaataaatttttttataatagatttttaagttatgaagaattatggaaaaatggaaataaatat

SEQ ID NO: 421887 - DNA, 374 bp, Oryza sativa nipponbare
  unsure (1)..(374): unsure at all n locations
tgattgaatcataacttttggtagaggtctcacaacggttgcagtcctaatcaattaaacttataacaccttggaaccgtgctggaataacaatgtggactaaaagtacctgaacacgaggtggctttaatgagaatcacgaactagcacaaatctatctacaagctggcaagcctaactagaagagcgcatatgcatgccttatacacgacgcattattacacgtntgagcagtggcacaaatcacagtgactatcacccgaacgagatgcattcactgataccagtgcctccgggcatggctatccctgttaccaaaaccacactacatgctcatacagcgacagcaaatgacactcaacattgcaagtgct

SEQ ID NO: 421888 - DNA, 386 bp, Oryza sativa nipponbare
tcaaaaaagagtgccacagatgttcagtaccatcaaaagagagagctgacacaacaatacatacaacaagagaggcttctggtgatcatccataacagacgcatagccatcacaacaatgcgtggcacatacgtccggccatgcatacctaacgacacaccaactgcacagcctacatagaaaattaccgaggcgccagggtgggtcacaagcaaacaatactctcactccacatttaccaagtatgggagtctgtctcgtatatatcacaaacacgggctaggaagcctacgagcaaacgctgaatgcttagggatcacttctctggtccctatcacctcgggccgtacatgtatataggccggagatagctggtggtgatgacg

SEQ ID NO: 421889 - DNA, 267 bp, Oryza sativa nipponbare
  unsure (1)..(267): unsure at all n locations
aaaanttaggaaattatgagaaaagtttttttttgttgaaaatattatttagtaaaaatttaaaaaaaaaaaaaatttttaaagataaaatgtaaaaaatggggggaataataagggagataatttaaattaattggaaaggggttaaagtaaaaatttaaaaaaaaaaaagtgggtgagaaaataaataaaaaaattggggaatttaaaaagaaagggagttttattatttggggggggggggaattttttttttaaaaaagaaaa

SEQ ID NO: 421890 - DNA, 397 bp, Oryza sativa nipponbare
  unsure (1)..(397): unsure at all n locations
ggggttggaaaaacaccatttcctcctttgttggccataagctagaacttcaacgaacttcctcagagattacaaggagagggagtgctgtgcagcaactaaacaaaatgttgaagagtgccaataacatgagcaaatcgtatgcattccgcaaattgaagtagctctgatcagcagctgttgacatgacatagtcactcactctgtggcttggtcgtcatcctctcctgcgactgtggctgcatcctcattaaaatcgtcgaagctgaggctaagtgtttgcagcttgaagccagctccctggatggcttctaccaggtttgaggccaccccggtagcttgcaccggcgtttcctttgtcaacacaacacttncgatgccttcctcgatgagcacc

SEQ ID NO: 421891 - DNA, 229 bp, Oryza sativa nipponbare
aaaagctgtaaacaaggatgagggagaccttgcattatctaatatatagtgtgataaaacataatgacagcctattggacaccgattagttacacataataggggaagtgactgactgatccactgtgttctttgcattggcgaatttgagcagggaggggacaaacataaattatacaatgattgaatgatatgatcactctagatcatgtcaacactatgtgaacaa

SEQ ID NO: 421892 - DNA, 425 bp, Oryza sativa nipponbare
gggcgggcaaaaattcccgtaatcgcattcgtttagtaacggttcatggccgagtacacaccaacgatcaaatgcaatatgatcggtttacatgacagtaggatagatccagtctggtaaatctgccgataaatatgggtaccggattacagtcaatcccattctgggagctctaattaaagaaaactgaattgcctccttgaaattgcaccagtactaggaaaccggcaatttttgccttcaaaattgccaccgtgctccaccagctgtacaattgagaatagctttaatttaccctacctcgctaagttatcgccgcttgtatctgttagtatattcagcctacgcgccgtcttcgtgaactcgctgaaaggttcatctccagtgtgcttgagtgccccagccgcatcacggtagaaaacatg

SEQ ID NO: 421893 - DNA, 369 bp, Oryza sativa nipponbare
ccatggggaacgaaaaattttataacacttttcacagagctggttcagtttttacagagattttatttgcaattcctaaatttcaagggaggtttcaccttttcgggtttaatagaaaaaaaagacctgaaaaaccttgcccaaacttaaaagaaaaaaaaaactttcctgtaaatgtttttggttctcagggtcctataaagcagcaaatggctgatttcaactggcataatttagctggggcagttagcacaaaaacccggtggggggcctttttttacaatcacattcatccatgtcgcccacaaagcaaacaacaggctaattggatggcccaatttcatgcaaaaaaaaaaaacttttttttcc

SEQ ID NO: 421894 - DNA, 206 bp, Oryza sativa nipponbare
ggttggggtttaatcctttttttttttttttttattcattttttatggacactgaagtcttcccgatatatcgtgaccgcgccctattggttagccattttacccaaaacattgggtgataacagatggaaggcaacgaccacccaactgtttcccgctgtaacatttacaaagctaaaataacacacgcgaacaacccgaaagca

SEQ ID NO: 421895 - DNA, 106 bp, Oryza sativa nipponbare
gaaggggcccttaatttttaaaatttttttttttgggggggtttttacccctagtttaaccaatttttaaaaagggattgggcctttaatttttttggacccgggg

SEQ ID NO: 421896 - DNA, 223 bp, Oryza sativa nipponbare
aatacccggattaacccacgcgtccgcccacgcgtccgaacgccatcacaaccaataaaaaaaaattgaaaataaaaaaaaaggaaaagatgctatgaaaaagtggaatataagcttacataagtaaaaaagatgcattttacctcatgtatagtgatacctaaagtcaatgcactgtcctacaattgtactttggggcaactggttaaactcatgtgtatcc

SEQ ID NO: 421897 - DNA, 155 bp, Oryza sativa nipponbare
ccacgcgtccgcacaggcaatggcgtccatgaccgggctgtcgcagggcgtgcagctgccggccgggcccaggcgcgccggcggcaggtccaggctcgccgtcgtcagggccgacgccgtcgccgtcgacgtccagaccggccgtcgtgccgtgc

SEQ ID NO: 421898 - DNA, 395 bp, Oryza sativa nipponbare
ccacgcgtccgcgagaaatatccgcggctaatctcctctgctcgccgcgcgccacttcctcactcctcgcaagcggcagctcagcgccgccgtctcctcctccgccatgatcgttgccaccgccaccatcccgttcttcccctcgttccaccgcccgcggttcaggcccggcggcctcccgcgccgggttgtggtcctccggtgctcggcgtcgtcgtgggaggagcgcgaggaggcgcggtggctgcgcgaggagcagcgctggctgcgggaggagcagcggtggctccgggaggagtcgcggtggcgcgccgagcgcgagtccctcctcgccgagattggcgcgctccgcctccgcctcggcacggtcgaggcgggcccgctccccctcccgt

SEQ ID NO: 421899 - DNA, 429 bp, Oryza sativa nipponbare
ccacgcgtccgtttcaataacaaaatttgtaaaacactaattttcgatcaaatactatatatgactgaggctccaaacagaatagattgaaattgattaatgaaaagaaaagtcaatttactctcttaactatttcatcgggcatttaacagctatttatttatttttggcttatatatgttatttatttatttttacattgctccataatggtatttctcctttttgtgttcctctatgtaagttgtattttacactgaaatttaataggatgatagatgaatgcatttgaacttagagaaaatctaagaaatgccattcacaagtgcccaactctaagaaataccgccgataagtgtaagttcctcgaaatatcatcgtacaagtgattttgttccagaaacgctattgttgttagggttccgtcta

SEQ ID NO: 421900 - DNA, 243 bp, Oryza sativa nipponbare
ccacgcgtccggctacaccttcttccactcgttcgtcaacaccaacggcatcactccagcacgagtgctgatgagttgcacagactacaggactacctaactctcaagctggctggccagactgagatctatcacatcactctggagcgcgatcaggctcttgctaactgactcttagttctgaaggtgactgcgagacaagatctgggaccggacatagttgttgccagtcatcctttccct

SEQ ID NO: 421901 - DNA, 295 bp, Oryza sativa nipponbare
ccacgcgtccgccgacgcgtgggttgtacgtgatggacaggatttcaagacagtgctgtgagaagacaccgtggactacgggatgtacaccgtttcggcccagaaaaaacgtccgactccaagaagctcgtcgagagtaagaagaccggcggctgttacaagaggccgtggtggtggtggtggtggtggtgaagtggttacctatgccgtatttggtgactaacttttagctagcgagtttacaagatctttttacaatctcatagtaacgttgtaggtttcatactatatcctt

SEQ ID NO: 421902 - DNA, 284 bp, Oryza sativa nipponbare
ccacgcgtccgcgggcgcgtaaacccacacgcgctgtcagtgaagagccactgcgagccgcacaggctccacgactgacatggccagcaccgcctgatgcactgcacctttaatgggaggagctggacaaatccccgccggctccatcgtgacgtcctactaaaccaaaattgtgattaatcgcaacaaactatgtgctatcatgctacagaacgcacacgggctatacttgattctaccaaggacgatgaaacacacgacactcacaacctatctatgcgacc

SEQ ID NO: 421903 - DNA, 355 bp, Oryza sativa nipponbare
ccacgcgttcggccacgcgttcggccacgcgttcggccctctctttcttcctagtccctccagatccaacaccttctccctcagatccacaggcggcagcaccgcgggcgatcggaggagagggtggtggcgggctcggggcgcgggcggcgtgctcgggtgtgggcgatagcgctcgggtgcgggcgacggaggagagtgcggcggcgagctcggggcgcgggtggtgaggtcaggcgtgggcggcggcgctcgggcacgggtgacggaggagaggacggcgtgaggtcaggcgtaagcggcccgggcggcggcgctcggcgacagggaggcgcgaggcggcggatccggcgac

SEQ ID NO: 421904 - DNA, 329 bp, Oryza sativa nipponbare
ccacgcgtccggaaattctcagcttatagtcaggtgaggtctgagctgaggttgagagatggcacacgcaatggcgtccatgaccgggctgtcgtaggtcgtgcagctgccgtccggtcccatgcgcgcctgcggcaggtccaggctcgctgcttgcatggccgtccctatcgcgcttatcgtgcatacggtgcgggtgcctatggagggggtgcctatagcggaagcgcttatggtggtggtgcctatggtggcgcttcggatgcctatggtggtgctggaggatatggcagtcattgtgttgctggaaccaggacgtgctttttgga

SEQ ID NO: 421905 - DNA, 363 bp, Oryza sativa nipponbare
gcccgcgggccccaattcccgattcgacccacgcgtcacgcgtccgcccagcgcgtgtcgcccacgcacgcggcagaagccaacgtaagccaaggcgaccgtaacgaccaactagcccgctcgcaacgagccggctagcattgtccccatgagaggctccaaggtgaagaacacgaggtagtgtactactgtacaacggacctcagtacactgtaagaggctatcacgatattagccacaagtatacatggtgggatgaccttatttgatacaactaaagcttatggtacaccaatgactgcagcctggacttgatacaggttactcagaggttttattaaggaaaggtcggagaaagaacag

SEQ ID NO: 421906 - DNA, 430 bp, Oryza sativa nipponbare
ccacgcgtccgatggtgatggacgcagctagagcggtggcgatgccgtcgctgtcgccggccaccgtcgcggcgaggccgagcagccgccgccttcacaaggtcgccgccatggccacccagaagcccacctccggcacaagaagggggacgacggtgtacttcccggtgggggagccggggccgaggcagacgacgagcgggaaggcggcggcgccgccggtgaagctgctgacgaacgtggagaagctgcggctgcttgacgaagcggagaaggcggggctccctgtcggcggcggagcgcgccgggccaccgtcttcgccgccttcagcttcgtgtccaagctccagagctcgtccagctgaagcgattacatgctcactgccttagctttgagtgattaattaccacttaatttgcaattagtgtg

SEQ ID NO: 421907 - DNA, 68 bp, Oryza sativa nipponbare
gggtgggggagttattgattggtgggtttttcttattttttttatgtttcgggataagcgtgccggac

SEQ ID NO: 421908 - DNA, 387 bp, Oryza sativa nipponbare
ctgcacaggtttcctttttttatctccaaaagttctgagctagcaataatatagttattacagctaaatacacctacattctttgcgaaaatgaaaaacacagggggatctcagcactcatttaacaaaactgtcagaaagaacgaagacatctacactgtctatttacacaatcaaactgaaaggacaagctactgcacactgttctacgacttgaggactgctccttccgttatcttccaccctcctagcttggagaaggccatctcataccgggtagggtattttgggtcatatgaatcattgtttctgggctcagtaacatcagtaagttggcctgcctaatcaatcgtagcctccacagtcgctcgtcgaccatctagggag

SEQ ID NO: 421909 - DNA, 442 bp, Oryza sativa nipponbare
tagaacaacatctgtatatagaacagagcgatattgtatacgatagtaacgcatacatgaatattctatatgtatacagataacgcatgcatggatattgtatatttattctagcgcacccgcaacagcggccatgtgcttgtatatatgtatttatacgctcgcacgtacctaagtacgtacgctatacatatgcaatctgagatcgctgcgccacacattatgtacggttggattaatacatttattgtaatatatctgtctgataccgccatctgtctgatgatcacttccatgcgtaccgcttcctcacgcgctacatatgtagatagagtttaagagtggaatcgcctgtgtaattagttaaacaaaaacagcactgtaaactattgcaaacgtggttcacttaatttactaattagggcttgagagcatttatata

SEQ ID NO: 421910 - DNA, 296 bp, Oryza sativa nipponbare
gataaacaaagacaaaggaagggtgtattacatatttgaatttactccggttgggtacatagatactcaaacgggctgacaaggtgccacacatagctgaatacctaaacctactactaatgtgctgcgtgcaacgtgccaatgagcaagcccacagatactgtcacatggccaggactagagtactaggactgggcttactagcagggactgaacgtgatcctgtgaacatgacaatcaattacacctcgccatctggctgatcgatcgaatgaaatcaagcgtatgcatgtttg

SEQ ID NO: 421911 - DNA, 85 bp, Oryza sativa nipponbare
gggttggggttttttttttttttttttttttttttttttttttttttttttgttttttttgtttttttggatttttttttttttg

SEQ ID NO: 421912 - DNA, 426 bp, Oryza sativa nipponbare
gggtatcgcaagctggtattggtatacttaaattccatgcagctttgtaacatactaacatcataataaaatagaaataacaaacaatactacagcggtacagacaataccatgcaaataccaatcttgtaagctgaaatattgggacagaaatatgcaaatttggttttactaggatctaaatataactattatggaggaacagaattgtgccatcaatatatcaactagataaacaaagaagtacaaaaaagaaaggaagtttaagttacaaagaaacctaagtaagttattagagaagtgcaatctcacagcgggatatgattcaagagctccatctccagctaaaaacgaaacatgattgaaaccattttctctcataaacttttctcctagctgcaatacaataaaataactaggtaaatg

SEQ ID NO: 421913 - DNA, 420 bp, Oryza sativa nipponbare
  unsure (1)..(420): unsure at all n locations
ggggaagcaaaagaaagcatttcttttccattgaattagaaaggagcacaacctgtttgttggagtattgccagagcccgagagcaattacaacatctaaattgggcaacagcaagcaaaagaaaaggagtgctccaaattaatggcatctaagtaaaagctagatatcttcctttccttttttctgcttctatgtactaacaatggcccctaagacgacctaaacctcccctgttacctataaaatttcctacaatgtacacaagaagcaccaacaacagtcagtcagcagccagtcagacttggaccctctgccttgttactcgcccaccctgagcgctgaagtccagcactcttgctccaccaccagtccaatcttcgtcatcggtgtcctaatnaccaccaccaccaccaccacca

SEQ ID NO: 421914 - DNA, 243 bp, Oryza sativa nipponbare
  unsure (1)..(243): unsure at all n locations
aatgttaaatatatttgattnggagaaaaatttataagaaagtatctcctgtaaaatctaatgattaatatcctatttatatcattatatacaaagactaacacatgccaaaattattaatcacaaattttcctataaattcattaagtcaaccatgcgnaaaaaaccctatattttccgatttaaacacttgaattatacagcaacactattaactcatgaaacacatttattttttttaag

SEQ ID NO: 421915 - DNA, 268 bp, Oryza sativa nipponbare
agcaccaacgtctgaaaatatgttacggccatgggccatggcctggcccaaggagagatttttttacataggtccaaaacaagaaaggagattttttacatgggtatgttacactgggcccacagcggctgggggaagcgggggcccacctgccccggtcacgcgatgaccaccgtcacggcggcggcggcgggggcgtcaacctcgctccccggccgtcggatgcccgtggcggcggcagctgcggttggtttgtgcttggtggggg

SEQ ID NO: 421916 - DNA, 352 bp, Oryza sativa nipponbare
caacagtaaaaactttatttttacatgttttataaagggaggaggctttaaagtttaaagattcccctttcggggagaggggttttttaatactaacatgctaaaacagggaactgccttttaattatatatatgggttttgggcaaattttgaaatgtagcccttaaaatttaaacctgggtcgtcgtcgtcgtcgcccaaggctgtgggatttcctgaataaatgatggggaggttaaaaccctggacttggattaaggctgttcggggccatccatgaacccgggggtaatcgaagggaaatttttaatgggcaaccttttcaattcctaaaaatccccggacgcgtgg

SEQ ID NO: 421917 - DNA, 485 bp, Oryza sativa nipponbare
gcgccacgccccacgcgtcatatgacatctggtggaccacggcgacgcgagctagggtgtctcgactcgccctcgccgatccggtcagccatgtcgaagcaaggagggaaggccaagcccctcaaggcgcccaaggccgagaagaaggagtacgacgagagtgatctcgcgtatctgcagaagaagaaagatgaggaaaaggcactgaaggagcttaaggccaaggcaggacagaagggtgcactgggaggctctggtctgaagaagagcgggaagaaatgaggctgataccaatctgtaatgcctgaaaaatgataaaccagctacctgtctgtgttacttcactatgtgcggatgtaacaaaactacctttaagcatgttatgcattaagcaatgttgcagttggttgcttgatccgaagatgtttcgggctctcttctgctagctatgatacatctggtcccgtatgatgataatataacat

SEQ ID NO: 421918 - DNA, 319 bp, Oryza sativa nipponbare
cacccacatgtcattttcccatttaaaaaaaaaaaaaaaaaccaaaaaaaaaaaaaaaagaccaaaaaaaaacaacaaaaaaaacaggaaaaaccaaaaaaaaaaccaaactaaaaaaaaaagggggcgccccctttaaagggccaaagtttataaccccgggattggcccgcaataatttttttttggggcacctaaaataaaatgaatggcccgtggtttaccaccctggggccgggaaaaaccccggcggccccaattaaaacgctcagcagaacatctccttttgccagggtggtaaaataccaaaaaggccctt

SEQ ID NO: 421919 - DNA, 451 bp, Oryza sativa nipponbare
acacacgcgtagcgacggagagagggccatggcgtccaatgaggacgttgccgcaccgacatgtgcgggcgcagcgtctgcggcaaaagaacggtactgcaaactaacagcggggcctatattcgacactagttggctgtggcagtactggttaaaccgatctgttatactggctacgatggcatcccttatgaccttttaattaagcatcgcaaccgggtgcgagtgcaagaaccagagggccacctgataccgtgcacatctactacatatctacgcatgacatcatcgatgcgcgcaagcatatggaggctgaccatgtggacatgaccgatgtccggggggaatatgaacaagacaacgactcttgcggtgtcgttggcgccgacgctaacggtcggtactagctgacgccgacgtgtttactaacgagttagccagatactcagga

SEQ ID NO: 421920 - DNA, 260 bp, Oryza sativa nipponbare
ccacgcgtccgcccacacctacgtacattactagctaaattctatcttctttaacacatacgatatggggcgggactactacatcattaggttgatcccaaacatctcaagaattatctcaccttcgttgacaacaacttccagatctacttcacccttcaccttaatctcacgattacgtgttacacgtatatcctcaacaagaccctgactatcaacaccattacaccttgacgttaagcttggacgacacatatacg

SEQ ID NO: 421921 - DNA, 143 bp, Oryza sativa nipponbare
ccacgcgtccggagttggtaagggagctctatatggaggttgaggtcttgagttcgaatctcacttgtagcatacaagttatattgcgtgaaaaattgtgaatttgtaggtagtgatgtgtaaccatgtataggatggctagt

SEQ ID NO: 421922 - DNA, 416 bp, Oryza sativa nipponbare
ccacgcgtccgcccacgcgtacgaacatttcttgctgaagtctgtcttgtttaacccatacggtattctcctacagtccttcatcactaggcagaaaccacagtctccaggacctagctagcttgtcaagctaggagctagcagctgtgcgtagacaatcgcattcaccggcggcttcctgtccacgctcgtcggctcgaccagactgggcggagccacaccggtcagcggcagacgcagctggaggagcaagacggctaggctctcgaggaggcaacggcgcggcagctcggggagggcgactgtgtccggcacgaagcatgcgccagagacaaccaaaaacaacggcagcggcagcagcagcagcgacaagcgcatgatgcaagtacacagacgcgaacgagctcgactgcacg

SEQ ID NO: 421923 - DNA, 59 bp, Oryza sativa nipponbare
ccacgcgtccgactgtatgtatttacagctatccatcagtctctctctctcttcccttt

SEQ ID NO: 421924 - DNA, 117 bp, Oryza sativa nipponbare
ccacgcgtccgcatctatccatccaagagtgtggaacgccacacgtattttttttttatctatgctaatctgatcattagcaaaggagagttttaacaataggattgggttaaattg

SEQ ID NO: 421925 - DNA, 459 bp, Oryza sativa nipponbare
ccacgcgtccgcggacgcgtaggttacccactcatctcccaacaacctccgattctacaccaacggggggcccggccttccactctagtccaccatgttcctcgacatgtcactctgctacataccctaatccattctccttcaccttttcatcaagctctaccaatcccttactctcacctaactcttcaactgatcaatacccctttctatagaccccctactttttctctcatcatatcaaatcggatccgatcgcatcccatcagattacatgtttattaatgtgtatgaaaaaagacaaacctaacatcagtgcactattatgaatatccatctgcttactaagtaccttgctagatctttcaaccaattgtactctaccatagaccaattttactcttaatttatcttatttcatacaaacaattaacgctaaatacttctacttgttcttgc

SEQ ID NO: 421926 - DNA, 368 bp, Oryza sativa nipponbare
ccacgcgtccgagtgatacaagcggaccactactagcccatgagcttgaacgccgacctctagaagagtaaccgttgatactgagctcatcaacacggaatacactacacattgcatccaaacctggtaaactcaataaaagaggtgtgaattgatcataacgagaccaccagagtagtcacaaacaaactgatcagcggagctagatgccatacatgcacaagcaccgctcgctactactggtgaaaaagaggacatggatgatctcgcggaaattccgcatgcataagtggaaagctgacgaggatgatgactgcacattagatggcgctctagatgacgagcacattagcttcgagggctacaag

SEQ ID NO: 421927 - DNA, 391 bp, Oryza sativa nipponbare
tatctgcaaactctatcggggggtacataatggaggagcagcctcgctatagtttagtattagaagcaaattacaagggcaacgaaagaaaagagaattacattggctccggccaaaaaatgaaaagaaatgcagaaaagaatgttgtcgcgatcgtcatatgtattcgagcctcctccattatatcttcaggtctgaaggggatgaggaccaccattcttgacaagccttcgagattccctgtgacaatggagcaaacattcaacaatcacatgagagcaatgtatgttgcacttgcacaagagtaagagacaacaggtggagaggacctaagggccaaggctgcaccaccgggagggtggaggatgcctatcagacgtccagggttact

SEQ ID NO: 421928 - DNA, 182 bp, Oryza sativa nipponbare
  unsure (1)..(182): unsure at all n locations
tttttttttttttttttttttggtttggttttttttaaatttttttttttttttttttttttntaaaaaattttttttttttttaaaaagaaaaaaaaaaattgggggggattttttttaaatccggacccnnccaacattaattattaatatttatttaaataatattgtttaacagttgc

SEQ ID NO: 421929 - DNA, 386 bp, Oryza sativa nipponbare
caatcaaaaaatatcccggcggtattttcttccctgggcgaccatttgtgggggccttatgcccagaaccaatacccaacagggggggccctaagggagggcccttttttttatagtaaaaagcacccgtttttttttttacatggaaatataaaagaggtccattgaaatgggccaagaagagatgtaggacccccctcagggggggggatttttagaagtcccatggcggggttccacaggttatgcaaggcccatcctacttttttttagcgggaatattcccaaaactagttccaagaaaggcggggatgcccatggccattgatatgggtgggggaggaaaagatccacgaaatttgaagggggggctcattaaacttttg

SEQ ID NO: 421930 - DNA, 410 bp, Oryza sativa nipponbare
tagatcgaaaagcacggcctggtgatgatatttatatacgaagaggcagggctagctggtcttcacaagagcagccatggccttcttctgtgcctgatacagtacattacctcctacgggaccgcccgtaccgggcctggcctggatagtgcatcttacaagcgctgctctttttgtacttcctttgctacttgccatactaatgaacagcatcaaactgacgccaggcgcaggcgattagaatagcttatgcatgagcgacctgtggcgatattcgtttggggcggctcagcttaaggtagtactccacttcgcttgatcgaatgtaggcctaattggaggtcatgccttctgtgagactggctcgctggtgctcctaaaagagctgagcgagctagtagcctcccctg

SEQ ID NO: 421931 - DNA, 350 bp, Oryza sativa nipponbare
attggcccccctttactggggtcccctttcttccctaaaaattcaaattttttcccccaatttaatttttttcttcaaagggaaattcgaacctaaacccttaaccttcttttaagggccctttaccaactcgggaccggggggtgcccccggaatttccggcccggtccttgggggggacccatttttcctttttgggggggtttttaaaactgggggaaattatgggaaaaggttttccctggggaaaatttttttcccgctaaaattccacaaaaaattcaacccggaaacttaaaggttaaacccgggggggccttttgggggggcctccccccttttatttgggg

SEQ ID NO: 421932 - DNA, 414 bp, Oryza sativa nipponbare
gacgttccaaaagactagcaggacacgggaccaaagcaacgagataggttcgatcaaatcgcccccagcctaaaacaagcttgagcttctcaagctagagcgggggaggaaaatcacactcatgttcaagagagcagaacagctattaactcaattacgggggctgcatgcaactatgctgcttagcgacgaatctgagtctgtctaggggacctccacgcctcaggatctgaagatctcggcagtgagctccctgctgacggagccgacgtatcggtccacaatgttcgcactccctgatgaacaggaaggtggacacctccaccacgtccatgtttcggaggaactacatgcaactgacgatctggtctgcgtgcatgcctgcgacgacggtggtatccgccatggagcgcg

SEQ ID NO: 421933 - DNA, 92 bp, Oryza sativa nipponbare
ggttgagggttttttttttttgaaagggaagaaaaactgaaacttcttactagctttaaatacatacaacccgacccgtggataccccccgc

SEQ ID NO: 421934 - DNA, 234 bp, Oryza sativa nipponbare
aaaaaaaaaaaaagtttttgctttttaaaaaaaaaaaaaaaatttaaaatttttttaaaaaaggttttgggggcaaaattttttttccaaaccttttaaaagggcccaaaaaaaaaatccccaaaattttttttttaaaaatttttttttaaaaaaaaaaaatttcctttggacattttttttttttttttttaaaacctttcggaacttttttaatacaaagttttttttttt

SEQ ID NO: 421935 - DNA, 66 bp, Oryza sativa nipponbare
aaaataatgatctattggcgagattattagttgggtttacttcccaatttaaataatctgggggtt

SEQ ID NO: 421936 - DNA, 217 bp, Oryza sativa nipponbare
taggggctgaagattaacttaagtgtggactgtcgcatacatcgaggtgcaagatcaatttaagaaaacgctgacacacgctcacacaaatgtacatcattactaatcatgatagatacctaaccatggggcgaattatggtttaccttttcctgctgcgtcctgctcatttgcactcggactgaactgccgatgtttctgtctgtcgacctgaaag

SEQ ID NO: 421937 - DNA, 292 bp, Oryza sativa nipponbare
tcctctacatcatcctccctttttttttttttttaattaataacactataagagggtttttaatatacatgaaacaccccctttcctgctcaaattttttacaccatacttttatacattaacaccatactttatccatacatttcatactactcactttttaactttttcaccatataaactttttatttacaatctcatttcatatcaactctcattaacttattcacatactcaacccttctttactatactttaatatctattaatccaatcaattacaacatctata

SEQ ID NO: 421938 - DNA, 205 bp, Oryza sativa nipponbare
ccacgcgtccgcccacgcttactgggacccatgggaagcaagagagatcattactagaatgatatgacgacagggctcctctcactgggttcattgattatggagcactagcgacggtgccgacaccgccaactgcgtgaaagcattaggcctgcggattaatgctctcatgctataggggatcattatccacagcataatatgt

SEQ ID NO: 421939 - DNA, 204 bp, Oryza sativa nipponbare
cgcgtccgtcccactcacttggaattcgaaatccacacgagcgcggcggcggcggcggcggcgatggcgagcaccattaacgtggcgtcggccacctcgaggttcctgctggccggcgggaacggcggcagcggcggcggcggggccagccattgaagaaaggcgagagctttgggatcgattccgggccatggcgaaggaggt

SEQ ID NO: 421940 - DNA, 273 bp, Oryza sativa nipponbare
gcaaatattgctgtcgcacatacaggttgagtacaatgataacctggaatcgacattgattggaggtggcttggcaccctagaggaaaaaccttgtgatttgtattttttttgtgtgcttctattatttctatatgtatgtcttgcctgagaaatctgtaaaatcgtgatcgggtgagcgctaaaaatagtggaagaaagaagaaaaggaaaacggaatagcaagagcaggactcctggtcgcagttggggcaaaccggagtaggaggtgggt

SEQ ID NO: 421941 - DNA, 431 bp, Oryza sativa nipponbare
ccacgcgtccgacctgaacctccctttcatgtaagctcagtcttcagaacaaaatcatggctactttatgccactctgctcataccagaacattcggaaagattggcaggagaaatgcagcaaaggtcctctgctcaacgcagatgccgccatctcagagcacaatcaaggttgttatcattggggcgacaaaagagattggaagaacggcaatagcggcagtaagtaaagcaaggggaatggagcttgcaggggccatagattctcagtgtataggcctagatgcaggagagataagtggcatggaagaagccctggaaattccggtgctcaatgatctcacaatggttctgggctcaattgcacaaaccagagcaactggaggtggtggtgatttagtgaaccttcaactgtttatgataatgtcaaac

SEQ ID NO: 421942 - DNA, 253 bp, Oryza sativa nipponbare
ccacgcgtccggataattctgttcaagtatgattgtcaatagaacagctgtggtgaaaaacatcgactgtgcaagctacgacatatagtattgtacattgttggaattttgttaaagacccacatgttctaatgtgagtcccaacatgtaagattttacactgcaatttcatcaaagaaacactatacagtgcaccctgtgaagacctcttgtttggaatacataatggaaacgtgtttaactgttttcaact

SEQ ID NO: 421943 - DNA, 467 bp, Oryza sativa nipponbare
ccacgcgtccgagcgccaccacctcgcccccgacgcctccctcctctccagctgcgcccactccgacctcctccaggcgcgggaggaggtcgcgtcggagcgcgcgcgatacctggaggcactggctgtgtacgcggaggccattgctatggtggaggagtatcagcacgccatctccactggcgtcgccaacgctgggaagaagctcaactgctccccgcaggtgtacgagtcattggagcaccatttggcggttgcagaggctgcgcagaggttaaggcttccactgctctcgcaggatggagatgtacatgaggaggagatagagaagctgagcaccttgtctaggagctcattcgatagcaccatgacaagtgccgcacctagctcgagttcaatctcgactagttacaataactacagcagcaccgcaagtgcagccactgttgctgcggcccctggtactg

SEQ ID NO: 421944 - DNA, 362 bp, Oryza sativa nipponbare
ccacgcgtccgtgacatgacaggcacataatcatatcatacatagcagtcatgtgcgtgcacgctgacacagaagaggcgcagtctacatttgatgaagctgcaatcttccatgttagggctgcatatgacagctactaacgtgatgcatgcacctgttgttcgctttagtttggtccatagctacggatgtcagacctgtgatatctttgtacaatgcctacacaactagaattagcattagcaaggctatggatgcgtgcgcgcacgacacataaagcctagagcgctggttatgtccaagaaacgtatatgaagttatactgtcttctatatgatcgcccaaccagacttaagagacct

SEQ ID NO: 421945 - DNA, 470 bp, Oryza sativa nipponbare
ccacgcgtccggccatctcagattatagtgtgtatcagcaagatgaagtgaggatgaagtatattgcacttgggccttgtcgaccaccactagagcaatttcctcaaagaaattgtggagatgacttaaacacagctttgcaaaggagggcgcaagatattgtgaatgcggttgagctcattgttttgacaaagatgcaattggagatgttgcggcaagatgatgggtgggagaattttttaaaaaaagtcacctcttttttatgaagaacgaagtcaaagttcctcagatggatgctaggtacaagccggttggaagatcaccaagcttctttggctcgtagagtcaagttgtaacaacttgtgttgatttttcagaacatggacaggatcacactatcttatataatatatgttgctgatgggtatcattcaatggcattttcttcctctgtattggatccaatcttt

SEQ ID NO: 421946 - DNA, 204 bp, Oryza sativa nipponbare
ccacgcgtccggccggttacaaggacgacctcgtcggggcggcggaaccctccagcctccgggctcggggcgggcgccttgctagcatcctgcgccggccggcgagctatgcgcacaaccccaaccccaaataaataatatcaattgaactatccaagcctaagctgccggatctagaatgcatggagatcgtttacgcggagg

SEQ ID NO: 421947 - DNA, 409 bp, Oryza sativa nipponbare
tttttttatttattttttttggataggtaatcaaaaaaaattatttttatttttttattaatttttttttttattataaatttattttttttattttttttttttgggcccatgaaaaagaaaaattatttcaaaataaaaaaaagggggaaataattaatggtgaccccgcctggggggaaacaccaaacaaaaaaaaaagtttgggaattttgctttttaaaaaaaaaaaaaatttaacctttatgtaaaaaaaaaaaaagcccccgacagggcctaaaaaaaaaaatcccggtcccgaagggaaaaaaaaaaagagcggaattctttattattttcccaccctaaattattaaaagagggggttttttttaaaaattttaattttttaaaaaaaaacgggccgggg

SEQ ID NO: 421948 - DNA, 209 bp, Oryza sativa nipponbare
cagcactatgtaactgggagacagaatcagattaagatacggacgccgtaccaaagatccaacgaaacacccagtacatacgtagttacaaaactaaaatatgttgataaaccaacaaataacattattttcatagcagtttctacggaatttattgtttatatatgccagacttttcttcagctaaacagagcagcgacggacacatg

SEQ ID NO: 421949 - DNA, 228 bp, Oryza sativa nipponbare
tatttctatttttcgtgttggcataatcatattattattcttccacctttcccaaattcaactaaacacctatttcatacttttttcaaaactaaaatttgttgatagaccaacttatatcattatttttatagcaaaaaaacaaaacctattgtaaaatttcccacacttttattcaaataaacagagccgcggcggaaaaatggacaaacaaaacaatcgctcccc

SEQ ID NO: 421950 - DNA, 170 bp, Oryza sativa nipponbare
tttttccaaacccttgctgggactcaacacactcataggaatttgccagttctaccaagtcatgaccggttcctcaccgagagaacactcaaagaatcgacgttttaaagggatatgcttgatcacggaccacagcgtggggcgtgaatagagacatgcatgcatgcatg

SEQ ID NO: 421951 - DNA, 423 bp, Oryza sativa nipponbare
tacttgttgaatatctgcaaagtctataacaatacagaacgcacgaacaatactgaagtatagtacaaagatggtcagatcaagagagtgaggatctactagtagcagagaaagaacacaaaaccgtgtgtgcgcttcagtttcagtttcagaatcgcaagccgcatacctatgtcgcgaacgcgtccgtccgatcacgagatgacgaacaccctgagctcccctctgtccccgcgggtgatgcgggtgtcgccgtcgaggtaggtcacctcgaactcgccgctgccggtgttggacggcggccggaggttgtccgggatgcgagggacctccagcggcggcagctgggacaggttccccttcgtcttcaccgtcgtcttgtcgaatgtgatctttatgctcgaggtgccgatgatctcaaac

SEQ ID NO: 421952 - DNA, 349 bp, Oryza sativa nipponbare
tctttaaaaccgcccgccttttttttttttttttaacttttttttttgagttacgggtaaaataaagattgggatttttcctttatttaccaattttttcttcctaccctaatttttttcgcccgttcatattttttttacggatcccattttgttcggtttttcacttttttctaacgcccccccaatatgccagcccaaaagttcaacccacaagcccataaatttacaatttcaagtgcccccacaaattcatttgtttcacaaacccacaagttcaagtccaagccacaagcctcattattccaagttcaggtgccccttcacaaattcaggtgtttcacaaacc

SEQ ID NO: 421953 - DNA, 355 bp, Oryza sativa nipponbare
tttcatactcaactaagcgtgagtagcacgaagctgtcacgaactgacataaaccacatattccgaacacatcgagcaaactacacctgtgctgtgcggctgttctgaacacatattgtcaggcaagttcaaccaaaacgtgattccgcacaaagctaccacgagttcaaacaaataaaaacattaacagatgtctgcacagattttcaggcatgctcaacaaaaatgctattcagccaatccaagttgtcatgaatagcagatgtatgagaaaatcaatcggtcctactcccagcggatgtatagccaaccccaatttctccatcaaatcaaccacattgtgttccaatgaaaa

SEQ ID NO: 421954 - DNA, 281 bp, Oryza sativa nipponbare
gtgctaaaacatcatggctggcctttcattttgataaacactgggcctcatcactcaccacgaccaaacctaactccttacatcttgagttcccttatattctgcaaaggaactcatattcttactgcctcacataaatccaaccactcatttattaattacctcaaccatgttgacaatggttatcaccatggatgctttccctaatattcctcacatatgtatactttccaccttgaactttcaacctgattttttctctttgaaaacatcattaatat

SEQ ID NO: 421955 - DNA, 227 bp, Oryza sativa nipponbare
aaataaaaacactggttggagatatataccaagaaggggctatctcaatctataaggaaagataaaaagtacttgatcattactgatcatcataaaataaagtgcacttcatgaacaaggaatgacctaaaatggctacttcaacacaagaagaatatggctagacaaggtacacaaaagtaagcaaggccattgcccatatctttaacgttggcctctatcaggtg

SEQ ID NO: 421956 - DNA, 286 bp, Oryza sativa nipponbare
gggccaaaaacaaaattaactttgataagccctgtttccccccccaatttacatgatctttacatggcccataaaacaggcccttatggtttgtttccccaaaggggttttgtttcgggggaccagcttaataaatttgattagccgatgttttggtccaggaccccctttttttttgggccggggaccacccccccccccttgttggggcccacggggccctatgccaaggtgtgggggagggtcaacccgggggggttcccggttttaaagccggagtttcccc

SEQ ID NO: 421957 - DNA, 339 bp, Oryza sativa nipponbare
aaaacgcaaaaaaaaaaacctttttttttttttttaaaaataggaggttcacaataaaatttgggtcctttaatttttgggggggccattaccccttttagcggggcgctttcctttttttacataaaacttttcccccaattttttttatggcggcttcttgctctttgtttttcccccgggaagtgaaaagaattaccttttccttttcccccaaaaccttataaattccttgttagttgggattaattcctaaccccgggggggttttaccctttaaaaagggttttgggcttttttttccccttttaagtttttttttttggggtccccaagttt

SEQ ID NO: 421958 - DNA, 353 bp, Oryza sativa nipponbare
ttttatttgcattgctcgtgctcaacgactatagcaataccattattaatttcagtagaagcggtgcgttcctacaaaaccagacgcatatggcataacattgttctgcttggtcacaacacaacgctgctttctataccctcctaatgaaaatgggggcttgagtaattcaatttaatctggcgggggtgtgccttctctggggcaaggtaaaaaaaagccctaagaatggggagctggaagattccaatggatgggctacccattggaactcggagggtggttccgggatcaaatggttggaggacatttgggtccttggggatcgctggcaactgctttttggaatggta

SEQ ID NO: 421959 - DNA, 401 bp, Oryza sativa nipponbare
tacagttaatttggcaccggaccatgtgatctttcaaaagttacaactagtttgattgtttgaagtttgaacatgattacatgggtatgctgacttcaacagtagctaatgaacagcctagaaagtatagggttgaaaagaaccagaaggtaagacaactacacaggtacagcttaagttaccaaacccaattacaaaatgttatggaactgaaagaccaccgatgcaccataacctaacatcatgagcaaaacatttcactgaacaaaacattgtgtcatcagactaaacagcacttggaagaccagtcaggaaacatcatgctccactgccagttgcgctgtatgagaaacaactgcagcctcgtctatcatatctattggcgcttatcctgcttacgc

SEQ ID NO: 421960 - DNA, 437 bp, Oryza sativa nipponbare
ttttagactacaagagcacagaggtctttacgtgctattggatgtagcagtgcgccaccagcatcaatcttttgctgctgaattgcccataagctgacagcagagtcgtgcatcactgcatgacctaggatcacggaccgataagccaccactcaggcctgtctctttacatttggagagttgatacaccaatctcagctagatatacaaatcatcagccaaatatctaccctacagacattatccaagaggaactttggataaccttcttctatgttgaatgggcacacggcgcccttgtacactatgaagtatgaaaacaatcttccaaagtgcaacttctgaaggatcttccttcaacgaacacagttgcaatgtttggtaaaactccagttttttcctttatgttcacttctatcagcatgtcactgaaagaa

SEQ ID NO: 421961 - DNA, 395 bp, Oryza sativa nipponbare
gggggggcaaaggcatgagagctttgtacatgattaaataacttgatcaaaatcccaattaagtacattgtccccatgcttccaggccggactgatgcatgtctgatggctgctgcccaagcagagcacaaccgatgatgctatgtacactggcaacagaattaaggaactgaaaacaatgaaaggcatgaaagaacaacagtcatcatggtcagcttcaaactatcaccaatctcacagcaaactgtgtcaatcgggttgctaaagaccggttcttgaatcaagaaggctttgactatatggcatttttgacagtttcaactatttacccgttttaccagactgagatcttgctgttcttttgagacaaggatatagtctaggctatgcatact

SEQ ID NO: 421962 - DNA, 363 bp, Oryza sativa nipponbare
aagaggcctttaaaaataaaaaaatttttaaattaaaaggtatttacacatcccataacaggatctttaaaaggaatatggccgcaaaaaaaaaaaattaattttctctaaactccatttatttaaatagggccccctagagaaacccattttttaattttccccaatttcaaggtggaaaaagaaaataaattgtgaatcttattgtgaaacaaagaaaagttgatatttggcacctttatgctttttaattgcaagttgagaggaacaaattgtcattcttcacaaatttcttgaaaaaatttttccttttttgggggcccatcccacttattgttaaaaaatttacggggggttaaatac

SEQ ID NO: 421963 - DNA, 387 bp, Oryza sativa nipponbare
ccacgcgtccggtcgctgccatgcatttgtggtggagcttctaggaaagttgtgtgctgttctttcaaattcagttgcagatgagttagatatatggaagtgggatcatggtctatggactagagcatacacaatcaatttaaaattctggccagaatactcacttgcaacgaatgttgtagtgcctatggcagttgaccttacagatggaaggattctgctgaatactgggaggaaagctggtttatataatccatttgatcaaacaattgaaaacttgcttgcacttgatcaggtgtcacttgccacacctaaagtgcagcaacagcgcactggaggtcatcttaagtgccacattaccagatgcgaagatgttcctaggaagtt

SEQ ID NO: 421964 - DNA, 370 bp, Oryza sativa nipponbare
  unsure (1)..(370): unsure at all n locations
ccacgcgtccgaaaaaatatatatagaaaactatgataacatcttatcttgtgttgaaaaagaaagccaccttatgttagttccttttcagtttaatcattatcaacagtaaatggtactgtaggtaaacctcttgttattgaaatttttaattcatttataaaaaaaggaaaaaaaagagaaaagatttgcctgcaagctaaaaaggatagaagtgaaaaaaatgataattttttacttgcaacttacaatngcactccactattttcagatagttcgaaatgattactgattagttatttatcgaatggattactgattagttatttatctgtgcatagatactgatgtaacaaataactgtacccaa

SEQ ID NO: 421965 - DNA, 418 bp, Oryza sativa nipponbare
  unsure (1)..(418): unsure at all n locations
ccacgcgtccgcggacgcgtgggtttttttttttttttttgtcttgttcntgnggtagcctttaaagttatcccggtgatttatacatttcagccaaatatttcacaataaacaaattatcgctaaatccatcgggttacggctgagatccttgagacttatctctatctacaattaattaacctgggtgtcaagaaaagcttacatatattttgtgctcatggcataaagctgacctccaaatgtcatatgtcatccatatcaagtggacagcataaacaacgctgtaatatagaactcacgaggcgttgaatgagcaaaactgaccagcagctgggagactgggaaaatgtcagttaagcaatcctcaatcatttaagttctcggttgttcccatgacaattgatgcttagctaac

SEQ ID NO: 421966 - DNA, 76 bp, Oryza sativa nipponbare
  unsure (1)..(76): unsure at all n locations
ccacgcgtccggcaggtgtaacctttttgcaaagatatattaancataaaaaaaaaaaaaaaaaaaaaaaaaagag

SEQ ID NO: 421967 - DNA, 75 bp, Oryza sativa nipponbare
tcgcccacgcgtccggctcatggtggtggattgtggtgcgccacccgccctcgcccgccgacatagcagcctaac

SEQ ID NO: 421968 - DNA, 411 bp, Oryza sativa nipponbare
ccacgcgtccgaattaaacatatttcctgtttggtgcacatagaactggctgttgtaaataaatttatctgtttgattagttgttcgagcctatcatttggctgatatttagccacaccaatattagttcttattcaatactagaaaatgaggagcattgaacactgaattgcttgttatgtttatatgttgtcatgtagtcctgtaactgttatatgttgtgttgccttacccttttgcataacaactctaatttatgatataactatcctttaatagtgcctaactagcatgatgcatttgtttgtgtgtgaaactaaaagagctacaactctagtgcttttgttaatagtcggatatacagttgttattgtcataaaactgcagttaaatgtatttgaccaatgcaca

SEQ ID NO: 421969 - DNA, 56 bp, Oryza sativa nipponbare
cgcgtcggcaccgggtaggctaatagagggtctctgaccggcgcccagatctcatt

SEQ ID NO: 421970 - DNA, 471 bp, Oryza sativa nipponbare
ccacgcgtccggaagaattctgcatctatatcgggcacagttttgaatcagagtttgcatgaaggaagccaaactgtaaattgtcagccatcatttcagccagtgccatcctccacacctatgtcttcctccacacctggaaagcatcgtttctggccaacggatcactggagcgccgcggacacaaggcactgtttactcccaatccgtcccccctataaagctagcctcaatcccactacttcgatgttgccctgtagaccattatgcaaattttccaaacagtgttagaaaggtcacattgatggattccaaaggtgagaaactccatgttcaaagaaccagtcctgcatgatgccattaagattggtgtgaactttaggaaccaagagtctactgcaaccggcagaacaaaataatgctccaagaaaaccagaagtggtgatagttgaagataatgaagtggtgatt

SEQ ID NO: 421971 - DNA, 244 bp, Oryza sativa nipponbare
ccacgcgtccgcgctgcaccgcgcgcagcctcgagctcgaggagagggagatttggccccccgatggcgaggccgagggcgccgctgctgcggcggatgctgctgctgtgcgcggagacggacttctgctcctactacctactcgtccttcacgcgcaagccttcgtgccgtcccgctacgacagattcgactacggtgacaccgacaccgacgcctggaaggacaccatactcgtcgaggcct

SEQ ID NO: 421972 - DNA, 476 bp, Oryza sativa nipponbare
ccacgcgtccgcaaagaaaagagacaacacttaccatagtccatcaaaacaaaagaatgcgttgattggcgcgaatgatcccagggacatggctgcaatcagtaaagaccgacataaaactgaagcattatgcagagaaatttcaaatggtcagagtgaagcttgttgtctagccgagcagttaaatggtcacagtacaagcccgagttctggtggtgaacactggaagatcgatatttctgatgataaagacgatgatagaaaattgtcccctaacaaggtcgaggcatcaagtcaggcaactgcattttctggtatcatgaaaaccaccgaatctttcacaagagtaagatggttgaggaatagcttgtggaaagccaagagtgatgaacatcttccgttaagatatgatatgccaaatcacttagactggagggttataaccttattagcacagaggtttaacgggcttactg

SEQ ID NO: 421973 - DNA, 478 bp, Oryza sativa nipponbare
ccacgcgtccggtcgcttacggatccctgttaagggcaggatacagctggtcgtgagcaaccctgagaagactccacttcatactttcttctgcagctatgacttgacagacatgccttcagggaccaagactttcatgcggcaaaaggtcactctgtcccccactctttcctcctctaatccaatgaaagaaggaagtaatgccggtgacattaatattggccccaaggctgagtctgtctcatgtggagaagttacagaacgggaaagttcagaatgctcatctgatggatcagaggagaaagacgcaaatgcaaaacgttgttcgttggacagtaacatgatggaatcaaataaacataactctcctgtgaataagaaaaataacaccgattctgatgattggtgctgtcagatggacaatttaggtggcaagaattattgctgtgcatcttctaggattaatgatagctcgggt

SEQ ID NO: 421974 - DNA, 99 bp, Oryza sativa nipponbare
ccagcgtccggggagagatgccactgcttatgctcccatggcgagccaactgatgaagagcaacttggtgtgctccaagccgagggggctgtctggtgc

SEQ ID NO: 421975 - DNA, 427 bp, Oryza sativa nipponbare
ccacgcgtccgcccacgcgttcgcccacgcgtacgtggcagtggtcgatggcgtggtggacgcggacgagggcggtgtcgacgacgacggcggcggacgcggacacagacgaaggcagcagcgtcggtcacggcgaacgcagacgagggcggcaagccggcaacagcgatcgtggcatatgttgtgataatatgttctgagatttatttgttttgcagctttgatgtgcggatgagtactctccgcttttccgttgcatatcgagaatgcctattgactgtgatgccttctatgtttcggatctgagcagcagtaagcctatttttattctgttttactgctatgtgtggtgctaattttttttttccatttcatttggtaatttgtttattcattgtgggttctaattaaaaaatatgtttaattc

SEQ ID NO: 421976 - DNA, 256 bp, Oryza sativa nipponbare
tagaactctttttggggacaggggccagaatagcatacagatccgatagacaataacacgcaggttacacccatttaccagcgcatatatataaccggggagcattactgcccaagaaaaaaatgcactgtactcaaggaaagcgctatttatgaggcaagggatatgctcagaacagcttagatgaagtgcgacctctagtgcttatgcccacgggaggttctggatgtctttcttaatcgggaatggtgaagta

SEQ ID NO: 421977 - DNA, 268 bp, Oryza sativa nipponbare
tggtactgaatcatttttaggggcttattctttttattgattcctgccctttaaaccccaccaccctgttgtttaagatttgtaaggtacaaaaaaagctctccctggaatgcaggggaagtgctttgtgcaacacacttattatcatgccgggttcgtgccatcaacgtgaaaattttacattctaaaaacttggcgccatggaatggccaatcatgggggacctctctgccccttgaaatggccacctcgtcaaggggaccatttt

SEQ ID NO: 421978 - DNA, 241 bp, Oryza sativa nipponbare
ttattttacatttggtgattttttttttttttttttttttatttttatatttatattttttttttttttttttatttttttttaaaaaaaaaaaatctaggggtacggtttatatttattcaaccaatggggggtatttgaacttatacataatgaaacgtttatatttagggacaaactcaaagatttacgcatataagggggacccttgctagattaaaggaaatttaatcgtaccaat

SEQ ID NO: 421979 - DNA, 229 bp, Oryza sativa nipponbare
tgattacaaaggtcaagtgagcgaacgtcggtatagttatacatccacgactataccattaccaccagcatgtttttaacatgcttggttttatttatacccactataagaaagttcaccaacacataccatggcatgcataaccagagccctcaaacacaaccatacaccagtggcacacgcgaaattagaatcaccacaacaaacttgggtgactactacatacggg

SEQ ID NO: 421980 - DNA, 75 bp, Oryza sativa nipponbare
ttttatcaaatatggtattcggtgtttaatggaaaatatatctttgcaaaaaggttacacctgccggacgcgtgg

SEQ ID NO: 421981 - DNA, 283 bp, Oryza sativa nipponbare
gtttaaatttatgtgtaaatttatattattaggatacgtcccatcgctatatcgtgggatgggagtacattttgatcatgcacatgtcaaagtgtcaaaaactacaccatacaatctgccacttctgtatgccgtgaagctaagcctgaaaaatcagacacaaaaagggaaaaaaaaaagagaaaaccttttggcatagctacagttgatgaattgagccccaaaaaaatcttgctcatggatcgagaagcctatcattgatccccgatcctcctccggcatt

SEQ ID NO: 421982 - DNA, 373 bp, Oryza sativa nipponbare
ctgttctttctgtagccgctccgacagtgattctttttatacatgcgacatagagcactaatccgagtaaagctaaacgccgatattagatatctacatgatcagactccgactaattcacgcatgcatccaaatgaggctgcactttacatgacctacgagcacatctcgggaggctacatatggctatggtagatatgctgcccaggcgacaataggctcagaccggatgcacttttcagatccacaggtgccaagtcggatccattatgcacaggctcatccaagataatgccgcttccacaagagccgtgacgcctcaggggaccgactgtagtggctcaaatgaacactactcctcatcagcaagata

SEQ ID NO: 421983 - DNA, 243 bp, Oryza sativa nipponbare
ggtgcaagaaagggggatagcatatttggggctaaaattctcaagatgtgaaaccacgatcagacacctggcagctccctgtggtgaatatcataagggagaaaacactgttaagcgagacaaaacctgtaggcatgactaaaagctgtacttggcgaactagctaactgatgggaagcagcattatgaggcgtttcttttgtgcaaattgagctccacgaagcaccatcatatgtacaagct

SEQ ID NO: 421984 - DNA, 192 bp, Oryza sativa nipponbare
atgtatcgtacaatgaccggggcgtttgtttaaatgcaaataacattatttttttatagatcattattttactagaacagattaagaaacaaaggctaaaaagccaaaccaagaaaagcttatcgattttgccttactagatacacacattaaagccttccttaaaaatttccatgtataaaaaaatcaacc

SEQ ID NO: 421985 - DNA, 199 bp, Oryza sativa nipponbare
gtctcactttaggcagaggatgttacagcttagtctagatcaatatttattgcatcacatagacgaactgttagtatccccaaaagcgttatttcaagtttacaacacgcttgacatacttacatagaggtcaacatttctaatctatcgccatgctgcctagatgaggggatccaggatgctagcccatgtcgctgtg

SEQ ID NO: 421986 - DNA, 388 bp, Oryza sativa nipponbare
gattataagatagggtcacatttcattagcaacaatggggtacagtcttggttaaccggctcacccactcgtcaggatgcctcttccaggacactatctacaacttccagaatttatctgctgattagctgagaagctgcatgtttcatgctactaaataacaatcttatactccagctactagctgcttaaaataacttcagcatcttctttaaggatctcacactcaactaacttctggtggagcatctgtgcctctttattccagcctgatttggcaacttttgtgactatggatgaacacaatgaattcccggggatactattttttgataacattactttagttatttcagcagcagcttccactttaccatctctacataat

SEQ ID NO: 421987 - DNA, 189 bp, Oryza sativa nipponbare
ttttttaatgctactcacaccgagttgggtaaaaatcctaaaattttaatccctcctcaaattccaaggcagtccaccatgctctataagcttgcttcaccctacaatgtatacacacacaaacacaaccctctctagctaccccgtatatacatacggtaaatgtccacattttaactaatccaattg

SEQ ID NO: 421988 - DNA, 317 bp, Oryza sativa nipponbare
aatggtaccaccggagctgtgtactttcacaaattgtataaatcattcacagtaggcctgcaaatccatttcccaacaggtctacattttttttttacagttgacttgctgagggtccagcggcgaggtgaaattggcaggattcaatgaatcatccattacaacagactccaagttgcctttaactatggatccatatacggaggattttgtgctggtgacaacacgttctctgatcttggaaattttgcctagcacaaatgaagtcgttcccgccttggtttattttcttatgcacaaatgaagtcggtcccggt

SEQ ID NO: 421989 - DNA, 171 bp, Oryza sativa nipponbare
tttaccctttgtataaatggagccaggcgggcagcctgtttgtgcccttgagcaaatgcatttcatttatacaagtggaaggcacttaaatcagccaccacatgaacacacacatgttccatcatcgatcgaactacacatgcatgacccggtcatgcacttacaaacaaa

SEQ ID NO: 421990 - DNA, 259 bp, Oryza sativa nipponbare
tattcgtcaagacgcaattgggaattattaataattcgttctacacgtcaagacactgttatcgccctttaaggttgggaactaaacatagcttcctggttccaaacactagtactctaaataacgggtttacctctctgcactgcacgatctaaagtatcgttggataaaataggagcagacaacggcatttattactctggcccagctttcctcttcttcaaagaatcgacgagggtagcctattacttcctgcttt

SEQ ID NO: 421991 - DNA, 336 bp, Oryza sativa nipponbare
ccacgcgtccggggagcgcgcgcgcgccgccgtgcggggctcggcgcacgcgccgctgttctttctgtttcgacgacacgggccccgtcacgctgcgcaaggagtgggtccacttcggctacatcggcctctggaccggccagtccttcaccaagatgaacgaccgcttcctcgacgacgtccgcggcgacgtcaaggaaggcaaggacgccaagctgcttgtctcctggggcgaaggcctgcggtcgacgatcgcggtgaggacgctgctcgacgacgggtacaagaacctggcgtggctcgccggagggttcagcatgtgcgtcgacggcgact

SEQ ID NO: 421992 - DNA, 197 bp, Oryza sativa nipponbare
agctgtagctgaagatggccctctgatggcgtgcgcacacgcgtccttcaggggctaagtcaccgcgcatgcccgccccgcgtcggactcagttggacgcagatggggagacagggcatgcaggggcatgagcatagagtcagaccttctactgcaccgttaccgggaggacctctgagcagatcgagtacttgctc

SEQ ID NO: 421993 - DNA, 144 bp, Oryza sativa nipponbare
  unsure (1)..(144): unsure at all n locations
acgacccacgcgggcgcgctctctagcctctcccgggatggaaacgttcgcgcggtgacgagcacttttcgttttctcgaggacngcctgccgagactggggaacggggtagctgagagggggggagacatggactgggtctct

SEQ ID NO: 421994 - DNA, 227 bp, Oryza sativa nipponbare
cccacgcgcccgcccacgcgtccgcccacgcgtccgaaaaaaaaaaaaaaaaaaaaaaaaaatttaaaattaaaaaaaaaaaaaaaagggcaaccggggcaaaaggaccaaacgcacggccgcgggcaagccaccaaataacccttccaaaacatcccccaaatccatccactggccgccacaacaacaaggactggcaaaacccaacccacccaactaaaaacccc

SEQ ID NO: 421995 - DNA, 211 bp, Oryza sativa nipponbare
  unsure (1)..(211): unsure at all n locations
cgacccacgcgtgcgggtcaagctcttggagtccaatactatgaggtggttgcgaatgtggtgttttttgttttacaccgcgcttccttgnccatttcgtggtaggactatggctgatgcgtaaatgctgtctattgcatggccaaataacaaaatcagggcaaacaagaggccaggtatctcccattgcggaggttgaagttcgggaatg

SEQ ID NO: 421996 - DNA, 211 bp, Oryza sativa nipponbare
ccacgcgtccgcggacgcgtgggcggacgcgtgggcggacgcgtgggcggacgcgtgggcggacgttgggtccgccacggcctcgcggtcaccgtggcagccgtcaagccgccactcgactctcccgatttctccgccgctgtcgcgcgcttcgcggagtgcaaccccgcatcaacttcaggctgcgcgcgcgcacgccggccgggctcgt

SEQ ID NO: 421997 - DNA, 58 bp, Oryza sativa nipponbare
  unsure (1)..(58): unsure at all n locations
ccacgcgtgcgcacgaatagagctcanctgctgcctctagcttacttggtgataagga

SEQ ID NO: 421998 - DNA, 298 bp, Oryza sativa nipponbare
  unsure (1)..(298): unsure at all n locations
ccacgcgtccgggaacatcttatgcagacttcatccgcagtgtccatttgccgatgcaactgagtcatgtagatcctattgtggcatcgttctcaggtggagcagttggagttatctccgctctaatggttgttgagatcaacaatgtcaaacagcaggagcataagcggtgcaaatattgtttaggaactggatacctgggcctgtgctcgctgtcaagtaccngaactctggtgcttactgaacccgnttcaacattcagcgatggtgatcagcccttatctacgccaagacagag

SEQ ID NO: 421999 - DNA, 361 bp, Oryza sativa nipponbare
ccacgcgtccgaacggatcgagccaaccttgcagccagatgaaactagacagagaggagggccagcattctcattgtcgaaacgtacatgaagcgcaccggcacgtggcggtatcttggacactctcgtcccttcaaagcccaccatcttgacaggcacgcctgcagcaccgctcgaattagagcagacctgagctgtgtagcgggccggataggagggacatcctgcctccattctcgatgcataccctcgtcctacttgagggcgcggctcccgaccactactggtggtacacggactggctctgcgaggacccagtggcactcgcgtgggacagggcgctggaggtgatccacgggcg

SEQ ID NO: 422000 - DNA, 417 bp, Oryza sativa nipponbare
ccacgcgtgcgccacgcgtccgcgcacggccacccatcgtcgtgtccagtctccacccctcttctttcttcattggtggtgtacgcttgcctccgtctcagcttcgttttcagatgtctcctcgtcgtcgaagccgggagaaattaaccgtgcgtgtttgccatgatcgattgttttgtccagcaatttgagcgaacagtaaagaattactgagccatgtcagagtgtgttctgaacttcttgttggaagagcagcgaggcgctgtggatgaggatcgattttaatgatgaatccattattattggcttcgattaatccactcgagtgtggaagttaatgatgtcctcttaatctgtgacacacgtcacctggaacagcctttccacattcaaatttgggacaatttgcaacttcag

SEQ ID NO: 422001 - DNA, 68 bp, Oryza sativa nipponbare
  unsure (1)..(68): unsure at all n locations
ctcctccttccacgcgccaaaaccccagccaccacttttttnttccgtcccggncccaccaaaanctc

SEQ ID NO: 422002 - DNA, 371 bp, Oryza sativa nipponbare
ccacgcgtccgatgcactggagcttgcaatgggtgatgagtgagccgtgtctaaagagtgtgtgtttttagtcgggagctcatgttgtcttaaggactttctttgaaagtggagaaaggggctttttcctcagctcacaattttccatcttcagtgctgttactctgttagcgattgtttggcatgtaaaaaagtgtgctttcttgtaaaaataccattttctagttcgcacctgacagacgaagaacaccatggattacatgtaaagttgtaaactgaacacctaatcttgagtgcgaataatgaataatgatcaccggagttatgagtttgggtaataaaaaaaaaataaattaaaaaaattaaaattt

SEQ ID NO: 422003 - DNA, 251 bp, Oryza sativa nipponbare
ccacgcgtccgcccacgcgtccgcaacagcaccggcgacgacaagctccggctgaagccgaggagcttcggcgtgctgttcctcatcaacgccgccgtgtgctccgccgcgctcctggcccacctcgtcgccgtctcgtcgctgccgacggagctgcggcggcgcttcgccgtcgtcgtcgctttcggtgtatccggccggcgtggaggtggagcgccggtggcgatggctggtggcggcgcggaggagag

SEQ ID NO: 422004 - DNA, 348 bp, Oryza sativa nipponbare
  unsure (1)..(348): unsure at all n locations
ccacgcgtccgcccacgcgtgcggagagaaccccaccttggcaaaaagaaaagaaaaataatatcattttactttttgctgcccttttcatcccctcggatattcacgaagcaaatctctctgcaatgcttttctttntttttttttgatcttgcggatcttctccattgaggaaaggcgagagctntgggatcgattcctggccatggcgaaggaggtggatccgtgcgaccacggcgaggtcgtcgacgccgggtgcgtacgcgccgtgctggccgagctcgtactcaccttgtcttcgctttaccggcgggatgactggatattgttgtttcctgggcagactat

SEQ ID NO: 422005 - DNA, 324 bp, Oryza sativa nipponbare
  unsure (1)..(324): unsure at all n locations
ccacgcgtgcgcccacgcgtccgcccacgcgtccgcccacgcgtccgcccacgcgtccgcggtcgccgtggtgctgcagagcctcgcanacatggacgtcagctacattgctctgggggagacggacatcggccgccatgtcaacggcctgcgcaagcacccgtccggcgaggtccggcagcttgtgaagctgctcgtcaggaaatggaaggagatagcggatgactgggtgcggctgcacaactccggtggcgaccgcggtagctcggttctaactgaaggtgactcttctgataaaatccaaggcaggagctaccaaaatgc

SEQ ID NO: 422006 - DNA, 245 bp, Oryza sativa nipponbare
aggcaacattaacgcttaacaacgccattctttgctaaacacacgggttgtcgcagattagggatatttacagctagagggtcatgtgcaactactccaaggaggctgcgacacctgctgcaggcgtcaagggagcccgcgcgtcgctactggcgatggcggcgacggcggcgcccgcgatggcgctcgttgactagaggatgtcgacggagggcaccgggctcagcctcgggctgagcaacaac

SEQ ID NO: 422007 - DNA, 148 bp, Oryza sativa nipponbare
ccacgcgtccgcgcacgcttacggtgatcctttacaattatcgccgctcactgaatcaagatgggtgtttactattgctccaccgttggagctgagggctcgactcccaccaactacctggggcaggagcttaagaaagacgcggcat

SEQ ID NO: 422008 - DNA, 386 bp, Oryza sativa nipponbare
ggaattcaacgaattcaattcaattataaaaaaaaaagggaagaggatgggaaaatatttgggatttggaaaaaaattcaaatgaaaaattgggggaaaaatcggaagaatgtcctgatgtaaaaaaaaaaaaaattgaataaccgaaaaaaaaaaaagatttggaaaaaaatttagaaaaaccaaacaaagggggaaaaatgaaatttggttttccctttaaagtgggaaaaatcgccgtcaaaaaaattggtaaaactttcgggaaagaaagaaaggtttttgaaaccgtggtggaaaaaaaatttaaacggaataaaagaacggaaggtttttccgaagggaaaaaaaaaattggggttcttgtttttgccggggggggggga

SEQ ID NO: 422009 - DNA, 175 bp, Oryza sativa nipponbare
aaaaaaaaaaaaaattgtttttggaaataaaaaaccgcccccaacaaaaaaaattccaaacaccaggggaaaaaaaaaaccatttttttcaacaaatccaaaagactaccgaaaatgtcccccatttttgaaaaatccaacctaatatggcaaaaaaaaaaaacaaaaaggtttt

SEQ ID NO: 422010 - DNA, 60 bp, Oryza sativa nipponbare
ggggttgggtttttttttttttgggacgcgtgggcggactcttgggcggacgccggggtg

SEQ ID NO: 422011 - DNA, 337 bp, Oryza sativa nipponbare
tttttttttttttttggttttgttttttttttttttttttttttttttttttttttttttttttttttttttttttttttttttttttttttttttttttttttgtttgtaaaaaaaaaaaaaaggatatttatttaatttattaaaaaattttttaaaaatattttttttgtgtttttttttgttattaaaaaaaaagtggttaaaaatatattattttttattaagttaaaatatttttttttttaaaaaaaatttttttttgtttgtgttttggtttttaaaaaaaagttttttttttaaaatatttattataaaaaagttttttttatttttt

SEQ ID NO: 422012 - DNA, 526 bp, Oryza sativa nipponbare
ttatgcaatcctgtccaaaacgtcacttaatatcaaactggagggagtatcagttaaggagtagtacatttaagagcgatgaaaaacaaatagattggactacttgggcaaaagatttcgctccaagttttggatctttttaggtacaagatcatcgcctcagctctataagagaataccatccagacatttagagatccagacatttagagctgtgacatccgagtgttgcaacaggaagtatttgtcatcaatattaaaatttattagtcatgagtacaattgcacgttcgagttggacctcactgcttgatgaattgaactgttgacaatcttagcatcaccagttctttgtcatggctgaagagtacatcgtaaaggaccatataccatttatatgtactctatggtgtgtttcgacgtttatactaagataacattgctttctctagtgtttcctgcagctctccacttttgtatgcatcaacggtgatgtcgcatcctccgaagaactcgccgtcgatgt

SEQ ID NO: 422013 - DNA, 103 bp, Oryza sativa nipponbare
tttttttttttttttttttgtgtttggtttttaattttgtttttttttttttttttttttttttttttttttttttttttttttttttttttttttttttttt

SEQ ID NO: 422014 - DNA, 347 bp, Oryza sativa nipponbare
gtatacgccaaataaaagcaggatttgaatcttacagggatagtatacatatcgtcacatattttggcaagcagtgcaagcatggaggcacagggcgaaaagaaagagagagggcctgcagtggctattgtacatattcctaagaaaatcatgtactctgagatggcaacacaactgtatgactggataaaaatatgtaggtgtttaaacaaaggatagaaggaaggatgcgcaccatgcgcaacggcagctcatagaattttccaaagctgagcatggggagcaactcattctcgagcttcaagtgcttgaaatgggggaacaataccgtgtgacgcgtgaggccg

SEQ ID NO: 422015 - DNA, 445 bp, Oryza sativa nipponbare
ttatcagaaaccggggctcttatttctgcaagacctgtttccgtcacaatacgaacagatgatgggggaaatgccgcaatagcagtctataacttacttgccaagctgcaactaagctttctttatgtcataggagtgatactgatggggtttgagcatatgaggaacattgtaaaagtaatgaagccagtaagggtcgcagcaatcgaatcataaggtaggtttcaagaactacatcaaaataccatccagagtgtttctgaaattgtagcaaacacttaaccgagctatgttgctttaatctgcagaaacaaaactcatgtaaattactctcagagccgtcgaggagacctggtattttcatgtctcctcagtactgtggagatgatggttttagaatagcatctccgaagacttcctgagaaaacttctgctctaagcagaa

SEQ ID NO: 422016 - DNA, 335 bp, Oryza sativa nipponbare
aaaaaaaaaaaaaaattggggggaatattttttttttttaaaaaaaaaaaaaggggttaaaaaaaaaaattttatataaattaggggggttttttggggaaaaggggaaaaaaaaaaaaattttttttaaaaaaaaaaaaaattttttttattaaaaaaaaaatttttaaaaagaaaatattttaaaaaaaaaaaaatttgggtgtagaaaaaaaaattttttttttttttttaaaaaaaagtttttaaaaaaaaaagggtttttaaataaaaaaaaaattttttaaaaaagggttttttaaaaaaaattgggaaattttatgtttttgtggggg

SEQ ID NO: 422017 - DNA, 362 bp, Oryza sativa nipponbare
ttttttttttttttttttttgggggggggttttttttgtgtgttttttttttttttttttttttttttttttttttttttttttttttttttttttgggggccaggccccggggggggggggggggtaagggggaaaattttgggggggcccccccgaaaaaccaggggggccgggggggcccccggggccgggattggggacccccgggcattaccccggggccggggggggggccccctttcccgcggggggccccccccaggcaccgggccttttggggggggggggggccgcggggaaaggcccccccatggcgttggggggggcggggcttaaaaaaaccggggggccccgccccac

SEQ ID NO: 422018 - DNA, 403 bp, Oryza sativa nipponbare
attctagcgcacccgcaacagcggccatgtgcttgtatatatgtatttatacgctcgcacgtacctaagtacgtacgctatacatatgcaatctgagatcgctgcgccacacattatgtacggttggattaatacatttattgtaatatatctgtctgataccgccatctgtctgatgatcacttccatgcgtaccgcttcctcacgcgctatttgcgtggtggcgggaattagacacgcttatcttgatccctgggatcaccccatattgctccgcgtgcccgtggcgctgaagtgtcaaagtgcaagtatatacaaattacaaatcattagtctagatatatatgtatgtctgatctgttggtttgcagtactcatgcacggtggcctgaacccctatccc

SEQ ID NO: 422019 - DNA, 367 bp, Oryza sativa nipponbare
aaactaagtaccctggggaaggaatcttgcttaccatatcattacaccttggtcttgatactgctctacaattatgaataacatcaattacaataaatataatcgagaagagttctaaatgaaacaatgaccgccccatccttcaattttcttccctccaaaacacatgtaaactttcaattcttcatacatcttttttttcaaaaacaaaacaaactattggaatggccataaccagtacaagatcattttactctacaggttggccaattatttgtatacgtcaatttttattttggattcaatcttacattcagatatcctttaaaaaatgtattaaaagaattcatgcttcgctcatacaata

SEQ ID NO: 422020 - DNA, 427 bp, Oryza sativa nipponbare
ggtcgatagattatttctgtaaatattaaaaaaaaatctaaaaacgaaaaaaaattccagcctgaaagctaccagatccatccaacgaagagctactgcaagtttgtactgtagcaaaatgaaaccgagctggatgtcaagctcaaacttcttgtgacatcagctttcgaaattcacacgtactagcaggcaggtgaagttagcagagcacatgcagtgtcacaaaaaaacgtttcgtgcttcggtaacgatctcaatcgcgtaaaatagtagacccattaagtttcttcactaatcaacaatgcgaaggtcattggttttcctcttgcattgaaaatggtactccctccgtcccacaatataaggagaattttgagttttgcttacaacgtttgactactcaatttattcatttttttcttgcaaa

SEQ ID NO: 422021 - DNA, 415 bp, Oryza sativa nipponbare
aaaaataagatgatatgattcatctatgcagctgcggcctgaaattctgaataaatgcttggtattctgctttgcatcataaaacagacaaagatacagcagccgatcgcaacttcacgccatcatcgtcccactttgtctctggagcagtggcaccggcaatatatgtctttccactattcacagtagccattacagcaacatgttctttgtccacaccaaactcataaaagtaatatgtccttatatcatcttcatccttaactttaattgttcgagctgagtataattttgcgccaccaggtacaaatatctttgatgcctcctttaaagggcccaagtctgttatatctttggcctctaggaatgtgattttgagctgattcgatggcttaattaccacgcttacaagttc

SEQ ID NO: 422022 - DNA, 262 bp, Oryza sativa nipponbare
ccacgcgtccggcggcagcggcgggctcgatggccgacgccggcagcagcggcggtggcggcgacggctggatgcacgacgacagcggctggatgcgtgacgcgtgacggcgacggcaacctcgatgggcgacgacggcggagggttcgatgcgtgacggcggcgctggatgcgcgacggcggcggcgggctcgattcgcgacggcggaggtcgatgcgtggcggcggcgatcaatgcgcgacggcggaggtcgatgcgcgg

SEQ ID NO: 422023 - DNA, 259 bp, Oryza sativa nipponbare
ccacgcgtccgcccacgcgttcgcccacgcgttcgtccacgcgtgcgtccacgcgtgcgttattaaaaagaagaaataaatatatatacatttttttatcttaataaaaaaattaatttaacaaaaatatataaaaaaaaaaaaaaaatttaatttgtatataatatattataatgggggttccttttttgagattccaagtttttttcctgctgtttgttacgtcatagttttttattggggttctctaattataatt

SEQ ID NO: 422024 - DNA, 237 bp, Oryza sativa nipponbare
tttttgactcacgcgttcgcggacgcgtgggcggactcttgtgattttgtagtctatgaactgtttctgtttggcaaaggtgtgcatttgtagattctacctatggctgtcatagtcccatattgacaaagcggtttttcttaacttatttgcctttgttgagcgtccgtctgcaattataattaatttaataaatttttaatatgtattaataaatataattaatagttgggtggt

SEQ ID NO: 422025 - DNA, 393 bp, Oryza sativa nipponbare
ccacgcgtccgtccacgcgtccgcccacgcgtccgtcgacagccaaggccaagctgaggctcctgttcgaggtggcgccgttttgtttctttatagataaagtttgttgattttatttttttttttctttttttatttttttttttttatttatttattttttttattttttttttttttattttttttttttttatttatttttattatattttttttttttttttttttttttattattttttttttttttattttttttttttatatttttttttttaatttttttttttttttttttttttttatttattttttttattattttttttttttaattttttttttttattaattatattttttttttttttttttatttttttaattttt

SEQ ID NO: 422026 - DNA, 345 bp, Oryza sativa nipponbare
aatttcgacccacgcgttcgccagagctaggtggacatgcacgacctgcacgcatggagcctgtcgtcctctgcgctgactcgggaggcacccgccaacgacaccgatatgggcctcataaccatacccaagtcaccgtccagagcgaggagggagagctccacacgcccctgtgcgcgatcactgtgcctgcttaagctgtttgcgatatggagcggaaaggagagaggagttgctcgtatagttcccttccacatgcaggtggtacaccacagttctgagcgctgccctttctacgaggattgcaaaccgcgattcatttgtggcggtgcggtaggagtacat

SEQ ID NO: 422027 - DNA, 178 bp, Oryza sativa nipponbare
ccttcttattatctctcttataatctattcttctatatatactattttcttattttttattttttatttcttattattcattttttattatttttttttctttttatatttttatattattttttttttaaatttttctttttatatatatatttttctatttttttctttttttttt

SEQ ID NO: 422028 - DNA, 411 bp, Oryza sativa nipponbare
ccacgcgttcggagccctcttgtcttgttaagcaagaggggggctggtctgttcaaaaaggcggcggagctggctctgcttttcttcttttatatgtagcttctggtaatgtcatttcactgttaactctacaagttcttttcctccagcatggaacgctccattgatcggtattaggatcatctatggagccaggaaagttcctaacaattttatgtcattcagcaacaatgatgaaaattcctttttatactgcaggcttaaggacattacgggttagtatctgcagaacactttttactacgtcgtgtgctcttcagttaaataaactcattaaacttgtgccaattgctgtgtggtaaacgtcatccaggaatatgtggctttaacataatggtgaacggagttcga

SEQ ID NO: 422029 - DNA, 254 bp, Oryza sativa nipponbare
  unsure (1)..(254): unsure at all n locations
atcancaacaacaaaatcgtggttttttaaataatantacacaccacaactaanaatatttcaaggtatccaataccaacatacaactacactatcaatatatcatcatgtgttacccttttaacctatataattatatatacaatcacttttttattaaccctatactattaactacaaaatgtctaatatattttctaattcaaaatatttacttcatcttatacacttgattaaactccagtacattttcc

SEQ ID NO: 422030 - DNA, 563 bp, Oryza sativa nipponbare
ttttgttggttttcactggccggtaattttttgttattattttgaaactgactagccaataacttacaacgctcaatttacgccaaataaaagcatctcttagagttggaggtcagctaaatagtttcagctcatccaaaataggaatggagctggataaaacgctctcacaaaataaactagagagatagaaataggtttagagcatctttcccatccttaaggaagtaccatgaggtacgaggtaacatgaggtaccaatctaatctaaccgttgatttaacaggggtataattgggctaacaaaaattaggtctctcttccattcttccatgtcgtcgtcgcccatcgagggccgtcccgcatcgaggccggcgccgtcgtcgcccatcgagctcgtcgccgcccttgccgtcgggcatcgaccgccgccgtcatcgcccatcgagctcgcccgccgccccgtcgtttgccatcgagctcgccgccgccgtcgtcgcccatcgagcttgctgccgccgtcgggcatcgaccgccgccggcgcatcgagcccaccgtcggg

SEQ ID NO: 422031 - DNA, 322 bp, Oryza sativa nipponbare
aaagaaaaaaaaaaagggttttggaaattatatttatataaaagttgtatttttttataaataagggttcaaaattattttaaaaaaagttgaattcctttaaaaaaatattaattttttttttttaaaaaaaaaattttttcggggtcttataaaaattatattttataaaaaaaaaccattttttttttatggggtataattttccgatttttcctttttaaaaaagaaaaaaaaaacaattttttttaaaaaatgttttcattttttttatggggtggatttaaaaaacaggaagggtaaaaggggtttaaatttaaaa

SEQ ID NO: 422032 - DNA, 65 bp, Oryza sativa nipponbare
acgcccccggggcccccccccgggcccccccccgggcccccccccgggccccccccctgggtccc

SEQ ID NO: 422033 - DNA, 504 bp, Oryza sativa nipponbare
aaaaggggaaaccaaaaaaaaacccgaggggtaaatttcacggaaaaaaggggggggacataaaaaaaaaaaaattaatacgttggtacacccaaagggcccaaaacaaccagttgttaaaaaaaaaaaaaaaaaacgggtttaattcaacaataattagcccaaaccaaaacccaccccattggggggggttttatgggggacaaaaaaagggggggaaccccccgggggcaaagggtcgggtgttttgggaatttaattgcccaacttgaaaacgggggaagaacaagtggggcccaatttggagcccgcgtttttcttgggggggggaacactttaaaagggcttttttggggtaaaaaaaaaaaaaaaccaaaaggggggccttttttaaaaaaagggtttttggaaaaacaaaaagaagtggggaaatttttccgaaatgggggaaaaaataaatagctaagggggggggggggaaacccggggggaggaaaaagtttt

SEQ ID NO: 422034 - DNA, 153 bp, Oryza sativa nipponbare
ttgaatatcaatatggggggggggaggaaaatatatatatacctatctctatatctatgtatcacaactaaaaccacacaaacacataactagctagtacaccaactgaaccactacgccatctttgccctgacctttaaaaggatgatcttt

SEQ ID NO: 422035 - DNA, 220 bp, Oryza sativa nipponbare
aattatatataaccatatctggcagaggttttatattacaaatacctcacccaacaacatatataccaatcacaataccacttttacattaacacaaaaaaataccaattcatacaaaaaccaactcatatcatctccaattaaacaaattcacaattaacaaacttctcacacactaaacacctcactaatcatcattcaatcaaacatcaatcattta

SEQ ID NO: 422036 - DNA, 237 bp, Oryza sativa nipponbare
tataataaaattttaagggtaggtttaaataaataatagatcataccccaaaaaaaccataaaatatacccataaatcaaacttttacaaacttataaacactatatctcccttttataatacttaaacccaatctctttcttaaaagactaaaaaattataatctccttttaattctctaaaaaaaaattatttctacaaatactactctataaataattttttaatctaaaacaa

SEQ ID NO: 422037 - DNA, 157 bp, Oryza sativa nipponbare
aaatctaatatacacgaagtttgttttttcacaagaacaaaattttataataaaacatccaactttccaaaaaacatattcttttaataataacaatttttacccaacaaaacaacaccaattattttcaacctctttaaaaaatattcattttatc

SEQ ID NO: 422038 - DNA, 447 bp, Oryza sativa nipponbare
tgggaaaaaaatgtcagcttttgtattataaaacaaaatgctgatagctcgacaggttccactggacactaactggagtagaaagatgcaagtaatcgcagtagtactggtattaatctacacaactggtattgaactattgacaagcttgcgatcgaatgtatctgattcacagcaactaagatgtaaatgactatgccgtgcttttccgatgtacaatgctacactggaaagtgcaaaagctaacaagacatgaatatgatcttgagttgttgaccagcatcagcaagcagtttcagcagccaagtatagatactgttgcaatcttctgggcgccgcgcttagagcgagtggaggtgcttggccttgtcgatggcctccctgatcttccgcgtgggctcctcgtagagcatcgccgggtcgtcgaaccgcgcggcgaggctgggc

SEQ ID NO: 422039 - DNA, 590 bp, Oryza sativa nipponbare
agagaaagtctgatagattagcacttaggaattaattgtgtagcatcaagttcagacacacgaccgaacaacgagcatctacaatcaccgaccgaacagcatcccggtgtgcgcggtcgtttaaacccatgcacattccagacaaggaagttgaagttgaaactcgtcatgggacgcgattgatgcgacctgacaacgaagctctcaagcggcctgcaccacggacgccggcgccatcagcgcgctagctggcctgcgggccccggcaagctgatgtctaagagatggtcgatactgagctcattgtcaaagatctccgtatactgctggagtgcattattggtcggctgtggaggaagaggcggtacatcgtctgcatcaacctcaagctttttcgccaaaaccacctggcaccttgacattaatattgttggagctccatggagtgcttgaaccacctgccggtcacttccgcgaggcgtgaagggggtagcaagcatgaccgatgcaggcggcgttggcagcggcgggagaagtggggcagggatcgccttctaatcttggtgcgcctagagaaggtgatcaatgga

SEQ ID NO: 422040 - DNA, 281 bp, Oryza sativa nipponbare
aattaaggagtggggtacaacaaaaacatagcttctaatattcgaaccatgttacatttcaaaaaagttgttctgttttcacactttattccatatacttttctctcaaggtccttttattttctttgccacacttttcactttacactttgaacgaggtctaaccattcttttaacatgcatatttacgttctttcaaactcatgcttcacactcacaccggggcaaaaatattacttttcgccttaattgccatattgtaactctttacacacctccca

SEQ ID NO: 422041 - DNA, 227 bp, Oryza sativa nipponbare
aaacaagcgaacacacggtcccccccggttttccccctaattatcaatgatcatcaaactgcaccagctgccttccagggcgcccgattgagcaagcctaaattgagtattgaacttgtcaaaagaaagaacctcacagaaccgtcctgtgttgaactgcatccttagcccatctacactcaaccaaagcaaaccttggcggaccttgtggaggggcaaatagaccc

SEQ ID NO: 422042 - DNA, 220 bp, Oryza sativa nipponbare
ttcaaatagaacaaagcgcggggcttttaaattattgaaacattccaaatatacaggcataaaccaaaacatcttctaaccataaatcctctaccattgcaaatatacaaggcccaagcaaaccatctactactttctaattcatataatacattaaataaaatcatacacccaccatcattgctttcatctttaacattacaaccttaaaacaaattcc

SEQ ID NO: 422043 - DNA, 390 bp, Oryza sativa nipponbare
attctcataactttttttttgggggggggttttatatgtcttttattcttttttttttcatatttttttacacacattgtatttgttgaggctaatctcgtggaaaaaaaacaagggctcttttttttttcgggggagggaccccatgctgaaaaaacttaaaggggccgcaaaagggattaatgcagcgtaggggcaactaaaaggggcgaaaaaaacccgcccctgtgacgggggggtggctacaaaaaatttaaagtgctaaaaggagggggggagcttttttaagaaacagcagttttagcaagaccactgcctagaaaggaaaaatacagggtcagggggggggggcaaaaaaaaaattggggggggtgttattggccgccttta

SEQ ID NO: 422044 - DNA, 446 bp, Oryza sativa nipponbare
ttaagtgtaagttccttggttatttctcaatttaattaccagctgtccaaaatatatatagcagtccgtgtacgttccatctcaaaacattttatattttacacgcaactctcaggtaggcatgcatgtcgcctgcatcgtctctgcatgcacattccatgagagcaaaaacccagatatgtcaatgcaaacacacaagacacactagctagtttacacatcgagctcgtctacacgcattgggtgaatgcatgatgaatcaattcacactgacgaagctacgacaagtcgacgggttgcattgcctcttctcatcgtggagaccggccggagcagagaggagaggtttttttttttttcgccggcggcggaggagacgatcggtgtgatcgatgtgtatcagccggcggcaccgctcgccgccggtggcaccttggggatgccct

SEQ ID NO: 422045 - DNA, 210 bp, Oryza sativa nipponbare
gctagtaaaaaataatctaagtgggtgtgtctttgtataatgggtatacacctttcatctgcacactcatctattaattttatcatcataaataatttcatcacataccaaaatctgttgatcttcctgttcccattttacgttccgaagtactttatttcacttaccattattttgtagtactacaacagaccataatctaccttgaac

SEQ ID NO: 422046 - DNA, 241 bp, Oryza sativa nipponbare
atcacaagctgatatgagtttggtttcataaaagattactccaccctcaaaaactgaaaacccatctcactatttacacatataacatgtccacccacacacaccataattaatttattccttaacccttaaaaaaaaccaacaataaatctaacccttacctctatctcgtactactaacagaactagctctcttctattcacacattactcattattacatattaccatactaaataat

SEQ ID NO: 422047 - DNA, 438 bp, Oryza sativa nipponbare
tgagcataaacatctgtggttggtaataatccagattaaaacaagatctaccttgttatagattaatcacacccattaccagtacacattcgacgctcgtgtatcacgcatacacactccagctcgttgaacatactcacctcagattacaaaactaggtgaggatgtagtttcaatttctgcccctgcgaactaccaaggatgtataaacaatgaatgaaattaagtctaacaacattgaacaccgatactttggctctgttgttattgaagaagtactatcccaaaccctggcatcaacacccaattatcgagatttggccacaacctggcttggcccaactggcccaagttttggcctgggcctccttctcagtctgccttatccatttcgcaggtttttgggcttgcattttggtgttaaaatggagttaaaaa

SEQ ID NO: 422048 - DNA, 125 bp, Oryza sativa nipponbare
ttttttttttttttttttattttttgtgttttttaataaaataaaatattttattataatttaaatataaaaataaaatttaaaaataaaaaatttatattaaaaaataaaatataataatatat

SEQ ID NO: 422049 - DNA, 398 bp, Oryza sativa nipponbare
agattctgctacaacgtggtgggcacaaatcctgggagaagctgcaactaccttggaaaagattatacactgtttttacttttacacattgcaacctcctgggtcaagctaacagactccaggcagcagaacacactcctcccagcttacagaacttggtgggggtgttgttccagtttctgcggctgccaagaattacggttgtatttacaatgaatcgaattaggttggacaacattgtacaatgatcacggtggggctgttaagatcgtccaagtactgtcaccgactaaagctgtcaacccggatggtgagggcgaatccgtcactgtcgtacatgctctaaatctccttctggtaattgtggagctactcttcacaaatgacctgtgatcaac

SEQ ID NO: 422050 - DNA, 87 bp, Oryza sativa nipponbare
ccacgcgtccgaaaaaattcctcctctgcggcctcccctcaccgccgtccccgtcccgaccaccggaggcctgaccgttcgggggag

SEQ ID NO: 422051 - DNA, 443 bp, Oryza sativa nipponbare
ccacgcgtccggtataattctattcgtatagtttctacggcaatgtattttcatataatttagggatgtactcattaacaaatgagtttatgagtaactagtggccaaagtatacacttagtcttttgactttataatacaccttattaaaggaatagagtatatactaatatacaatgcacccaaactacatatcactagataagctaatcagaagtatctcttctacagcttgttcagctgatcatgtgataatgacttggctcgttttgcgtgccatcaaaaattcaagccaacactcattccgaactgagcctagtgttttttatggcacacaaaacaagacaagccattggcacatgattagttgaatattaattggtaaaaactagaaagaaaaaggatttatttgatttttgaagaaacctctatatagagaactt

SEQ ID NO: 422052 - DNA, 409 bp, Oryza sativa nipponbare
cgtccgcccacgcgtccgcccacgcgtccggcacgagacgctcaccggtgcccaaataaagagcatattggcccaaggaaacaacaagcagcagcaggagcatgctattgaagctccacagaagacaccagctgtaccatcatctccagctgcatcagctgcagcggcagcggcagctgcagcagccgcagcacagcaagctgcagcgaaagcgaagggtgaaatcgccggtatcggatcttagcagtcaccaaatgatgttggatcgattgacagctcttgaggatcacgaagaggttgctaatgctgctgcagtcatcaatagaacatattgattgtgtgtaagctgttatttcgtttcatgttccccaagtgggggggaaggaaacataagagaaatcattacatt

SEQ ID NO: 422053 - DNA, 234 bp, Oryza sativa nipponbare
ccacgcgtccgtggcagtggcgttccactgaaccaggccaagccagacggacaagacttcgccgcagccgggttctcctcaccgcgccgccggcgcaatggctacggccatcgcagcctccgcgttcctctcctccgccttcgccagggacaggccgctcccccgccagcggcgcgcggtgaggcccgcgacccgccgcgccgccgtggtgggcctgttggtgctgtgcgagca

SEQ ID NO: 422054 - DNA, 184 bp, Oryza sativa nipponbare
ccacgcgtccggagacacatgcgatgagatgagagcccaacgcctcgacctgtatgattattcaagacaagggcgaggcggacaactcatctgtcaaggtccggaattacaacacctgactctgcggaagtagctactttaacaaccacacagggagctgcgccactgactgggtatcctgcaa

SEQ ID NO: 422055 - DNA, 420 bp, Oryza sativa nipponbare
ccacgcgtccggcgcggctctcttctcctccatcggcgacgagccactcctgcgatgagatgagattgcccgcatcgtcgtcgtcggcggcggggctgcaggagcgcatctgggacctccacgacaatctcagccacgccatcctctccctctccgcctccgcccaccgctgctgccgccgccgcgcccccgaagggcgcgtggtcgtcaaggggtggcggcggcagggaggatgtggggactgcggcctggagcaggaggcggctgcggcggccaccatggcggacgcgcggagccttcacgccgtccgcgccgcgctcgaggacctcgagggccacctccatttcctccacaacattcaattatgtcaggtggcagaacgagatgccgcgattgctaggctgcaacaaaagtcgattc

SEQ ID NO: 422056 - DNA, 427 bp, Oryza sativa nipponbare
ccacgcgtccgcgcgcgagcaaggtgaaaccctaccgtcgccgggcggaaatctggaggagcgggcggctgccaggagccggccagccacgggagcgacgagcgcgtgaactcggcagccggcggcaagcgcgtggcggccagacggccatccggccgatcgcgggagcggcgagcgcgcagcggccggccggctagagtcccgcaagctagcgcgcgggggacggacggccacggcaaggctgcagcttgtgacaagaagctagcaggcacgtctctcagctgagacgaaagcacagatgcaatgcaggtatggagtaataactgaattgcgaagaaaattatccctacatcttctagttctttagataatttgttcaacatagcttcatgccttctcagcttctccactaaaattagagatgagc

SEQ ID NO: 422057 - DNA, 441 bp, Oryza sativa nipponbare
ccacgcgtccggatatatcctgctctcatgaggatgcttacaaggcagcagcagacgcggcatgggagtcctcatcctgatgctcaagctgaattcgctgtgtcaacccatccaatgctgttgcccattgacaagccatcgctagcggttagccgcacactcacttccaatgaggtggagctcatttcaagatatttttcacagaaatcataccctgccaaatctgtgccatcagttcctgaattggttcccagagctgacgagttggtcaaacgcagccagcaaaatttcatggctaatcaatatttcatctgcagaaaggtgaaagctgcattgaagagatatgcaaaagaaaagggaaccgagtatgaacttcatgtcatctgcggtacaaattttgatgtacctgagaatggcagatatgggtactttcggaatcgc

SEQ ID NO: 422058 - DNA, 316 bp, Oryza sativa nipponbare
ccacgcgtccggggacgcgtgggttgagcttgctgaacactcatgcctccaaactcgcgcccaaaccgtggttcccgacaccatcttggagttcgcgccaccgagcggagcgatctcttctcattatgctgtcctcgcgagcagaacggcggaccgacgctctggcgtcaccaggcggcgcgggccctgtcgcgagtgagggggaggcgtgtccagggaggtctgctggcagcggctgcgcaagccgttggcaggtaggtagcacaccggagccggggccaggccgagatccagcgtcgagactcgtcggctccct

SEQ ID NO: 422059 - DNA, 114 bp, Oryza sativa nipponbare
taccaccctttttttttttttttttttattctcaatacccgggggttctctatataaaaatcacataaccctaaccctacatcaaatacttattacatattctaatcttacaat

SEQ ID NO: 422060 - DNA, 82 bp, Oryza sativa nipponbare
attattatatttggcaaagggttgtctttattctttaaatataacaaacactgttttacattaaccatttgctttgaatttt

SEQ ID NO: 422061 - DNA, 436 bp, Oryza sativa nipponbare
gataattggtgatatcatccatgattagattggcactctggaatttgccccatactagaactactcccttcgtttcatattataagacgttttgacttttttctttaagttgtaacttaaagaaatttgacttagaaaaaagtcaaaacggcttataatttgaaacagagggagtaattgataattaggtctagaaggtggcaaatcctttgactacccaatgggtggcatagaaaatggacgcgactccctgaatgttgtgtagatggcccaagtagattcttagggcgagttctaaacagcaaggggaaacagctacttcctcgtcctctgtgagcattgcttcccaaactgctaaataatgtgtttcatgcaaaagttctctatatagaggtttcttcaaaaataaaataaatcctttttctttctagttttt

SEQ ID NO: 422062 - DNA, 313 bp, Oryza sativa nipponbare
ttggccccaacattactgtttgtcattacacggcaattcagcaaagatacagaaaaacttcttttgtcaacttgcagaacatacagtacaacaagggagcatcacagggctaaagaaatggactctggagctaccattctagacaaatacaacaggttctctgttaggtataaccatccaacgtctaaagtagctgaaaattattaggatgtaaacagtatttccgtgtgtgtggccatgtgatacaaaaattcacatattaagcagagtctaaatgtgccttctacaatggtatgaattctcttaagttttc

SEQ ID NO: 422063 - DNA, 259 bp, Oryza sativa nipponbare
catggaggaatatttcttggtgtacattgcgaaattgcgtccaaaaggcgcccttatcaaaatacatatacactgagtacaaatttgaggtttgacatggtatataccctccgcacaatacaaatttagcgaatttgaaatgtaaacagcaatttagatatccaaatttattgcgataattggggatatgtcccatcaacttcgatagaagggagaaaaggcaacatactatgatagcattacttcagatatgtatgtg

SEQ ID NO: 422064 - DNA, 396 bp, Oryza sativa nipponbare
aacaagcttacaagccctgccagttcatctattgccaatctaaaaccatttacaactcatgtggtacaacttcctatcaaagatatgctgtagaccagccaatccaagggagtgaaatgattagtgtcctaacaaaactttcaagaaatgtgaacagaacaaaacttatctatacatcaaacaatgatgatttcctcatcctctagctaacaatacgaccagatgcttttctttagtgttctttacagacatctgagaatgaaaataattgactcggctacaattgactggtggaggttggttaccaaaaggccattggtggaacttgcaaaattgcagccttcttactggaaacattgcgggattacccagggccccaaccaatcttttaaaatt

SEQ ID NO: 422065 - DNA, 333 bp, Oryza sativa nipponbare
gagaaaccagaaataagctggagttatctactacttagattagaatatactatatatacagaaatgctaagtagctaactatgcagaaatatatattgaatgaaaagcactgcatttataaacactatggagtatatatgaactactacacagcgacagccggggcagaaagttaaagcaactcactgagggcatgcaacacaatcacgttatactcggaatgcacatacacactggcagaatcacatttcttcagctgatcagctagcatattatctgcgaggctgacctacaagagcctcatgatggccctacttagcggacttgcaccat

SEQ ID NO: 422066 - DNA, 362 bp, Oryza sativa nipponbare
  unsure (1)..(362): unsure at all n locations
ccgccgttgccgtgcgagctccggcaggcggcgacgtcgaacccctggatcctcaccgncggcgcgaacgacggggcanaactgctgctgctgctgtacgcggggtggggggccgtggtgggtgctccggtggtcaaaaatcgagagctccggcgcggcggcggcggcggcggcctgggggcgctggttgagcaagaagtgcgggtcgtggacgagcgggttgtccgccctcgccggcggcgaccctncgaacatctnccacctcccctnctnctnctnctncttactcttcccttccctttgcttggtggggttgttggaggagaggaggaaaggaggggggccnaggatgaagtcagcgc

SEQ ID NO: 422067 - DNA, 329 bp, Oryza sativa nipponbare
agctagggcttcacatgcacagtccacgcgtacctaggctcgtatccagtggaccgcccgccctttttttttttaaatcaacaagcaaaggtacagatgtgtacctaataaacgcgacctggatcactgcagacttttactggcgaattcgctcatatgcagtctgaacgaatcctccaaatcgtaaaattacatgaacacatctgctactgtcgagtacactcacacatgcaccaagagtctagtactgatgaattccctgcaacaatggcctacagaaagaacatggcttcttctccttccttcctacggcgacatgggacacgagc

SEQ ID NO: 422068 - DNA, 428 bp, Oryza sativa nipponbare
ccacgcgtccgcaacgatccgatgatctctgcaaaggtgcctcagctccagttagtgagggacaccaccctccagatggtcactgggaagccagctagcattgccaccagtgcaagccatggtactgctgtgccgatctctcggcaggtgccctgggtcaagttggtgaaggatgtcaccccgcagatgctcacctcgagacttggcagtgctgctgtcaaagttgactatcgtacggctgtggcgatccctcagaagttgtcccagctcaagttagtcaaggatatcacaccgcatacagccacccaaaagcctgccacgattgcggcgaaggccattcaccagaagaagcggaaagctaacagtgaccctggcgagagcccactggcacggcataagccgactatcaatgacgtgccacccagccc

SEQ ID NO: 422069 - DNA, 315 bp, Oryza sativa nipponbare
  unsure (1)..(315): unsure at all n locations
ccacgcgtccggtaagaatgtacctctgatcatcctcaatgcantgtgaccaatgaaattttgtaggactacatgtaatctctgttgggtgtagggttataaatgacattttgaccgtttgtaatcagctaaccaccttttgtcatttcacgccgaatcgaattaaaggtgcttatcttttgatttaaaataatttgttatttgtttgttcgttcttttattatatttatttaggtgatttttgattcgtatatggtctatccttatttcttagtttcataatattggatttgagtaacttcttggcttgtgcaa

SEQ ID NO: 422070 - DNA, 73 bp, Oryza sativa nipponbare
tattcccgttccgacccacgcgtccgcccactcgtccgggagggggttgggttggctcctttcatcctttcct

SEQ ID NO: 422071 - DNA, 339 bp, Oryza sativa nipponbare
accttaattcctctactaccaccatttcactcacctccccatatcctctctcccctacattcactactcaactctcctcccctattccctacttccaaacacctccttcaccttatccctacactctccacccctcttcccaccactactcttatcctcctccatcatactctcaatcttcctacttcaaccatcaatactttacccactatatctcctaccaccatactcccattcctcactacttattatcccatctacataacccccatccaaaatacccaccctcaccactccttctttattaaccccaccactcacccatacaaactaccttaa

SEQ ID NO: 422072 - DNA, 245 bp, Oryza sativa nipponbare
ccacgcgtccgggccaccggccggtagggagttctcgcggttttgtcgttcgatcgatcgatcgtgtccatgctgctgcggctgaaggccgtcgccgaccatccggcggcgctccttgggcgaccgcgcagccatgacgcaccccagctcgtaggccgcacgggcgcgtcgacgacgactgcgaggcggagggcggctaggcgcgccgtgacggtgacgatagcgctcaaggcggagccgcaagg

SEQ ID NO: 422073 - DNA, 193 bp, Oryza sativa nipponbare
ccacgcgtccgggcgggcgtacgccggcttgatgcatatctgtggccgagcatgcaggctccgggtcattctgcagcagaccgactgaatgaaatgaagcctcatgttcttcctgatggatcactgaagcgtgcgcccaagaggaaggcggagtggcgcgccttcagcaagaaactgttcaagtccggcgatt

SEQ ID NO: 422074 - DNA, 366 bp, Oryza sativa nipponbare
gcccgattccgggttcgacgcacgcgtcacgcctccgtcacgcgtccgcccacgcttctgactaggaatagatcgcgagctgtcactctagagagtctcaggcttcaccatcaactgcatgtgacggactcagattactgtcgagcaaatcgacatagaataaagtggcgttcagtctacaacacagggactgcgacaaccgctgtcactactaaagtgattgcgtaccgcgatacattcccttgttcagagctcaactgataccgaactggacgacatgattcacgatgtcgatcatgagggcaatctgaatagcgaatgggacgcgctcttgaacgtggtattaaacgcgatggatgatacggt

SEQ ID NO: 422075 - DNA, 226 bp, Oryza sativa nipponbare
gggtcgacccacgcatccgcccacgcgttcgcgaactcatgggctccgttcttttcactcatgtcctgcatggggggcgtcggcgtcatggagcttatcaccgtctcctccactccttttccggtgaaccgtttatgcaggcgttaggatggccacctgagtctatcaggaactcgtcgatccggcgatggtcacttgatggtcctgtatccgacgtatcagggtt

SEQ ID NO: 422076 - DNA, 433 bp, Oryza sativa nipponbare
ccacgcgtccgcagacgcttggacagaacgggtggccgacagacctgatgaagcagaacacaaaagatgatcatgctgaggctgcctaacaggcactggttcctactctcttggtcactgaatgttggctgagacgccagaccctaatgctcgtctttctaatggccgctctacgactccatttttaaacttcaagactcatgaaccgaaaggaataacatcagatattatggcgaaagggaccccataacatgtgaagaaacaatgcttctatacaggagtatgagacaggttccgcacaaccccccaggaaattaccatgacatgtgcctatattctcccccctgaacgacgatggatcgtcagcatatgcctgcatgatggttgaagaagaggtgaagttacggtgccgatgtatgaccaccttgttgac

SEQ ID NO: 422077 - DNA, 124 bp, Oryza sativa nipponbare
  unsure (1)..(124): unsure at all n locations
cacccttcnnccttttttttttttattaaaccatataaccgggtcccgcctatttttaaaaaaaaccaaccactcatacatctactttaattccgatcttattcacacaacaaaaaaaaaacat

SEQ ID NO: 422078 - DNA, 112 bp, Oryza sativa nipponbare
gggtggtgttttttttatattttgtttttctttagaaagggtaacccttatttttccatttatcagcttatcatcatccaatagattttaataatagaggggggggaagttg

SEQ ID NO: 422079 - DNA, 175 bp, Oryza sativa nipponbare
  unsure (1)..(175): unsure at all n locations
gggggggggtttttttttnngggggaaatgttcttgattttactatttatgttagaaacaattgttcaaaactaatttcgtggcatcttggttgtcagcaactcaacatcaatgccctgtaaatggaactgctaccctaatctgcttctttctctacaattctctctgatgattt

SEQ ID NO: 422080 - DNA, 56 bp, Oryza sativa nipponbare
ttttaattggcaattcagcgcaggcttaacctgctaaagcatagtacactcatcca

SEQ ID NO: 422081 - DNA, 239 bp, Oryza sativa nipponbare
gaaacctaataagggggcggggctcattttacttggccgataatactattactactccttcagttcacaatgaatgattcactgctatctagtttgcggttctaaaaatcgaatacttaatactcttcatacgcaactagaaaaacctagttgttggccgcactccgactacaatgccatatacgggacatttggggcgctgcttatcatatggcaatatcataccaacatttttctac

SEQ ID NO: 422082 - DNA, 494 bp, Oryza sativa nipponbare
  unsure (1)..(494): unsure at all n locations
gaacttcaaacttttttgtatagaatagttcaattcccttttagaggaaatgatctaacagaaagatttgtttacattatgaattcctaccttagcaagcaacaatgaatgcttaaagtgtaagtacatgtgattaaccgcataaaaataggggggtctgcataacatcttctgtagacccaaaaaaagtaattctaagaaaggcataataacctaaacaattttcagcaacaatattaatgggtagcagaatgaagcaaggtcaatcaccaaaagttcccgccacgagttcttgtcctcaattcgtcatccagaaacttacaggcagcagaggtgcatatcatcatctatgccattcctcctggaaattcttctagagttctagttaccatcattcgtggcaacatttgaaaaagtgtggtctttgcaaggaatctcaggttctccatcagctcagatcgggttaagaagcgcatatcatcgntcttggtcga

SEQ ID NO: 422083 - DNA, 383 bp, Oryza sativa nipponbare
tttttaaaccagcaacggaggatggcaacaacagcatttacacatctaactatacttaacacatacaattatccggtgacataatacgtctccagtacccacttagcatgcatttactgctttatcaacaaaagcgtgatgctcaatctaggaacatgaatccacagacatgccttatgtgcatggctagagactagcctcgatgaactagttattagctgctctcaacactcactactgagctaagcatacgttgatcacttctagatcaagtgagacagcatcccagacatacttatcataagagtagcgcttgatgatattgtcccaggctgatatgatctatccagagaagactagcgttgccagtccgccctatatca

SEQ ID NO: 422084 - DNA, 261 bp, Oryza sativa nipponbare
tttaaattaaaccgggcggtgttttttataaaaaaaattaattttttttctcctccaaaaaaaaaatttttttttttatttttttctttttttatctatcaatcaatttttttattctttttacctctaataaaaaaaaagatccaaaaaattttctccaaccccctatttttttttcccctgaatttttttttttttttaaatcaataaattaagttattttattccttccctcccttaaaaaatatataattttttttt

SEQ ID NO: 422085 - DNA, 122 bp, Oryza sativa nipponbare
  unsure (1)..(122): unsure at all n locations
ttattatttaaatgcaaagggttgataattaacaatccatttttccctaaccaatatcatatttcttttnttacaaggggacaactatcattggtaaaaaacataaaaaattccacacacat

SEQ ID NO: 422086 - DNA, 227 bp, Oryza sativa nipponbare
gggtagggttttttttttttttttccatctttgccaactagagtccaatttaaatatagggaatctggcaatccccacgggcattgaaaacattttaataagccctgcttacccacatgaatttgtctaaccagagtaacatgtcccctcccaattctgatagtgctacaaaatgaatatgatccccccctgattcaatatttccagacccttggccggactcttgg

SEQ ID NO: 422087 - DNA, 250 bp, Oryza sativa nipponbare
gggaaaaaaataattttttttttaattttttgagggagcaaaacaccaatttggtttttttttttgggaattaaaccattttttccaaaccaaaaaaaaaaaaattttttggcccaaaattttttcaaccccaattaacctttgtttagttacgggcccccattttattttgcggggacaaaattggggggctacccccaggcttttttttttacggggttcggaagggggtcccggaggttttttaggg

SEQ ID NO: 422088 - DNA, 341 bp, Oryza sativa nipponbare
ggtgttgggttttttttttattttttttttttttttttttttttacgggatccaacaattttttaaccacctcaaaccatgacaaattttttattttacaagatgaaaccgggaaccaaacaatctttaacaggcagcccacatagttccacacattgcttttaattagaacattgcactaaattgttcctgcggagaaagaaaaaaagagcttaaattttggcgatgtcctccccctcaaactggatgtaatcctcgggggcgcccccatccttgggcccgttaactttaaccccctttttgagccttagggtgttggggagctccccttaagcctttag

SEQ ID NO: 422089 - DNA, 320 bp, Oryza sativa nipponbare
  unsure (1)..(320): unsure at all n locations
attatagtggggggttttttttttgtatagtaattttnattnaaaaaggggggaaaactttttggtttccacaagccaataattttttacacagggtgtaatcagaattcaaatcgatgcatgtttacaaaaactgaatccaatcacttggctgaaatttaactcgattttacctttgatcatactggtactggttaccaacttcagcagcggaattatacaagcaggtttaaactgacacaaggttttttggactaaatcactactactagagatacactcaactgtttgaaaccgtttttttaaacaatgcaccggtg

SEQ ID NO: 422090 - DNA, 326 bp, Oryza sativa nipponbare
tttttttattttttagttgggtttttttttttaatttttttttttttttttttttttttttttttttatttttttttttttttatttatatttttttattttttttattatttaattattttatttttttttattaaaaaaaaaaaaaaaaaaaattttttttttaataaggggttatttttttgttgaaccaccaaaataaaaaaatttttttttcactatttaaaaaaaaaaatttttttttaaaaaaatttttttttttatttaaaaaaatagggaaaaaaaaaattttttttttttttataaaaaaaataaaaacttttttt

SEQ ID NO: 422091 - DNA, 426 bp, Oryza sativa nipponbare
ttgaactcactatgctttggataatgtactgaattacctgaacatagataaaactgagcattaatcgctaatcattgtagaacactgattatctgagcacacataaaactagctgaatttcatggcgcagttactggctagatgctgatacatgttctcatttgaaaatagtcatgtctgttatacaactcctgtgcttcctcacatcagtctctgctctaacattttacagagctgtgactcccgaattccgcatacaaaccgcaaccttgcaacagcatagagaacccgctgtttaatttccgccaaaaatatactgcaagaacaagggaatattaccagtacaatatatggctcagctgaaccatatcgagtagctagcgtcttacgattgggcaacaacaatagatagggaaaaactgttgt

SEQ ID NO: 422092 - DNA, 367 bp, Oryza sativa nipponbare
aaatgaacacaacaggtaacaataataatgaatcaaacactacactggagtcccttccccttcgggatgtcaccaagcaattccaatatacacactagccaagaaaaaaagaaaagaaaagagcttgtgccactcgctcatgctgtatgtatgtgtatgtgcatccaatgaattgcagtctacagctacaaccatacttcaaacctgcgacctctgtgaggttgcaggataaataaacacattccgatattacaacagtcaaaattgagtttggttagggtagtctttcggtggcgggaagtgctgcttcttctatcttgtcaacctgtgcacagcgatttctggatcacgctcctagctgtacaaa

SEQ ID NO: 422093 - DNA, 312 bp, Oryza sativa nipponbare
  unsure (1)..(312): unsure at all n locations
aggattanatgggtgggggttcctttgtgtggatttttttaaagcccaatcacattttattttcttaacatttggttgcttgaatttacaaagggtatctccatcaactggttacagaaagagggaaagctgaaaccgttctgcaaaatttcaccaagaatagcttaaacttctggggtgtgaagcgtgaactaatggcacggaaaaaaattgaaccgtgtttgccaagtgctttataccctaaaaaaggttaaaaagggttcaaccggagttggagaaaagatactattttttctaccaccattaccaccc

SEQ ID NO: 422094 - DNA, 104 bp, Oryza sativa nipponbare
gattaatacctctgggcgagattatactctggtagcatgtatttttcattcacaaatccatacactcaaaccttactactccaagaccccatttaaccattatt

SEQ ID NO: 422095 - DNA, 186 bp, Oryza sativa nipponbare
ccacgcgtccggggcggctggcgttggggaggaggtccagcggcggcgcgtgcgacctcggaggtcggaccatcggagaagcccgggaggcggcggcgacgacgatacgggataagggaggcggcggcggctgctacgcttgagaagggagaggcggccggcggcgccgactcgggaagaagctgt

SEQ ID NO: 422096 - DNA, 273 bp, Oryza sativa nipponbare
ccacgcgtccgctcaacacgtaccctctcctccatccgacggtggagacgagcgaatcgctccacaccaccaccaccgtgcaccgtgacccgcaccggtgagtggatatggtccacccgctctccgccatcgtcgacgccgtcggcggccaccaccaccggctcttctactgctacccggtcgagcggacacaagtagttcaccaccaccggcggcggcagacgtgctccctgtgcttcttcgcgccagactgttcccacggctgtaccaaag

SEQ ID NO: 422097 - DNA, 359 bp, Oryza sativa nipponbare
ccacgcgtccgcccacgcgtccgggcgcacacacactggcaatgattaaaaatggcgcggcctcgctgatggtgcgcctcctccacctgccccgcgccgcatccgcccccacctacccccgccgccgccaccaccttgccctcctcccctcgctccggctacgagtgccggcgcccgccgccgccgtcgccatgtcgagtgccgcggcggcgcaggaggtcgccgaccagaagcgcgcgctgcggtccgaggtgcggagggcgctcagggcctttacctcctagcagtgcgccagttaagtctaagcttttcaaaatgcatttttgaactcttttcgcgttaaagaatgctagcctttt

SEQ ID NO: 422098 - DNA, 466 bp, Oryza sativa nipponbare
  unsure (1)..(466): unsure at all n locations
ccacgcgtccggcttcatcttggttcatctccttaaacttaaaggaatgtactgagggagctgatatgatggttttgattgctagtgctgcagtgctccagtttactctggcactgttcatcaaagttttctttttcgcctgagattgtcttttggtgttgctcaggtctgcctctcttttttaccttctacgactagataccatagcatcataaccttcccaacagtacacagaccacgcctttatgaattttatttagtagtcttttattgtagcagttcattatcaaattgggttaaaatattctaatacattatattttgcttttgacaggtgagcttgatgttttgtctgctccaatcattctgttctggcgagcatccttttgaggaccaagcggagtagttttacttgacatacatattgacactagattgataagaccttgtgtttngtgttcatgag

SEQ ID NO: 422099 - DNA, 280 bp, Oryza sativa nipponbare
ccacgcgtccgcacacatagaaccagacagagagagagagagagagagagagagagagagagagagagagaaggcatatgttcactccaacacttcgaactacgcacacagaggaagaggtagggaaggagtgggtgcgttgtatatggcatcaacgatcatatgcgcacgaacagatgcgacgccaagctcaccatgttgaaatataaaggcacaactgcgctaagctgtaactgtggaagagccataacgtcaagggtggtgatgcattcactcctat

SEQ ID NO: 422100 - DNA, 457 bp, Oryza sativa nipponbare
ccacgcgtccgcccacgcgtccgggtcataaaagctagatctctccactgcaagctcatgatcttgtcgctaacgaagctagctaattgctaagtaactacaggcatgggatcacgctactggtcgcttggttctccacatgctggcaccgaagaaaacaatcaagccacaggagggatgaaatggggtgatcccaggacacaaggctctgccagcttgcaaggatatagtgggccgtcttcagtgcatcagcccatcagcagagaacccgcagcgggtttaatacggggagatcccagggctcaaggcgcacaaggatatggtgggccgtctttactgcatcagcccatcagcagagaaccggcagcgggtttaatccggggagatcccaggactcaaggcgctcccattacacaaggggctcccgattggggtaatgtgaagcagccaaacagta

SEQ ID NO: 422101 - DNA, 317 bp, Oryza sativa nipponbare
ccacgcgtccgcccacgcgtgcgctgaagacaccctgaacacaaagaacgacagagcttggcaagctgaagagacagaccgcttcatgaacgcttactacctcacacaaccgccttacgttacatggactcaagtccatcctcaacatgcccagcacccgccggttcgtcaactgcacctacgacaacgagagcaatcgcaggtggatcatgtgcatgcaggtcaacaccattgatgtcatgaagatgcccaagaccatcatctacatgccaccactcatccctgacgacctgacgaagcaaaccgacgacctgctc

SEQ ID NO: 422102 - DNA, 346 bp, Oryza sativa nipponbare
ccacgcgttcgcccacgcgttcgcccacgcgtccgcccacgcgtccgcccacgcgtccgcccacgcgtgcgcccacgcgtccgaaaaaaaaaaaaaaaaataaaaaaaaaaaaaaatatgaaaatatagaataataagaatggggttaatgtaaaggtggatgttgtatttagaaaacttgtatggtgcttcataaagtgtgtttcgttgttcgaccgttacaaggatggtattattactaattgggggaccattgatgggattgttgtagtaggatgtgactgttcatttggttgagactttggggtggatgagtttgttgatggttgttgtaatttattgttta

SEQ ID NO: 422103 - DNA, 360 bp, Oryza sativa nipponbare
ccacgcgtcctatttttttttctttttccttttcattttcttttatactctttgctgcaagtggggaggagggcgtgtgggcccctcttccggcggcggagaccttgccgtcggctagaaatggatcggtgattcgagcgttcgctttgcgccatcctagattgcaaggatggagaaactggttacacataaaaaggaacatgtcttggatgaaattttctgcctggagcttgtataagaatttaattgatcttcaggccgagttggaagtaaagtactacaggctttgcaggttcaataatggttttctcaaaatgttctctgcatttactgtcatacctccatgttatgcctactggc

SEQ ID NO: 422104 - DNA, 207 bp, Oryza sativa nipponbare
acgcgtccgcccacgcgtccgcccacgcgtccgcccacgcgtccgcccacgcgtccgcccacgcgtccgcccacgcgtccgcccacgcgtccgcccacgcgtccgtccacgcgttcgtacacgcgttcgaccacgcgtccggatcgatttgctaaaaaaaaaaaaaatttaaatatattttataaaatattatatttgttttttttt

SEQ ID NO: 422105 - DNA, 352 bp, Oryza sativa nipponbare
ccacgcgtccggagctcactacacagagagagtagctagttagccgccggcgatggagacgacgacgacggagaggcggcggctgttcgcgacggagaaggtgggcggcagggcggtgtacaggctgcaggcggcgacggtggccgccgggatactgctggtgctctactacagggcgacgcgcgtgccggccgccggcgaagggcgggcggcgtggctggggatggcggttacggatctcttgttcgccgtctactgggtcattacgcagttcgtccggtggagccccgttcgtcgtcgcactttctagaacaggctctccgtgagattctaattaattttacctggtgtg

SEQ ID NO: 422106 - DNA, 432 bp, Oryza sativa nipponbare
ccacgcgtccgggcgaagctctcgccacgcgctcgcgtggacgacgagatgatggccttcggctcgctgctgctctcgccgccgccgccgccgccgccgccgccgtccctcccgctaccggccagaccctccgccgcgtcgtacctagtcgcggtacgccgccgccgcccgccggagcctcgctgccgctcgcaggagatggcgtccagcggcggcggaggaagctccggggggctcggctctgagggggaatccgctgcggcttctgctatcggttccctggacctcgacggcgctgccgcgttctcggacaaccgacctggggaaacatctagcaatggagattctgagaggtggcaaacgagacaacatagtacagatgatttttccaggagcaagttcaagccaagatacatcaaagcatttggggta

SEQ ID NO: 422107 - DNA, 208 bp, Oryza sativa nipponbare
caacccaaaaaaaaatttttttaagggggggaaaaaaacccttttttccaaaaattttaaaaaaatttttttttttaaaaaacatttttttttttaaaggggataatacaccccctcttaaaaaaaataaaaattttaaaaaaaaggggttccccactttttttttttttttttaacccaaattttccctaaaaaaagtaaaattttt

SEQ ID NO: 422108 - DNA, 72 bp, Oryza sativa nipponbare
ttccataaaaaacggggtgaagtttaaggctataaaaattctatttcgattttatggaatgaaccaacttgt

SEQ ID NO: 422109 - DNA, 365 bp, Oryza sativa nipponbare
taattccttcttttgatatggataggagattcctctttgatgaaaactgggaaaaataggcttatttctgctacaatggcaaaaacattaagctgaatcaacagaagaagttgtgcttaccatcggggaagagaaaaatataacttggtacgtgccgggaagcgggatgattaacctcatgactcaccgaactgttggatgtgccagcattgaatgtgcagttaacacaaaacccaacattgtcgtgcattgcataataaagttgagattaatcaacaattacccaagtaaaaccccaacgactctggttattggtctccacttttaggaatatattattatccatgaaataccaggctaataaa

SEQ ID NO: 422110 - DNA, 211 bp, Oryza sativa nipponbare
ttttagctgaaaaacaataggcaagcgcagaccgaaactgcgaatagatgcaacgcaccaaaaaggatatacactctgcttgacatgattccatatggaaggattgatacgacccagacatccaggttacagaacaagcagttgccagacgcttgagcatctaaagtcagcggttgcacattaaataaacgtaaaggccaaagcacttctt

SEQ ID NO: 422111 - DNA, 344 bp, Oryza sativa nipponbare
tcagataatcacaggacttatgtagaaaggatagtaagatacacaaatgcaaaaataagctgtgttactcctgcaaattgcaagtgaacagaacaatctcaagctaagctgttctttaatcagaagaacaggatatgaacaagctggatttcaagatatttagtggcgccggtttcgatttcttacctcgctatagattctgtgagagatcaaattacatgacccataaattgtagagcaatgcaggagtaacactcccagctgagaaaccgattgatgtataacatctccgatcttcgatcttcgttaggcgatgcaacgagagaattcaaaattttcaccaa

SEQ ID NO: 422112 - DNA, 363 bp, Oryza sativa nipponbare
ttccatagtcctctatgaatatatgttgaacttattgtatgtttgatcaaagttgtcattacaatacgcagacaaaatcaattcatattcagaatacagatacattgcgtaacaaaatcacttgatcgaaaaatttctcagctttggtgaagcattatctaaaaaagtgttgttcagggaagagaggttgactgtcaactcaaagcagaaaccaatcagttaaattatatcttggtcaatgctgcaggactgattggaatgatgccagaggatgagaccagagcattaataggaacatctgttgagttgactgggatgatgcctttcttcaaaatttgtaccgagtatgaaagcgcgacttga

SEQ ID NO: 422113 - DNA, 443 bp, Oryza sativa nipponbare
tgcaaaaacataatttctggggaggcagtatccgttaacggatcccattttatttagaaaactagatgttagtatcccttttacaaatcagtatgacaaaaaccgctctgaccgaagctggaaaaaaaaactctgtgccaatggtccggtcagatgctaaattaactatgcctgggtctaattgggtggggcaaaattagtcgatggactggcttttttttgaggctgggggggctagggctgctggtgatgctttggctgggggggtgactgttgatgatgcttccgctgtggctaagcaggcgtggttcctgctggtagtgctctttgcatatagttttaagaatgcggggtttcatcttgctcatggcggaagagccaactgttttggggaaaaattcataatttctttcttcaggaatttattgatcctggaaggaatg

SEQ ID NO: 422114 - DNA, 82 bp, Oryza sativa nipponbare
gactaataagttacaggagtgtatatcattgattaggtaaataacacttacagacatacaacatatcattagacttatctta

SEQ ID NO: 422115 - DNA, 408 bp, Oryza sativa nipponbare
agataaaaaagggtgtgggacattatgcatcataacgcaagaatgaataatgtgtgcaaaaacaagaacacatgcgtgacatttggcataaaagactatgcacatgttaatgagcatgacgcacgaatcttgaaggatataaacagcgtcgtattctgcgagaatgtagcgaaggaccctgtatcaacctaaagatctaggtgtgatgatatttgatacaactgtggatgaacctgaaggggactgcatgatctggataccagcagattgctatgtgggggcaatggtcaccatgggaagaggcatgcgctggcactgtcggggagctcttcaccaggagcagacaaccttcgggtgatccttcttatggctgagatatgctacgatagtaccggcacagtatagttc

SEQ ID NO: 422116 - DNA, 274 bp, Oryza sativa nipponbare
ttgatgcaattttcaaaacgaagagcttaaccgaactgaaataacctcactgtaccaactttgtacgctgcactgactgcgtaagacattattacatacaagatgaacagttaaaccagcacatctcttacggtgtcctatcttttggccacaaaatcatcacaaagctacactgtagcatggatgcaagttataatatataacctgcctctacactgtctgaggctgctgtacagacaaatgcttctcgcctacgtctttttggactcatgga

SEQ ID NO: 422117 - DNA, 190 bp, Oryza sativa nipponbare
ccgtgctttgtgccgtgctcatggacctagtgcccgggaccatggactcgtccgttccgccataggccgcatcacgccgctctccatacgcgccggtaggcctggctgggcgtcacaggccggtcccctctcggtcaggcgaaactccgccttctaagccggttctctatacactgttttttatcgtttt

SEQ ID NO: 422118 - DNA, 132 bp, Oryza sativa nipponbare
cttattaaaagaacctttttaatacactttttttatatcaaccacgatctacatagaacccaccccgtcacccaactataacgccctaccataccccaccgcttttccaaacattgcaaaatttcacgtaca

SEQ ID NO: 422119 - DNA, 406 bp, Oryza sativa nipponbare
gatcgccaaacatcattgggcgggtgaaaaattacatatgaagatggcatctgtccctacttttaaacgactaggactctgtactcaacaattatcatgccaatttaagttcttttttttaaaaaaaaaactcgccctttacttgcctaccctaacactataaaagaatacaaaaggccttacatcatgtaaaactcaaggggaaaaaaatatacacatggactttcaggaaagaacggacaggaaaaagctagccacaccccactgaattgtctcatgttgctggagtattgcaaccattctgcagcactacatgtgcactatatttgccttttcatgccgatacccttttggatatatcaaaactgaatcaacgcacaagccacctttcgtatgggtgcaatca

SEQ ID NO: 422120 - DNA, 352 bp, Oryza sativa nipponbare
actaaaagcatacacacaattaattaattgaagtctataagggaattatgcatcctttttcctggaagctgagccagggtgttcgatccagcactttttttaggggtagatcagcgtctgtatgtatgtatgtatctacatgactaccaagcaataaaataaaagatttttctgcaattgaactgcctcccataacgcggtgaggtcggacagcttgaaggagtcggcaacaactttgagcctgtttctaagcctactacattggcgttcgttggccgtcacgatcagggtgtagtaccgaccgtttccaagggcaaccgtcgaaaatgcggacaccccgaagcccggggcc

SEQ ID NO: 422121 - DNA, 329 bp, Oryza sativa nipponbare
aaccctcaaaaaaaacccaaaattgaaacatacctaaggccttgcttaaacaaaaacaacatggaggggacattgcccgttccattttaacaaacaaaaaaacccccaaaccccatatggccattaatcccaacctaccctaacttggccaagacctttccaaaaacaaattttgacaaaccttaaaacttttccccctcttcggggcttttgaacctggctgcatgggaaaacccctcaataggggccaaaaactttcccagaaggtccttgaagcccttttttttaaccttaggctttgaaattatcacagtttttaaagtcctaac

SEQ ID NO: 422122 - DNA, 250 bp, Oryza sativa nipponbare
attcgtgtggccttgcaaataaatccgtaccccagaaaaataactcggacgcccgagcggacacctatgcggacgcatgcataggacccacggacgaacacacggacggccctctggacgacccccttgtgggccgcctcgttggccccctcgtcggacgcctccaagtacccctgggctaactcctgcctgtacccgcaaatataccacctctacctatagggggtccaaatatccctttaatgaatcc

SEQ ID NO: 422123 - DNA, 386 bp, Oryza sativa nipponbare
tcttgaagtaacttatttgtggggggaactccttacagtaagctcttaatgtttatgtaaatcccctccaaaatactattatggcgagatatatttttggtacctaggtttccagtacaccaaataacattgaggctaccagcgaaagagacacctgggattaatttctttgatacacaaataactgggtgaacaccagggtcacatgaaagttgactctagtgtctacagacaggatgttcaagggcaaagttatttaataaactaataaatttccttgttttgccttgcagatccagctaaaggtaagtatggggaagaacaaactggggtgcacctatttgaaagcaaccgtagaccaaccaaactacagtgttttgcacttt

SEQ ID NO: 422124 - DNA, 378 bp, Oryza sativa nipponbare
atcttaagataaagagaataattgagccttaacttggtactagtactaacataataatagtgtactcatgtatgaattcagttggcagtatactgggaccattttgtggccttacagatacaatgttgtgctcacattgcaattaaattcagtcgattctactacacataaaggcaatcgcattgcattctagaagaccatgtagcgttgtgggtttctccaaaagacctaagcgagcaactggttaggtgtaaccgaagctgagttcatgagttatgatagctttcgaatatctgtcgaatacctttcaaggatattcgaattaactcagaattataaactggttgatgcaaccagtccatttttgccaaacgggga

SEQ ID NO: 422125 - DNA, 443 bp, Oryza sativa nipponbare
ccacgcgtccgctcctccaccgggcggttgtccggtgctagaccgcggccgtggttgcctgctttgtcgagctcccgatggccacctcgttggacttgtgcccggcgccggtggcggcgagaggtcgagggcttgtgagcaggggcagctcgccagggataaccagggacgagctacggcggccagctcaccagcagccatgggatatctctttggcagcgagaaggaagaaggagaagaaaaataaaaggattttttagtgggccccacctatcagttggtccctaccctcatgtgggaccaccgataatccacagtggcatgccacgttggcgcgtgagggcgggttaagacccgtttagactagtgatgacacacgaaacaagttgaaggacctctcatgtacttcacctcgagttatttgtgcaactgcaagtgcgcat

SEQ ID NO: 422126 - DNA, 355 bp, Oryza sativa nipponbare
ccacgcgtccgcccacgcgtccgcccacgcgtccgcccacgcgtccgcccacgcgtccgcccacgcgtccgaaaaaaaaaaaaaaaaaaaaaaaaaaaaaaaaaaaaaaaaaaaaaaaaaaaaaaaaaaaaaaaaaaaaaaaaaaaaaaaagggggggttcgttttagaggttccacgtttacttacgttttctttagaggtaataaattttatttgggggcccctaaattaaatacactggccgtggttaaacaactgggggaatgaaaaaactttggggttaccaaattaaattgtttggcagcagattaatatttaacaggtgggaaaatatcgaagaggccaaaattgatc

SEQ ID NO: 422127 - DNA, 442 bp, Oryza sativa nipponbare
ccacgcgtccgctcaaggtggaaccgctagcagcacgtcactcaaagttcgtgcagtacaggtgaaatgatgagccgttcgaaggctatgcgatataatcctacccatccctgaactctttagaaactatcacagaagccggtcaaggagagctcttcttggtggtatctcactactgggaggcttttatgaggcgcaaacaatatctctgactttcggagcgttgggtgtgaacgatgtcatagcaacagttgcgtgtgtcctgcttactgaatccgtaactgaggtctactacagccggcctaaggttaccttcccatttgctctcctcaacaacttcaagatgggtttcacatatgcggcggatatggatgccttcaagcttgctagctgacctgcaattctttctatcggtgccaagacatgctatgctcacagaatc

SEQ ID NO: 422128 - DNA, 435 bp, Oryza sativa nipponbare
gggtcgacccacgcgtccgccattctcaccaatttattcgtacttctatgactaatctctgaaacgaaacacccttcttgcagtctctgaaactaacccatccatgatgcatcgagttcatgtcttcttggtggttgtagcaatgtaagtctcgtaggctagctgtgccgccaaaagatcgaccaccgccgtgccgacggacttgaacaccgtgatctcgtacgtggcatcgccgcccagccacgctcccggcggtaagctccgtgagcgtaccggacacgtcctccctccgtagcacgccgcgctggagcgcgctcaccatctgtccggccttctgcatcgccgcctggaagtcgatgaacactctgcctcgtcgcagcgcctcgtcgtcgcactctgtcatcgtcggcgtgaacgagcccacaaggtgcaggt

SEQ ID NO: 422129 - DNA, 440 bp, Oryza sativa nipponbare
ccacgcgtccggcaaggggaacagttacctacggaaacccaagtacaacataccggccatggagaaggagaagccatcagttcctgaatgataccaactccagaaaagggtcagttctgggtgcctaaactcagctgattggatcaatggaccacccaggccaaattaccatgcacttgcaaggattggagctcgccacagccattgggttgaggcgggcatccagccgaaggccacattcagaattttggagctagcacctcttgactcgccaactaatgaaacgctgacttcgcatgttgcgcgaggcttgtatccatcagcgacctgacatctgaagagaggaagcagactctatgtatgtacataaagaagaacgagactagaaactctggcctaaagatcaagtgtgcttgcaggcaggctcttgcagacagtca

SEQ ID NO: 422130 - DNA, 444 bp, Oryza sativa nipponbare
ccacgcgtccgcccacgcgtccggccacgcgtccgcccacgcgtacggtttggcgcttacagaatgacaaaagaggacgaagaaagtgaacactctccaaactatctccatcgggtctacaggattgtatcaccaagcttgcacttaactacaaccaagctaaaatgttgtggagctacgacatgctacctaagaaataagatgggcgcccaccaagaggatccttatcaaaattacactggacccaaggagccaattggcgtgcctaaagccctgttggagaagcttgcgttagactccaagcctgcttacatgataaagctcatcgaagagatccgaaagcttaactggataggagagtcaccagttgttagaagccttacgagctacgtgaaagcattcgaccccaatctcaagatcaggacttgatgagacatatggtgg

SEQ ID NO: 422131 - DNA, 186 bp, Oryza sativa nipponbare
ccacgcgtccggtcgtcgtcgtcttcttcttctgcggattgtggtgctcggtttggtcggtgagtttgggtggctggcgatggcattcgcgggggacgcgcggatcgtcgtcgtggcggtggcggcgttcgtcctcgttggcgtggcggtggaggggaagggggaggggggaggaggaggaggggt

SEQ ID NO: 422132 - DNA, 439 bp, Oryza sativa nipponbare
ccacgcgtccgtggggatatgttgatggccgtgtattttgtgttgctatttctattcccctcacatatctctggtggaaatttgccaaggaagacgctgagatgcgcacttcaacaatcatcaagaaaacaaggtagtgttcagcacaagtgaatagcacaaggatttgagcctatgtgaaatcttatgctcgagattcagtcttaccttgtaaaaatttgatcgttcatgttctttctaggcagcttgagaattatgtttttttccatccctttttgcctcagctcagaggtttagggttaatgcttagggtgtgactagtcactttatattcattttcttgtaatcccgacagtgtaacacgggttgcttgtaggttgtgttatgtaacagaggaacgtagattcgaagctttctgaatggatcaatgggaactggg

SEQ ID NO: 422133 - DNA, 213 bp, Oryza sativa nipponbare
gaaggtaacatggtttgtgcaagtaaaaagccggaagatatatgcccaaataagaagtgcccgacccaagatgcaaaatggcctagctccaaatggagaggctttaaattcaaagagcacgctaacatctactcaagaatgtgttaagagggttggttgattgggtctgttctcagctggcggattctagccacccaaactgtgctgtcccta

SEQ ID NO: 422134 - DNA, 73 bp, Oryza sativa nipponbare
ttacacaatttattaatttcatcttttaataggagcgggttctataaaattaacactaattcatacatttaat

SEQ ID NO: 422135 - DNA, 238 bp, Oryza sativa nipponbare
aaaatatataatttttttattttttaaaatttagggctcacgaaaccaaaaagaataagtcgttctgattccatgtttcaaaataaatgcagttgtttaattttgaaatagagactacatttattttgaacagttctctaattaatttgttacacttattttgagattgaggaagtagtactcatttagtcctttgaggattatttaggatgcgcacttgcagttgcacaaataactt

SEQ ID NO: 422136 - DNA, 315 bp, Oryza sativa nipponbare
tttgctaatgattattccattttttcttatcctggggaagaattaatagccgggggtcgcatctatggaacttgacataggccttacccaacaacatatatatgaagcacatcccgcttttacatgaggtcaaagagagatcaggtgaaataaacacaaaagccgggctcgggggggaaagtaaaaagagggagaacaacctgggtacacatgcaacatggggggggacatcttgcggctacaggtgaacaattcaacaagggtatttttgacgaagacggcttatttgctcccaaactcacgaacgcgtgggtg

SEQ ID NO: 422137 - DNA, 397 bp, Oryza sativa nipponbare
agggttagttttatatataaaaactatttcattacaaaggaaccaccgaaaaaacaccatacaaaaccaaccccaacaaacaaccagaaaaacacccacgggcaaacccaaaacacaacccaaaaattacaaacccacaccaaaagaaacccaatttaccccaaaaagaaaaaaaaaaaaacccccccaaaaccaaaaaaaaaaattcccccagagtaaaaaccaaacaccccaacatacacaaaaaaaaaaacaacccaaacaaaaaaaatgaaaaaaccaccacaccaaaataaccgacaaaacaaaacaaaaattaaagcgcgaaaaaaccttattaacaaaaaaaaaaccaatccttcaaaccacaaaaaaaaaaaaaaaaacccaatacaaa

SEQ ID NO: 422138 - DNA, 279 bp, Oryza sativa nipponbare
aaaaaaaaaaaaatttaattgttgaaaaacttgaaaaaaaaaaactgtaggaaaaaaaagtttttggagggtaattttttttagagattttcaaaaaagaaaaacttgaagagaaatacaaaggggagggaaattatgcattctttttgaaaaaaaaaaaaacgggagagtataggcccaaaaattggggggaattttaaaaaaaaaaaaaggcggaaaaatgtttttggaaaaaaaaaaaaaaggttcacctaaataaaatgggggaaaaaaggaaga

SEQ ID NO: 422139 - DNA, 76 bp, Oryza sativa nipponbare
ttttttctatattttcttttttttatttttttttgtagggtttttctaatattaactttctcgtccacctctctac

SEQ ID NO: 422140 - DNA, 342 bp, Oryza sativa nipponbare
gcctgttcgtccggtagccgcgccgcctaagatgcctggtgtgctagcgcctaagtgaccccggcggcggaagctcatgcggagaaggaagagcacccacgcccatggacacggctaaaatgccacaacatcctctggaactgtacaggggacgacatgcgcgcgctcttccgtaagcaccactctatcgacgatgtacgagctatccatgtacaagcaaaccagaaacagacgacaggcgtttgcaaccatgggttcagaagaggaggatctaaacacactcaaagaaataaattcaactactctaaacgtttgaacaaaaaaaagagacgggactagacc

SEQ ID NO: 422141 - DNA, 451 bp, Oryza sativa nipponbare
atcgcaagcatgaatccaccacttcaatcaggcaagttcctgtaaatttagaacacgtaaacccccatcaaccactacacgcctatttgactagcctttctctccactcctatacctgcccgtcaagattcccgaacgcacacgaagcacaatggccgctcctcccatacctgcaaacctgttcgtatacatccacgcgtacacacttcactacgtcctccccttcccgtacatgatctgccacctggatacctaactgacctccttggtcgccaggatgcactggccgcaccgagtatccttgccactacccaccgtaccatccgcctccatcctccttaagccacccttgagcgcacacccctaggtaggctaccttgggctgaatgccgtcatctattttccagacaactagctgctccttctattcgttcacaccggcgtttaactc

SEQ ID NO: 422142 - DNA, 473 bp, Oryza sativa nipponbare
  unsure (1)..(473): unsure at all n locations
gcaatcaaaggatatgcaagcaaatccattggacagagcctttttaacttacaatttgctgacatttacatgtgccatagattcttttacatnttccacgtacgctgatttcatgacttcatgtacttgccctgagaaatcgtgttggctcaggaaaagcctggaaatttgacaagattgaattctagacatatccaacttatccaccagagatgataagatgcatttgcattcccatgaagataaaaacatagctaacattccaggtaggcatacaatttttccatccttaagaaagattgaccgccactctgatatttaccctggtcaagaatgtcacctagacttcagctttctcttcttaccaccaccaaggggtataccggttgtgtattttgaatttgcaagttccctgggaattggagcacctgcagtcttcagaatctgaacaagctctctgaaaagattcctgt

SEQ ID NO: 422143 - DNA, 273 bp, Oryza sativa nipponbare
gtcaaatgacaagatttttaaataaatgaaaaatgcaagggtgctacataattacaaagagcctctttaacggaaataaagcatgcacacttgtagacacagatttctgcaccatgcagtatcttcttgtgcatctcattaccactccattggatgatgaagcctttatgcaggtacaacagggcgagcttactcaagtagctaagggactcaatgccttgagggaccattgccagctatggcagcaacacaatgtacaaacatgtaatgcat

SEQ ID NO: 422144 - DNA, 486 bp, Oryza sativa nipponbare
ttgaaatggcatgtcttagataataaaagggatcaaaccgacatacaagaaaaacatgtccctacaacatttccttatcttacaaagagaaaacaaggagaggagctaatcttacacggcaggtttcctacctaggcccatactagaaaaagcacactcctgaaaagagttccaacatggcttttggatacaacaattgtaacgtgtccgaaaacttgattttgagtcagattcagcctccaacctggcaccaacgtggcatgatacatataaaggccagtaaggccttgcattacaggaaaaactggcccccaaattatgaagcgcaaaagagaatcaataaaaccatggatggggagcttaaggtatcactgtgttgcagtcttcaagctgaagggcctccattttgagtatcctctaacttggtttttggttcatcagaaacatggttagaatgtgcctcttcgaacagagggctttccgctt

SEQ ID NO: 422145 - DNA, 392 bp, Oryza sativa nipponbare
ttttttttttttattttttttattttatttttaaggtgggtatttttttattatttttttttttattatatattataattttttttttttttttttcaaaagaaaaaaagggaataaaataaaaaaaaacaaaccccaggttaaaaaaaaaaaaaaaaaacccatctaaaaaaaaaaggggcaaaaaaaaaatcaattaaaaagaaaggtttctaaaaaaaaaaaaaaaaaccccacaccccccactggggtaaaaaaaaaaaaacggaatgggggaaaaaataacccgcaaaccccccctttttaaaaaaaaaaaagacccccccccccaaaaaccccggaaagggtaccccccaaaaaaaaaaccccggggttccaacaaaatatatatt

SEQ ID NO: 422146 - DNA, 382 bp, Oryza sativa nipponbare
gaaaaaaaagtatggttgtttttttacaaaatttaaaaaggggttaaaaaatttacaagggaggggaaacgggaatattcttaaaaaaaaaattgaaatttttggaaacggggaggaaacttttaaaaacattatgtttgaaggaaaaaaaatttgggaattttttttttttttttttatcggaaaaagaaacatttatagggggggaggtgttctttttgggggggggggggggggaaccccggtcccggaaaaaagggttttttttgggggggggcttaaaagggggttttttttttgaacccaacccccgaaagggacggtttaaatttggcaactatatattttagggggggcccaaaaaaaaagggggccttggggg

SEQ ID NO: 422147 - DNA, 68 bp, Oryza sativa nipponbare
gggttggggtttttttagaaaaaaccactttggataagccactgataactagggccgaccgggtagat

SEQ ID NO: 422148 - DNA, 334 bp, Oryza sativa nipponbare
attaaaaaaagaccaaaccaccacaattcaatttaacaacacaaaaaccacctaagacaacaccccaaaaacaaccctccacaaaatcaatttaataaataaaaaaaacctaaactaacaaacaccacccccacaacccaaaaaaacacaaaatccccaaaacaaacaaacacatattcaaaaaacaaacattcccaacacccacaaaaaaactattaaaatcaaacacacaaaacacctctaactaaactaaacaaaatatacacacttacaccataaccctctcttaccaaaacataaaaaaaaatacccaaaacccacccccccaacaaaa

SEQ ID NO: 422149 - DNA, 90 bp, Oryza sativa nipponbare
tcttttagacagatttttttttattctcggggtggggtttttttatcaagcaccatttcttgaacccttaccatatatacctatagtgag

SEQ ID NO: 422150 - DNA, 343 bp, Oryza sativa nipponbare
aaaacggaatttttttaaaaattttctgacaccttttttgacaccctggcggacccctcggtccacaacccaataacggaccgccacccccagcaaaccaccattccctaaaaaaaggagtataaaaaacaagcgtaaaaataagaataacagctacccgcgtaaaaaaaatatccgcccaaaaaaccacacaacaaactacccgcaaaaaaaaaatgtaaaaccaacggggcccaaaaagtaaacaaacaaacaaaaaatacgtcacaacaactacccgcactacagaagagaaaaaagtcgtgccaccaacaaaaaaaaaacccccaacaccccacaagaa

SEQ ID NO: 422151 - DNA, 488 bp, Oryza sativa nipponbare
aacacagagtgcattacaacacaccacaacttgcagatatttctttcaacctgacaaagttcattacaaaacaccacaacacccatcttgctgcaaatacttcaccctacatttctccttaccaacaccagtgcaaacatgacaaaatacacaccccataccaccacctaacagataccatctttccttttttagcctactatttttatccttcaccacagcaattctttcagcatagtcacatgacagctttcttgctgcctccaactctctttgagcagcatcaacctctattatcttctcctcaaccttcatcctctcttcttggatagccaaacaagtctttccttctccctcctcgctgaccaaactgcatctcgcaaatcattcaacacttctctaataaaggtggtcgtcggcccatcataccaagcataaaaaccacatccaccttcctgggcattgcgacatttgaagtaccggcggct

SEQ ID NO: 422152 - DNA, 474 bp, Oryza sativa nipponbare
ccacgcgtccgattctgtttgtgtttacatgttcagtcctatctccactaaggtttgtcaaattcactttcttcctgctgtattgtatcgcctacaaactatttttcatataatcttgccatacgcttaattacatgcatattctacgtccttgcctcacataagcaactttgttttggtacatatggccccgtgcctctatgagcagctcagtttattactagagcaaatatgtgcagtgtgattttcctttttcttaaatacctagattcatatgcccatcatgctatatcaacatttctagcgtacacaacaacacactgcatatttcatttcatttatttttctcacaaaaatgctcttgcttcacatgggaggcttcatttgctaattcttctccttttattcatacttcaggttcaaggcttgtaggttccagctgcatggcaattggctctttgggttcctctacct

SEQ ID NO: 422153 - DNA, 217 bp, Oryza sativa nipponbare
ctcgcgggtccggatccccggttcgagccacgcgtccggcaggatctctgaggacgcgttcgcaaacgaaatcagagatgcatcaggtgagccgttttccaagctaccagaaagagggctgatcaagaaatggtattcaaatgcacatgcacctgaattgcatgatgacgatgctatcgttgcttgcatagataaccctgtagactgcatggattat

SEQ ID NO: 422154 - DNA, 351 bp, Oryza sativa nipponbare
ccacgcgtccgcccacgcgtccgcccacgcgtccgcccacgcgtccgcccacgcgtccgcccacgcgtccgcggacgcgtgggtttccttcctagcacattctttgggtggtttgtttgcgcgatatgctatttctatcctttattcaacagcaatgaaggatgcaagtcaaagtgctgcttgtatagctcctacaactggagggtctgaaaagttggagtgcacttcaagattaggtgcaattgctgggctggaaccaattaatttattaccttagcaaccccacacctttggtgttagagggaaaaatcaggtgggtctctaaatctattaaaattatctgatacattt

SEQ ID NO: 422155 - DNA, 431 bp, Oryza sativa nipponbare
ccacgcgtccgacgaccatctgtgtcaggtatcagacctgaatagattgatgggcaacgtgaacacggagctgttgcactgggcgatggcgatggctgggcgcggcgacctatctttcatgctctgagttccatgaccaagatcaggcatgctcaagacccccgcgaagcacacggcggccgagcagcaatactgcacggagaacagcaccgtctgcatcatctacgctcagtcctgatctggctgagagcgcagggcacgctagcctggagcctgacgatgtatccaaggcccgactacggttagcaacagacgcgatgttctccaacaacaagctgacgtgcaccaagaaccggtagcttgaggtgatgaggtttgcccgctcatgttgggcacgctctggtcggagaagatcaaggagctggccacca

SEQ ID NO: 422156 - DNA, 78 bp, Oryza sativa nipponbare
  unsure (1)..(78): unsure at all n locations
ggtaccgtccgntatcccgttcgaccccgcgtccgcccactctttcgaggacgcgtgggcgcacgcgtggtcccaccc

SEQ ID NO: 422157 - DNA, 139 bp, Oryza sativa nipponbare
acccacgcgtccgcctgctcccacttcacttggaattcgaaatccacacgagcgcggcggcggcggcggctgctatggcgggcactattaacttggcgtcggccacctcgtggttcctgctggccggctggaacggcgg

SEQ ID NO: 422158 - DNA, 161 bp, Oryza sativa nipponbare
gaccagtaaatcctagtgcactatatttatggagctataacattacaaaatcatttttccgagatccttcaaccatcccatgcagctgatacctctaacaagctgtatatagctctatgctgcacattcaaacgtgcgatgacacacaagtgcatcatata

SEQ ID NO: 422159 - DNA, 179 bp, Oryza sativa nipponbare
ttaaacaaaacaaaacttctaaaaaaaaaggggcgggtgttttacatggggtaaatcaaaacaacagcacacaagtaataatgcatgcaaagcaaaatccacaattacaacccaaaacacaacaaccatttacacacaaatccaaccacaaacaataaaccaaagttaagctaacgaac

SEQ ID NO: 422160 - DNA, 114 bp, Oryza sativa nipponbare
ttataacccccaaaaacgggggaaattaaggggcggggggaaaaaaaaagggctacaaatatattataatttaggtacaaaacttttaattaaagaaacaccccgcaataggaa

SEQ ID NO: 422161 - DNA, 284 bp, Oryza sativa nipponbare
aaagtaggggaattttttttttttttttttttttttaaaaaaaaaatttattttttttttttatttaattttttttaaaaaaaataaatttaaaatttttataaattaatttaaatcaaaaaaaaaatatttaaaaataatatttataaaaataaaaaaggaattattacatttaatcccaatttttattgaaaaaacgttttgaatttaaaattaaatttaagaatttttctatttaaatactattaaaaaaaaaaaattaataatttaaaatatttttatta

SEQ ID NO: 422162 - DNA, 359 bp, Oryza sativa nipponbare
tcccgttcctaattacacaatcatccattgcagcctgaaactccttgaaatttacaacaaattttcatctcgagaaccagtcgatactagtaacacactaagcactgtataaatacggtgattaatacgtacatgtcctagtgatcatcaaaccctgcggcgacgatcagtcggactcctgcaggccggcgaggacgacggagccgactaagaggccggcggcggcggcgaggaggacggcggcgaggacggcctggagcgcgactagggcggcggaatcttcggggaccagggctactgcggcgatggcggctaccaggagcgggagcgagactgaggctagggcctctggggaggcg

SEQ ID NO: 422163 - DNA, 474 bp, Oryza sativa nipponbare
ggcaagaaaaaggcaccacggtgcatattaaagcatgaatataaatactacaaagttactaggccaaacaacaacctgttcagatacatcattaaaccatctgctctttagaaatattctacaatgatgatcaaaactgacaccttttagtaatagtacacaataggatgatcaactagcgttgcctcgccttccggttcatttctatcaattgtgtaagagagacagcactccatctctcaattccttcttgaagttgtgcgtagagtaggcgcttcacagagtcgatgcaaatacttacggtgccaaactcatacactggcataccattgtagaatttaccaactctgggcataaacaataagccttggtccattgcatatgcctggatagactccttaaagctcatatccgccatggctgctcctggcaccgcatggtgagtcatgtattgtgatgcttgctgggctgcat

SEQ ID NO: 422164 - DNA, 462 bp, Oryza sativa nipponbare
atatagcatacacatataagaagttgcgcgacaaaccgtttacaatatgattacagtcacacaatccatcacaaatagattcagaaggactcctatgtaggagtaggagtaggagtatatatatatatccaccgtatatatgtcttgtactttgactggagcccacaatgcttgtacgcaacacagagaagccgtccattcatggttacttatgggtttcttctgcgcccgccgtcacgaccacctttaacaggctttctctgattagattgtgcactacctaatgatgtgccagcatctcctgtaaaagtatgcatcttgccagacggctctaatacttgtggaacaccgtggggagctgttcttgatagagttagcgatgcacccccatcgggggtatgccttggatcggcgtcctcggccgggacgaacgtccagagggagagggcattggccaagcgc

SEQ ID NO: 422165 - DNA, 377 bp, Oryza sativa nipponbare
gggcaggggacagtttgtatattcggtatgacaccggctttctgatgtaaacatgacccaaaatctttactataattaacacaatcatatcatacaaacattcatacgggtaattcttctactgcagtaagtactgatgcacatgggtatttcacagggacagtcaaaacgaatcctttactgtctaaacctgaataagaatagaacaaacagacagacagggggggggggggcacatgcttataggatctatctatatgcacatgagctacaacaattctcatggatctaatggtttgtcaggaggatggtgtgcacgccgttttctttctgaaatagttcattagctgcaccgagctcatagagcaaccattgga

SEQ ID NO: 422166 - DNA, 61 bp, Oryza sativa nipponbare
ggcgtgttgttctcgccatcaacttcttttaatattgcgttcttcttacgtttttcttttt

SEQ ID NO: 422167 - DNA, 443 bp, Oryza sativa nipponbare
ccacgcgtccgcccacgcgtccggttacctaattagcctacttagtgtatcatctgtacgtgacatgccacacttagctagccgactaccattcattgagaaactgatggctgctgcgcctaccttcttctccttctgctccgttaagccactgctccattcggcttcaccggtggccaggaatacttgccggaccagtcgcaaccgtggcttcttccgccctccaccggggatatatcccgggtgggagcctgcgtctcatgagctgttgcacgattttgacttgcaggaaagcctagtgaatgttcaagcgttattgcatcaacatccgaagagtagacgagccatgttgaccactgttgatcacctcaagcgcctctgcatcgatcattatttccaagacgagatcgacaatgtcatggatgcatgtgtggatctcgttc

SEQ ID NO: 422168 - DNA, 438 bp, Oryza sativa nipponbare
ccacgcgtccgcccacgcgtccgattgttgttagatgattgaggtggcagctggactacctacagcagtgcctgcctggttatgagcaatttgggatttcaagaaaaggctcagaggataacactgatgaatattgtacaatattctatgaaaaagaaaaggtggagcttacagaaggtggtaccttttggttgtcagaatctccttcagtgcctggaagcgtttcatggggggcaactgcaccctgcattgctacatgggcaatatcctttggtgcaatgcttttgtcggcattttattctatcatactttaagtctttattggaataaagtaaagtagttgccttaacatgatgtacacacatttcaactcaaacaagtagaaccacctgggttcagcttccagattgtaaatacaaaccttgatgaagatagccc

SEQ ID NO: 422169 - DNA, 337 bp, Oryza sativa nipponbare
ccacgcgtccggcgtcctccaagccccagcacctacgcgtcgtcgcgccatggccggcttcggcttggaccagcacctcgacctcatccgcgcccacctcctcgaagacgcccaccaccacgtcctcgcgccatcgccgtcgccctcgccaccgggtactgggcgtgtcaggccggcgcccgtgtcgctgcccccgaggccgccgctcctgtgggcggcggcgtcggcggcgccgcggcagcaggaggagtgcttcgagctcggcggcggctacgcgggggagggggagggggaggaggaggccgacttccgggggtgccgcggggggcggcagcgg

SEQ ID NO: 422170 - DNA, 212 bp, Oryza sativa nipponbare
ccacgcgtccgccacgcgtccggcactccgtcgcgcaccactccccacctcccgacgagatgggcgggctgcgccttacctgcgtcagcctccgccccgccgcctccaccttgtccgccgacgtgccgcggtccgtcaacttcgcccgcgccggggcgcgcgggttcccctcgcttcgacttgggccggcgctccttcgcggggtccgcagc

SEQ ID NO: 422171 - DNA, 336 bp, Oryza sativa nipponbare
ccacgcgtccgctttcacggcgtcctacacttgttctgccgctggatttgctctacacgctctacatgacccatgttctgttgtgaaggacaagatgggccacatcgatgcctgagccgccatgagcggatcatgacgttttttctaaagggcatatgctggggaatccactgcggtggaaaaaattcacatcttggtacttcaggaaagaaccctcacttatctggtgaatgaacaccgccatttccatgcctacaactgcctggctgccgtggatggattctacacagcgaatgttctacctggattgcaacctctctgactactgaaagagcc

SEQ ID NO: 422172 - DNA, 432 bp, Oryza sativa nipponbare
  unsure (1)..(432): unsure at all n locations
ccacgcgtccgtccaagcgtactcccacgcgatctgaaagaggatgactactgactagtgcactactcagatacttgcgccaccaacgatactagtgctacaaaactaaatatggctagcagagcatggaaggggatcctggcacagggatcaactgcaccaaatgactcaccaggcaagcggatctccggcgttccgccggcaggggcactcatcttatctacgctgatgctcagacgcatgtgcaatctgcatgtcttgatcacacggacaataggcncaattttgacgtacggctcgacagaaacggtcgcaagcatagactgatactatgtctaccacgagcgaggtgcaagagaccgacacaaggactcccaccaggcaagcacaagaggcatgcacccgctccgccacctgcgccgtacaccgagc

SEQ ID NO: 422173 - DNA, 372 bp, Oryza sativa nipponbare
atacaatctatcaatgaattaatcattcattgatatgtgtacattataaaatgcaaccatctcccactactggcaaaataactagtctttctccctctccttcctcattctaattttgcgtaacatatcctcatcttcatactcgagcgcttatgtctcccttcctcaacaccgctattctacaccaactggctctttatactatcatttcccatacctttcatttttaactttattcctcttcaatgtattcctatctattttaatttactcctcttcctactccctatacttaattttatctaattcaaccttccttaagaacctatatttttcataacttctaccatccccattaccattaaccttatt

SEQ ID NO: 422174 - DNA, 370 bp, Oryza sativa nipponbare
ataaaaaaatttaatttaatatattatttatattcaaataaaaaaaaaatatttaccggatatcaatatgatatataaaacataatggttatatataaacggtaaaaaaaatttgctgttattaaccggcgggatataattatttactcgattaaacgaaagcactataattaacacccacatttaaattaaacaattttaatgcatcttgtatagccttctcaggatttctctcagcttgtatgaattgctttcagtattcctctttgaaatttgcttaccataaacgtagacaaaataaaaacgccaaaaaatttttttaaaaaaaattctttctcctaaaaaaaaaaattttttctaacatggaaaa

SEQ ID NO: 422175 - DNA, 412 bp, Oryza sativa nipponbare
ttttttttttttttttttttttttttttttttgttgtttttttttattattttttttttttttttttttttttttttttttttttaaaaaaaaaaaaacaaaaataaataaaattttttaaaaaaaaaaaatttttaaaaaaaaatccttttttaaataaaaaaaaaaaaaccccaaatttttttaataatttaaaaactaaaaaaaaatgcctctttaaaaaaaaaaaaaaaattttatttaaaaaaacctttaaaaaaaaaacaaaaaatccccaacctaaatcaaaatccaacttttaaaaatttaaaaacattctttttaatcttatttaaaaattttgtttaatccccgtgtttaaattcacaaaaactaaaaaaaaaaatttaaaaaaaccccccccttttttttt

SEQ ID NO: 422176 - DNA, 408 bp, Oryza sativa nipponbare
cctccttcacgagcggcagtattttgcaattttatttacagatggaatttaaaattgctctcaaaagcaaaactggtagtaagactatgtacagatctctgggaacagagtaaaggttgactgaccaacaagagtaacagcactcctgactggtaaagtacattggatgataagaatattggcccaaattctgcacaggactacaggagtacatgtaacgtgtatgatcaaggcaaacaaaacgcgacagagagaaaataaaaataaacaaacattttaaccaaaaagaaactttaatgatgaaaaagaaatggtttggcaaaaagaacacacaaaacgattatggtgtctccactaggcggacggagcgtggaagcaaaaattcagcaaatatgggaaaatgtgaag

SEQ ID NO: 422177 - DNA, 420 bp, Oryza sativa nipponbare
caagtgttggggggcttcccaaatcaaataagtttacaagatcccaatcagagacgtattttcatatacatcagtcatgtttgcacaaaattatttcaccccatgtaactaaacagtggcaattagcagatcatcgagacctctcttacaagcagcaactcatctattatttgtcaagacaaagccaagctcataatccacatcaggttatcctccagatatcatcgaacatttggtgtaaacaatatgatcctccagatatcatcgaacacttggtgtaaacaatatgatactccagccatgctccgtagtcctccagaaacaaccaggttcaatagtccagtgaaaaaaaaaaataaagaacagggccagcagaagaatctgaacatggtactctcaatgcaaccacattctaccatc

SEQ ID NO: 422178 - DNA, 55 bp, Oryza sativa nipponbare
acccccccttttttttttttttatacaattaacaacaatccctaataatatcaaa

SEQ ID NO: 422179 - DNA, 449 bp, Oryza sativa nipponbare
cacgaaaaggggaacaaaacattgaacctataaaacaaaagagtgattaatgacatcattgcatgaagtcaacttataatgaaagcttcataatcatatttgtgaaaacaaaaaaattcaatccaaaaggatcgatcttctaaaattccaataacatgcagtgcaaggcaaaaaaaaaaatcaaagcaagaatattactttagagggaaagaaatattaactgtcccaactacaaccattggagcatatggcaggacctatctagaatggtttgaactaagaagaggtttcaacgaattgaatgtcacatgccataatatactgaagtagaacttcatttgcaaagcacaagagaaccacgcagtatagctagagatatggaggcatgatcaattgaggtataacatatactcttgatgtgaacactgataagaaattcaataaatcat

SEQ ID NO: 422180 - DNA, 58 bp, Oryza sativa nipponbare
attacaaatgaccacattaacaatctaacatttcactccaataacaacgagaaggacc

SEQ ID NO: 422181 - DNA, 422 bp, Oryza sativa nipponbare
  unsure (1)..(422): unsure at all n locations
ttaaaacaatcataacaacaccactaataaacctctggntatttcatttatatataaatacattacatccaccactcctaatacaagtagcaatacaaactatctttacaaactacacaacaatgaaccaaaacataccccaatctatctcttggcctactctaactgaacaaccttttcccgatacaccaagaaagcgtacaacccaccacccattgtgtcaaattccatcacccaaacaatcactgctaccaccgtcagcatgattgcctccaccttgtaccagaacatcaccgtgagcaacgatcacagtccccatacaaagaccttgagccattcccggcgggcacagtccctcggcgctttctcgaatagactgatgcacgctaaaaacaacacgagatcgatgtaccaatttaata

SEQ ID NO: 422182 - DNA, 337 bp, Oryza sativa nipponbare
gcaacaaatcatcatgctactatgcttaccaaagaggtggggtgattatacagatgacggacttacatcctagactgatgcctatgcaacataaattgtacgaccgtaattacataccccaatagtaaacctatacaataagtgggtcgacgtaatgtacaatcatacacacacacctttactcttacacgcatccattcgttcatacacaaaaactctatggtaattaatatccctcaggatggcatcccttacttaactccaccatatacaggcatctaggtcagacaccatcacacatggtatcaacataaaaacgcaagtttccaacgctaaa

SEQ ID NO: 422183 - DNA, 378 bp, Oryza sativa nipponbare
  unsure (1)..(378): unsure at all n locations
taagcttggatcctctanacggccccctttttttttttttttttttttttttttttttttttttttttttttttttgttggttttttataaatttttttcctcctcttttttttttttttttttttttttttttttttttttttttttttttttttttttttaaaaaaaaaaaaaaacccccctcttttttttttttcttcttatattttaccccaaatttacacttttttttttatctctaaaaaaaaatttccccccctttttttttttttttaaaaaattttcttctttttttttttttatcccccttttttttttttccccaccttttttttttccacccccccgccattttttctaaaacatttttttttttt

SEQ ID NO: 422184 - DNA, 416 bp, Oryza sativa nipponbare
tttacatttgccaaaattaaatccaacacactggttgttttttaaaaaactatggtaactaccttttttacattatttacactctcttattttaacaacaacagaaacaaatctgatacataaagaaaacaagctctttatttatcatatttaatttcctaaagtaactagcacaactccccggccaaccctcatcgccggcgacgagctcgaacagcctctcctcattgcttcgggatggggtacggccactacacgtacccctcccactcggacttccaccggctgagcaatatctgcaactggcgctcgacctgtagctgacgggcagcacgtccttcatcgtcttcatcgccgtcaacgacctcttgaatatccccttctccgccgcctcggcgagcgcctggatccccccc

SEQ ID NO: 422185 - DNA, 179 bp, Oryza sativa nipponbare
acccaactctttggctagtcacattagttattaacagagagcttctgatgcccacctagtgggtttaccaccttctcctatacagagcaaaattaaaacttggcatggtcatagacataattgcaagctgtaagacagtctgattcaatcacaataacgcacatgataccagcgctact

SEQ ID NO: 422186 - DNA, 437 bp, Oryza sativa nipponbare
ccacgcgtccgtggagttgttgtcttggaaatatttattcggagaaggccaactgacgacatgtttaaggatggattgagcattgcaaagtatgcggagatcaatttccctgataggatactagagattgttgatccccaacttcaactagagttggacggccaagaaactccaatggcagtcaaggagaaaggcctacactacttgcactctgtattaaacattggactctgttgcaccaagatgacaccgagtgaacgcatcagcatgcaggaggcagctgccaagctgcatggaatcagagatgcatatctcatgggaaactgaagaagcagtgcagttacctcaatggttttggttttgtctgaacgcattatatattatatatagcattatactagcatgcatgtgtgcatcttgttctgttaaatagatcg

SEQ ID NO: 422187 - DNA, 251 bp, Oryza sativa nipponbare
ccacgcgtccgttctgctttactcagacctgtgcgctatgacagacatgtaaccgtgcgctggccgtgatgtgacgcgcggaggacgtgatgtacttcttagagggcgcatgaccatgcgcaagtctgcatactaacccatgtcttgcgagtcggggagcccgtgctactgcgtctaccgtgtgctctacctcggatcttcttactgatagccgcctattatcgtgccggccttgtttcctgctatttcct

SEQ ID NO: 422188 - DNA, 491 bp, Oryza sativa nipponbare
cgtccgggaggaaggggaggaagaaggcgtggaggaggattccgaggaatccggtgccgcgggggaagacgatgacggggaggacaacgacgaaaagccgcggcctgagccggtggccgcctctgggttcgagttcgcgtcgccgccggagggctacgtggatgccgtcccgttcgactagctgcccctgttgtcgccctgtggacgtttcattcggtttatcgaatcgctttatatgctccgtcttttttctgttatgttggtatattttgttaacatcgtgttctattgtttctaaagttgtgttatatttttttttccttagtttccgtctatttttacgttattttcgggttttcatcattattttttcgtttttttacacattttttcaattttttgaaattattcatgttttttacatttatttttttttttatcaatttttttatttttttaagtttttattagttttttatttttttggattt

SEQ ID NO: 422189 - DNA, 321 bp, Oryza sativa nipponbare
ccacgcgtccgcccacgcgtccgcccacgcgtccgcccacgcgtccgcccacgcgtccgcgacatcgtcgtcaagacccgcaacgtcttcgaggtccgcgacgccgctgcccccgccgtctcaccggcgacctagctgctgatccgagatccatccatccatcgatcagacgacagcttatagctacagcagtccacatgagcttgcctggctgctattataagagggtgagtatgtatatatatactgggatgcgtgtgatcgatcaaagatcgatgtacacacaaatgatcagcatgcacagatcactagatcgagatc

SEQ ID NO: 422190 - DNA, 327 bp, Oryza sativa nipponbare
ccacgcgtccgattcgtttttcccttcatcttctcttttgctctccttcctcctcccccttcttcttcctccgaattcgagcggaggacagaggcggcggcgaccgtgtggatggggcttagcaggcggcggcatcgacgggacggggagggatcgaggagtcggctcgccacctcgcattcgcgaccttcaaatgcaagctatgagtaaatttcctagaaacatgcacctggggagaacattgatgaggttccttgttcaaatttctactgtctactactgcttaaaagttaaaaccttcagtagggaaacgggaggagatctcaa

SEQ ID NO: 422191 - DNA, 351 bp, Oryza sativa nipponbare
ccacgcgtccgctgcatcacctcaccaccatggctcagctcctctcctcctccgctcctccccgcctccatctcgccgccacgccagcttgcttctcctcctcttcaggccatggcgtctcccgcttgtccgtgacgtcagcatgctctgccgctcccgggtcgctggtgagcatgaggaggcagaaggcgaggtccctgaccgtccggtgcgagcagggagccaagggcggcggcagcggcggctgcggtgggctggacgtgtggctcatccgcggcgccatgctcggcttcgtcgcccccatcaccgtcgagctgaccaccggcaaaggcgtgctccaaaacgtggggc

SEQ ID NO: 422192 - DNA, 217 bp, Oryza sativa nipponbare
ccccgcgtccgcccacgcgtccgaaaaaaaaagataataaaactaaaaaaaaaaaaaaaaaaaagggggatattggagaactacggggggggtgtcccacaaattgctgcaggtgtgtggagtgttttcacggagctcgatcttctggacacatttctggagtgctagtgaagatgatacaaaaacctgggtcgtgccattcacttcccgagactga

SEQ ID NO: 422193 - DNA, 347 bp, Oryza sativa nipponbare
ccacgcgtccgtttttaacaaaagtatccattaagggtgttcttttatcatgccatttttggtatttatcaatttttttggaacaaaaacaatggattttcttagttgatgctttatgcaggtatctattgactttaaagatcatgaaggcattatgcatatatcaaggctttgacatggtcttcgtgcaagaataaaatgccattttgtgttcgccaacaagagttatttatttttaatcaacaattgtgtgtcttacttcaaggtcactgatctaatggtttagtcttgcacctgtcacttgcttataatgttgtaaccccgctcctgtcacttgatagtatttc

SEQ ID NO: 422194 - DNA, 386 bp, Oryza sativa nipponbare
ccacgcgtccgccgcagctgtgattcatcaagagcaccttcagtgtccagaaaacaacacaaaaagaaagttattttagcaatcacactcagcgtgtctgttggaggcattatcattcttttatccctgagtagtctcctcgtgtcactcagggctacaaagttgatgagaaaaggggaattagctaacaacagaaatgaagaaacagcctcattcaatccaaattcagaccattcattgatggtgatgccacaaggcaagggagacaataacatgcttacgtttgcagacatcatgaagactacaaataacttcgataaggagaacatcataggttgtagagggtatggattagtctacaaggctgacctacctgatcgttccat

SEQ ID NO: 422195 - DNA, 196 bp, Oryza sativa nipponbare
gcgtccgggcgaacgcgcgggtcggcggggcagcagcgcggcggcgcgacgcggtggcagcagcacggcgcagcaaccggcactggctaaatagcgccgggagcaaggcagagacagccaccatacagggactgaaggcaggcagaggcaggcaacaagctatagaggagaggaagaggagattaggaatgttgtg

SEQ ID NO: 422196 - DNA, 392 bp, Oryza sativa nipponbare
ccatcgcgtccgcccacgcgtccgatctgtgctaggttccagcactatcagttgaagggaatgacacagcgatcttgggaagtggggaatggtgggatgttcctctcggcccaaagcatggctgtcggaactatcatggtccgttgggtgtcaaagtattctgatccaatcattgcaacaggatggcacatgataattggtggccttcctttgttgggtatatctggtctcaatcatgatccctcgcctgaatgggcatcttcaagaacttacactgaatgatgtattatcacttctctatacatctatatttggcagtgctatcagctatggtgtgtacttctacaatgctacaagaagtagcttgaccacacttagttctctcactttct

SEQ ID NO: 422197 - DNA, 168 bp, Oryza sativa nipponbare
ccacgcgtccgctcgaaaaccccgcgccgctgctttctccgcgtgtgctccggtgatgtcggcgacggcgacggcggcggccatccgctccggagagctactcgcgtgcccgatggctctgcggagggcggcggcgcccgtggcggcggcatgtcgttccggtgggga

SEQ ID NO: 422198 - DNA, 104 bp, Oryza sativa nipponbare
ccacgcgtccgctggcgcgccgaagcttctctcctctctctcaactccggcgagaggaggaggcggcggtggggcgttcgtcgggagagagaccagggccgggg

SEQ ID NO: 422199 - DNA, 384 bp, Oryza sativa nipponbare
ccacgcgtccgcaagaattcagtaagaacttggatctccttctcgtgctctctctctctctctctctctctctctctttctctctctctctctctcacacacacacacaacaacatcaacaacaacaacaaacaagaggtgaataaaaagtgaaaaaaaaggcctgtgatggaggtggttgtatcggctattgcaggtgatgttgttaatcgatttatatccttcttgatcaagaagtatgagagccaggaaaatcttgaaagaaagatggaaaggcttcagaatctcttgctcaaagttcacatgattgtcgaggaggctgaagggcggcacatcactaactccaagatgctacttcagttcaagaagattgtagatgccatg

SEQ ID NO: 422200 - DNA, 52 bp, Oryza sativa nipponbare
ccccaaattcccggcccgacccacgcgtccgcccacgcgtccgctccgcgcc

SEQ ID NO: 422201 - DNA, 475 bp, Oryza sativa nipponbare
ccacgcgtccgtgaaaagttcaagtggagacagtgatgatgaattagatatccccttcatagcaactagaggttatgacagtgtagtatggagtcgtttgtactcacaaggccctacggaaatgacgcgtcattcctggaagctatcttctgtggttgctgaacgaacactgaaatctgtgggagcaaaagggatggttgtagggcacacaccccagactcgtggagtgaattgcaaatgcgatggcaaggtttggtgtgttgatgtgggcatgtcttatggtgttctctattcaaggccagaggtcctagaaataatcaatgacagaccaagggttttgaagaatcggagggactcatacgacgagatggaagttttagacttcatataaaaccttaagaaacctgcatgtgcaggcatgtataggaaaaattctttttctggaaagctactgtactggacaattttggatgga

SEQ ID NO: 422202 - DNA, 172 bp, Oryza sativa nipponbare
ccacgcgtccggagctgtacgacgccaggcaccggtgattcatttagaactactgtgagacatccgtcaccaatgagcgctacattccaaaagatatgcgtgaccttctgataagccacctgcgatgtctcgagggctaagacctgtttgctgcgagaggatggctcaacat

SEQ ID NO: 422203 - DNA, 109 bp, Oryza sativa nipponbare
  unsure (1)..(109): unsure at all n locations
ctcttctccttccttgttgtcacctgcgtcgccggcgccaggccggggaacttcagcgcctccgacttcaccgccgatcccaactaggaagtncgcatgtggccaccta

SEQ ID NO: 422204 - DNA, 70 bp, Oryza sativa nipponbare
ttcccacatataattcgggccttgttaaaatatataaccatactaatacctacacttatattaacattat

SEQ ID NO: 422205 - DNA, 77 bp, Oryza sativa nipponbare
tttatgaatcctcacatagtgtagatatactaaagataatatcctccaccacatctttctcacacatatttacataa

SEQ ID NO: 422206 - DNA, 442 bp, Oryza sativa nipponbare
tttaaagaaattttactgggagagccagaaaatgagtcgtgcatgttccattcgatggtggaaagctataagcacagatactgagatacatccaatagatcatcacagatcattgatgcagatgacacacaggaagcagagcagtagtactattgttgttgctaaacaagaagcagaggggtagaggaaaacttgttgttgctacagcctacaggtagaggaaaacaagaagcataggtagaggtgtagctgcggctgatgatctcatctggagcagccctgccctcgatcttcttgcttgggcatcatgtctccctgaataatttccttaagccagcatgaatgcatgcacatgtggcaggaacattttccatcgagctagaatccagtgtttgtctgcctctgcctggtaatcaagttagattacgccaagcacgccaag

SEQ ID NO: 422207 - DNA, 220 bp, Oryza sativa nipponbare
actttctaaaattacaccaaacggcggggtttaataataaaccaaaacaccccactacaattatattcttaaactcagccccataaacacatctctaaatccaacacccagttcacagaaacccaatcttattaaacacacattcccacacacacacatcacgcaaaacacaccaacaccactgataccaatgcagtgacaccattcacccattggtaaa

SEQ ID NO: 422208 - DNA, 427 bp, Oryza sativa nipponbare
ctaaccttggtgacggggtttctacctttttgtcatgcctgtacaacttgagcataaatagtgtttcaacaaacaagtgaaggatcaaagcaagacgaattctttcagcactcaatgccctgaaatgatagtagtctgtcacaagccgcggagaacgaactataagacaagtcagtcagaagtactaattctagtgaaattacataaactcctgttgggtgaaagtacaaaattatctatcattgatgttatgtgtttcggtcagcgtctatactgtccagactagcaactacttccatgatagttggcctcatcaaaggattatagttgacacacttgcaggcagtttcaagcacctttagcatttgctcatcataccccatgcctcgaactgttggatccaggacctcgatctgtttttccactg

SEQ ID NO: 422209 - DNA, 141 bp, Oryza sativa nipponbare
ctaaataccctaacacaccttcatatacacaacatctacctcatcatacaacaaaatataaaatcgagcacctaaaaataccaaacccgaatcccaaaaaccctaattcccactcctctcattcccttttcccgtactact

SEQ ID NO: 422210 - DNA, 511 bp, Oryza sativa nipponbare
  unsure (1)..(511): unsure at all n locations
acccgtacgtaaccttgaatcctctaaaccgcccgcccttttttttttttttttttttttttttttntggtttttgtttaatttaaaaaaaatcattttccatntaatannnanattaatttaaaaaaaatttataaattattttatttttaaaatttaggggtttttttttttttttattattangttaaaaaaaaacccccccaacttacccaaaaacccccccccccccaaaaatttttaaaaccccccttcttcacgatcccaacaaaaacccctcaaaaaaaataacaccaaaatccctcacttaaaaaaccccccccccaacctttacaaccccccccaaactttcagccgccgtctccctttccaatttttttaaaccccccctttttctctttttcccaactttaacccccaccaaaaaaccccccncccctgacccccttgctttgaataaaatttttataaaaaaaacccccccccaaaaccaaaaaacaataaaaatttt

SEQ ID NO: 422211 - DNA, 468 bp, Oryza sativa nipponbare
gttctgtttttataaagcacgaagggggggcgccatcgacagcactacttatatatgctcggcgaaaatatcgataggactctgatttctatctgtgatatataggtagcgatcgatctcgtgatctcttctcaccggatatatttaatttcgacctccaatttgatcgagatgttaccacacacagggcgtctgacaaatgccaaacagccagaaagccctatcaagtattttgcctatccctgcacaattgaacaacaaaccagggttaattagactgccacaggagagatgacctatatatcgacaaaaccgagaacaaggtaatttaaactgcaaatcatctaaagaagaaattaaggtacaaagggaggagatggaatgtgcatttgctcaagtcactagtatgatcctagctgctgtaccagcatgttgaatggggtgttgtcactttcgtttgattggttg

SEQ ID NO: 422212 - DNA, 453 bp, Oryza sativa nipponbare
tttacagtttcacaggggccttgtgtctcacaaaagggacatgcttcgtatttatcagggaaagtgtctgaacttagatcgatagacgaagcttgtgctcaacatatacagctgcttcctttcgatcaactatttttttatgctccaaactacttgtacaaaggggcaacttccctcaatttgatatccacaacacagttcatagcaactatgttttaaccatctgatgacactcaagttttatccatttcagaatgcaagccgaaatgaagtagatgactaacttgggaacctcggaagtatgcactgatgcccaaattaccagtctaactatgttcagaggttataccaccatatccctgtcttctttcacagttcaagctgtgtgagatgttgggaccgtgggatgtactttaaatcttcacattgctgttttgcgccaatgaaatgtta

SEQ ID NO: 422213 - DNA, 175 bp, Oryza sativa nipponbare
ataaaaaactaggtgttgttttcatttaaaatactacttatatattctctataaaatatttattttacttttatttttatctgaaaaaacacccagctataaaacttattattttttcttatccccatattccatccccacccccaattttaccgacatcttaccacacacttta

SEQ ID NO: 422214 - DNA, 367 bp, Oryza sativa nipponbare
aataacaataattcccaccctctctcctctacataccttttttacaccgacacctaccccccccaaatttttaaaaaacctccaatccccacctttatcccacaacccccccccccccccaataacaaaaacactctttacaaaattcccttaccattcctaaaaaaaactcaaaaaaatccccccacccaatacctacacataacctccccctcaaaccttcgggccaaaccccccaaaaccacatcacctccccttaacaccttatagccctaaaacccacccccccccccataacccatttaccactcctaccaaatttccatacccaacccaaccacccaaacttccactttttaaaaccacc

SEQ ID NO: 422215 - DNA, 299 bp, Oryza sativa nipponbare
  unsure (1)..(299): unsure at all n locations
tttttctctttttcttcgggtttgttttaatatataacttgattttttttttattttttatntcatatcctttataaaattactttcaataatatatactttaaaacacattttaacataaaaaaaaaattccttttctcataccacaacaaaataattttttacctnatatataaaaacataaacaaaaatttacctctttaaaacttaaaaaaaccttacatctntnaccatttttaaaaaatctnctcctaactacaaaaaaaaatccaataaattttcattaaaaaccctaaaaa

SEQ ID NO: 422216 - DNA, 149 bp, Oryza sativa nipponbare
  unsure (1)..(149): unsure at all n locations
ctattataatatatatttaacaaccttaaaaattatctcccaactccaccatacatttacacaaacatttaacacatacttccaacctattcaaactccacccttattcttcccccataatattaaaattaacctnaaaccattacaac

SEQ ID NO: 422217 - DNA, 416 bp, Oryza sativa nipponbare
gggagcttgtaaattatataacaactttattaattctttttgtgtttacaaagtgcaccaacagcactccttgcaaaaatttcgactaaactcgaaaccctaactcaaaactcaactcaattgctctcaaaagcgatactgggaagcctcacgctccccctctatttatacccgaggtaggcagcctaaagccacgaaccaaactcatactaggagtcctaaacaccttaggaaaccctctagtacaagaaacaaactttacataaccaatcataccaaatttggactccttccaaattcgactcagcatcccatacgcacacaatacctccatcgtatgccatatggaatctccatcaaccacatgcatcaactctagcctaagtatcccgcatgatctctgaccaccacggacg

SEQ ID NO: 422218 - DNA, 448 bp, Oryza sativa nipponbare
gattgatcaaacaaatggtgaggtgtgctatattgaaggatgcatctataaacatgcacgttctcattatttaatgcataaatgaacatcaggaatcacattcacaaaatcatcttgtctcacttacaatggccatatctacaatcattttagcatggatactttctacaacccaaaattgtttatcccaattcttacaattgtcctaaccatttttatccatttttcaaactgaccacacattgccatggtgagtctaaacaaatgtaacggcatattaattggataacaaatttcaaatttactaattagcaaaaattaaaaactccatatcatcatctatttcttgttcattgactcttaggctcaagaacaacaaatatgttttatgaaactatctcactaaacatgctacattagttgtacacctctaaacgtatctatacca

SEQ ID NO: 422219 - DNA, 300 bp, Oryza sativa nipponbare
  unsure (1)..(300): unsure at all n locations
gatnnaaaaaattatggggtgggggttttttataaaaattacaccctaaaatccacaatcaaatatacaattaaattcaacaaaaatctaaattaaaataaagaacttattaccaaaaataataataaatagatgcataatctttaaaaataatatttttaacatattaaaagaggaaacaaaattttaataaaaaaaattatccacatttaaattaaaataaaacaaatgtgacggtatataaattggaaacaaataacaaacatcatcattagcaaaaacttaaaacacataaatata

SEQ ID NO: 422220 - DNA, 617 bp, Oryza sativa nipponbare
gtcgaccacgcgtccggcgcggcggcggaggaggagaaggtgaaggtggcggcgccgttcaggctggcggagctggggctccgggtgtgcgcggtgccgctcgccgtggcgtctgtgtgggagatggccaccaacaagcaggtggacgagacctacggtgaggtcaggttctccgacctttacggcttcaggtatttggtctggatcaacgccatcacgtgtgcctactcggtgaccttcatactgtcttcaatctgtatgtacattatttgcttagattgtgctatttttcttcttgtacaggcgtttgcttacctgttgttgaccttgtttttatttttattaattattatacttcatttttaatattattttatttattagttatattaattttttttttttttatcttatgtaattattattatctattttatatttttattatatttttcattagtatctttattacttttttttctaattgaattatattttgttttatttactactatttatctgcttattactttattttatatatttattattatgtaatattatttattaattattattttgtataattttttttttgttttcttattatattattt

SEQ ID NO: 422221 - DNA, 451 bp, Oryza sativa nipponbare
ccggtcgaccacgcgtccggcggcggctgcggaggaggagaaggtgaaggtggcggtgccgctcaggctggcggagctgtgtgctccggtgtatgcgccggtgttcgtttcgtcgtgttctttatgtagtgccataatttgtttaattaacattgtcagctattgacgatgtcctatcgttttagtatcttgttagttttgattttttatggactatttttattttgtatttttctattttctttttttatttttatgattttattttatattttatttattattattttttattatttttttgtttatttttttttgttttttttttttttttttttatttttttttaatttttttttttttcttttttttttttttttttattttttttttttttttttattttttttttattttttttttatatttttttttttattttatttttttt

SEQ ID NO: 422222 - DNA, 54 bp, Oryza sativa nipponbare
gcgtccgcgtcgcgctccgcggctcgtaatctttcgcggtgtgccggcggcgga

SEQ ID NO: 422223 - DNA, 58 bp, Oryza sativa nipponbare
cacgcgtccgctcacacgtgcgactactcgtatgatcaaggagctattcatttctttc

SEQ ID NO: 422224 - DNA, 141 bp, Oryza sativa nipponbare
ggtcgacccacgcgtccgcctaattaaccatttctcgctcatcacaacaccacctcacctcactccccaactaaaaaacaatggctcactaccaggaggtggactactgctcggaggaggtgaggtcggtgacccccaccg

SEQ ID NO: 422225 - DNA, 283 bp, Oryza sativa nipponbare
cgcgtccgcccacgcgtccgcacagtttacatgacattcttctactcttgtagactatctatctgcgattctctacgtacgagggttcagaggatctggagcaagatctaaaactgctgctttccccgttaagagtaggcgcggaggcgctctcgtgggcggcaagaagctggagccagcaagattggcttggcgacttccccctccacgacggcggaccaagaccgtgttctacaggctcgcgtgaagcacgagtcgcagtcgtctgacgccgaggcagaca

SEQ ID NO: 422226 - DNA, 344 bp, Oryza sativa nipponbare
ccacgcgtccgcccacgcgtccgcccacgcgtccgcccacgcgtccgcccacgcgtccgcccacgcgtccgtggaagttgggctgatttgtatttgtgatgagttttattttacatgtccatctggaagttgggctgatttacttctttaaggtgcatgttagaacacgtgtgcaaaatcaaagctaagccatctactagtaaaatcaacgtaaggaggatgcgacctcacaagtgagcaagatgagaggtaaggtgaaaagaagggaaataataaattctgggaaggcagcctccaaggcccaaacaggcttccaagagggaggcatgttcttctgttcttcc

SEQ ID NO: 422227 - DNA, 342 bp, Oryza sativa nipponbare
gtcgcggacgctggaaccatgagagacagcttagtgagccatacatatactcctgtccatgatgatagcttcggcatcgagcgtcggtacgcttacagacacgtaagtgcaccaccgatatgacctgcaaagaccgactcgacatcatcagctttggcaacagtagctatgcacaccagatcaggtacgtgcatgatgctccactcgaagacaagaacatgtactcgactcaatcatatatgacactggtaaccgctgaggaccagcgctagcaaatcgtgctacaacttgcgctcaagtggacgctctaattaccaagtaatcggatgaacatgaaacacc

SEQ ID NO: 422228 - DNA, 419 bp, Oryza sativa nipponbare
ccacgcgtccgcccacgcgtccgcaattctcttctcctctccacccctacccaccggctcacctcctctcctccctcccaatccgatcggaggaggggagcaacggcagtgcggcgctccccctctctccctccccactggaggagggggagcgacggtgacagcagcgatgcagacatgggggacgcggcggcggcgtggacggcgacgtctgcatggatgggccgacgacggcggtgaggcggctccccctctctcccttcccgctcctagatctggctggaggagggggagcgacgacgacgcggatggcgacgacagcatggatggtgcgacagcggttgcccggacggcgacggcggagcggacgctggtcccgtcccctgcctgtcctagatccggcccctactaggtgaggg

SEQ ID NO: 422229 - DNA, 237 bp, Oryza sativa nipponbare
  unsure (1)..(237): unsure at all n locations
cgaccacgcgtccgagacgctgacatcagtcgcaactccacatcaccccgncacaaggaatgaccacatctcctgagcagccaagcacgacggaggaggggagcaacgacagtgccgagctccccctatctcacctaccactggaggagggacagcgacggagacagcagcgatgcaaacatgggcgacgcagcggcggcgtggacggcgacgcctgcatggatggcccgacgacgg

SEQ ID NO: 422230 - DNA, 125 bp, Oryza sativa nipponbare
  unsure (1)..(125): unsure at all n locations
ccacgcgtncgnccacgcgttcgaccacgcgttcgccacgcgttcgtccacgcgtacggcacaggcaatggcgtccatgaccgggctgtcgcagggcgtgcagctgccgggcggcccaagcgcgc

SEQ ID NO: 422231 - DNA, 211 bp, Oryza sativa nipponbare
tacgtccggattcccggtcgacccacgcgtccgggaagacataccagatgtgacttacaatgactacgctggatgcatggagctgattgataagatacgtatggtggatgtgcttcctatacttgatctagacatgctcagcaatcttattgtcgatatttttaatggagtactgactctttgacgtctacttactggtgctacacttttt

SEQ ID NO: 422232 - DNA, 345 bp, Oryza sativa nipponbare
attccggtcgacccacgcgtccgcaaccatgtcggtcgccggcgacggccaacctgaagctaaaatcagactcaaggtgaagaagacaaagaagaacaagaaggctgccatgaaggtgtagtgcacacaaacatgcatcaatataatgcatgctagtatgttattgcccccctcatgatgataatagatagcatcatcagtcaaagatcacactaaagtgctaattataatcaaagagaagattaattctccatcagaaggggggggcttacatatagtatgtactcatcatgttctgaatctgtgagccattcaattgaaagataattattccattgcataaaa

SEQ ID NO: 422233 - DNA, 397 bp, Oryza sativa nipponbare
  unsure (1)..(397): unsure at all n locations
tggtgggcngggggattatgacgacgatgatgagggttacaacccacctcccaggagggctgtgaaagctgatgaggatgatgaggccttattcataaagcgtaatccagtggatgacaaacaagctgatgggaggtctcccaaaaaaccaaagatggaacccagatttatctgctcaaagattgtcgctgcggctagtgtggtaggcatacgctcgaatttggcagataaacagggtccccatccaccttcctcaagcacgaaaacttttgaaggcaatggtgatgtacgggaggaaagcccaggttctcataattatcacatgtcccagtaagcttggttttcactcatcaaaatggtgatgactgttccattgatgctgggtacttgtctttcg

SEQ ID NO: 422234 - DNA, 191 bp, Oryza sativa nipponbare
cgcgtccgcgcacacgttacaaacgcacacataacacgcagaaatgctgatcatacaggcagccaagccaggcacactggccacaccccaccatggtactctggtgccggacgcttgccgcctaggtacggccggaaggcgtagctggacgcgcgcatcaccatgcgcaagtccgcggcgaagtccaagcc

SEQ ID NO: 422235 - DNA, 363 bp, Oryza sativa nipponbare
cgtggcgtcgtgctcgctgttcggagacccgctcaggcggttcctggtgcgcctcgtgagctcctaccggtacggcggcggtggcgtcgacagcgagctggcagatcgccgaggcggcggagctgcacgacgcggtggtgggcagggtgcaagcgctgcacggcgacgacgtctttcgcatcgtcggcacgaggagcacggcacagctcgcgacgacgctggagcggtacaggcaggagcacggtacgggcatgcacgaggatctcgactgccgtcgcggtgacctagatcgaggggtgctcaaggccaccctcttgagcctgagctaaaggagcaagcattcagatgaggggatccggacat

SEQ ID NO: 422236 - DNA, 279 bp, Oryza sativa nipponbare
cgcgtccgcccgcgcgtccggtacgtgcgtatgcgtatatgtgtgtacgtatgtatgtacgcaactctgtacgatcgatggtgcgtgtgatcgagaggggtatgtatgtacgtacgtatatacgatgtattattatgcatgggtgtagggtgtgggtgtaacatgtaaattcgtgctccaactgacttgcacgcatggtcgcatggatcgatttgcttacaaatagagaagacgctggaactgttcatgcagtatcacaattaagggcatctaaaaggt

SEQ ID NO: 422237 - DNA, 372 bp, Oryza sativa nipponbare
ccacgcgtccgccataagaaatacgtacatcactagacagtatccatgaagagctgagtgaaatctggtcttgaagaaagaggatgtgcacacttgatgcgctcaagggaggatcatgcaaagagcgttgatgttgcagatcttggagtaggcttacagctacaatcgccagacattcctaaagataaacacgctgattctactttagcagacacgctgaagaactattttgcaagctgcgagctttcgatggcatgttcctacattgccatgtcagatgatgacgaattgccagaagcaatgctatcttggtcttgctgagaattgcaacaatgatattaggagattatcatatctcctacacaggcacct

SEQ ID NO: 422238 - DNA, 59 bp, Oryza sativa nipponbare
gcgtccggcggcttgttttaaagtgtaactgtgtaagcgaattgatgttgaactaaata

SEQ ID NO: 422239 - DNA, 96 bp, Oryza sativa nipponbare
  unsure (1)..(96): unsure at all n locations
cgtccgngatttagccgccgtcgccgccgccnccgttcacccgcgcattcgacgagctccagcccgtacacctgaccgggtcgcgccgtcggccga

SEQ ID NO: 422240 - DNA, 99 bp, Oryza sativa nipponbare
ccggtcgacccacgcgtccggcggcagcagaagcggagcatagaataatacggtgcaggtgctggtgcagcggcctccgccaccgccgacctcgttctc

SEQ ID NO: 422241 - DNA, 161 bp, Oryza sativa nipponbare
  unsure (1)..(161): unsure at all n locations
cctaaactcctatcctctacacccccctncctttttttttttctaacaaataatcataatggatggactctttataaaaaaatctacctccacccttcctacccacttctgtttacaaacacctaccataatcaactacattcctaaacaacaaaactttc

SEQ ID NO: 422242 - DNA, 206 bp, Oryza sativa nipponbare
  unsure (1)..(206): unsure at all n locations
aggggtgtgtgtttttttttttggggtttttttataattttttatngggcccgcttttagaaaacttgaataaatttttaaatgggtgacgcccaacataaagggcgtttttacaggttggggttctaaaacatttaacataccttacaaggttttttgcttggtttcctttttaaaagttaccacctcaaaaacatccttttttt

SEQ ID NO: 422243 - DNA, 484 bp, Oryza sativa nipponbare
ttaactcaaaagtgggagagctttataagccagcttgaagcataagttgaggctttttaagagcccagtacactgaatgacaagaatgctataggttattactgctactgctacatcatttgcaaaggtgcaaaacataccatggtaaattaaaacggatcacagcctcacatacattatgacattattaatacatataagagccaggggccaagaccttcctctgtgggagggttatagccctagaaacaagtcgtgcgcacgcatgagttcgtcaaataagcattccatctcgctctgatgtagcttttttttccagactacccaaaatctctgcctgagcttcagtgcactcagccatcctgcgattctgtggagcagacataggtcagaacatggcttatgaacagggatttgtggatgatgcgtgacaggtgccactaccaaattgaaagcatacaggactaacatatgcatgcataat

SEQ ID NO: 422244 - DNA, 337 bp, Oryza sativa nipponbare
tttataaagacataaaaacggggctttcatatattcaactcgcatatacctcaccaaactgcatattgcaacatcatattccactcttacatatactattacagagttcaagtgatacatatgcataaacaaaccatgccattaagaaacaaagaccaatctcaatcttataacacacagaacaagctctgagacactatataatcacacctgaacaatttaacactgctatcactcacgaaccctgttttttttgcagcactatacacttatcaatatggctcaaatgctatgcaccacataagctgcacctgtctaacgctgggaagccatgcat

SEQ ID NO: 422245 - DNA, 79 bp, Oryza sativa nipponbare
tacccccctttttttttttttttaatttcaaaatacctaacacaaggttttaatacactaaacaccctcattctacatt

SEQ ID NO: 422246 - DNA, 259 bp, Oryza sativa nipponbare
  unsure (1)..(259): unsure at all n locations
taaatccatccctaacgcgtctggtatatatataaaaaccaccctcccatatatttcatttacatatnacttcacccaacatcatatatccttatcaacacccactcttacatcaagttacatatacatcatttcaaacaaaaacaaaatcaaatctcggccttcaaaataaaaatactatcaacaaacttataacacaccaaacaacaattaaaacatcattccatcataaatcaacacttaaacaaccttatatata

SEQ ID NO: 422247 - DNA, 58 bp, Oryza sativa nipponbare
ctaagactcctcataccatctacaccccctctttttttttttttttttactaaaacaa

SEQ ID NO: 422248 - DNA, 64 bp, Oryza sativa nipponbare
  unsure (1)..(64): unsure at all n locations
caccctaacctaagctcctatccatcacaccncccttcctttttttttttaaacaaaaacaaaa

SEQ ID NO: 422249 - DNA, 476 bp, Oryza sativa nipponbare
tttttctaattggaagtggggcggttgtactatattaataccatgatggatctttaattacaggtagtgggcacaagaatttctgtatacaagcactgcatttttttacatgaggaataaataagggattattgcggaaactatctaactagtaaaatatttatgtggaaatttctcgagctcaaaggcaaagccttaattttcccaggcaaggagatcactgacggttttctgtgatctgtctatctatataccaaatgataaagagtggtacaacgtatgaactgtcgattggccttgaagcaagtgaacaaagtaaaagaaactaataattagtcatacgcagcaagaacaagatcgtaccacacaattggttaaccgattcttacgtagctactattggctattagccgtggtgcgaagggttttaataagaaactgaaaaacgccaacatttgaattcagcattgatgtga

SEQ ID NO: 422250 - DNA, 100 bp, Oryza sativa nipponbare
  unsure (1)..(100): unsure at all n locations
tctatcctctaaaacccccncccttttttttttttttttntccacaaacccgaactgtttttataaatataaattcttacccccaacatatcaacattaa

SEQ ID NO: 422251 - DNA, 215 bp, Oryza sativa nipponbare
  unsure (1)..(215): unsure at all n locations
taatctaatacaaaatcaggtcagttttttttataaataaaaacaccacccacaaacatanaacacacaaaaaaaaaaaccctccaagattccattactcccaaccacttaaaaacccagatttaatttttactaaaaatcacccacacacacacccccaatacccccccctttttttaaaaaataaaatgatcaacacctcccatatattaaaa

SEQ ID NO: 422252 - DNA, 374 bp, Oryza sativa nipponbare
aataaagactaacattagtgtggggttctaccaaactataatcaacatactttctaacacaactaaaacatccttcttttactcttgcccataaacatattcctataaactacacttttaacacactgaattgatgtcatgaagaacagaagcatgacctactgacttgtacactccccaaaatatacaagctgacaagctctttgaacctatctcatacacattatcccatagacacattgactgacacgacacatatccatctcacccctatcaagaccttgtatgctatcatcatatagtctacttcgagagaacgaagacaccatgctacacgccacctgaggatttatcttggctagctagaaaacaac

SEQ ID NO: 422253 - DNA, 123 bp, Oryza sativa nipponbare
  unsure (1)..(123): unsure at all n locations
aagcttctatcctctagacccccctccctttttttttttttttncaattnaatcctgtacagcttatataaaaaaaaaaccaccccccccctatcaacatcataaacagcctaaattaatcca

SEQ ID NO: 422254 - DNA, 257 bp, Oryza sativa nipponbare
ggagggcacgactcaccatcaatgaggcagtgaccaatcttgcattcaaatatgttaagatgataatatcgataatttacatgtgtacattctaaacagaacctaaatcggcatgttttgccaatacaccgcacatgttaatgggactttttcttcattcttaggaagctaaccaatgtgattctggagggagcacctgtgcctgatctcttcttgattgctgtcgttttacacagctttccatctcttacggtagt

SEQ ID NO: 422255 - DNA, 503 bp, Oryza sativa nipponbare
gagcaggaacgaaggtatgattcattaatccgttctcacagaatgtacgcacacggtatacatgtacaggtcaagcgaagcaagggattttgctacacaacacatcacatcagactatcagagctcttccagcctcttggcacagtccacgctgctgtccagcgtcttctacactccatacctgtacttgaaccctaaatccacaagcttgttggtgtcagcttgcactctcaccccctccccaatgaccctgcgaaagacgaacacaaaaccaatcttacaaattcacaacacaaattagatcaaagcctgtcaatgaaagttgatctgatttcaaaaaaaaaaaaaaaaaagaatcttacaaattcagttactacatactgtattcaacaacaacttaactaatcaagataaaatacctaatggaaactaccctaatatataccttaaaggaagggggttgcatatcaagagtttggattggtgacacatactctttgagc

SEQ ID NO: 422256 - DNA, 269 bp, Oryza sativa nipponbare
caccaaaaaacctatatatattttaacccccgctaattaaaaataaaaggcctatataaacccccccccaaaatttcttaatcccaaatttacacaccccaaatcattttacaattctccaaattccaaaaatatttcccttttaattaatccctggtattaaaaacataaaccccccatttcctaggtgtccccccaatactttattttccttccacccctcttcaattcaaccaaatttttttccaacaaattcccccaattaaatt

SEQ ID NO: 422257 - DNA, 395 bp, Oryza sativa nipponbare
gattgacaatatatgttcattgatatcggtagtgacaatatacaatgatcgaattctacttctgtatttgaaccttaaatccaaaagaaatttctctatttcctgtataaggatttgagcataatctctaggccttgtagttgtcagtggctggattcaagaacaaaatcgtgattgagacctacaaaactctcaaacagaatgtactttttcagagacgatatataacttccacaagggtaagtaggtaggtactgctctcaagaaccctctgattgtaaaactgcaagggttctcactgttgagatccagaatcaggttcttcttcatcaagcagatgagactgaaatccgcaagtgctcaggtgatgtgaaagcttttcgcccagttgcttc

SEQ ID NO: 422258 - DNA, 268 bp, Oryza sativa nipponbare
taagcggcgcctttttttttttttttttttttttttttttttttttgtttttttttttttttttttttttttttttttttttttttttttttttttttttttttttttttttttttttttttttttttcttttttttttttttttaggggggaggagagataatattttttataggatttttgaaagatatgaatttttttttaattgggttgatttttttaggttgattgacaagtgttttttttgagggggggttagttttttttt

SEQ ID NO: 422259 - DNA, 401 bp, Oryza sativa nipponbare
ggggttggtttttttttttttttttttttttttttttaaaaaaaaacaaaagctgactgggaatttatgaatttagggttgatttaaaaaaaattcaggtttttgatagttgaataggtgaaatcctatatacatgacctgatagttaaatagttgggattttgtaaaaataacctaataggatggattttttgggcattccacaacaacggattttcaagaaaatttgtgttcactcatttgggttttgaagaaaaaatttgcataaaaaaatatatccatagggttggagatattctttttgtaaaaagaatatttaaatttgtttggactgggccttgaaaaccttaaatttttttaaaatgttagggaagtaattttgcaaatatttttttaagggg

SEQ ID NO: 422260 - DNA, 470 bp, Oryza sativa nipponbare
ttttaagcgcatgaacaaaaggaaccggaattagctggcagattcatgactcattacagcttggcctcataaaattcctcttcatacccaaaaaattaattggtagtgtcctaataaacatatgtacagttgacagttccatttgaatgtagttcattgttggatcatcatcaattgatccactactcaatactgactaatgctgctgcttatcatgaccactgctgctcattggaaagtcacctgcctgtcaacactgtgtgaaactgtgaatgtgtgattctcttcatcttctccagtggctttggaccctctaagaaacaaactgccacgcaagttgtatgacattgtcatcgatgtatggtcgcaaatcccacatttgacagtagccctctagctctgacgatgctgttttaatgcataatgccttaacaatcttctcctgcatcggataatcgagttttaacata

SEQ ID NO: 422261 - DNA, 429 bp, Oryza sativa nipponbare
gttgtggaactgtggaccgatcgataattagattgctgatagcatacttaggtaccgaatcaaatatcgtttcaaattcctacggtgaaatcaaacaccacttctattcaaacccatcgaactaaaattgctgcacacatgcatggactgatcctctgtccgtgaccaacacaaaattcaggccatttaggatatcaggatactgttttccccccttttgagtttagcatatcgcattgttgaaatgagatctacttcgtatatcagtttcacccaactcacctcgtcgtctggtaccggtggtggtggccggcggcgtgacgtttacggccgccggagatggcgccggcggcgctcccagtgatgccgccgggagctgcagcagcgagaccccgtcgaagaaaggatatatctcgtacctgtagttgc

SEQ ID NO: 422262 - DNA, 194 bp, Oryza sativa nipponbare
ttaataaaacaacaacacgggggctgggtttaattgcatgcagaattccctcacccaccaccatatacccgtaatcaataccacttttaccctcaagcagcaaaaagaccaggtgaacaaaaaccaaaacacaaccccggccgttaaatccaaaaaccattaaccaacctggcaccccccaaaccaggggggaa

SEQ ID NO: 422263 - DNA, 61 bp, Oryza sativa nipponbare
aagcaatccaggggatggctaataaagcaaaataaaaaatccgagcaaacaaaatacccaa

SEQ ID NO: 422264 - DNA, 431 bp, Oryza sativa nipponbare
ttatcaatcacataaaccactggtccggataagcatagagattcgttcgttcaagatgctataggaacaactcatttagctacatatacaccagattttgattgctttgccaccttcaagactttgagcaagaacaacaactaataaaagaagatgacaaaagaagaagctttttttatatatatttgtaatttttgtaatataccttcagtcgttgctatgatcgagcatcaaaacaagaagagaaagccaaaaccagaggaaaataaattgaaaaagagaagcgaaggcgaagaagaagatatgaaactacgcatacagttgatgcaggggatgatcgatgtggtgttggttggttgctgctgtctgaactctgaactctgaactctgaaagagaagaagagatcgatcgatcgatgggagtagctagt

SEQ ID NO: 422265 - DNA, 258 bp, Oryza sativa nipponbare
aattgacaacacaatatctcagtgatgaggttcataacgtgcacaacaccacacactacatgatcagatctcactatatctacaatactcaaccatacaacaacgaagtccataggaacacatacatccatccacaacacaccactgcatatactgggccccgtactcaaattgacactgaccaagatagacgcgcacgcccaggcacctatctagactagctcaacgcgatgcgtcgccatgttatcacaggggccc

SEQ ID NO: 422266 - DNA, 437 bp, Oryza sativa nipponbare
ttttagagaaaaatcacattggattggggttattatttcagcactgaaccatagaaattaactacatgagttatcttacaaaagtcacaatgcattaataataatccccctaattttaaccgatggaatttggaattccacccaccgaaaacccgcatcagcagttaaaaatagtgatgcgggtttccaccacggaatcagaaagcgacggcgaagaagacgacgacatgaacaccatgcgccaccattagcatgacggcgagattatgacatgttgcccttttcttaaatgttgtcttaagacgggcaaacgccattgccgttgccgcgttggcgcccattgggagaggggtttctggaactttctagaaggttggcacgacgccgtaggccgcggtggcagcggtggtgctgtccatgtagaaccctacgccgtc

SEQ ID NO: 422267 - DNA, 105 bp, Oryza sativa nipponbare
  unsure (1)..(105): unsure at all n locations
aggggggggggggatttttacagattnattaagttttttgatttttttaagtattttttttgtaagggttggaggtttattttttttggggtggagtgggggttt

SEQ ID NO: 422268 - DNA, 324 bp, Oryza sativa nipponbare
  unsure (1)..(324): unsure at all n locations
nnnnnnnnnnnnnnnnnnnnnnnnnnnnngggnnggggtttttttttttttttttttttttttttttattgggttgacccaaaaattgggattctaaaaaaggaacctttgtaaaaaacgttgaagaaaaattgatttgaacaggaaatttcaaaacggaaatttaaggggaaaaaatttttcttaaaaaaaagtttataaaaagttggggtaaaaaaagaaaaaacttttatatgaaaaaaatatttattcgttaaaaaaatcaaaaaaaaaaaaagccgaaaaaataaaatgaaaaaacttgggtgccaaaaaagggaacta

SEQ ID NO: 422269 - DNA, 448 bp, Oryza sativa nipponbare
  unsure (1)..(448): unsure at all n locations
aaccaatcactttggtntgggtgttttttttatattttattatttttttattttttactttattttttttttgaaaaaaaaaagcggcaataaaaaaaattttttcgaaaggaaaaaaattttacttggaaaaaaaaggtttaaatgggccccctttaaacataaaaaaattttatttttttgccaaaagcaaaaaaaaaaccgatcaagtttcaatttttttgacttccccaaaaaccttttaggtaaaaaaaattttttagggtcttcaaataaaaacaaccccaattcaaaacttttttaaacttgggggatttcgacctcccccccaaaaaattcctgtttaaagtccttggggtctttgcccccaaaggggaaaccaaactttaccaaagtgccaaaaattttttttaaggggccggccatttctttggcaatggacctgggc

SEQ ID NO: 422270 - DNA, 387 bp, Oryza sativa nipponbare
tttttttttttacacaagtgggggtgtatatttggatgcgggtgacgaaccaccaaagcatgagctgaattacaagaggctctagtgtactttattgtatattagaatagggagagagtaaggtagaagaaatcggagaaatcccggagttgtcggtaatctcctcctacttttgtatcttgttaattactctgctttaatagaaatatcattatgagtaattaagatttgcttagtgagaattacttcttggttagtttctaattagcatacatgatcattattcactatagtctatttgtttatagtgattgctttagtgtttgatcgccagtagttataagccaggtacaatagcagactataagccagctataaacatttttt

SEQ ID NO: 422271 - DNA, 247 bp, Oryza sativa nipponbare
  unsure (1)..(247): unsure at all n locations
cnnnngcaacccccccctttccccattttttttttttccctttaaattacccgggtccctcacaccacaaaaattttttcttttttcccccctttttcccccaaaccccccttttttttttttttttttaccccccggtttttttttaatattttttggcccccccccaacccccccttttttggggggtttttttttgggcctaattaaggggggggtctccccggggttgaagtttccgtttttt

SEQ ID NO: 422272 - DNA, 342 bp, Oryza sativa nipponbare
cctctaccattttttttgtttgcttctttttcaaacattttattggctttccacacatttaaaaattttttcctgggtgggcttcctgtttatgtattcttaacaaagggggtttgttcttcttttttattcctatgggtgtgggttcgtgttttctcccaacaactttttttgttttttttaaaaactacccctcattgatattatgattctataaaatcctctagcgatattataatgtttttaaaacacttcctttattttttttttattaaacccgccggcttggttatcttttaattatccccagcacctttggctttttttaattttttaaaaggg

SEQ ID NO: 422273 - DNA, 58 bp, Oryza sativa nipponbare
ggacgcgtgggcggacgcgtgggcggacgcgtgggcggacgcgtgggcggacgcgtgg

SEQ ID NO: 422274 - DNA, 350 bp, Oryza sativa nipponbare
ttttaagcaaaagtttgacttggttgcatagtggcagccaatcaccatcatagagtaattcagcgagatagcaaccttatcatatcgagttgcatactgataagcatgtaaacagaaaacggaacatagcaaaaagaaaagtgtaagtccttcaccgggacttggtggcatagatgaaggagatggcagccaccatggtagtcgtagccgcatatagccaagcccaaatgccacccttcctcttcctatgtgcctcagccacttcgagattcagctgctcgatgtccttgattagaacatcgatcttctccctcttttccatcagtgccaccttcagcttcccaatctta

SEQ ID NO: 422275 - DNA, 355 bp, Oryza sativa nipponbare
taggaaaattggcgaaaaaatgaggctggaattatcagacagtaacaacagcatcggcaagagaagcaatctcatcagaaagctcctaacaagttttcttttcctttcctataacctgaccacccaagaacagttcccctcggtctgttggacaaatacttacgcatttttggcagaaaattagtagtagcgagtacactccttgcacatggttgcaggcttgtatcgtgttccaacccaaactgaactccaccaagatcccacggctcatccatggatcaacttcgagcacttggccttgatccagcggaaacccctgcggagggaggacttgaccttcccctccaccgagtac

SEQ ID NO: 422276 - DNA, 363 bp, Oryza sativa nipponbare
gaaacactgcttgaggggctgggggactatatcgtatcatagatgacaataacaacatgcaatggactacacctgttccaatgagaacgtcaattatggctacataacggtagaagaacatctaacactgtactggacggatatgagggcgtaatccactgttacagagccactggacactgagaacgacataactcgacgatgaccagagtctgacactgattgctaacgacaactgcgcactatggctcataccaaataatagctccagcaaccgcacgagtactgacataagcccatgacacgggaggcattgtaaaccaagtcgccaagacatagggcaagaacttaactgaagtcaac

SEQ ID NO: 422277 - DNA, 200 bp, Oryza sativa nipponbare
gcaaacccctaactccataagggctgggtattattgactagctattattaccattgggatccatatctctaatccgccaccttattgacgcatactagcgaaagacagcgtgcgtagcctccatcggcggccgagtcaattgagagttgagacaactgctacacacgatggaccttgccgacgacattgagagttttttg

SEQ ID NO: 422278 - DNA, 240 bp, Oryza sativa nipponbare
ttgccgaaatctcatgttggagttcataaaaacgttttaaagccacggttccataccaataaatactactactacgtttataactttcattaaaaaggtcatgacaaactgcaattgctattaattctctgcagaaatgtggcgtgagtaacagcaaactgctaggagtataagtaatctcctgcatcgcctaaatattacttactccacagaaaaaaaacagacggacggaatgcatgc

SEQ ID NO: 422279 - DNA, 63 bp, Oryza sativa nipponbare
ggtataaaatctaccagatttaagaatggatttactgtcgacagaagggtgccgttaccttat

SEQ ID NO: 422280 - DNA, 341 bp, Oryza sativa nipponbare
cccccgggatcaaatgtaccagatttaagaacggatttaccgaccacagaaggtagcagggacataattataattataatctaccgcatggtcatgacggcttcttctcgagggacacaagcagaactcctagagggttttgtgcaagctcgtcttgcaagctgccctccaagctccaccgacgctccagccgtgctcacgaactcatccatgagcccttcttttccatcgcatacggccggaccaaaatgctgaacaattatgggctcgaatgcggatctcagcatacttgctacccttgcctaggtgatcagcgcgctgtacgcaccactcgcgagttc

SEQ ID NO: 422281 - DNA, 410 bp, Oryza sativa nipponbare
ccacgcgtgcgcccacgcgtccgcccacacgttcgtgcacacgatcggacacatttccgagagagatagagtttatgtattggacaagaagagatgcggaagcattgggcataagagttggctattgcagtatcttatgcaagaggaggtcagtgaaaattatttgttaagtggaataccacaaaacctccataatatatcttgtgtacaaagattaggtttggagtacaatatgctaagcaaagcattgccacctaacattggtgatgccctctacaatctcgaagtacttgggtaacaatatgtttgaaggacaaattccagcttttttaggtaatgctttagggctacaaataataatgttcttaaacaatgcattcgttgggaaaattgcttctttgggaaagctt

SEQ ID NO: 422282 - DNA, 162 bp, Oryza sativa nipponbare
ctcagatactcgattcccgaaggtcgtcctcgtactcgtccatggcggcggcggcggcagcgaagacgacgacgaggcggcggcaggctaggggtgctggagcctggcgcgcacttcgtcttcttgcgcttaaactacccgtacccggcgaaaccaacccac

SEQ ID NO: 422283 - DNA, 470 bp, Oryza sativa nipponbare
  unsure (1)..(470): unsure at all n locations
ccacgcgtgcggcgagataatggtggggaggaagccgctgcgccggcggcggcacgacgcgccgccctcgccgccgttgttcggggccacgcctggggcgacctcccctcggtcctcctccgcctccgtggccgcggtcgcggaggagctggacggcctgctcctcacggcgccgcggccgtcggcgtcgtcgtcggagccgcggagcttcccctacgtggtgaagcagcggtgctgggagaaggcggagcgggtggccgggcgcgacccggagaggtggcgccgcgacgcgcttggcaacgtcgtnttccgcaagctcgtctgctgccccggatgattatgtcacgactacgaccacatcgtcccttacttcaagggtgagaagaagacattggagaactgttaagttttcgatgctactggaaaccgggctaaagggaacaaaacatagttatccaaatctgagctca

SEQ ID NO: 422284 - DNA, 361 bp, Oryza sativa nipponbare
ccacgcgtccgaaatgatgtggctgacagactggcattctcagaggtcctctccagtgacacaattttcttaattccaatgaatgatacataccagcttccgtggggtaaattcaacggatattctaaccttaaagaagtatttccaagattcctttcctaccattttaaaaaaatggaaggatctaggcgcacagtccaccaacctcacatattctttacacagaaagagatctacacacctctaggtatatattttgatacacatctgtgctttaaaacacacatgagtgaatacacaatttcttgtgtatctgttggtgtgggatgtgcaagaaatgcatgctattttggtatgtcta

SEQ ID NO: 422285 - DNA, 483 bp, Oryza sativa nipponbare
  unsure (1)..(483): unsure at all n locations
ccacgcgtccgttgatttcacctttttttatggtttaatactttaatcttgtatttatttcagttctaccttatgatagctgtgctgctatttggtggaccaccgatgatgtatttttggaagtaactttcagtttactgaaagtaacaatttctagcaaacaatttattctgcaagtctaaatcctgccaaatggatgtctgattcatgtctattctacttatttgcttaccccctttattacatggatatcatgtgtaatctcattgcgggtaacttaaattcctattcatgttctgccatcgctgtcttattctttctgaataatgctgagaaacattgcactgctcactattaagcatgtgcttacagtcaacttggatatgcactcacctatttcagaacattntcgaagaccaaaacttctcacagagtcaggtgcaattagtgagatagtcaagtctaaccttagtgaccgaatga

SEQ ID NO: 422286 - DNA, 297 bp, Oryza sativa nipponbare
accgtccgattccgggtcgaccacgcgtcgcggacgcgtgggcagggcgtggcaacttcgcagatcgcaagacgtagcccatcgaggtcaagttcaccggcggaacggcttcgacatctagacttcttcttcttcttcttcttctctcataatcgacctattaattacttgtgttttgggtggatggacatgtaattttaatcatctgtcaggctgctcttcagttattgatgatggtgtaatcgatcgatggggggatataatctcttcttataatattggaggatatggttggtg

SEQ ID NO: 422287 - DNA, 349 bp, Oryza sativa nipponbare
  unsure (1)..(349): unsure at all n locations
ccacgcgtgcgcgcacgcgtccgctcgatgcgagcagtctctatggccgcaacccatcgccgccatagacgtacggacggccggctacaacgacaagagagtaactgtaactgaagaagccggcgccaccattcccgccgccaatatgctcgccgccgccgcctccgtcaagctctccacggccgggaccgccacggcgcccaagatggcattattcaagcccctccacctccctcccctcttcgccgccgccgccgccgccgccgggccacgtnccctctccctctcggcgcgccccctgtaccggcagcaggacccgttattcctggcgtcgcgcgtcgcgtcaccg

SEQ ID NO: 422288 - DNA, 83 bp, Oryza sativa nipponbare
ccaggggcagcataatgggaccttatggagctggaacccgggactcaccgtgggctggacttcaactccgggaccgaccgcgt

SEQ ID NO: 422289 - DNA, 278 bp, Oryza sativa nipponbare
ccggtcgaccacgcgtgcggcggcagcagcagcagaagcagatcgatcgatcgatcgccatgagcgtggtgatcctggacgggtcgaccgtgcggggcttgcggggccgcgactacgccttcggccgcgagcgttgacactcgcttttaggcgctggacgccaacggcgacggcgtgctgtcccgcgccgagctccgtcgcgcgctcgagtttttgcggcttctcgacggggcctggttttgtatcgtctagttggctctacatctcagttttgggct

SEQ ID NO: 422290 - DNA, 376 bp, Oryza sativa nipponbare
ccacgcgtccggagtcggggacgggtcaggcggcggcggaggcggcggcgaagcggagcacgtcgaagcggcggtggctggcgctgggtgacccggacatggagcggaagcggcgggtggcgtcgtacaaggcctactccgggaaggaaggtaagggctcttcgaagagttaagggataggacgtactcactgctatgtggctgtattactctctcacacgacgcttttttttaagtaagtaagtaacgagaccaccacaatacatctgtacgtcggtattttttgctgtttttatattcttgttgtttttgttggtaatacctgagttcatcatttaaagttttgattattggtgtagtaggaaaaatggtgtaa

SEQ ID NO: 422291 - DNA, 270 bp, Oryza sativa nipponbare
cggccggattcccggtcgaccacgcgtgcgccacgcgtccgctcacgcgagccgtctagctacctcaccgtcgagtacctgggcgactacagccggaacaacgcgcagatcagtgcgtcgcatctagacggtccacgagaacctcaagctcgacgtgatccactaccggatggccatgctgcccgcgctcgagtgcgtctacccggagttcctcggccggaactgcgacaagttcggccaggccgacgacgctaaggcctgctcggagat

SEQ ID NO: 422292 - DNA, 178 bp, Oryza sativa nipponbare
gcgtgcgctgcagttcgaggtgaaggcgcaggtgccgctgctcgggagcaagctcgtcggcaaggtgtccgtgccgctggcagacctcgccgtcgccggttgatacggcgcggttttacaacctattcacttgaactaccatgtgtgcgcccaccacagtaaggtgaacggcaagctt

SEQ ID NO: 422293 - DNA, 51 bp, Oryza sativa nipponbare
  unsure (1)..(51): unsure at all n locations
tcccaaatcccgntcgacccacgcgtccgcgacatcatgtcctccggcggc

SEQ ID NO: 422294 - DNA, 397 bp, Oryza sativa nipponbare
ccacgcgtccgctctcgccgcacttccccttcctcctccggcgcggcggcggcgccgaaccacccagttgcggcgtcgagcggcgcggcggacgggcggcggcgtggagcagcgcagtggaagggtggcggcacgaacggcccgagcggcaacgccagaactggtcaacggggtggctcaagcgcctcccctcctcctcctcttctggcgccgcggatcgaggggcagcggcggcggccggcgggacggcccgagcggcggcggggtggtcgagcggcggctcacatgatcaatactccctccggccacctccctcggctccctcccctccccgtccccttcggcggcgctgggcacaggcctcaccctctcctctttccggcggacgacgggtgcg

SEQ ID NO: 422295 - DNA, 227 bp, Oryza sativa nipponbare
ccacgcgtgcggtagaggagtttgggcgagctcaagaacacggcgcaggcggaccagattgaaatggaggagaaagtgaaggcgaaagtggagcgattgaaggtgttgggtgccaagaaggctgatatggatgcgagggtggtgtttttggatgcatatctcaaagctgctgttgctaaaataggggaattggaggttgatgccgttgctaatatcgtatttttcta

SEQ ID NO: 422296 - DNA, 76 bp, Oryza sativa nipponbare
ggtgaagagagacattctcagcttatagtcacggtgacggtctgagctgaggctgagagatggcacaggcaatggc

SEQ ID NO: 422297 - DNA, 342 bp, Oryza sativa nipponbare
  unsure (1)..(342): unsure at all n locations
ccacgcgtgcgcccgcgcgtccgcccacgcgtccgcccacgcgtncggccgctgggaatttctcccacctcccctcccccacacgaagcgaagcgcaactcggcagcggaagccgcgcgcgacgacgatggccgccgccgccgccgactacgagtaccgcgcctacggggcccccgccgaccacgaccgcccctaccacgggccgcggagggtggccgtacggggaccgccgcatcgacgtcgtcgtcaagcccccgggcaccaccaccaccaccaccacgaggtcgcctccgccgccgctgccggtgaccaaggttgngggcggnggaggaggcatgggat

SEQ ID NO: 422298 - DNA, 397 bp, Oryza sativa nipponbare
  unsure (1)..(397): unsure at all n locations
ccacgcgtccgcggacgcgtgggcgcgagttggatgatcgtctctactgttcgctacggctcgtcccagggacgccgccccaagccgccggcaccggcgacgccatgttcgcggcggcagttgggcttccactccggccacgggaagccccgccgcacggggacgcgcggcccgcagcgagcctcgtgctcgagctcccgcttcgcgcccgggctgaccgcggagtcgtagcgtggcctgaacctgttgcgcgtcgccgccgncggcgcaacgacgacgacgactgcatcgtcagcaacggcagcgatggcgtcgtcgtatcccgttcccccttccggcgggtgccgncgncgncgtcggtgcatcggcgggccaccaacatctgtcgtcggcggag

SEQ ID NO: 422299 - DNA, 432 bp, Oryza sativa nipponbare
  unsure (1)..(432): unsure at all n locations
ccacgcgtccgcccacgcgtgcgctctaggcgaccttgaattcgcgtgcctgaaacgcgctcaacgtattctacacatctgactggtacaggacgggctgagtgggcacgcgcagaggggatacggctatctgccggaagtccagtctcggcagaggtgagagggancgagctacatacccccgtgatgatggtgatcactctcgcatacgcaacttgcgcaacgacatcgcaggcctgctaacatcatgacgagaaggaaatgactgccggtcttctttgcatagattgcatgttgagctgcttgggataggacagctgcatcggtatggtgctaactatgcacctctgcaagaacgtgctctacggcatggcatcaacgagatggatcacacgggcaactttcgtgctggcaagtgagcgccttctgcgc

SEQ ID NO: 422300 - DNA, 396 bp, Oryza sativa nipponbare
ccacgcgtccgcactaattaattaataattacctactgcatctgatctctgcatgcatgcatggattaattgagtaagctatcaaattacatattacctgcataattaataagtatagtttatcacctggctatgctatatacatataaatatatatagtgacatatgtagcatatatacatgagctctgacttgtgtcatggagatgtggaggcatgcatggagccttggattgagcatttaattgatgtataataatatttgtggaacatatatttggttgtgtcatgcatatatgcatgtggagttgtggtatttggctcgtagtggtttgggagatttattttgaaataaagagtgtgtgagatgtctgctatgaaatacaaagtttgatga

SEQ ID NO: 422301 - DNA, 301 bp, Oryza sativa nipponbare
ccacgcgtccgtttatattttaattactatatattttaattaaggagaataatataaggggttttattattatagatgtggatattttttttttttttatttatttttatattttattttttatttatttattttttatattaatattttaaattattttatattattttatattatttaatataatataatatttaatatttaatttgttttattataaaaattaaaattataaattttattataatattataatttaataaaatttatttaaataataataatcaattaatattttata

SEQ ID NO: 422302 - DNA, 192 bp, Oryza sativa nipponbare
ccacgcgttcgaccacgccttcggggaccccttgggttttgttgaatttccaacttccttttgaatgggggccttaaggcaatggaggtcctggccccttcaagaatgttgggcaccgggttaaatttagcgggttcttccggttacgcaaccggggaaccaacaacggaagcgcaaagagatcgttccttt

SEQ ID NO: 422303 - DNA, 207 bp, Oryza sativa nipponbare
ccacgcgtccgccaagccttccggtggctaccgaacctaatggacaacaattttttggaaggatggaggaataaattttaacttggaaggaccggttggggggatttttaccaaaaaaaaaaaaaaaaaaaaaaaaaaaaaaaaaaaaaaaaaaaaaaaaaaaaaaaaaaaaaaaaaaaaaaaaaaaaaaaagggggggcggtttaa

SEQ ID NO: 422304 - DNA, 161 bp, Oryza sativa nipponbare
ccacgcgtccgcccacgcgtccgcccacgcgtccgcccacgcgtccgcccacgcgtccgcccacgcgtgcgcccacgcgtccgcccacgcgtccgcccacgcgtccgaaaaaaaaaaaaaaaaaaaaaaaaaaaaaaaaaaaaaaaaaaaaaaaaggaaaa

SEQ ID NO: 422305 - DNA, 357 bp, Oryza sativa nipponbare
ctcagtaaaagaataacactcaacaccttatacaatttatatatattctagagactgaaacactacacagtaatatgtcttaacagacattaattctaaatctgagaattgaacacattctaattatatgtaactgaataactattcggtgcacctaccctctatatatatgaccgcgtatacacactcgcactatgttgtagacactcgtattgtgagactccattgttgcttatctgaactctaaaactttacataggataaccctgcaggccagtcttactaagttatcactaacttgcctgactaggctcacaccttgaatatgaattgtgccctagcagatgcaccaattta

SEQ ID NO: 422306 - DNA, 289 bp, Oryza sativa nipponbare
attattaatatatattatttttttttatttataatttttctggggggtttttttttattattttttttgacaaacaccaggtaatccccaaaattccatcccacccccttcaagctatcaaatttttcttaatagaggtcatataaaagtttgtctaaaaaaaagaaaaaattttttcctgggaaaaaatgtaatcccttaaaaattccacaaaatattcaaccctgaactataaattgaaaagcctgggttgccaaagaaaggatctaactaatattaattactttgc

SEQ ID NO: 422307 - DNA, 131 bp, Oryza sativa nipponbare
ttttatttaagactcccacctactacttttttcaatccctatcttttccccgaccttttttttattcaggcacctgctccacacacactaacttccatttcttctaccttcccccctccctcttctagatc

SEQ ID NO: 422308 - DNA, 193 bp, Oryza sativa nipponbare
acactaaaccgacacaactaacacttaaatttatttctacctgaacagaagggggtgcagatcatacacacgcccaatcactgaaaagagctaaccatgcttgcgcactagatctttacggcaagatgatagctacaccatcacaatagcatgcctacgcgactcatgttacaccacccatttacagcactac

SEQ ID NO: 422309 - DNA, 451 bp, Oryza sativa nipponbare
taagcggaatagatatagtactattaataagactatgtcttatcacttgcagtgggatttgttagaacgtgcatatattacagacaccaaacattgctgatactaattcatttatcatttggctagctattaggggtagtgagcccgtaacaggtaaaactaatatcgattggtctaatggcttgcgcaaaagaacatttctcttttctatgttggcactgcaaaatagattgaccaaagtattttagctttgcttcaatcagggagagaagtatgcgcgttgccatgccaggtgcaaaaggtcacttcgctctggggatatcacatgggaggctcaagtcattttggcagctctggtggcagcttgtctacgaacagtgtgtgcacaacagaaagcttgcgacgatcatgttcatcaggagatgagctacaaatggaagttgtttgagtc

SEQ ID NO: 422310 - DNA, 412 bp, Oryza sativa nipponbare
acaagcgcagcgttttttcccctcatgtgttaaactattgaatgttctagtacatctggctttggtacttaataaatgcattttcgattgatcgtagggataccaatatgtgctctcttattgatatgcagagttgttgcttttcgtgaattttcttaatggctacagatgacgttcattatttttagataatacagatgagatgacattcctatcacacaacatctgtatgcacttatttgcaaagaaactctgtcgttcgtaacatgcgcttcatgtcaggcattgggtaacagctggtgcttcttgagctgcttgccttcagcattaagcagtagatggcaagagggaggttgctaattggtttgttgagttgccgctgatacttgagccggctcagctttctgctcag

SEQ ID NO: 422311 - DNA, 331 bp, Oryza sativa nipponbare
gaaacatgtttaatttcttggtttacttaacacacgttcacaaaaaattaattttttttttcaggggaaatcgatggatccccctttttctttaacttgtttttaattttcatgtccaatcaaaaaaacacacccccccacacacatgcgtgcactgaatttttttgagaaacaaactcgattgatttgattttgattccctggggattaaaaaaaaacttaaataaaaatttcaacaatctttccacctttaaggagcttgttttctttttaaaaaattttttggcgcctttaaaccaccttttgttgccggccttccctttgaaaattt

SEQ ID NO: 422312 - DNA, 387 bp, Oryza sativa nipponbare
taagatatcccatatctatatattatattattattaacaaaaacttgatatgggccgggatatctctagcacacatcttattcacataacatagagaaaacatataaggactaatcatttaataataaagcgtctaagactgactcgcttaaaaacgtgtaatagggatctatcgcatgctaggtaataatcactagatcaaacatattgggaacaaatttgatgcaatctatctgtatatgtatgttacctgctatctatgcacattgtattcatgcttacttgccagccgactacgatgcatacatgggatgccatttgctatagatcaattattcagttgaatagcctaaactcataaaacgaaccaagattcattgcctctga

SEQ ID NO: 422313 - DNA, 361 bp, Oryza sativa nipponbare
accaaccctattttctttcgggcgggaattaacaggttttaaaattcatttcccaactccacaatatttacactccttttaacacttttttccacctttttaaaactcctcctttttttttcccggttaaaattaaaattaacttgaggccacccaacttccccggcgtaaaaatattaacaggctgtccttcctttctgccgccccaaaaattacggtaaccatttttttcccaaaaggttcttctaattccttgaaaaggtttttaacgggccccttcccgttaacttatcccttgataaaaaaccccatcttgaaaaacttggcctccccccctttttttatttttttaaccttaaaa

SEQ ID NO: 422314 - DNA, 139 bp, Oryza sativa nipponbare
ttaattaaaaactcttcttgcatatatataccaagattggtctatctcaatcgggggggaatttttaaaaaaaattcttcaaaactgattttccaaactaaaatcattcatcattctttcaaaaaattaagtgtctcct

SEQ ID NO: 422315 - DNA, 94 bp, Oryza sativa nipponbare
ttatgctaaaaaaaacactttagatattcatacacttagtttgattataaaggagaaatcacaatcaccctttatatacaaatttttacaccaa

SEQ ID NO: 422316 - DNA, 114 bp, Oryza sativa nipponbare
gggggggacccctggacggacgcgtgggcggacccttggtcggacccttggcgcacacttgggcgaacccttgggcggacccttgggcgaacccctgggaatacccgtgggtta

SEQ ID NO: 422317 - DNA, 211 bp, Oryza sativa nipponbare
  unsure (1)..(211): unsure at all n locations
ggagcacaaatttacatgttacacccacaccctacacccatgcataataatacagcgtgtatacntacgtacatacatacccctctcgatcacacncaccatcgatctacaaagttgcgtacatacatacgtacacacatatacgcatacgcacgtacatacatacataattaaaaactcgtaattaattaaatacgtagttgatggcatc

SEQ ID NO: 422318 - DNA, 262 bp, Oryza sativa nipponbare
  unsure (1)..(262): unsure at all n locations
tatactagtcagacgcccttcctttttttttttttttttgntntaataatttacaactttattatattaaacattttttttttttaggggggggcggttttccatgtgattttttaaaaccccgtacatttccatttaccaggggttttccgttccataccgccaggcaaatttttttcccaggaaccaattagctaaaaatttttttacacaatcaggtccattgtacttttttcataaaccaaccaaattatattttttt

SEQ ID NO: 422319 - DNA, 591 bp, Oryza sativa nipponbare
  unsure (1)..(591): unsure at all n locations
gggggaaaacccctttagggggtttccaagggggaaaaggaaaaaaaacttttgggctttggaaaaaaaaaaaaaaaagggggggtttttttttttgggggaaaaaaaaattgggggaggggggggttttttttgaaaaaaaaaaatttttttttttgggcccaataaaaaaggggggaagggtttttttttttttaagaaggggggggggggtttaaaaaaaaatagggggggggccccctttattaaaggggggggggggggggtttttccaaggggggggaattataaaaaaaatttttttatgggggggggggggaaaattatttttttttttttaaaaagagaagttttttttgggggggggaactttttttttttgtttttaaaaaaaaaaaggggggggggggggggggggggcaccaaacaaaaaaaaaaaaatttgtggggggggggaaaaaaaaaaaaaagggggggggggggggggaaaaaaaaaaaaaaaaaaaagaggggggtttttttttttttggtgggggataacaaaaaaaaaaaaaaaaaaggggggggggggtgggggnntttttttttttt

SEQ ID NO: 422320 - DNA, 335 bp, Oryza sativa nipponbare
cgcctgcgtaccgtccgaatcccggtcgaccacgcgtccgcggacgcgtggaggaggtagctcggggacagggtggagaaggtctgtggactttgacctgtacctggacttttgatcctaggtagtaatcctgcagttatatgatacatattacaaatttagttgtgcatgagcccatctgtatggtgtcttacaaagcgctgttctatatcatgcttggggggtgtcaacaaactaccgttcaggtattgctagttcgatacttccaggcgtgcctatttgagcttgaagtatatagcttgtaatgatcttgttactatcattgtagagactaa

SEQ ID NO: 422321 - DNA, 364 bp, Oryza sativa nipponbare
  unsure (1)..(364): unsure at all n locations
tccaacagtaagtattcaaagagcaatttcatatgctctgataagttaaagtgtcaataacatgtcatgatacaatccccatcaagagccctaagtgttctatttacattgtaactctagttaaagagattaatcctagtactagtgtactggtacagtacaacggtacaagtaccagatctatgacacgtgtgtagtatacctttacagttccccgtttcccgctatgacgcggcacaccaaaaatttcagcgaccccgcttcgacggcggcggcggcggcgccgccgggcggnggactacgtggcgacggccgnccagnagcctggcttgcaggccctggccggcgtgctgatgatccgggc

SEQ ID NO: 422322 - DNA, 325 bp, Oryza sativa nipponbare
  unsure (1)..(325): unsure at all n locations
cccccccttttctttttttttttttttctttnnnananaaaaaaaaaaaaaaaaaacccccccccccgggggggggggggncctttggggggccccccccccccccccccccccccccaaaaaaaaaaaaaaaaattccctcctttctccttccacaaaaaaaaaaaaaaaaaaacccttatcttttttttttnnccccgcgccgcaggggggggggggccccaacaaaaaaaaataacctccccctctctcactataccacccccccccttttataaaaagatagataaagtatattacgagcgcgccgccgcgcccccccccc

SEQ ID NO: 422323 - DNA, 211 bp, Oryza sativa nipponbare
ccacgcgtccgccccgcgttcgcgcaacagttacggacgcgccgacatcagacgcagaaatccgcatcaacaggcagccatggcgtccacgctgaccaacgtcggcctgtctaccccggcggcggcggcgtcgtccctcgttaggccggtcgccggagctggacgcgtggtgtttccccgtgttggccggggggggttcgcggcggtgcgg

SEQ ID NO: 422324 - DNA, 80 bp, Oryza sativa nipponbare
ccacgcgtccggtggaaagctagggtttcgccgactcgcgagtggagggcgctgctcgtcgccaggctcgtcgcgccgtc

SEQ ID NO: 422325 - DNA, 391 bp, Oryza sativa nipponbare
  unsure (1)..(391): unsure at all n locations
ccacgcgtccgattcaaagctcgaatcttgctgaaaaaggagggagcttttggggtagggatcatggctcacctgctgcagcttccagacctcgcggcggcgaggccgccggcggcgcggaggaggatcgcggcggcggcggtggtggtggcggaggccaggggcggggtgaagcagcagcagcagcaggtggcggtggggagggtgatcagggtcgccgaccccgtgcgggaggggaggctgctgctgctgccgccgccgctcttctccgtgccggncacgccgtcngagtcgccggcggcggcgaggcggcgggagggggacnnggnggngccgcngcgggcctacctcaacanggngnacgccattccgaccctgagggaggagctcc

SEQ ID NO: 422326 - DNA, 256 bp, Oryza sativa nipponbare
  unsure (1)..(256): unsure at all n locations
cccgcgtccggagaattctcagcttatagtcantganngctgagctgaggttgagagatggcacaggcaatggcgtccatgaccgggctgtcgcagggcgtgcagctgccggccgggcccaggcgcgccggcggcaggtccaggctcgccgtcgtcagggccgacgccgccggcggcgacgtgggggggggccgccacgcctagctggccctcatggcaacggtgatcgccgggggccccctcgcgcaggctgcgc

SEQ ID NO: 422327 - DNA, 476 bp, Oryza sativa nipponbare
  unsure (1)..(476): unsure at all n locations
gggggggggggggaaaaacccccttgggggggggtttnnttttnnttaaaaaaaaccccccccgcgggggggggggggggggggggggagaaaaccccccccccgggggggggggctttttttttggggccccccccccccctattttttttttggggggggagggggaggggggggtttttaaaaaaaaaagggttttttttttttttttttttggggggggggcccccccccacaaaaaaaaaactttcttttttttggggggggggggcccccccccccccccccccccccccaccgggggggggaaaaaaaaaagggggggggggggggggggggnnnnnncccnncgtgtttnncccccccccccccctctttttttttnnnnnttgttttttaattggggggaggggggggggccccacaccaaaaaaaaaaaaaagggggggggggggggggggggcctcttttttttt

SEQ ID NO: 422328 - DNA, 137 bp, Oryza sativa nipponbare
  unsure (1)..(137): unsure at all n locations
ccacgcgtccgctctcatctcccgttcccacttccccctcccctccacctctcctctcctctcccctgccgccgaccggaggcggctactgggtggtggcggcgcactccggcgcggacggnggaaggggcggacgc

SEQ ID NO: 422329 - DNA, 426 bp, Oryza sativa nipponbare
ccacgcgtccgcggacgcgtgggtgcatatagttccttatggtataatatcagctaccaacctgccaatatgttctacaatctcataatgcatacaatgtctcacaatatcagctgatggatggcacagcctaacaatatgatggaaattgtgtggtcagaagcacaacacagaagctggagcaattttccttccacttctaccttgacagagaagttctgaagactgattttcattctctgattccaccagccactatgacagagcataccttgcttccacttttttccttgatgaggttgtagtgttcccttccccatatttttttgttgttcaacttaagattctcgccgttaaaaaattgcaaacaagaaatttggttccatttgatactgtgcatgtaatacaggaggtttcatttggtct

SEQ ID NO: 422330 - DNA, 602 bp, Oryza sativa nipponbare
  unsure (1)..(602): unsure at all n locations
aaagggggggggggggggttttggtttaaaacttttacaaaaaaaatagggcccccccccttcccgggggggggggggggggttnnnnnngggcaaccccaaaacggggggggttttttttttttttgggggggggggtttaaaaaagggaccccccccgcggggggtttttttcccccttnttccccccccccgggttttttttttgaaaaataaatttttttttttttttaaaaaaaaaaaaaaaaaaaaaagggggggggggggggggggggggggggggcgcccttcctccccgggggggggggggcccccttttgggggggggggggaacaaaaaaaaaaaagaggangcccggggggtttttttttttttttttttttttccccccccccaaagggggcgggggggggggggggggggtgttttttttataaaaagaagaaaggagaggggggggtctcttctcttcttcttctggaaaaagggaggggggggggggggtcctcctcctttttttttaaatatagggggggggggggggggtgtttgttttttttttttttttttgaaaaagaaaaaaaaaaaacccccccccccc

SEQ ID NO: 422331 - DNA, 437 bp, Oryza sativa nipponbare
  unsure (1)..(437): unsure at all n locations
ggggggcccccccaaaaaaaaaagagggcccaaaaaaagtttctccccccccccgagggggggggggggagcgggccctctcttaaaaaaaaaaagggggggggggcggggggggggggggaagaaaaaaaaannnntttttttttttttttcttcccccccaacaaaggaaaaaagagggggggcgccccccccccccaggaatttttttttttttttttttgtgtgggggggggccgcccccccccccccctccccccctttttcattttttttttggggggggggttttggggggggggaaagaacacacccccccccgcccccgcacaaaaaaaaaaaaaaaaaaaaaaaaaaaaatttttttttttttttttttcaaacaaaaaaaaaaaaaaaaaaaaaaaaaaaattttntttttttttttttttttttt

SEQ ID NO: 422332 - DNA, 390 bp, Oryza sativa nipponbare
ttttttttttttttttttttgggtttttgttttttttttttttttttttttttttttttttttttttttttaaggaataaaattcattttggaccctttttataaaaatttttagccggagcttccattttttttattaaaatatgcctcacccaaaaaaatttttttgtagcaaattcccctttttcattaaattaaaaaaagattaggtgaaaaaaaaacaaaaaccgagcccggccggtaaaattaaaaaacctttaaaaaactgggaacccacaaaaaaaggggggagacatttttttattcaagattaacaatttaaccaggcttttttttaccattaccgctttattgccaccaaaattctttaaacccgggggctttttggcc

SEQ ID NO: 422333 - DNA, 199 bp, Oryza sativa nipponbare
atccaaaaaattaaataaaaaaaaaaaaaaaaataattaaaataaaaaaaaaaaaaaaagattaaaaataaatataaaattaaggttcatacatacatgcacttatacaactgcaaactaataaaaaaagctttaactactacaaaatgtacacatggctaccatggttataaccatcttttaacgtgtctttgtgctc

SEQ ID NO: 422334 - DNA, 250 bp, Oryza sativa nipponbare
  unsure (1)..(250): unsure at all n locations
ccccccctttttttttttttttttaaaaaannaataccgtattacgtttaaattaaaaaacccccctcccccaaattttttttatttttcaactaattaacatcaaaaaactccatacataaacctactactcctccccaaaaagtaacaatcaaataaacaaaacccaaaaaaaactccctttacaggcctaaaatatcaaacctaacccaatgaacaaaaatttcacataaacccaaaaaaataccaa

SEQ ID NO: 422335 - DNA, 114 bp, Oryza sativa nipponbare
aataaaaaaacaaaacctcaaacttaaaaaattacccccaaattcaagaaaaaaaaacaaataaaaaaaaatactttagagcaaaaaggcccccacaaaaaaaaatattccata

SEQ ID NO: 422336 - DNA, 351 bp, Oryza sativa nipponbare
gggttggggttttttttttttttttttttttttttttttttggggaaacaaccccccattttacaaaaagtccccaagttttccacaaacaacccggatttatccctttcactttaaaggaaatagggccccccataacaagatattcttttcctaaacccctctattgggggcccctatgtatcatttacatatgtttattgcccaatactttttaaaagaaaaagggaaaccccttttttttttgtggcttgggcccacctaaattaacccatccaaactccccctgttgattggcatacacaaccaacttgccccccaaagcattatttcccactattactggtgacc

SEQ ID NO: 422337 - DNA, 354 bp, Oryza sativa nipponbare
ttattttttatttttgtttttgtgttaaaattttttttgtttatttttttattttttttttttttaaaaataaaaaaaatttttaaccctttttaaaaaaaaaaaaattcttttttaccaaaaaaattaaaaaaaattcaaaaaaaaaaaaaaaaaaaaccacccccattcccctctttccacaaacccaaatattaataattaaaaaaaaaaaaaaccctttcccccccctaaaaaacaaaaaaacattaaaaaaactttaacaaaaaaaaaaaaggtttcaccaaaaaaaaaataaacttgaacaaaaaaaccaccctttaaaaaaaaaaaaaaaattaattgccacccaac

SEQ ID NO: 422338 - DNA, 349 bp, Oryza sativa nipponbare
  unsure (1)..(349): unsure at all n locations
ttacaaacaactccgcgcccccgttaaaaaatcctctaggccacctccaataaattacccaanctcaaatctgcataaatactaatcaacaaaattaacaacaaaaaaatctttctacagaaccttcccttttattaaactttaaataaatacaaaaatggttttaaaaactttttcaaccaactgcaactcttttcccttgcactttctaaaaaaaaaaccaccctattccccttttcaaacgcccttaccaaatttatagaacccgtcacttccaaataactctttatcacatatctttactaaatttggccaccaatcttcttcaccgaggtatccacgaactcct

SEQ ID NO: 422339 - DNA, 387 bp, Oryza sativa nipponbare
tcacaagcaacgccgggtctagggaaaaaaagcctctacgaaactacagataaggtacccaagctcaaggctgggaagcactcatcaacaaaatcaccacaaacagatcgttctagcggacctgcaccgagcatcatactttaaacgaatccactatggtctcgagaactttctccaacgactgccactgcttgtcgctggcacttgcgacgaagagcaccaccaggggcccctcggcagtggacttcgccagattgagagaaccggacagtgccaatggagtctctagcacatatcctgacgaagttggcccatcgatcttctccacggaggtatcgacgagctactcggagtcgaaggtgctcccggcgacaaaaggccccagag

SEQ ID NO: 422340 - DNA, 378 bp, Oryza sativa nipponbare
gcggccggtgccgttctcggaggacgcggtggtcttcgagctacgggacggcaggctggcggagctgcggcgaggagcggacgggtgcggcggcgggtgggagtgggcgcggatcatcagcacgccggccagcgcctgcatgaccagctactggacggccgtcgccacgtagtccgccgcccggcggggccgacgtcgacgacgtcgaagcggggtcgctgaaattattggtggggcgtgtcatagcgggaaacggggaactgtaaaggaatactacacacttgtgatagaggttgtacttgcaccgaactactgggccgacccactccaactagggttgatgtctttaacttgggatacaatgagaatggcacactt

SEQ ID NO: 422341 - DNA, 421 bp, Oryza sativa nipponbare
  unsure (1)..(421): unsure at all n locations
caacaacacanaagacgggggtgattacagcattgcagacttgccaaatgtggcgtaatcgttacattcatccatgtgttatacatgcagaatggtacatactacaatagctcaggagtcagcgtagctgtatttgtacaagagccctcgatataacaaaatcacagtacattgaatactttcatcaagttttctcatctatagacccatccttttgggcctcaagtatgtcgagcctttcttcaagcccggcatagaaacttgctgctgctgcttagctctcttctctcgctccctctccttctaaagccgtgcggcctcggcttgttcttgcctcagcttctccatctcctgctccatcgcgggcttgtcctccttctgcctcttcttatggtcgaggagcgaggtgtcggtttcctta

SEQ ID NO: 422342 - DNA, 150 bp, Oryza sativa nipponbare
  unsure (1)..(150): unsure at all n locations
actactaaangaaagactcgattacaaatttacaattgcacnatacccttaacaaagccaaccattcaaccaacccaaacacttactttcacttgcaaaaaaagggttatacaacttcactaacattcttttgttgcatacacaatttga

SEQ ID NO: 422343 - DNA, 340 bp, Oryza sativa nipponbare
tctaccgccctttttttttttttttatatcaacacataattctatggggccggcacttttctaaaaatacattcccccatttcacccttctttttaatactcataacaaactaaagatacatgctcaaatatcattctatccactaaggatttacatattttccatctattattgatactaccatatattattacaaccatgccattggatgcacacaccataaacactttcttaacactaccttatcagcctagcctgtacactacacaatactaaacgtgttcattgtgccatgaccatccccgattccatgaaccttttttgtccgactatttacaa

SEQ ID NO: 422344 - DNA, 363 bp, Oryza sativa nipponbare
  unsure (1)..(363): unsure at all n locations
caatgcaagcttcaaaacccgtgatgaggcccaatgggtatagcatntactatcatatactctactatcatattataaaacccacataaaaatgtcgctccttactctatcccaattatttacctaatgcattttcaacccaacatctaccttaaactacagatcctaaggctccaacctcccaaaaggccaaaaaaaccaactgcatttcaacctataccaaacaaatcatgcccatgcatcctcatgccaagaccttgtcttaaactctcacttctcatagaccaaattatataattacgcccaaccatttttattaaccagattccaacacttgttcgatattataattaggaaccccat

SEQ ID NO: 422345 - DNA, 397 bp, Oryza sativa nipponbare
  unsure (1)..(397): unsure at all n locations
tcctctanaacnccnncctttttttttttttttnaaanaaaattccnacgaccccgcttaaatataaaattgccccattcaaaaactaaaccaacaacttntaaaaacaccaaaattaaaactttcataaaaaccaacctcctcccttccaatatatcttatttcccaaagctataaaaaaaacaatttccacattaaaaacaacaaaaactatcctaaacatataataaccttattcgaaatttaacccaaccccccccaaacgatctataccccaataataactaaaaaaccttctatgttcttcacaaaccttaactaaaattcatcaaatccaaaattctcaaataataataaagctttcttttatccaaaattcataaaataattcatatac

SEQ ID NO: 422346 - DNA, 312 bp, Oryza sativa nipponbare
  unsure (1)..(312): unsure at all n locations
aanaaattnannnatgggaccgcncttttttaaaaatttcatcccccactcacttttttcacccacttttttctctctttctttaaatacatacatttttacatttctacatacactacccatattatttacacattccctcaaactttaatatcattgtacttacatacaaacacacatttacgcctactctcttacttacatacatattgaaaaactacctatcaattaaaatcctaaatcatttcatcatctatctaacttttaattaactattatattcttataatacatcatcaattatcttatcaa

SEQ ID NO: 422347 - DNA, 399 bp, Oryza sativa nipponbare
  unsure (1)..(399): unsure at all n locations
gttaagggaactaanatggaacatggagtgcatcaagcaaatagtatgattttgctactagctttcttgtcttacatcgagaaagcatttcacaccaaaggtaattaaaccaaaagtacagcaagcaccttactcgcaagcactttgaacttatcatcgacgacaacgtatacatacggatcgttggattgactgactgtctgtgtgtgtgtgtgtgtgttcatcgcatcactacgggctggcttcgattgccttcgcctcgacagcgggtgcgacgacggcggggacgggtgcggcggcggcgatggcgggctgcttgtcagtgaccaccttgggcacggtgacggtgagcatgccgccgtccatggacgccctgacgaggtcgacgacggcgtcgtc

SEQ ID NO: 422348 - DNA, 372 bp, Oryza sativa nipponbare
gggcccgaatcaacttggtcagagagaagatgccccagtgatagatttgtcaaattggctcactgtttgatacatttaattgagcaagtagaaactgcagcttgcacatatcaaccggaagaactcttattctataaaaattatcactgtacatatatatacagcaagtactaccaattagtgacttggtacactatcattcaacaaaaaaagggcaaaaatttagaaatatcatgctaaatccatgctatccttctcccagatttggtagcgaaagcatatggcataacagtaggtagcatcttgtccatgccaatcttaaataacctggctcaacgctcaaagattgagatgaagtctcaaaataagttg

SEQ ID NO: 422349 - DNA, 474 bp, Oryza sativa nipponbare
tttttatttatttttttttttgattcgtttttttttttaaatttttttcttttaatatttttattaatatttaaattataaatttttttataaaatacattatttattactaatagcacatacaacatattaacacattttcacaatatttactgtcattttacttgttaaaatatttaacattaagactcttagtttaatgattgtattataatttataactttaccaaaaccatacaatatcctttacaccttttctcatctattgtttaacctttttatactcaaatttatcaccatttatattcctaaatttcactaaattaaaatatgttgtaatctgaaatattttagcattgatgtacattacacctttttttccaaaatttatatccttacatctttaacaaacaaccaattattttttaaaaatttttaatataaaatttttttaaataaaatttaaaatttttt

SEQ ID NO: 422350 - DNA, 662 bp, Oryza sativa nipponbare
ggccaaagaaaaaggacactaattatgattttgcaggggacgaattcagcgctgacactctgcggaatctacattaggaagcattgtgacactgaatgctccggtttcagtcagcgcacaaggtacaaaggagtaagttgccactctacctgtaaactcaaattgctttgtccagccatcttggaggtctcaatgaaggctttattccgagcttagtcaggaatattgtatacattatatgtagtaggaagataaagaatccacagttgagtagaagcagcgttccaaagagtacataaattgcatccatggaaggaatcgtgttcaccccagctgccgccagaatgtatgtcagggaagcatgtatattgactgttatcaatccaagaatattctctcttatcagaaatgacgacaataaaacgtatccacaagcccctagagcccgggtaattgagcacagtgttgttggaaccattccagttggtctccaacctccacatagtacccatggccagacctactactccatgcatgagcagataagttgatgcttttacagggccagacaatgtgaatagcagtaaaacagtagccaccgcagttttcctgccagcttctagtccccatcttaagaagagataacaatcggcaatggaaaa

SEQ ID NO: 422351 - DNA, 413 bp, Oryza sativa nipponbare
gttatcaaaattttggtaggagttctgatgtatttatcaaagtttggcaacaaactaaatgcaacacttctttttggtaattttaaaaaaaatagttcggttgaaaatgacatcaatccgaacagcccctgtgtaaacgctgtagtgtagtgtagtgtaccagtgcagtgctagagcttccagtagaggcgagcacggtggaggaggccggcgacaagggcccagaacaagatctgcgcgaagaggacgtagaggaggatgcccacacgggtggaatgccacaccttcacgaacacatgcttcctcacccagtaaaccagtgtgttgttggtgccctcgtagtaccacccgttcaagaacccttcgaagatgcctgccgccgccatcacgtacaccagcatcgcgttcatgcc

SEQ ID NO: 422352 - DNA, 192 bp, Oryza sativa nipponbare
ttacattaaatctccatccaaacaaccaaacattataacaaacataaattaattaagctataaatcttctttatttatcacacacacacacacaattaaggtacatacatacatgcacttctacaactgcaacttcaaattatcaaccctactactacaattaaacacactttactttactttgcaccatct

SEQ ID NO: 422353 - DNA, 400 bp, Oryza sativa nipponbare
  unsure (1)..(400): unsure at all n locations
tcctctaaaaaccccccccttttttttttttttttaaataaattaaaacgcgataggttatatatcacaaaccagaccctcccannacttcacactaccgntacagatctcaccctctctccaaaatcnnacaatcatacacncccctaacatacataccttcccctcataatatcaccaaccatcatttactttacctcttacacacacacacactctaatntacaaaccctcatcatcaccaacctacctaccttaacttaaatccatcctttcacattccaataccaccacactttttcttactttccnacacccaaatttttcaaaatcacccatcccatctcaactaccaactttnccaccaattaatcctaattctttactataccctttacat

SEQ ID NO: 422354 - DNA, 450 bp, Oryza sativa nipponbare
atcgataaccctttctgcttggccccccttcttcaaaacttgcatttcttgtacaagagctaacaaacacaaagaatttctttttacaatagatctccccctttcactcgatcctatcatacatagctagccatcagaatatgatcatctatctcatcccttcctggtgattcccaaatggcacccaacggccagttcgtctcgagaacacaatgacacgcctttggctgcttgcagccttgcacatgccaattccagcagactttttgtttccttcgggcacccagtattttcaagatcatatttcgcagcgcaactttcagctttggcaccaattaattctaagtccttactgtactttttagattatcgactctatcaattaagtccatagcttttgtcctatcgatctcaaagtcgatgacaggaagcatcctcctgattgatagc

SEQ ID NO: 422355 - DNA, 333 bp, Oryza sativa nipponbare
ggttgctaacaacaccgtgcgggttctattataaaactggacacacacatactcacatattacatatggccacatcacgtagtctaatactatcaacttcctatattttaaaactacacacatatgtaatccactaacacatactaactcagtatcacactctcacaaactcacaccaactctaaatccaaggttccaaaatactactatataacatgcaagagatcctacgaaattgaaacaccggatacttattatttttacttcctatcaaacttatcaatctctctgacactaggaaagttaactatacccctatgcccacaaacacct

SEQ ID NO: 422356 - DNA, 435 bp, Oryza sativa nipponbare
tcacaacaatatctttgttctggtcttcaggatagctgtctcttttacatgctgttccttccccaatgtatcaaaatacagtataagttttggaccagaagctaaaactatggagatccatgtggtgggggactagaataatccacaatctaaagccaaatccataaactggagaaaatagcatgcctatttttaatctcccacaattaaagagtcgcaagaggcagcagagatatggaacttggtaacatttttaccacataaatctgcagagaaaatcaagaaattcgaaagcacactgaagtaggtccttctacattgcaccaccgcagagacatccaataagcagctccacaatgatgcaatggggtagacaaaaagggcgtttaaaactcgctataattccggcatactgctcgaaattcctccctgaat

SEQ ID NO: 422357 - DNA, 114 bp, Oryza sativa nipponbare
atccccgagcggggggggggggggtggggcccattacggcgcggcactgggtctgtgccgcggacggggaggggggggggcagcggggctcggggcaggcggggggtgtacaaa

SEQ ID NO: 422358 - DNA, 106 bp, Oryza sativa nipponbare
cgtccggtggtggtccgcgccgaggattatgcctcggcgcctccgtcgccgccgtcttccgcggcggaggagaagccggcggaggccttaggcgccttgtctatca

SEQ ID NO: 422359 - DNA, 521 bp, Oryza sativa nipponbare
  unsure (1)..(521): unsure at all n locations
ccacgcgtccggctactagttcataaacccggtgaaggatttctatattatgttttagccactgcgctctctcccttgagatgggcaatctcaaaagtaattgaaacttacttcaagcaaagcattcctttacaaaagcatgggatggttcctgactacagcttctcctttgccatgtcgtcttgcttgattgcaatgctaccagaggggttttatgataaggttgatgaaggcagcattattctcaagaaatccaagaggttcagcttctttaatgatggaatcatcctggaagatggaaatgaacacataaagagtgacattgtaattctagcaacaggnatttaggggagatcagaaacttagagacatcttcacagcaaactggtgcaaagagaaagtggcagggtcatcagctactgcggtccctctatacagagaatgcatccatcctcggattcctcagttagcaattggtggatactctgagagccttaccaacatatatgcctcagaaagga

SEQ ID NO: 422360 - DNA, 113 bp, Oryza sativa nipponbare
  unsure (1)..(113): unsure at all n locations
cgtccgctccaagcttctagctgtgatcaagcaaagaagaattgaaaaaaaacatatatatattatatatatngccaggnngtgtgggtgtttgaggatgggatggtgaggag

SEQ ID NO: 422361 - DNA, 232 bp, Oryza sativa nipponbare
cacgcgtccgcgactgcaggccgtcgacggcggcggcggcggcgggggcgggggcgggggccgtcgtgctcagcgtgaggccccggcgggggtcgcgctcggtggtgcgctgcgttgccacggagggcgatgttccacccactgtcttagaaacaaagatgaattttctcaagagatacaagtgtcctgtgctaagtatttacagtaaagttctacaagaattttttttaca

SEQ ID NO: 422362 - DNA, 415 bp, Oryza sativa nipponbare
  unsure (1)..(415): unsure at all n locations
ccacgcgtccgcaaggtcagaactggaggctgacagtaggcaaaccaacaatttactggaatataagcagccaatgggaaggcatttctccaagcctgaccacaagaacaccgagaaaaatggagggactaaaattcatgcatctaatgatggcaacttgattccacggagggaagaggatgcatcactgaggaggatgacatgttcaaatgatattaattgtgagaaagcttccagggatatggagctggttcatattattgacaatcagcatatcttatataaaatgcctaatgtgctagatcaagtgccttccttgataaataatattattaccgtgagatttgggttctgacatgattaaaaaaaaaaaaaaaaaaaaaaaaaaaaananaaaaaaaaaaaaaaaaanaaa

SEQ ID NO: 422363 - DNA, 361 bp, Oryza sativa nipponbare
  unsure (1)..(361): unsure at all n locations
ccacgcgtccgcatacacgtatgccagtagtgtgtcacaggaaacgagcgaagagagagacgagcatggataacactgcatggccaccagcagcaccgccgcggcgacctctgtggttgcgcgcgccgggctcgccaggccagttggtctggcgagatgagggcgaggaggatcaagagggtgaggtgcaactactccaaggaggccgggacaccggcggcggccgtcaagggagccggcgcgtagctactggcgatggcggcgacggcggcgcccgcgatggcgctcgtcgacgagaggatgtcgacggagggcaccggncttagnctcgggctgagcaacaaccatgtggggtggatcc

SEQ ID NO: 422364 - DNA, 417 bp, Oryza sativa nipponbare
ccagcgtccgggagcggctacaatttcttcttgcggatcagcacaggaagctcaagccagaatatcctggacaagacaggcttatcagcaagatgattggtgaacgatggaacaatttaggccctgaagataaagcagtatatcaagaaaaaggtgtagaggacaaggcaaggtaccagagacagttagctctttacagagaacagagaacaggccagccaatcagcaacgcggtgcctatccagcagagacttcctcagaaagaagtgacgattgatgaggtggactctaaagtcagtgaaggtgatatcctgctgtccaaccaaggatacagcagcagtaccagtagcagtgatgaaaccgctgattcgggagaaaaaatgtggaagatgatgaagagttaacacagagacatct

SEQ ID NO: 422365 - DNA, 582 bp, Oryza sativa nipponbare
ccacgcgtccgaactacttactggaacacccaaaagcaccacactgaagtgcaacatttgcaaatgaactagtgaaatactagaaaatacttattgaaacacccaaatagcatcgtacgcaacataaagaacaactctttccaacacaaaaaacttaaaatgtggaacaaatttaaattccaattgaaacgttggcatctgacacgtgaaacataaaaaaacaatggtctaaaccttcttttttaattgtaatataatcatatgacatcttgttgtaaagatttaattgcaccaaatatagcagtgatcggatcgttgatcgaataaataattttagagaaaatatttagaacatgctaatagatttaatgcatgcacgcattttgttagcaaaacaacatgcattttgttagcccgcatgcgtttatgcatgcatgcatggaactgggatagagcaagagaagagagaaaaaggtaattgctcatcttgagaaaaaatcttgtggtcaacacaaccctggtccaccatttggagcgaccgatatttccctggcccgtcgagtgcccgggggaaagcattct

SEQ ID NO: 422366 - DNA, 61 bp, Oryza sativa nipponbare
ccacgcgtccgaatacgcttggcgacgaatcgacacgcgcagatccacgcgacgagagaaa

SEQ ID NO: 422367 - DNA, 197 bp, Oryza sativa nipponbare
cacgcgtccgcggacgcgtgggcgacggtggcttgcccctgccccgccaacgccgctggcatcgggctcttcggcatcaggaagaagctggagcgggcggaggaggcggcggcggaggcggtgcgggaggtggaggaggcggcggtggaggccgcggaggtgggtggggaggcgtttaaggcaggggggggggaggc

SEQ ID NO: 422368 - DNA, 242 bp, Oryza sativa nipponbare
  unsure (1)..(242): unsure at all n locations
gacctctatacacgcgtatcctaagctaggatcctgtagatcctccacactttttttttttttttttttttttttttttttttttttttttttttttttttttttttttttttttggttttttgttttaattttaaaaaggggtttttttnaaacccctccctcattttaaaacacttttatttaataataaaacccccaaaaaaaccacttttaatttaaaatcctggcaattgccctttt

SEQ ID NO: 422369 - DNA, 281 bp, Oryza sativa nipponbare
  unsure (1)..(281): unsure at all n locations
aaagggaaagctatttctttacctatgtaaaaaattcaanatggatttcttgtcagaaaacacatatgaaaactatttgtaggttcctatggttgggacacaatcacctatccggatcttacctaatgacccatgtaatttcttcctgggcctcctggtggagtactgccatacccaccaccacccccatagccgtccaaataaccaccagcaccaggcatcccatgcaaaccactactacccagtccttcagaaacccctggtttagcaacccttaacca

SEQ ID NO: 422370 - DNA, 352 bp, Oryza sativa nipponbare
tttttacaaaaagttaataccagcgataaatttaaacgaacttgtactggggatcctacaacaatatggacaggaaagccattcactttccatgtttagtttcatcccaagttacaaaaactaagtatgatacagagagcaagaaagcattgcactattgccgctaccaacactacagacgctacctgcttcctatgtctttccatgtatccacgtcgttgctgctgctcaacatcttcgaaccagagccgtactgtgccttgagagcagccacagggtcagatacaaccaaggaccttcctgatttcttaacaagttgagctctttagagggatccatttattagtacatg

SEQ ID NO: 422371 - DNA, 96 bp, Oryza sativa nipponbare
tattataatattattatattagagtgtatttacacatagtataagcagatattgaaaaggaatagttcctgcaatatgataatgttattttctcta

SEQ ID NO: 422372 - DNA, 254 bp, Oryza sativa nipponbare
  unsure (1)..(254): unsure at all n locations
ggatagtgttcatttattacttttttatatgtacnctttggtgtttcatatttttaccttaattattttaatttttaacaaacatgaacgagtttcttctagtaggactatacttttttaaatatttaacaattgttgaacacgactcatggtcttcttttttttttttttccgtttaaatgaattttttttgtttcatttctttaacatctttttttgttttcaatctaacataagacaacttgttttttttt

SEQ ID NO: 422373 - DNA, 213 bp, Oryza sativa nipponbare
  unsure (1)..(213): unsure at all n locations
ccacaaggaaaaaccatattcgggcgaatggcataatattataccgattgtaaagaacaaaccaccacctttacactatatacacacnaagtctcgatcaagcaactttaattaatttcttccacatttacaacatgcatcctctcctaactccgtgatcaattaaagaagattctttgcagctccagcttgaccacgatccatccgaattaa

SEQ ID NO: 422374 - DNA, 402 bp, Oryza sativa nipponbare
  unsure (1)..(402): unsure at all n locations
atactcaacagactagttcaatatattttgttcttagcattgggttgacttttgcaaatgttttggactttangtagatttacatgatattaactgaagtacaagcataaattcacataaattgagaactaactctctctctctctctctctctctctctgaaagtagaagtgtgtaaagaacatggtagattctattttatattgntatgataacaacaaacttgaaagatataaaacctttctaatcaatcagtaggatcctggaagcagtacttgtgttcttttcctatgaatatacttgtagggtagtcgtcaataaagactcgcataatcagcaagcccatatggctggaaccattcaaccagtactcctttcttccttttagggttgcatccaatg

SEQ ID NO: 422375 - DNA, 95 bp, Oryza sativa nipponbare
ttcttttttttcttcttattttttttttctttatttttatcttggccttcgttttactttttcaaatgtgtacccccccccccctttcttcccct

SEQ ID NO: 422376 - DNA, 437 bp, Oryza sativa nipponbare
gggaggcaacaggattgtccgacatatgtagctcgagattttggctttggtgcggggcttgcagagaaaaaagcaatgcagtagcacggagatatccccatcacgacgaccggatggttcttctgcctctcaatgcgtgcgattcgcacgttaccgaggactgcatttcgtgtaatggagaagaccgtgcataaccagctttctcgcaaactctctgctactaacattttggatgagcagagattggaggcgcggcagctgaattgctgaaataactgcatcttctttcattctgtcaagatcacaaatatgcagggcagaatgggttattaacatgacaacgacaatgtgcatctcatcttctaaatgcctttctgatcaaccaaatatttttttctctctctttcaaacatgatctctgcgcaacatgtagttct

SEQ ID NO: 422377 - DNA, 263 bp, Oryza sativa nipponbare
gggaatcatacgtaagtgcttgttgatacaatagaaacatgaggggtccattgccggttccatatgaccaaacataaaaccaccgaacccccatttggccattttgccgatcttagcctactttggcaaggccatcgccaaaagcagatttggtcaacgtgtagaacttttccgctttttcggggctttagatcttggttgattggtcaaccccgtaattggtgccaaaaagtttgccgtaaaggtccttgaggccttttttt

SEQ ID NO: 422378 - DNA, 275 bp, Oryza sativa nipponbare
gaagttcaactgattcagttgttaatgaagtgatgccacaaatcaggcgtgcaagaggaaagttattaggaagatggtggatctataattaacaattattttaccaaatctgcattacagcagctatactggtttagtctgcactttgcggggcaccggctggacataaactaatccggttcttctaccagaaactctgaacctatctggttcagttttttacaaaggcaccaagcagaaactgcaggaacccttgtcatcaagtttgatgtctg

SEQ ID NO: 422379 - DNA, 231 bp, Oryza sativa nipponbare
gggcgcttgaaaatgaaaatcttaccaaattttggaactaatactcgaaggtggagggcacaataaacctatggggcaagttggaacagacatgtccgctctgaacaagtgtcataaaagccaaatcagttaaaaaggatctattttttgggggcgcaatttatatttttatggttacaaacttctttatgtccaatcatctggaaagaacggatgccatcctagaagaaa

SEQ ID NO: 422380 - DNA, 59 bp, Oryza sativa nipponbare
  unsure (1)..(59): unsure at all n locations
naacacagtgagcacgacaagcgttcaattatgcatgcagttgtgtcatatgacaaagg

SEQ ID NO: 422381 - DNA, 379 bp, Oryza sativa nipponbare
gttttgaggaaattatagctgcattaaccatagctcattgtcatgcagatgcaatttaaaacatgacttgcacaagacatgctgaatgtttcacaagtcagtcgtaaggaaataaataagctctaggtttgttcgtcaattctgctactccgcaataaataagatacgatttcgatcggtgtatcaaggcatcacgccgtcactgactcactgtggtgggtcgtcgtcccataggttgtcccacctgaggggtccagcccgtacgccgtcgccttcagcatcatcaccggcgtcgtcattaagtccgccgtagcttcccactttcttattctcgtcaggactgacccccaggtagttaagatcatcagcatgcacctgc

SEQ ID NO: 422382 - DNA, 52 bp, Oryza sativa nipponbare
gcgaaataggggtgatttggactagtgaaatcctacaacagttttgacatat

SEQ ID NO: 422383 - DNA, 112 bp, Oryza sativa nipponbare
ccacatcacaaaacttgggaattttctatttaacctgaagggagagttgggccttcacaaatttgcagggccattcccctccaaaaaaatttttaaaaatttaaattttcca

SEQ ID NO: 422384 - DNA, 160 bp, Oryza sativa nipponbare
  unsure (1)..(160): unsure at all n locations
ctctcggcgtccgatgctagtggtagtggcccgcaaatcctcctcctccgctcgcgtcgccgcccaccaaacccgatcccaccgcgccgcgatgccggccggccagccgcacgcgcacgagcccgacggcggtggcgcgagccaccgntcgccccaggcg

SEQ ID NO: 422385 - DNA, 428 bp, Oryza sativa nipponbare
  unsure (1)..(428): unsure at all n locations
cgtccgaaaaaaaaaaaaaaaaaaaaaaaggaagaagggggggggaaaaaaaaaaataaaaaaaaaaaaaataaaatacaaaataccatacaaagaaataaaataattatataagggaaacctacattaaattaacttggccgttggtttccctctaaattgactgaactggccctggctttacccagcttagggggggtgtacctcgtcctcccctcccttgtttgcgttgtggcgaattggccttctccgagcggccttaccatccgttgggccccctctttggcgcctgggccgcgccctgccttgttgcattaagcgtggggggcgccctggccccccccattaagcccggtggggttgccgcccccttgctccccttcctttccctttcttaccttcctttctcccctccctttcnctttttt

SEQ ID NO: 422386 - DNA, 260 bp, Oryza sativa nipponbare
  unsure (1)..(260): unsure at all n locations
ccacgcgtccgcggacgcatggacgaacgcgtggncgaacgcgtgggcggacgcgtgagcggcggcggctcgtgcctcggcggtaagctgttctgcggcatgagggaaggagaaggccggacgcactccgctggctggaactagcatggccgtaccgacgagacagctgtacccactagatctttatcaaggaggggggggtcttcacctncatcntcataaacctnctcctnatcctccccaaccanatgcttttcaac

SEQ ID NO: 422387 - DNA, 299 bp, Oryza sativa nipponbare
ccacgcgtccggccacacacacggccagactgtctcggcgatgcgatcgagttagcatgtgcttatatgtcaatcaatgagcattctgctacatatttaccaatatcacagatacatcactaactacagtttagacttccttttttttttactcctattacaacaaggggcgaacgctttatgatgatccctgcagacgaacaacatatggctgatccaggagtcattctaagggtgacctgggatgcaccagatggcctgatgtgtaaaactgctggatagtgaaacccctgcatgta

SEQ ID NO: 422388 - DNA, 157 bp, Oryza sativa nipponbare
ccacgcgtcccgcccagccgtcccgaacttctttggctccccccgcaagaaggcggggtccccctacttctcgcgggcaatccctctgcgctcgcaaagcgggcgacgcatgcccgcttggtccccgcgctcgccggcctcgactgcgcgctgtctc

SEQ ID NO: 422389 - DNA, 477 bp, Oryza sativa nipponbare
  unsure (1)..(477): unsure at all n locations
ccccccccccccccttttttggggggcccccccccccccccccgccccacaaaggggggcccttttttttaaatatttttttatttttcggggggggggggggggattttttttttttttttaaaaaaaaaannngggggggggggggggggggggaaaagaaaaaaaaaaaaccccccccccccccccccccccctcttttttgtgtggggggggggggggcgcccacaccactttttttttttttttttttctttttgggaaaaaaaaaaaccaaccacggcgggtttttttttttttttttttttttttttttttgggcgggggggggcgccccccnnnannnnnnnnnccccaccaccttatatttttttccccggggggggggggggggggctcccccccccccccccccccttttttttggtggggggcgcgccccccttttttttttttttgtgggttgngccccccccc

SEQ ID NO: 422390 - DNA, 222 bp, Oryza sativa nipponbare
  unsure (1)..(222): unsure at all n locations
ggggggcccccccccccccccccccttttggggggtaaaaaaaaaggggtgtttggtttttttttttttttttttttttcaaaaaaaaaaaaacggcccccccccccccgcgcaaatttttggggggggggggggccggttttttttaaaaaaaaaaaaataanngggggggaaaaannnnggggggggaaaaaaaacaagggggggggggggggggggggg

SEQ ID NO: 422391 - DNA, 298 bp, Oryza sativa nipponbare
  unsure (1)..(298): unsure at all n locations
tcccggaagattcccgggtcggacccacccgtnccgtcagcagtttcacttaaagtctcataggggagagcgtagctcaagccactagcaaacttctgcggggagctaactcttatcgggcataaggcaagcgtatggtgacggtcgtacacgaggcaagtctgaaggcaatgtaagtctggaagtagcctacgaaggcttcttgactcttgagactgcgaggttgccgcaaagaagccttcatagtcgcacatgggaagccctcaggaagcattcaacataggaactctcgtttgca

SEQ ID NO: 422392 - DNA, 297 bp, Oryza sativa nipponbare
  unsure (1)..(297): unsure at all n locations
ccacgcgtccgcccacgcgtccgcccacgcgtacggtagagattgtaagtataagatgaacactgttctcttattttgccaaatatgcaaaatgcagtctattaattaagacactaagtttgtactggatttgttttgatcagttacttatataaaatctgaaaatattgcgttgaaatgataactatttgtcaccaaaagtaacaggagcttatgccatgtattttccatatgcttctagaatgtttttttttttnatacatntnanatgatgttattttnaagntttattattta

SEQ ID NO: 422393 - DNA, 488 bp, Oryza sativa nipponbare
  unsure (1)..(488): unsure at all n locations
ccacgcgtccgctggtcttagttaaaaaaaaaaaaaaaaaaaaaaaaaaaaaaaaaaaaaaaaaaaaaaaaaaaaaaaaaaaaaaaaaaaaaaaaaaaaaaaaaaaaaaaaagggcgggctttctggtgtagcggagcctagcttcgggtgcctgcgatgtaatggttttttttttgtgtcgcgtaacttaaattcagtgcccggggcttcactttgcagcggcgggaatgaccatggcgtgaccttacttaatttagtggcatcgcatcctattttcgtttggtgaggtgacgtattagcggcctggcccgatcgtttttcccttcagatgagctgccttgccggaatggggaacgccccctgccctggatcgttaccttcggcgggggggggtnnttaacgctacacgctaactatccttttcactggccagtaccctacggtcctttcgttttgtttccttcctttccgggcagggccggttggt

SEQ ID NO: 422394 - DNA, 53 bp, Oryza sativa nipponbare
ctatcaggggtgctttagtagatcatagatttcggtatgatactggatcgacg

SEQ ID NO: 422395 - DNA, 222 bp, Oryza sativa nipponbare
  unsure (1)..(222): unsure at all n locations
aaaaaaggggggggggggggggggtggggggggaaacaaaaccacaaaaaaaaaaaaagagagttttttttgtggggggggggggggggggggttttttttttttttttttttgggggggggggcgcggccccccccccacctaaaaaaaaaaaaaaaaaaaganaggggggggggaaaaaatttttaaaaaaatccccccccctttccccccccccccccc

SEQ ID NO: 422396 - DNA, 503 bp, Oryza sativa nipponbare
ccacgcgtccgaattacattgtcaagctcgatcagattaagtgatggatactgctctgttctgatgcattatagtacagaggactagctaataattgtgaatcttgatctttgagtaaatagctccatgtagttcagatgggttactcttttgtgatggcagatcttttaattctttagtgcttattaggaatagaactatatttttagatgcaagatgaaggttagatctgactgccggcaaacaagcctaatagttcctaagattcaagccatgaattttgttactagctaggtgttgcttatgtgggcattggtttgctggtactggtagaagaagcctcatattgtcgtggcaacgagaaagagaaaacgaaccttgaaacataaccggagtggaaccactacaaccaaagaagaaagagatggattttggaacaagacatggatgatgctcaattgataattcattcatcaacaacatgttgatttggttggctggct

SEQ ID NO: 422397 - DNA, 151 bp, Oryza sativa nipponbare
  unsure (1)..(151): unsure at all n locations
ttttttttttttttttgttttgtgttttttttttttttttttttttttttttttttttttttttttttttttttttttttttttttttttttnttttttttttttttttttttttttttttttttttttttttttttnnnntttttttttt

SEQ ID NO: 422398 - DNA, 258 bp, Oryza sativa nipponbare
atattaaattttttttttttttttttttttcttattttttattctttttttatatttttttttatttttatttttaatttctttactattaaaagcagaaaaaaaaattttctaaaaaaccaaccacccagttataaaccaacaactaacagtcttctcatcttaatccattccccagcataactcacacactaacacctttacaacttctcattctttaaacaaaaaccttccatacaaaacaaaattttttttttt

SEQ ID NO: 422399 - DNA, 98 bp, Oryza sativa nipponbare
cttaaattctcttcatctacagccctctccctttttttttttctctcaaaccacctcaacaggggaaggttttataatataaaaaatcccactcacac

SEQ ID NO: 422400 - DNA, 415 bp, Oryza sativa nipponbare
cccacttactggatgggggataagtactgggactatgactacagaacacatgatctctgtttcgcaaatataatgcaatatgaataatattaaacagaagtcgacctactaaacaaagggcgaagcctgtagcgcagtgaagccataaccaggatgatttgatctaatccatgctatcctcgagttccaggttcctggatccttaagtagccgtcacagtctggagggttttcatgttcaatcagacttcaccggagagggagagcgggataagctcctgcttgggcttttactaacagatcttccacgagaaggtgaagaaacaggagtccgtgatcttgatattgattgtcaggcctagctcgctcctaggactggttgttgcccatttgccatacatgcatcacaatccagc

SEQ ID NO: 422401 - DNA, 300 bp, Oryza sativa nipponbare
  unsure (1)..(300): unsure at all n locations
caccaaantaaaagctatnacctcacatgcgcgcgtacttaaactctcttcctctatatccctcccccttttttttttttttttacaaactaacccatgcgaccgtgcttataaataacattcaccccaaattttcatcttatatccacaccctaacccccttcattattatacacctcatatacttactctcctacatacccctttttatttcactcaccatctattcaacaaaatcgattacattcctacatacacacatatacacattcccacctccatacctacataattaaaaac

SEQ ID NO: 422402 - DNA, 428 bp, Oryza sativa nipponbare
  unsure (1)..(428): unsure at all n locations
anaagcgaagggggcccagtataaaacaagcttgatcttttcaagctagagcggnggtgtaaaattacaatcatgatcaagagagtagtccagtaatggagacaattacggttgctgaatgcccctgagctgcaaaaagatgaatctcgtttgcctaggggacactttctccaacgcatatggggagggggtctttgagcattccccagcaagaacctacttagcggccgtctataaaaacgggccttgagccccggaaggaaaaaattttggggggggtcaaaaacctggggggctttatgcacccctcaacctggtcggggaatgtgctttaaaacgccgccgcctttttaatggcgcccccccggctaaccaaagaataaaaaacttttccccaagggccccagagatagaaccctttttttttt

SEQ ID NO: 422403 - DNA, 402 bp, Oryza sativa nipponbare
  unsure (1)..(402): unsure at all n locations
gggattggggatttataaatatggttcattatacaatcacatnttttagggagagaataaaacagaaaccaggggcagccctatccgggtttacagtgccgatcccacacaagaactcaatccttatttattgaattgagtaattagaaacgcagggcaatatactacacttttccattgttaactatttccataacacttacacaaaacataaaattggttaaaaatctcagtttaacacacggggcttcataaaagtggtaaaaaaaaaagtttacatcagtttgtggcacctcactttttctgataaaaaaactggccttccccatctaataaataacctcaacaccccccgggtgggctgtgaacttttttttcctccaccccatttttttttttatt

SEQ ID NO: 422404 - DNA, 440 bp, Oryza sativa nipponbare
ctcgtctttttttttttttttttaaaccactattatagggttggttttttttccaaaacaccttactcataaattttgcgctcaaattttcttacaataacatccccccacactgggatgtacttagtacactaagtacacccgaaatgacacgtttttttgaatcattacaaaattactttaattgtctagcattcctgttacataacaacatttaattcaacttcaggaccgtcaaagaagtcctcggcgagatggttaatgtccacccgtgctttctttctttgccgagcacactttgtcttacacatccccatactcttcaatggctgacccgagcctaaaagcttaagaactttccctatcgtgtttcctcttttagccggcaattgtccttggaacaggtgttttctgtgtgaactttctataccctcaaaccc

SEQ ID NO: 422405 - DNA, 130 bp, Oryza sativa nipponbare
gagtgtgaaatgaacagccggggcggtaaacgttcacaacatatcacacccacatattctttatccccctatctattaacatcaatctcctattcaacaactaatctccaccctattgtttgtccaaacc

SEQ ID NO: 422406 - DNA, 357 bp, Oryza sativa nipponbare
tcgtgaccgccctcgcccttttttttttttttttagtgttaaattaacgagttggggggtatatattaattttattttacacacatctatacttttgcaccctgcgatccaaaaaaagcccgtagtgtaccactggtttgaaagcaaacattttgtccaaacaaggggttctaaaaattatagcaccgctctacgaaaacgcctgccctctttttggggggggggtggggggggttttgtactactctccgcattgatcaatcaaagatttttacccatatatcattctttatttaccccgcccaataaccgcaacggttgaggacgttcttcattatatccctgacctgctcctgg

SEQ ID NO: 422407 - DNA, 380 bp, Oryza sativa nipponbare
gggatataaaaaaaatcagtatatgcatttacaggaaacattcagcatatgcatttacaggaaaatttagcatacaaatctgaaagcatgcaagggctgaagtacacaatatccatctatttctataaagatattcaatctaattggctcctaatcaaccactggcaataatttttggggcatacttttgactatggggataaaatgattatcctcacctgctgctttgccacatgtacgtgaatactctgctggtctccttcagatgtgttcatcacatcagggcaaaagaaaccagatggcggccaggctgatgtggcgaccatggcggtattcaacaagtcaatatatcctgcaacgaggagaacaatggtgtcaac

SEQ ID NO: 422408 - DNA, 358 bp, Oryza sativa nipponbare
  unsure (1)..(358): unsure at all n locations
caagactaaaatcgcccgaatgctgggatacatcaccaatttttcacaaacatctcgatatgtatcgaattacataggaaaccatgtgtcgaaaccatgggaacatttcctctaagctaatagtgtagtaataatctcacaatttttgatgctgtagtttaatcatgagtacacagtttaatctctctatagtgaagaagagttagggcgtggaggaggagacaggtggggtacagttcatgagatggcgatggccttngaccgccgcgcctgcgccgccaccggcgagggcgggagccgggaggagaagttcttgtaccggaaggccgcggcggcgtcttctgcggcgtcttcttcg

SEQ ID NO: 422409 - DNA, 396 bp, Oryza sativa nipponbare
ccatgcgtccgaacagcacatctggagatagactatacaatatactggttaattaggctcggtagctagagagtcataaatgaagaagcgcatgaacttttacggccggacgcgagcagttcagtgatggctatggcggatacaggtggaggaggagcattggcgaccccatggtacgcgacggcatggccataatgcatgtcgtaagtgaacataaagggaaacaggtgtggcaggacgctgcatcaacagcgaggtgaagggattgacggaaagctatgtacgcgatgcgaggacggaacggtgcggatatctctgccttgaggaggctcaaccaagcaatctaccttctgactactggtgccagggagagcgccttcaggaacatcaagacca

SEQ ID NO: 422410 - DNA, 78 bp, Oryza sativa nipponbare
ccacgcgtccgccccgcgtccgggggggggggaatcgtgcgagggaggggagggttttttgggcgagatttgagtttt

SEQ ID NO: 422411 - DNA, 325 bp, Oryza sativa nipponbare
ccacgcgtccgcaccaaccccccatctcctccatctccactccacctcacacgcctcatcgacctcccaagaaccaccaccgccttctcccatggccgccgccaccgtctccgtccgcttccacccggccgcatccgccgcgcgctgcggcggcggctcgcgccggagcaggcgcctgtccggggtcatcagggcgcagtcggcgccggcttcggcggcggcggcggcgctgacgcaggacgacctgaagaggctggcggcggtgcgcgcggtggagcaggtggagagcgggatggtgctggggctggggaccgggtcgacggcg

SEQ ID NO: 422412 - DNA, 342 bp, Oryza sativa nipponbare
ccacgcgtccgcacctacatccctgaaggagggcatggtgtgcaggagcagttccgtgactatgtgaatgagctccttcttggcttcttgaaagatcatcctgtggttatataaatgctattgtagcctcagttgtgcttcacccgtagttcaagttggcttagaaaacgttgtgctatatcatggtatgaatttgtcaacaaactaaggatcagctatggctagtttgttactttcagtaatgcctatttgagcttgttgtatctaggttgtcctgctggtgttactagcaatgtaaagactaaacccattgctatacttctaccatgacttttgcaagcc

SEQ ID NO: 422413 - DNA, 410 bp, Oryza sativa nipponbare
ccacgcgtccgcatattactaacaatataatgatcactgctatgtctgcaccatacatatttttttagcaataataccatatctgagatttgatcgcccgaggcgtatctcatccaggtatacattattgttagactagcatgcctactatcttcaagacagattacgagcaggggttcgatctgcacgcggtggcgtgggtgaacatactgaacagcatgttgctggtcttgataggacagcgaacctacttttgtacatgactagatgctaccctggtctacctcaacagaaactggcgccacactagcactctttcggtgatacaggaaatcttgccctccaaccagtgtacactttatgacggggaggagaaaaggagggctcggctttgtaaagatcagcttcaa

SEQ ID NO: 422414 - DNA, 322 bp, Oryza sativa nipponbare
  unsure (1)..(322): unsure at all n locations
gtccgnatccggtcgccaccgtcgccacgctcgggaccgtgggcggcgctgatattactaataaattttaccatcgctcaaggcgcactgcgctgtctgacagaccagtgctgaagaaaggaccagctatgggcgcatattgaagccaaagagccatttaggaggcgcgcggcgagagaacggcggtgaatgcggaccagtgctctgaccgctgcaatgcggatggaagcacgaacaccgaacactgccgcgcgaagtactacttattatccacataaaaccacctatgagggggtttgttaaaggttatttggtgataacc

SEQ ID NO: 422415 - DNA, 140 bp, Oryza sativa nipponbare
  unsure (1)..(140): unsure at all n locations
ccacgcgtccgaggtgtgggacaaactgaacagatacgaactgcaaagggtgctgcatgggatgaggactgnggccctactaagaaagcaagcactccatcacagtcatctgattccaatgcacngatgaagcaccatca

SEQ ID NO: 422416 - DNA, 212 bp, Oryza sativa nipponbare
  unsure (1)..(212): unsure at all n locations
ccacgcgtccgcccacgcgtccgacgcgcaccacctgcaccgcctcccaccaccgatccagcctgctgaatccatgttctcgccgaggcagcctttgtttcggcgccgccgccggcgaggttgtcgtcggcggcgccggtggcgcggnngtggcggggctntgccgggnggggcngtttgtgctggggtgggggcggttgtttgttgggggt

SEQ ID NO: 422417 - DNA, 445 bp, Oryza sativa nipponbare
atgctatatagggttattttacaaaaaaaaaaaaaaaaaaaaaaaaaaaaaaaaaaaaaaaaaaaaaaaaaaaaaaaaaaaaaaaaaaaaaaaaaaaaaaaaaaaaaaaaaaaaaaaaaaaaaaaaaaaaaaaaaaaaaaaaaaaaaaaaggggggggccgttttaagggacccaggtttacgtccccgggcttgcaaggaaaaattttttttatggggcccccaaaatcaaatccccgggccggggtttaacaacggggggacgggaaaaccccgggggtaccccaattaaatcgcttgggagaaaatccccttttccccggggggggaaaaagcaaaggggcccgccccgatcgcctttccaaaaagttgcccaccctaaagggcaaaggggcccccccctgtaccggcccataaagcccgggggggggtgggggttcccccc

SEQ ID NO: 422418 - DNA, 195 bp, Oryza sativa nipponbare
  unsure (1)..(195): unsure at all n locations
cccgcgtccgtgaaaagaggctgagcaacaactcacgtcacggcggcaatgggcctcctcgtccacctccccaacctcgccggcgcccgccgcccatcgccgtgcggcggccaccggagggcccgcggcggcgcgcggnnctcggngnccgccgcggcgcccggcgggggccgcngggnggnggggggggggggg

SEQ ID NO: 422419 - DNA, 439 bp, Oryza sativa nipponbare
ccacgcgtccgcccacgcgtccgcgaatgaggtggaagatcaaactgattaatatcactgtaggggaacccttgagtacgagaagaaggcaaggcctgatctgacagcacaggtgcaggcaatggagaaggatcttgtttctatggctcaggaatctgagaagctgagggctgagattaagaagagaaatgcacccagtttcagcggccatggagcttatggaccaccaatggcgactccagggatgggcctgcaaggcgtctatgatgatggctatccttccataggcagccgctatggcactggatcttgggcaccacatgatccccatggttatccacaactgtgactgggcttctgatcgttcttccctgggcagtgctttatcttcgtaatatcgcttgatggttgatactgatcgtgacaaagcttttctctt

SEQ ID NO: 422420 - DNA, 466 bp, Oryza sativa nipponbare
ccacgcgtccggaactggagaaagatggcgaagctgatatccaggatcctactttggaaggaagaaacaggcggcgatctgtgcgtgtgaggacaaaggggaccatggttgatattcttcttcaccatatgttgagcaatgaacttgatggatctcaaaaccgtgaccaatagcttatcttcatggccctgcaggaagaaagcaagaacagaaaaaaaaaaggaaatgattagagccggttctcgagcatggagttatgttttgttatgtcaggtactcaggtgcaaaggaatcttggtgaggtgatggaaaggactctgcttgtcatactttagttgtcaaggagaacagcagatgtgttctctttctgctccaaaggagaccttaaaggagcttttttttaaaagtaaatattgtaggagattctcctacagtgcatatatatttatacaaaggagctcttttt

SEQ ID NO: 422421 - DNA, 458 bp, Oryza sativa nipponbare
ccacgcgtccgtcatattttcgcatattgtgtgaaatattttgttgtataaattaatgtatggagtcaggagcaatatgctctagaaatacatggttatgatgctaccttcaacgtgctgctgctggcctgatcttcccttggtgatgaacaacaagatacatgggagaatggctctgcaagccaacattgttgacaaggacaggtaaatcagattcactatgttgcagcttcaatccaaaaatattatattgcacacacaattcacatatggtaaatcagattcccttgccgccgccgaactccaccgctgccacaggttttgcccggaggtgttcgactgaatgccactcaaccaatacggtttctatttattcctaaccattgcctcatatattttattggtcatgggtctatctatctccttacaatggagggatacatcggtgggctaggact

SEQ ID NO: 422422 - DNA, 493 bp, Oryza sativa nipponbare
  unsure (1)..(493): unsure at all n locations
ccacgcgtccgatttgatctcaccttgtttcctctttgtttgagcttcccataaatctgtctatgagcggcttgaattgtttatatggccaagtgatctggacatctatgtaattattgacccaaaagacgagtgtttgttttcttctgaaagactgactttatggagttcatatatatcccaatcccatgtcaagatttgattaaactgtttccacgtttctcttgcttagtctaattttgctgattgaaacttttttttgagggactttcaggttgaaacttgacagtctctttggctagcaacagctactggatgttctttttaattgcgaggcaagccacaattctcattaacagaggccataattgtgaactatcttgtcttcattccagtgctctatttcagcatatatgctaatgtgtaagatatgcaggagacgaatggaagtgtttcttaatttgaacttctaaaatgccagcanaactcttgg

SEQ ID NO: 422423 - DNA, 125 bp, Oryza sativa nipponbare
ccacgcgtccgcccacgcgtccggcttgataaaccaaattccccaccggccgcttcgttctcgccgatccgtgagggctcgagatgaaggcgaggtcgaggtccagcaatggcgactccaggctc

SEQ ID NO: 422424 - DNA, 186 bp, Oryza sativa nipponbare
gtccgcgctatctatccatctatctatagctttggtctcccgcgaattcaccgagcaatggcgtcctcgtcgcgccagctgcgcgtgaaggctcgcggcagtcattcggaggaagtgcgtaggcgggcgaaggttttagtacagagggggtagacttgacagcaacgtattgaaggcgtatgatgg

SEQ ID NO: 422425 - DNA, 211 bp, Oryza sativa nipponbare
gaaaaaacaaaaattttttttttatttttttaggggacccaacccccactctttctttattttgtgaaaataaacccattttccccaacccaaaaacaacaaacttttttgccacaaatccctccaccccccataaaccccttttataataccggcccccccttttatttcccgggacaaaatttgttgcccccccccacccctttttttt

SEQ ID NO: 422426 - DNA, 213 bp, Oryza sativa nipponbare
ttgaaataacataatttctaatgccgcatgtttcacatcaagtggagaccacacaccacaaagcccatctatcccaaagtaacatcacctagcaaaacacttgatcctgctagtcctacaaatttatcacatattcacaacacccagggcaaatcctgcaggccacctcctgatcaaacaccccgaactcaaacccccacacaaacatcatca

SEQ ID NO: 422427 - DNA, 180 bp, Oryza sativa nipponbare
gaagccccaactgaaaaccatgagtgatgggagatccaacaaaacgcgccataattgccacatcactaatgaacttcatcaaaacacaaacccaccacacgatcttcatacgcttcagacactcacaaaaaacttttacctaccaatctacgcaagaacctaaccacaaatacatattat

SEQ ID NO: 422428 - DNA, 285 bp, Oryza sativa nipponbare
aaaaaaaaccatttccctcactttactcttttttttcttattaaattcttcatttttcttcttcaaccacaaaaaaaggaaatttataccccaacaaaaaaaaccccccccataaaaaaaaaaacccccccgtttttgaaaataccaacaatttatatccccccataccccaaaaaccctatccccccccaaattaaaaaaaaacccttttttttccaaccaccctaaaaaaaccctccattttttcccccccaacactttatttctttcccacccccttcaaaa

SEQ ID NO: 422429 - DNA, 370 bp, Oryza sativa nipponbare
tatatatttaattagtgaatatgttgttaattaaaaaaagtttttaaaaattttaaccttttacttaaataaaaatcttaatttacatatttattcaaaaacattttgatatggagaaaaaaaactacgaataaaatataagaaaaccaaaatactttaaaatttgccactacccagaatgaaaattacaagctaaaacaaataaaatgggtttttttgaaaaaaaaaaaaaaccaaaacatagaaaatatacataagctaaatgtccatttttttgtcaaaaacaccattttataaaaataggcctatctgggaacaccacaatcctagatcaattaattatgataaactatggttgcttaattaaaaa

SEQ ID NO: 422430 - DNA, 233 bp, Oryza sativa nipponbare
gtaatattacaaaaaggttcaggggccacaccaaactgattacaaatgaacacaaaaacacttacaattacctacacccacccatagatatactcatgccacctagctcaaccgacactgcagcatattcagcatacatacacaagtacatcgctctcatagcattcctgacacaaacccacacatgatccatgatcaagagctctacacaagccctacccggtcatgcactt

SEQ ID NO: 422431 - DNA, 398 bp, Oryza sativa nipponbare
ttttgttgatacaaattgcattggccaaggataactttacacaaactttttacatcaacatgcgtttcactcatcacatgtgaacaaatgcatccgatagttagctgtaacattcaaggaaattcacaagactcgatgggtactactacactactacccatgacaaaactgcagtggtaatgtttcaagtagtcaggctctcatgcatcttttgccttcagtagaatcgacaccgcgaagcatatcgcctgagcaatgtaaggtgtgaccatgtaaggccttccacaccaagataatttgttcccatgatcatctttgatgcaaagattgttagtgtcaacggaagaatcttacaggcagacctgctacttagaacaatgaggtccctcctgagggga

SEQ ID NO: 422432 - DNA, 433 bp, Oryza sativa nipponbare
tcactactttttttttgacaaagccatgtggggaccatcagccagagagaactgtaatgtaattccagagagccccttgcttatcagccaaaccagcctcattgccttgctcgcaaactgaccctgatatactgatcaacagtacacaagcaggcgaaaagattcccgtaacaattcggtccggcatgccgataaccccaatcttgcaaagaaaaaactgatttggtaccaatatgtctgaccacaggaagcaatcagatagtactccccaattgatctcatggaagcacttcaaagaccgccacaatcaacggaggaatcgacgcagatgcaacccccaacttgaatttactcaacttgaatcgtgcgtaaagagcctgaagggagtgccgagagcggagagcccagctaccttgccagagttgcagtccca

SEQ ID NO: 422433 - DNA, 296 bp, Oryza sativa nipponbare
tttattattttttttgggttgggttaaatattaaatatattttttttttatttttttttttaaaaaaaaaaattttttttacaaattcccctttaaaatattcgaaaaaaaaaaaatttaaaaaaaattccttttttttttaaaaaaaaaaaattttttaaacccaggaatttataataaattaaaaaaaaattagcaaaaatataatggtaaaaaaaaattgtcgaaaggggggaaatttttggttttcgggttgacttttaaaaaagccttaaaggggtgaaaagtttttttaa

SEQ ID NO: 422434 - DNA, 276 bp, Oryza sativa nipponbare
aaccatgcctactaagaggttagagcacaacaccatatctcttgcctcctcatcaaaacatcaaccaaaatacaaggtacacctacagaggaatcccccgatctatgcttatacacaactccccgcacgccagactaaaccctacaattacacaccgcaccctccaacattaccagcaccccctacacacactcacactatagcgtagagacaccatgggcatagaacctacctagctgaacataatgatacgctcacaacatcacacaacatacg

SEQ ID NO: 422435 - DNA, 301 bp, Oryza sativa nipponbare
cattccgggtctgtgttaaatggacaaaggggtgaccttacccaaaaaaaaaaaatgcacgttcaccctcaacaactttaatcacaattcacagaagacacgggtttctatccacaaccgttactgttgtattgatgggcctatacttcttgactacacaacatggggccttcacagaataaatgaattacatgtcggggaggggagtttctcagtaaatccccttaggtccattttcacgaggcccatttaacctggttgagtcgtggcacattttgggccttccaaacatcccaacaaa

SEQ ID NO: 422436 - DNA, 197 bp, Oryza sativa nipponbare
  unsure (1)..(197): unsure at all n locations
tctccaacctcttcggccttttgttcactataaaaataccttttttccatctatacaacaatnttttttaaatcaacaaccattcttctcacaaccatatttacattcaagaaaccaaaaacatttattttttttcacttttcataactataaactctttatataaatctcacaccttatatacctaaaacaatcta

SEQ ID NO: 422437 - DNA, 507 bp, Oryza sativa nipponbare
gacaccatataacagctataaccacgcatacacacgttcttaaactttaatacctctacaacctccttccttttttttttttttttaagaaacttttcctttatttagagaatatactacatattttccttcaaaaaaaaaatatactccttaacaaaatacctatatataacttaaagcaatgataacacttcaaaagccattctttaaacaatcttcaatgaaaatctccaattatttccatatctcttaacaccataccaccaccacctcaatcttcatcactatacattcttaaacttcacatccaattccaatgatactccatccatattttactcctacatttccttttattttactcattttattaccaccccttcctatctcatcaaaattaccattaacaacaactacccttcccaatattcaatttatccctcttactaaaatatttatctcccttattaaaatattttcaacaccatctttatatcctactatttt

SEQ ID NO: 422438 - DNA, 404 bp, Oryza sativa nipponbare
  unsure (1)..(404): unsure at all n locations
gagcctgaancttcggctgtaggtgagtcgagcaaagaaaaagttnctcaagatgtacacgcacaatcagatagacatgacaacacctgtctacctgctactggtctttacatgaaagatcaactaatgacaaaccttttcaacaactaagtacctatttatgatcacaaggtcttcttttcacacgggggtattcagctaacgtcacttttgaaaccaacatctgaacaaaaatcactggaagactggttccgtttctagtcctttcatgggttctccacgctatcacttcgcattggaaaccttggagatcaacaagcagaggacgccagatccaaatggaaaacattaccaggaaacatcctggggcgggggcggctagtgcttcttgctccgcgcgggct

SEQ ID NO: 422439 - DNA, 384 bp, Oryza sativa nipponbare
gatttgaacgttaccaaattccgatctggggtttccttggcgatcaaattgatccaacacaaaaaaggaaaactcatcccctcatatccacatcattagaccatatcgccctattatccccatcagctaaaccaaaacagaaaagaaaaaaaacggatgagagagagaaaaaaaagaaaagaaaagaaaaaaaatctagtctaattgctattactcctttccctccgccatcgctcactaaaagttgacgctgactctgccattcttggcgcacccgaacgccgggcacgccttctccatcgcctcgcacggggcacactctcacaggtgcctgcactgcatgagcagcaccacaggcggcgcctcttcgcaccccttgcagcg

SEQ ID NO: 422440 - DNA, 616 bp, Oryza sativa nipponbare
ttttttaattcttactgcattttgtttaaatttaaaaaaatttctttcaataaaaaaatattaatcttttttaattttttttttatttatatatttttttttcaaaaacaaaacatcacaaaaatatcaaattgtttttaactaaaaacaatttattttcttttttaaaaaaaaaaaaaaaattaccttttttaaaaaaaacacccctttttttaaattttaattttaaaaaacaaacatcctttttttttcccccaaaaattttttgcccaccccctctctaatttctaccttaaacccctaaatcttaaccacaaaaaaaaaacccttatttttttattttaccaagacccaccctatttttttttcccaaaacaaaaaaaaaatatttttttaataaaaattaccccccattttttttccccacccccccaaaatatttataaattttttaagtgacgcccccccatttcctctttttttaaaaccaacacaaaaaacctgttttgaattccccctttttatattttaaaatttaatcaaaaaataaaattttttaaaaaaaaaggtttaaaaccccccaaaattttttttatgtttttaataaatctttttt

SEQ ID NO: 422441 - DNA, 237 bp, Oryza sativa nipponbare
  unsure (1)..(237): unsure at all n locations
taacatctcataccacgcgtacgcaagctcgtaacctctaaacctgtccacctttcttcctttttttataattaacacacaaccccatcgcgcattgtataaaataacaaccttccccaaaatccacactaccttntccttccttacattatatgaaaatatatttcttcacctaccccaaccccaacttatacacacatcttacttttccaacactttacactactccatctcctg

SEQ ID NO: 422442 - DNA, 284 bp, Oryza sativa nipponbare
  unsure (1)..(284): unsure at all n locations
tttttttttttttttgttttgtgtttaaattttaaatttttttttttttttttttttttttttttttttttttttttttttttatttttttaattttttttgggggggtgggggagaaaaaaaaaaaattttanatttttaaaaaataatcccccccttgtgtttaaccctaaaatttctgaccgctcttttaaaaataataaattttttttatatagaagatatttaaaatttgggaaaaataaataaaaaaattttttcttggaaaaaattttttttccgtg

SEQ ID NO: 422443 - DNA, 452 bp, Oryza sativa nipponbare
aatagcagaatcatttaaatttggactgcgtgttgcgaatagatactcatttacaaaattaaattaattatcctggagcaaataatatgcatctgctcaggaaacacagctcatgatgctgcgcattgcagatatcgctcatgaataagtaatttttgctattgcaatttggtagggacaaacttctgagcaacatccagccctgactgattccaccttgttatattcatacgcaaacttgcatcttgtaaagcttaagttcctatttttcttcttcgttgcactgaattccctcttacagtcatcattgattacattttttggagaggtaccaaggcaaccatagctggtatattgctacatatgctaaactaacaacacttgaagtgcacccccaaaagaccatctactgtgcaccacaagttctactaagagaaaagctttgtcacgat

SEQ ID NO: 422444 - DNA, 284 bp, Oryza sativa nipponbare
tttatattattttttgttattggtgattttttataaacttttacacaaatacacactaccaatacaaatctcaccctatctccaatactctcacaaacatccacgcaaaacacacgaatacttacatctatactctccacttacttacatttactacacctgtttcacacacacacactcttctgcaaaaacccgcatcgtcttaaacctacctatcttatctaaacgcaaaccatcaccatgtcaaaactaaagacccatctctcactttccctgaactaaat

SEQ ID NO: 422445 - DNA, 218 bp, Oryza sativa nipponbare
cctcccccctttttttttttttttttccacccccattcccttcttcgccccaattcaaaaaaaccctcctcctctctaacctcttctttttaacaccttacccattattcaccctttacccttatcttatactctaaaacctcccctcttttcttttcttcctctccatacaaaaacaatcaccttacactctctcactctttttcctcaacttcccc

SEQ ID NO: 422446 - DNA, 404 bp, Oryza sativa nipponbare
  unsure (1)..(404): unsure at all n locations
cttgagaattggataaatnaatgctcacaggaaaaatataaatctgcaatacaatcataaanaangtcacatccaagaaacaatatgccaaaagtacatgtggaaaaccttcaagattgaaatcaatgactgaacaggtatcgatcggtgaaaaataactgaaaacacttaataacagtaccagtagcacttttcccccacaaattcttcttcagttcaatttgtcgtcaactcactcctccattgccgaatcaaatcttcattgtcatatgacattactgcacctgtgcacaaaagcaaaaagagatatggaatcaagatatagattcctcatggtaaattttataggggagtttataccgctcaacctatgacaattaaggattctcaattcacacaccatc

SEQ ID NO: 422447 - DNA, 402 bp, Oryza sativa nipponbare
  unsure (1)..(402): unsure at all n locations
aaagaaaatcttcacttgggagggggatagctaatanactgcagaaagtcagtcttagcagaagaatacaaaaaactcccatgtctttctggtcaaagaaagtatagccatgtccagatcatttccttcaaaaaaaatcaactacacatttaaaaatgacgtacgaggattggaagaaagtctgcgcatggtcagtctccgttaagctgataccccacaactctacataatgcatgttatggtgaaggacctgattggcattgcgttgttgacgccttgaggcacctcctttcagtcactgctcctcagctcttgctgatggccattatggtggccatggcgacatatgccgcagggtttaacctgcatgagatatgatgactagatccataaaagtcttta

SEQ ID NO: 422448 - DNA, 344 bp, Oryza sativa nipponbare
gacaaatccaaattcattatggagcatgatacaagagactcgttatattaataaactttacctcttcaacaactaacacaaatggcaccatctactcagatctgtgatttaaaacagcacctgataccacttctcacttagattacagacagagagacataacacactacacgattgtggtcaactcgcctagagagccacgacaccacatgagacctaagctccacgaggagacctttaaaactaaaagctaaaggcagcaacatacaaacactagcaaggagctataaccagcaacgtccactatggttacgccgaatcaagaactttccctactacactgc

SEQ ID NO: 422449 - DNA, 398 bp, Oryza sativa nipponbare
cttaatctcaaaacataagtgcgaatttacctttatatgcaactctttacaccaaaaggggaaaaaaactgtttcctttcaaaaatgagtataactttgcagtttcaagtcccacttcaactacaacccaatctgcattacaagataaaagtctaaaactactgcagtttcaacattttttaggccttcaaacacactggcctcgctttgcaacaaaagattatgcggctgctcccacagaagccccatcattcaacctcgacaatccgtaaatattctactctaaccagatcatctctttcttggaaccacacaccacttgaatccactcttctataatattgatcaccttttccaacaccgactatttgccttctctgctgtacccaccacctttc

SEQ ID NO: 422450 - DNA, 81 bp, Oryza sativa nipponbare
tctttttataattacacttttggggcttgtttattattaaatattactttcaatttcaatccattttcattactttttaca

SEQ ID NO: 422451 - DNA, 429 bp, Oryza sativa nipponbare
  unsure (1)..(429): unsure at all n locations
ctatactctacacccttcttccttttttttactattcaaacctcactaatacagcataagtgcaaatttacctttatatgcacacttctacaccataaaacaaaaaaatacgttacttcacacataggagtctaacttaccagcttcaaaatccacttcaactacaacccaatcttcttacataatcagaatataaaacaactccactcatatcgttttttattactgcagacacaactaactcactttactccaaaacattaagtgttcgctcccactgtgactccacttgtcaaacttcacaacccttaaagagcatcttctacaccacttatatccttctttgtactttaccccacttaactccttctaatnacttcttttatcttctactataacaaccccttttctccctcctttctttaccca

SEQ ID NO: 422452 - DNA, 84 bp, Oryza sativa nipponbare
  unsure (1)..(84): unsure at all n locations
tcagcatcnaattnaatcctttgcaacttgataaaacatagaaagagcacaattatatcaacatcttaaaccatgggaattaat

SEQ ID NO: 422453 - DNA, 176 bp, Oryza sativa nipponbare
  unsure (1)..(176): unsure at all n locations
tctttttttatttttacttttgtgttttggtataattaaaataatactttaattttttttttttttacttatttttaattaacctattttaattcttttatttttnncgaaaaaaaaagaactttaattcaaaaatttgaaataaaaaaacccttaaaaaatttttacttagtact

SEQ ID NO: 422454 - DNA, 261 bp, Oryza sativa nipponbare
  unsure (1)..(261): unsure at all n locations
cctttctttctttttttttttttttacttaaatccttctgcgtcgggggtaaaatcggaggggcctttncctctttcatttaactaatatcaaaacactcaaaccccctaactgcattattcaaactcttgacttgctttgcaaaatcaatcccactaacgaattatcatacacggtgttacctaaacccctctttggggatttatttccataacataactactaaccccgtaataaaaaaaaaaaacaattccaagcacc

SEQ ID NO: 422455 - DNA, 210 bp, Oryza sativa nipponbare
ccacgcgtccgcatcgatctcctcctcttcacaagcaagcgcgagaggagacacctccatcgatccatggccgccaccgcgaccgccgttgcggcgtctctgtccgtggccggggggctcgggaggccgctggctcgcgtctcgtcgccggcggcgccgatgaaagccgtctccccggcggcggcacgtggggccgtcgtagaccgggcg

SEQ ID NO: 422456 - DNA, 73 bp, Oryza sativa nipponbare
taccggtccgttatcccggtcgacccacgcgtccgttaatcaccgtttatattattagtatctaattttcacg

SEQ ID NO: 422457 - DNA, 271 bp, Oryza sativa nipponbare
ccacgcgtccggggtgaagtacctgtggccattctcggcgcatactcggttgcaccagaagtgctagttcacggacgactaccggtgggacgcggttgggggctaagaggtgccacaagcctccgtacggaaaaaggcgcagtacgtagtaggacagttgatgtagtgagcttggaggtcttcgagctttacagctctattgacctcttcatgaactgttcctaaattgatgttattcaggctggtgaggagaatgctgtgagtgcatcat

SEQ ID NO: 422458 - DNA, 286 bp, Oryza sativa nipponbare
ccacgcgtccgcccacgcgtccgcccacgcgtccgcccacgcgtccgcgcgttcccagcgagcgagatgagtgttccttcaggtatcagcaaccttgaaaagctttcggaggcaaagatttgctacaatgcacggtacatcaatagtcccaacgttaagaggacagtagaggtagtgagcaaggaggtcgccaagcatcacaactctattgaccttttcatcaacggtacccaaatagaagttaatcaggctggtgaggagaaggcagagagtgcaacaagattca

SEQ ID NO: 422459 - DNA, 105 bp, Oryza sativa nipponbare
attcactaactgctgttgttcgcgttatggctgatggatcggaccctaagtcttggctgatattgagcctgtacttagtataaggactgttgcaagactagctgg

SEQ ID NO: 422460 - DNA, 160 bp, Oryza sativa nipponbare
ccacgcgtccgcggacgcgtgggtcacgataagaggcacccagacgaacacctaagctacgcgcgcgatgctcccatgggcgccgccgccggcgacggcggtcaccacctccccggcctcgtcggctccgctcctccgcgccatgccccggcgcgcgcgc

SEQ ID NO: 422461 - DNA, 416 bp, Oryza sativa nipponbare
  unsure (1)..(416): unsure at all n locations
ccgaattcccggtcgaccacgcgtccgcncacgcgtccgcccacgcgtccgatttgtatggaacttttctgcttgataattttcgcatgtgttagtatttgtatatgatgatataagtgggaaataaatcatcaaattttccagcnnaaaaaaaaaaaaaaaaaaaaaaaaaaaaaaaaaaaaaaaggggggaggaaaaaaaggaaaaaagaaaaaaaaaagcgtgaaagagaagaaaaaagaaaaaaaaaagagacactaaaataaaaaaaaaaaggtcaaatatttgggggggggcggttagggggaacaaagttatcaccggggggtgggcgccttaaaattcttttagggggggcccgaaaggaaaataggggggggggggttaaaaaggggggggggggaaaaaacggggg

SEQ ID NO: 422462 - DNA, 459 bp, Oryza sativa nipponbare
ccacgcgtccggtcgttcaagcacaccagaatggttactatgcaccagtatctgcaagtggcatatctattcctgttgatgccacatctattgctccagtacctgtttcttactatagctatccttcagtcactatggctgccactggagaagcagctgagccttctggatactacgcggcatcagtctctgccacttctagcagtgtattagataacacaacaagctcttccaatcttgctcctgcgaatagtagtttgcattccagggagtctgacaacatcatatccaaggaggcaaaacttgcatctttgagccaacctgtgggagcaacatcagcatcagcatccatacagggaagttctgcacaggcttctacaagtaccacaagtcagagcaaagttgttcgtagcaagaagcgagctgtttcttgtgcaacatcactgaggtctaataaag

SEQ ID NO: 422463 - DNA, 368 bp, Oryza sativa nipponbare
aaaacaattatatttcttacatatccacacatttatttgtccatggttcataaatattaaaacgttactcatcccaaaataatctatattctataaccacactttcataacttctttccatcaatacaattcttcaaattaaacacccgccaaatttaaaacatttttatattttttaaccatacaccctttaaaaaaacctttttctttaaatactttttaaacactttacccaacaaactttactctacacttaatcttttttaaaaacactaaacaattccccctttttatctatacttttaaaaaccctcaaatataattttttccccccacaataaaaatcctcattttaaactatcttcttt

SEQ ID NO: 422464 - DNA, 283 bp, Oryza sativa nipponbare
  unsure (1)..(283): unsure at all n locations
tttttcccaancaacatgctgaaattctataccacaacctgacaacctctttgggtagggtgtacaaattacacatgaacattacacatcattccatttcaattgccagaaatcgataataatccatcccagacaatgaaaagtcatatcacgtggttaagaaaagcaaacaaataaacaataaactctcttcaacgctcgaaacttcaaaattctcattacaaacgatctaaattaacaatgaataactctccctaaaatttttccaaccaagtgcacttac

SEQ ID NO: 422465 - DNA, 67 bp, Oryza sativa nipponbare
  unsure (1)..(67): unsure at all n locations
tttnttttttttttttttttttttttttttttcaccaagtcttcagtggacgacattatgcaagcta

SEQ ID NO: 422466 - DNA, 230 bp, Oryza sativa nipponbare
ataataaaatattttttttttttttttttttttttttttttattttttttttttccccaaaaaatcctttttttaaaaaaaaaaaaaaaaaaatttttgtttttttttaaaaaaaaaaatttttttatttttgtttttaaaaaaaaaaaaaacaaaaaatttttttttaaaaaaatttttttaaaaaaaaaaaaaaaaattttaaataaaaaccccctttccccaaaact

SEQ ID NO: 422467 - DNA, 66 bp, Oryza sativa nipponbare
  unsure (1)..(66): unsure at all n locations
ttnggggctaagtttgaacaaaaaaatacggcgatacaaacaattcaacaaaacccccctctaccc

SEQ ID NO: 422468 - DNA, 233 bp, Oryza sativa nipponbare
tttcttttttttttttttttttttttttttttttttttttttttttttttttgggaaaaggaacttttttgctaattgggccggtcgtcctccctttgcctaaaaaatgataaacctgaatttccgtgtctaacgttaaactgttcattttatataaaatttttttataataagtattttcattattgttagatgataaaacataatcggacccttgggcggccccttggttc

SEQ ID NO: 422469 - DNA, 262 bp, Oryza sativa nipponbare
ggtaacaataatattttgaacggagaggagaggccttttatttacaggcctaatatatcaaatggttgaaaagtacatttgaggaggttcgttttcttaattgtatcagcgaccatcaattctttttacataaacaggtttgacaaattgctttttcacaagcacaaaaaaaaggtgggcttggtgacaaatatagcataaataatcggtttaaactcaaatcaccttttaagatttctttggtcaccttttttttgacctt

SEQ ID NO: 422470 - DNA, 379 bp, Oryza sativa nipponbare
  unsure (1)..(379): unsure at all n locations
taaattaaatttactttttttttttattgataacacaaacttatttagggaacggctcaacttanacattcactatttaatttaactactccaaaatacacctaaaatgaacatntctcaccaaaaactacttactttacattaaatatcatcactttccccagaaaatgacactttttacttttgaacacactttactctttaaacatcctcctcctaatcttcatcttacccttccttcttcctttaatactacttacccctaaactactcttttattttcacataattcatagtatttttctcacatttatccacgtccatatcttataatttgcccccaattttaactaataaaatcatctcaaattccctgcat

SEQ ID NO: 422471 - DNA, 555 bp, Oryza sativa nipponbare
  unsure (1)..(555): unsure at all n locations
aaaaaaaaaaaaaaaaaaaatttgggttttttaaaattaacaaaaaaaaaatttaaaatttaaacattaaaaaaaaaaaaaaaaatttttctggtggccccccaaaaattggccccaaaatttttacccgggaaaaaaaaaaaataaaaaaacccccctttttgagaatttttttttttttttttttttaaaaaaaatttttcaaaaaaaaagaattatataatattttttttttaaaaaaaaaaaaaaaagatgtgccccccctctcataaaaaaatacaaaaattttttttcccaacaaaaaaaaaaatttttttaatttctaataaaagcccctcttttattttttttaaaaaaaaaaaaattttntttggggaataaaaaataaataaaaataaattttttaaaatttttttttttttttttttcaaacaaattataaaaaaaaatttttttttgccgccccccgtgaaaaaaaaagacacaccgttttttttttttttttgagaaaaacttttaaaaaaaaaaaaatatattgtctttaaaaaagaaaaa

SEQ ID NO: 422472 - DNA, 380 bp, Oryza sativa nipponbare
atatatatcttcaatcattttaaacacgaagcccttgcagactcccaaaattgggtcaactaaatcaataaaccattttcccgttccttccaccaacaaaattttcactcccaaaatcctgtaaccctaatttctacaattccaaattatattattatttttttttcaattgctaaaactgtctaccaactattacactgtaaaaacccaaactttacaaatcgcaagaatttccctctacaccaagataactctttataactccttcaatttaataaacagcctggggcaacaaaaactactttaacttacctcctgtaaatacacagcccaactttgtaacttaacatgagaatcattccccttcccaaaaaaaaata

SEQ ID NO: 422473 - DNA, 77 bp, Oryza sativa nipponbare
  unsure (1)..(77): unsure at all n locations
gatcctgtatagcaaccnaactttttttttttttttaacatnctaatttataataaattacaacaccatatttcatt

SEQ ID NO: 422474 - DNA, 203 bp, Oryza sativa nipponbare
  unsure (1)..(203): unsure at all n locations
ttttttttttttttattttttttttttatttaatatttttatttttttttttagtttttagttttttatttaaaaacaggatttttttataaattttaataannaaatttttttttatttttatagataaaaaaaaaaattgatatttatttttcccttttttaaaaaaaaaaaaaatattaaattttacaaaatttttttat

SEQ ID NO: 422475 - DNA, 128 bp, Oryza sativa nipponbare
  unsure (1)..(128): unsure at all n locations
tatgnaccgtcgcatgccacgccgtacgtgaagcctgtggatgcgctctagaagcaggcccgccccctttttttnnttttttttgagacaatggaagtgccatacccataatttagaaaatagctggt

SEQ ID NO: 422476 - DNA, 264 bp, Oryza sativa nipponbare
tcaaaaacaggatcaggcctacaattatctattcttttcaccaaatggagcacgcatcattccctaataccatactatcacacatctacccttttcacacatcataccgggctcaattctttctttttacattgaacaacagttgacactcattacagcttttcatttctaataaaactagctgatactgtactccaattcattcctcttaatcggaatccattgggcatcatccatcatccacaggggccagttgatcaaaca

SEQ ID NO: 422477 - DNA, 301 bp, Oryza sativa nipponbare
  unsure (1)..(301): unsure at all n locations
ctgggaaactgagtgtattggaataagctggtgaaatgttatatgggcggtgtggctgcancaaccttctttctcagtaagattatggcacttctgcgtgtcacagtctatatatattcttcagactgaaacacttggctggaatatgtatttacagtgatgaattctcaattaggagaaatgcacacttctaattctctctcactgaattactgatggttggagcgatccttatatatatgtgtgctcatgcagtttggaatatgttctggaccattctcttcggagactccattgctgc

SEQ ID NO: 422478 - DNA, 313 bp, Oryza sativa nipponbare
ggggggaagaaaacaaaccataaatccctccaacttttggaaacaaaccaactttattttttaaaaaaatttttttgcccttaacatttatccaacactttttcccatttttttttgagtcccccccaaaattaccaatcccgcttcattttttaaaaaattattttttccattttagggaatggaatcaattcctttttcttttggctttggcaacttgtttcaattcacagctttaccaaccaaagtaaaatgaccgacaggggctttttgatcccatttttccaaaattttttcaaaattttggaatttt

SEQ ID NO: 422479 - DNA, 324 bp, Oryza sativa nipponbare
aataaccatacatcattaatccaatcattcctttaatcccctctacgggttacgttaaatctttatccaaagaagcaaacatcttaacaaacctaattaatcaagcttgcaatatactatatccatcacacacacacacacactattaatgatcatacatacatgcacttctgtaactccaactatacattcacatcttatatactactactctacacataaaacattaattaacaccatcataacctttccatttcctaactatccgttcaccaacctgaactcatatacccactcgatattccctaccccttatgaaaccta

SEQ ID NO: 422480 - DNA, 340 bp, Oryza sativa nipponbare
gtatcgattgccatccaaatattcagaggctcctacagtgcttctcggatctgggctttcctcaacagggctaaagaattttgaaatactttggtagattgatacataaaatcaatctacaatgacacaaaactggaatctaaaaattctaccccatggataaatggaagaaaaaggacatgtggcatatattttattttagctagtaattcctaccaaatgaataaattatctcctccgaattacatcaagactctttctgtctagtttgtggtgactgtccctcttgctgtatcctaggaaacagaagttcgtgtatttgcttctctgcaccaaactc

SEQ ID NO: 422481 - DNA, 109 bp, Oryza sativa nipponbare
atacaccccatacctaacctcggatcctttaaaacatcccacctttcttttttttttttaaaatattcaaaaataatcattctcctatccatctcatactctcccactc

SEQ ID NO: 422482 - DNA, 422 bp, Oryza sativa nipponbare
agaccgcccttttttttttttttttttttttttttttttttttttttttttttttttttttttttttttttttttttggggtttgttttttaattttaaattttgtttttaaaaaactcaatcttaaaataccaaccttttaattaaaaattttttgggttttcaaaaaaaaaaatttaaaaaaaacaaaattttttaaaaaaattcattttggacctttaaaacctaaaaaattgttttattggtccaaaataaaaaacttttcttcaaattttttaataggcaaaattaaccccgcccaatttttggaattttcaaatcctctttaaaatttcccaatttttttttaaaatctttaatcccccccctttaaaaatttttgcctcttttttgctaaattaaaaaaaaaaaaattttgtttt

SEQ ID NO: 422483 - DNA, 338 bp, Oryza sativa nipponbare
  unsure (1)..(338): unsure at all n locations
cacccctacctaancttgtatgctgtagagacacccccttttttccttttttttaaaatattcaaaattaatctttttccttcntatctcatattctccaactctatgcgtctgagtaaacaatcagcataatctttacattcctaattaccatcccaaacaaaattctccctctgtcaacatctgattcctcccccccctaaatttctaaacaggtaggaaataaaaatcgtaaaaattaaaatcacaaaaacaatgctacattactacaatacgcatgcaactcccacttttcctttcaccaattcaacaaccatcacttttatccctccatccct

SEQ ID NO: 422484 - DNA, 65 bp, Oryza sativa nipponbare
  unsure (1)..(65): unsure at all n locations
aaacanccnccctttttttttttttttntatcaaataccatccaaatattcatatactcctacaa

SEQ ID NO: 422485 - DNA, 335 bp, Oryza sativa nipponbare
ttttggggtagaacactagaaccaacaaccgaagatatagattacttctgctggggggcccagagagtgtggtcatacagtctatattactactaactattacaaggaggatacgctgacgcttgagcctttactaacatccttgaaggggatcattctgaacaccacataatcccaccgaatggtggctatacatacaaacaccattttattctcttaatgaacgagtcaggtatcaaagagtggacatttgtatgacaagctgctcacacgtcgacactcgacaaagtgactctctctgggtaacagatgcggaattcccgaaaaattatctc

SEQ ID NO: 422486 - DNA, 240 bp, Oryza sativa nipponbare
  unsure (1)..(240): unsure at all n locations
tacggaagcttggatcctctaaacaaccccccttttttttttttttttcnaaaaaaaaacaattataactattnacaacccaatntatcttctccgtaaatgatatcaacatggtaatgtcctctcctcntaacatccacaaacatatancataanttcaaggcaccaattcttattccacttacagcaattattcaacccacaaccagtgtgacatccttcccatcaaaacaattcaac

SEQ ID NO: 422487 - DNA, 327 bp, Oryza sativa nipponbare
ccacgcgtccggagttgtacctcaatggccctgaggctaggggatccgtaccacacaggagtgacgcgtccagaaaaataaagagagatgttattggagctgcaggagaccatgatgaacaaaataggaccagcaaatcaaaggatggcaagcatactagtgagggggtcctggcttttgcctgcacaagaaactctggatcccttgatggccagcatttgcctccaaaagacactactagtatgccaggtttgagaaaagtaaagctcaaggttagcgggattactcgacctctacatacaaaaaacatccaagaggcaagtgatg

SEQ ID NO: 422488 - DNA, 119 bp, Oryza sativa nipponbare
ccacgcgtacggctcaccactgctagcttgtgaagaggaggaggagctcgagctcggagagagacaacaatggcggctcaggctcttctctctgggaggcaactgctggggaggccatt

SEQ ID NO: 422489 - DNA, 231 bp, Oryza sativa nipponbare
tcgacccacgcgttcgcccacgcgtccgaacaatgatgctgatgttcatacactcaatataggattgcgtctgttctaattcaacaatgcatagccgtagctaattcatttactcgcttttgcaccttatacaaattgtgacgtgggtttgtttcctagtgtactaggcttccctagaacgagtgtaactggccctttttgcgttggccggctccgtatggacaaccttct

SEQ ID NO: 422490 - DNA, 117 bp, Oryza sativa nipponbare
  unsure (1)..(117): unsure at all n locations
ccacgcgtacgcgtacgcttacgcaanggcttacattaagcattctgagcagaaccgctgcttctcataacgtccgggagaccatcttcaccgcaggggggggcctggacgcccaag

SEQ ID NO: 422491 - DNA, 52 bp, Oryza sativa nipponbare
ccacgcgtccgcccacgcgtccggtttgcatcaaaatttgagaagagcagaa

SEQ ID NO: 422492 - DNA, 111 bp, Oryza sativa nipponbare
ccacgcgtacgctcactcatactgtcgcttaagctctaggaggggttctattgggcgcgcataatgccattcacatggtgcaaggacttctaggtggagcgacactagaaa

SEQ ID NO: 422493 - DNA, 90 bp, Oryza sativa nipponbare
ccacgcgtccgcccacgcgtccggcgaggaagtgtcctggggatcgatcacccttgttgatgctgagaagcggctgctggccaatgcctt

SEQ ID NO: 422494 - DNA, 176 bp, Oryza sativa nipponbare
ccggattccgggtcgacccacgcgtccgcgtacgcgtgagaaaattctcttctgatcaagtcctacagtgagagtcacatgcctctgaggtgcgtaacctacaatgtgatgacagaggcgagggagatcgttttagaagactggtattctatcaacctcctattgtaaaacaagct

SEQ ID NO: 422495 - DNA, 207 bp, Oryza sativa nipponbare
ccacgcgtccgcttctccacttccccttcgaatctagggttacgactccgaccaacctcgccgtcgccaagctcgccgactcaccggccttcctcgtcggccgcggcgcaaagggagaaggtggggagcgaagatgccgcagcggcactcgaagaacaacaacgacctcgccttcttcacgtacgaggagaagcggaagctcgggta

SEQ ID NO: 422496 - DNA, 291 bp, Oryza sativa nipponbare
  unsure (1)..(291): unsure at all n locations
ccacgcgtccgaaaaaatgtttcatccgttgatgcaagctgggtgaagagctgtgttcttgctagttcatccaatgatcataccatcaagatttgcgatcttcagtcaggcttctgcaaaagcaccataatgtcagggagcaacgccaactcactagctntcattgatggtgtcaccctttgctcgggtcatagggatggacaccttcggttatgggacatccgaagtgcaaaatgcactagtcagacattcgctcatcttgacgtaagctctgtcagtgtgtcacggaat

SEQ ID NO: 422497 - DNA, 177 bp, Oryza sativa nipponbare
ccacgcgtggcggcacgcgtaccgtccacgcgtgcggccacgcgtgcgagagtgcaagtgcatgggcaaccagatctacataagaggagaggacgcatgcatagccaacagcaagtgaaggtttggctggttcatcactatattggaggcggccagcgtaaacgacgtggggattga

SEQ ID NO: 422498 - DNA, 76 bp, Oryza sativa nipponbare
ccacgcgtccggagcctgagcttggaaagcggctcatctgtaatatcgggctatcaagataatctaggaacgatgc

SEQ ID NO: 422499 - DNA, 137 bp, Oryza sativa nipponbare
tcgcaccgtcggtactgcgaactctctttatcctaggctacctactagtattgcgaccgcgcgcgttcttgacccgcgcatgcttttttatctggccgcgcgtgcgagttgtgtcttgctcctggcctatcagcatg

SEQ ID NO: 422500 - DNA, 84 bp, Oryza sativa nipponbare
ccacgcgtccggcgaaaagcagcatctcctcctccgacgagcattgatctgatcgagcgcgcgtcgatcgtcggagaggatggc

SEQ ID NO: 422501 - DNA, 124 bp, Oryza sativa nipponbare
tccgggtcgacccacgcgtgcgctcgacccccgcatctcatccctcctatcgcttagttcagatcgaaatcgcaaatggcgaagattaagatcgggatcaatgggttcgggaggatctggaggc

SEQ ID NO: 422502 - DNA, 61 bp, Oryza sativa nipponbare
  unsure (1)..(61): unsure at all n locations
cgcgtacgcaaacgcccacatnatacgcagaaatacacatcaacacgccacgccttagagt

SEQ ID NO: 422503 - DNA, 269 bp, Oryza sativa nipponbare
  unsure (1)..(269): unsure at all n locations
ccacgcgtccgcgcacgcgtccgggacactttgagcttggcaaggcacgccgccaggtgaagcgcattcttgaaggacggngtatcagtgatgagagggggctcctgaagtatgcacgacaggcaaccggccaggtgaccgaaccatgcttcggtcgtggtcgggcaatctttgaacacccttttaaaataagcaacagagctttgcgctgggagctaattttcatgctgggatcgagatgttgggctttttggaccaattgggggctt

SEQ ID NO: 422504 - DNA, 157 bp, Oryza sativa nipponbare
cgaattccggtcgaccacgcgtccgcccacgcgtacgcccacgcgtccgcccacgcgtgcggctcccacttcacttggaattcgaaatccacacgagcgcggcggcggccgcggcggcgatagcgagcaccattaacgtggcgtcagacacctcgag

SEQ ID NO: 422505 - DNA, 211 bp, Oryza sativa nipponbare
  unsure (1)..(211): unsure at all n locations
cccacgacccacgcgtgcngggatcgcaaacttatgagcaggtagcctcaaatagcataaggaccaccatgcattaattaacttgaacgaacgaaacaattatgggggctgcaaccaaataaacaatcggttaatacacccgttttaatatcaggcaatatatgtttgatcaaaacaaatcatgtgctaaggttgaacgtactcaatatgg

SEQ ID NO: 422506 - DNA, 145 bp, Oryza sativa nipponbare
ctggcgcgttacacgcggactggaaacctgcgaccaataatgctgagaatcccttcgcagtgggtatacaaaggccgaccgacgccttcaacattgccagctgatggcaaggaccgcctgtgcgggcattaacgcgcgggtgtgt

SEQ ID NO: 422507 - DNA, 55 bp, Oryza sativa nipponbare
ccacgcgtccgcggacgcgtgggcgagagacatcgccggcgaaaggagaggagag

SEQ ID NO: 422508 - DNA, 173 bp, Oryza sativa nipponbare
ccacgcgtccgccactgctagcttgggaagaggaggaggagcttgagcttggagagagacaacaatggcggctcacgctcttctctctgggaggcagctgctggggaggccattgcaatcttcagtctccaggtcttttttctccacgaagggcccctttatggtcagggcag

SEQ ID NO: 422509 - DNA, 143 bp, Oryza sativa nipponbare
ccacgcgtccgcccacgcgtccgaccaaaccctagccgcgagccctgacgttgcgaggaaggggaagaggagagatcgagatcggagagatccatgcatggcgctgcgagccctgatcagcgagatccaggggatgaaggtgc

SEQ ID NO: 422510 - DNA, 54 bp, Oryza sativa nipponbare
gctctacgagtccgactcgtcaccttgctaagacaagcttcagacagcttactg

SEQ ID NO: 422511 - DNA, 52 bp, Oryza sativa nipponbare
gtcgacccacgcgtccgctcccgacgcgtataacaagtacagcgccggtgct

SEQ ID NO: 422512 - DNA, 301 bp, Oryza sativa nipponbare
ccacgcgtccgccacgcgtccggttctagcactctgtaccatgattgatatcttgggagttccttgaaattattaacacaagcatttaattttaagtcagtgttataatctgtttctaaatgtgaactatttggatttatggtgcagtttagtttgccactatcgattttgctacaatcgatctatgttgttgagcatctaccaagcaggagatctaaaaaaacatcgtaccacggttagtatcattcaacttgccatcagtactgtgctaaaggctgaatgtatattatgtgtatgttgc

SEQ ID NO: 422513 - DNA, 59 bp, Oryza sativa nipponbare
ccacgcgtccgcggacgcgtgggcggcggacggcggcagggcggcggagctcgtcacca

SEQ ID NO: 422514 - DNA, 59 bp, Oryza sativa nipponbare
  unsure (1)..(59): unsure at all n locations
ccacgcgtccgtccacgcgtacgcccacgcgtccgnccacgcgtccgtccacgcgtacg

SEQ ID NO: 422515 - DNA, 305 bp, Oryza sativa nipponbare
  unsure (1)..(305): unsure at all n locations
acacgcccttttttttttttttttttcttttttattttttttagggggtatcaatcctttctcctcnnaattagaccggataacaatcaaaaacaataattccatccaaaataaaccaatcactcctctgtcctttacccaataaaattgtacctcaattctcaccacaaattttttttttctagactaaatagtttgcaccacataaaccttcactacactacttataacaccaaataatttgccccatttcatttcatttcagataacccactcaaacggcaccaatatttttcagcttacca

SEQ ID NO: 422516 - DNA, 418 bp, Oryza sativa nipponbare
aacagacaacatccctggatggggagttcttttccacaataaagttggggagggcacagttactgtaagtgctaaaataatcacaaagacaaaaatactgggctagcgagccagttgcatttacctgatcttatacagaagcaaatcactttgcaatgcagatcatgatggccacccttctgttcataatccccagcgggaagagggagggtgagaagctgatggactggaacaagtgcaagaagatccagtggaacatcatccttctcctcggcgcaggattcgccattgccgatggcttcaagacgagctggcttaccgacatcctttccaacggcctcaggttcctgaaaggggcgccgactctggtgatcgtgcctgtcgcctgcgttttcagcgggatcatgacagagttcac

SEQ ID NO: 422517 - DNA, 327 bp, Oryza sativa nipponbare
tttttaatatttatttattcattaaaaaaaaaatcacaacctttagattgctggaatacttcaggtgcggtgagaaatttatattactcattactaccatccaaaatgtaccattcacctaactctctccactatttattcacatacaatcatgctggaaacaattaccaaattatacacagtacctctcaattttaatacatttatctctatatctttaaaccactcatattaataacatcttatacatgcatactccacaaaacaaaaccaccatagcagaatccgaccctcttaaattgcccaatcatacgtatcatcaatctg

SEQ ID NO: 422518 - DNA, 309 bp, Oryza sativa nipponbare
attggggccaaaacttttaaattaattaaattttttttttatttttcaaccttaattattttttttacatattgcccatacacttgaaaaaaaaataaaaaaaaaaaaaatttttttaaaaaatcccccatttggcaaaacccaaccacccaacctaaaagcggtcttcaacataaaaaaaaaaattttgatttttttcctaccaccttaaatttttttaatccagcccattcaccccctccaatgaagcaacaatttgcaaataaaaactaaattcccttttaaactaaacctaatttttttttttaa

SEQ ID NO: 422519 - DNA, 362 bp, Oryza sativa nipponbare
  unsure (1)..(362): unsure at all n locations
tttttttttttactaattaaatttttattttatttatattttttattttgtttgttttttaaaaaaaaatgggtattttttttaaaattttaattacaaaatnaaacaccttcacctgtatanaaaaaaaaaaaaataatctatcccttgtaatgaaggtccccccaaatgagaaaaataaaacctaccttgctacttaacaataaatcaactactgcgcctcttttctaaccctttcttttactaaccaaaaaagaaaaaaaaaacatatttagcacacttccggtttgtccgcggatggtctggggtctctctatttagtacctttcaaaaaaaaaaaaatataatctatgttttttccc

SEQ ID NO: 422520 - DNA, 259 bp, Oryza sativa nipponbare
cctatcagaagatcacaatcaccacattttcaaatacatctcccaactcgtctgttgtttcactaacaaggaacacattcttccactcttctaaactactcctcttttctccccacctaagattaaaattaacttgagtccagcctgcttcaacctcgatgaaatacttacagactactcttccccttttctcccccctacacaacagttaaaacattcttccctaacacaaaccttaacttttactatacaaaattta

SEQ ID NO: 422521 - DNA, 323 bp, Oryza sativa nipponbare
aaatactacaaaacatttcttatcacacatacatattttaattcaaatggggtggccacttaatataatgtgtggtttcatactccatacacattcctccccactcataaaataaaattatactacacataacaaaaaccaaaaaaacacctttcctaggggtgtttacaaacaaaaacatacaccatttaaaccccatgctaaaaattctttttttttatttcaagctctccaaataaaacacaaccccttatttttttttattaaattttcagagacaccaacaaacaggccacaacactataaataactaaacaatcact

SEQ ID NO: 422522 - DNA, 385 bp, Oryza sativa nipponbare
  unsure (1)..(385): unsure at all n locations
ccttcctttttttttttttttttttataaaatttatattttttttttttttatatattcttttttttttttgtttattttttataaaaattttttttttttcatatatttaatacttttnnaaaccaaacctacaacacatctactcattttttcaaaaaattccctaaatctttgcgtcaccaatacttaaaaaatttttattttcacaacagccacccaaaaattaacaccttctcttaaatttatatcccttataaacaccttccaatatatctcaaccaatccagcaccaacaaaccccccaacccttaatattcaatttttattccacccattaaccttttttatttttttttcccaaacaaaaaaattttctttctttt

SEQ ID NO: 422523 - DNA, 231 bp, Oryza sativa nipponbare
  unsure (1)..(231): unsure at all n locations
atacaatactagagtaattaaaacacttatatgcccacctacaaacataggggtacttacatatgtacggacccctcctttnttattccatctacacttattaccagttanctctggccaacctgagtaattaattaattatttaactgcttcatgatctgattaactatttaaacactcactaattaaaacacacctaattaattaactgacctgcccgctatgctaact

SEQ ID NO: 422524 - DNA, 455 bp, Oryza sativa nipponbare
aggggggtgggaaccctcaaaaccggaaacctttaattaattttttccaaaccccaattttcatttttttcccttaccaggggaaccaaaatttaaaacccctaaatttttttttttaaaaaattgaccccccctatttttaacaccccgtaacaaaaaaaaaaaaagccccaacaaaccccacaaattaaaaaaaaaattggcccaaaaactttttttttttaaaatcccccaagattttaattattttaaaaaacccccttaaaaaaatttttatttttttagggaaccccccaaaattttatcctttttacataaaaaattctaacctttttttaacctttgaaaataaatttttcatttttccaaaaatttttattatttcgactttttctttaaaaaaaatttataccgttaattctatttttaaaaaaaaattttttttttaaaaattt

SEQ ID NO: 422525 - DNA, 320 bp, Oryza sativa nipponbare
  unsure (1)..(320): unsure at all n locations
tttttatttatctttttttattttttttttttttttttatattncccgggaaggttgattatttatttcccacttatttcatcatatacaaatactaacacatcctcaaaattatcaacctaaaaagttccttacaaattcattcaaacaaacaagtgtaaaaaacctttttttttcccatttcccccttaaactatccttaaaaaccaccatttcaccaaactccctttttttttttaccacaaataattttttcaacccagtaacttataattaattccagacagatttcccaacatataatggtaaaaatcaatttt

SEQ ID NO: 422526 - DNA, 395 bp, Oryza sativa nipponbare
  unsure (1)..(395): unsure at all n locations
aataactagcttgcactgaacctcacacttctgaaagagactcttggtgtgtcaactatctacgagaaaataatcactacgtgatcaanaaagtattatatgtcaggcacagcacacaaataaacccaacatgactaacttctactgtccttgaaggtctaaccatttaagcaggggtaccaaatcatcatctgcagggagcataggctacatgaatctcctattatacactcaaaaaacataaaagcccaagttctctaaaaaggaaaaaagcagcctccaaaatggcctctataagacttcaaaatcaaaggcttatgttgtgtctcatgtctcccttcgggacctcccgcttggggcagcagctccatccttctcttcctcttccttctccg

SEQ ID NO: 422527 - DNA, 336 bp, Oryza sativa nipponbare
tgctaaagaacaatcatcatactaaaccttttatttatcactttgggggtggatcacactgaaactttgtaacatttacatttgactaatgacataaacagttccattttaacttttatacaaacaaaaatttctcctacaacatacacatttattggcatctaacaacacacacaagaactattcatcaaagattacatactcatcattctaaacttaacatcttatatttcacccggctctcggtaacattttactctcattactttctacccattcttatattctggatccactaaaacggttgaatcatatacaatcacgccttctccatct

SEQ ID NO: 422528 - DNA, 305 bp, Oryza sativa nipponbare
aaacattaaataccacccgggggtaaacaacctaattttataattaattcacaacaccatatttcattatcaggttcaaaaccttcacaaaaatacacactacctgtacaaatttcacccttttttcaatactcgtacatccatccactctgtccacaccaatacttacatttatactgtacacttacttacatttacttcacctcgtacacacacccacacttttcttcaaaaactctcattgtcgtcaacctaactatcttaacttaaggctatgcttctccattgcaacactgcggcggctg

SEQ ID NO: 422529 - DNA, 379 bp, Oryza sativa nipponbare
gttgggctaaaaaatggttggggcttggactaacaccaaacaactttaaagttttttgtcccatttttttatttataaattatgagtgaaatttttacaatttgtgggctaaactaaataattcccatttttttttcaaaagatcaacacttttatccccattttccacctattaaaaagaaatcaaattttattgaaaacaaactttttaaccccccataaaaaacataaaaatttttcttatgcataactttttgggggcattataaatttcctttttgtcctcacaagttttacattataccaaacagccggaatagcccttcacttgacaattccacctttttcttaaatatttgaaaggccaaactttttccac

SEQ ID NO: 422530 - DNA, 373 bp, Oryza sativa nipponbare
  unsure (1)..(373): unsure at all n locations
ctaaaaaaattaaaaatttatttcccacttatatatcatatacaaatcctaacccattccaaaatttttaacccaaaaatttccattcaaattcattcaaacaaacaactttaaaaaaccttttttttcccatttccccctaaaactatcccaaaataccaccattccaccaaactccccttttttttttacaaaaaataattttttcaaccccctaacttataattaatttccaaaaaatttctcaaacatttaattttaaaaatcaattttcttannttccccacttatccctctcccnattttcctttcaaaaaaccttaacctcatcaaaaattttcttaaactttttccccccttattttcccccccc

SEQ ID NO: 422531 - DNA, 378 bp, Oryza sativa nipponbare
ttagataaaaaaaattttaaacaaaaaataagcttttatctgaaagtggggttattcaaaaatacatgcgagttgtacaaacaaccccatctatataaatacatcctgactcacatacaaatggttaatttataaacaaatttctagacataattattagtttcttttaaaaatttacctaatttcatgttaaaactcaaaaaactaatattaacaacaaccattactatttttacttgcaaaacaaactcactatacaatgcttaaattcttagcatataactgaactccttacatatgtccaaaataacacaacatctaaatccaaaaaattgaaattaccttctacatcagagctctgttttttattataaaaat

SEQ ID NO: 422532 - DNA, 259 bp, Oryza sativa nipponbare
aaacacccttaaaaaaaggggtgtgtttataccattggttttgcacttctgcatcctaaagtactccacatgatacaccaggctggctttccatccataaggtaacaaatgggcagaattgccttttttgttataaaccaaaggattttcaatttaaagtaaaccatttatagtcccatcatgcatacagtttcagtccaagatacaacacacagcgaactggcaataaattgtttttttgtaaatcttaccactccaa

SEQ ID NO: 422533 - DNA, 342 bp, Oryza sativa nipponbare
actccccctttttttttttttttttttttttttttttttttttttttttttttttttttttttttttttttgttgtttttttaaaaaagttttttttttttttattattttccttttttttctttttttttttttaaaaaaaaaatttttacaccccaaataaaaaacatttttttttttttaaaaaaaaaaaaattttaacttttttaaaattcttcaaaaaacccccccaaattttcccccttttttataaactttttttttccttttaaaaaatcttttttttttttttctagtaaaaaaaaaaaataattttccctccccccctcccccctttcaaaa

SEQ ID NO: 422534 - DNA, 592 bp, Oryza sativa nipponbare
aaaatgttgttttttttttttttttttttttttttttttttttttttttttttttttttttttttttttttttttttttaaaaaaaaaaaaggggggaaaaaacccctttttttttttaaaaaaaaaaacttttaaaaaaaaaaaaattttttaaaatttttttttttttagccttcttttttttttaaaaaaaaaaaaaaaaaaaaatttttttttgaaaaatatattttatatgggtttttttttttaactcaaaaattttttgcgccttttttttttaaaaaaaatccaaaaaaaaaaaatttttgaaaaatattttttgtaaaaaaaatttttttaaaaaaaaattattaatcctttctttttttttttttcaaaaaaatataattaaaacttcacaaaactattttttataaaaaaaacaaacttttttttaaaaataaaaaatttttttttaaaaaaatttaacaaaccatttatggattgttttaataaaaaaaaaaaaaaattctttttcttacaatattttttattttgggctttttttatttttccccaataaaaaaatttattaatttttgtataaaaatt

SEQ ID NO: 422535 - DNA, 243 bp, Oryza sativa nipponbare
gataaaaaaaaacaaagaggggggggctttttggtagttggcatcgcattcatcacacacaacatttatcacacaaaaaatttttcaccaacatttcatcacacataaaacaccctttgcaagcaagcggttcgtcaatcaccttactagcaacaaaaaccaagggaataaataattgtggttttttcctgccagggctttttcataccaccgtgggcttaaacttcttggccctctaaacct

SEQ ID NO: 422536 - DNA, 156 bp, Oryza sativa nipponbare
  unsure (1)..(156): unsure at all n locations
ttagacaaaaatggaaaagtttatttaagggctaaaatnctttttgatcgattacatantagaactaggactactantatcatcatcatcatcccatgatcatcctcctgttctatggagtacctgtttgattgatttattcattcatttcctaac

SEQ ID NO: 422537 - DNA, 403 bp, Oryza sativa nipponbare
  unsure (1)..(403): unsure at all n locations
taattaaatttttttttttttttttatattttttttattaaattttttttttgtttttattttaaataaagttttttttttatacattttattatattaacannnnctctttttttaccccaacaaaaaataaaattttaaaacaaaaaaaaaaaaaatctttttaaaaaaaaatttaaaattttggttaaaaataaaaaaaaaaatttttatataaatagattaaacatctttttattttaaaaaaaaatttttttaatataaaaaaattttctaaaaaactaaaaatatttctaataaaaaaagtataaaaaaaatttttttttttataaaattttaaaacggaaacctattttttttttttttttaaaaattttttaaaatttaaaaaaaattttttttt

SEQ ID NO: 422538 - DNA, 59 bp, Oryza sativa nipponbare
ctgacgcgtgggctgactcttgggctgactcttgggctgactcgtggtgtgactcttgg

SEQ ID NO: 422539 - DNA, 233 bp, Oryza sativa nipponbare
ccacgcgtccgcccacgcgtgcgcaggaccggatggattaaaaattcaagcttgttgtaactagtcatcatgactaaaaatgaccatgcttgttgctatgagtatgagcagagcaacaaccgcccgtgggttaaatacggtttggcccatccatgggcctaaaactccatttctctctcaaaagacttttttctggaaataaattaaatcctagaattttactattacgaatg

SEQ ID NO: 422540 - DNA, 318 bp, Oryza sativa nipponbare
ccacgcgtccgctcctccattatttatgcttcgatcctccatgctttcctctactgctcattggcaacattcggtcaattggacaggcgagctcagtattaaattttaatgtagcactatggtgtgctatttttgctctcgtaaaagagatttccgctttctcgttattttgagaagtgattttccttgccggtcttatcttctttatacgtttctgtttctttagccattgttttctacttttctctgtataccacgggtaatatcctttttttttgtaactattgttatttagctttgcctttctatttcaagggt

SEQ ID NO: 422541 - DNA, 107 bp, Oryza sativa nipponbare
ccacgcgttcgcggacgcgtgggcggacgcgtgtgctcagaggtgggttggcttctcctctctcttccggttcggttcggttcgtgtccggtgggtggtgttttttt

SEQ ID NO: 422542 - DNA, 91 bp, Oryza sativa nipponbare
ccacgcgtccgcggtgacggtcgcctccaccgccgacatcgccgtcgacgtctcgctccggcttctcgccgacgccacgtcgctcgccgac

SEQ ID NO: 422543 - DNA, 83 bp, Oryza sativa nipponbare
ccacgcgtccgcggacgcgtggttcgtcttcaaccaaccaaattcttgcacacgcgcagcttgagccatggccggagagagca

SEQ ID NO: 422544 - DNA, 121 bp, Oryza sativa nipponbare
ccacgcgtccgagagagattgtataatatatactgtagaatgtgagagacccataggtcagacattggtcatctgttgaatgctatggatgagcgagcacatgttcgaagtagcattgttg

SEQ ID NO: 422545 - DNA, 73 bp, Oryza sativa nipponbare
ccacgcgtccgcccacgcgttcggattaccagaggctcattcatcgaaattattgggacaggaaaagaaaatg

SEQ ID NO: 422546 - DNA, 236 bp, Oryza sativa nipponbare
ccacgcgtccgcccacgcgtccggctacgcttccgctcccgtgccgtgccatggcgccgctcgtgtcgctctcgctccccctcccgtgcgcggcccgcctcgtcgctccctccgcgcgcggagccagacgcctcgtcgttcttccacccgtccgcgtcgtcttcgtcgtcgccgcgcggcggtcggcttgcgctggccgtggtgcaaccgggctctcggcgccgatgggtagggag

SEQ ID NO: 422547 - DNA, 89 bp, Oryza sativa nipponbare
ccacgcgtccgcggacgcgtggtgtataacatattgaagcaacgtaacatctagtttaacttgatgctgatcacggttgatgacactga

SEQ ID NO: 422548 - DNA, 95 bp, Oryza sativa nipponbare
ccacgcgtccgcagactcgtcctttcagaacacagcacagctccttgtgctgaatggcctacagtcctgtgagtcgtggtcctgaagcgatggct

SEQ ID NO: 422549 - DNA, 485 bp, Oryza sativa nipponbare
cccacgcgttccgctttgtttccgtgagcgatcgacaggaggacatggcggaggaagcggctttttttttttctgtggcggtggtgaggatgtcgtgtggtagttgtttttgtctattggggcttttctttttcttcatctatcttttcttttttttttttttgtctttgtttttcccttttctggttttattttttttctttatattttttttttttggtatgtttttcttatgtgttttttttttttttttagagaattatattgtttttttttttttttttttttttaatttaatttttacttttttttttttcttctttttttttaagatgtttttttctctcatactattttttttttttattttcctttgttttttttttgagggttttattttttttcccatgagcatttataatgttttttccttttttttttttttaggtttctttttgggggtttcattttggagcttttttttt

SEQ ID NO: 422550 - DNA, 499 bp, Oryza sativa nipponbare
ccacgcgtccgctcggggtccatcgtcggcttctgcggccggagtgacgacttcgtggacgccatcggcgtctacgtcgccgtctggaatcccggaggttctatgatagcatgcgcaggcagggcgtccgcgtttaccgggcgtcgcctctgcgcatggacctgcgtcaaatagaagaagagaaaaagaaggaagaagtggaacgtgggcgcctacagaaggagctcgaggaggggcgagaaagtcttcggaacatacgattgaagcttgatatgcccccagaacagagaaaacgcctgatacgactcgacctgtgagtggagcatcaagaaatctaacctctgttaccagagatgcaacaactgggactcgagcggttacatctggagcaaccagatatcgaacgttatttaccctctcgttagcaactggggcatcaagaaatcaaccttagttactaaacttgtaactcgagcgttagctacaccggtggagatac

SEQ ID NO: 422551 - DNA, 395 bp, Oryza sativa nipponbare
ccacgcgtccgccagtttctttgtccagccaaaggacccaaggtccttccttcgatcaatgtcagaaattctttggttggaaatcctcccaccacggataccacatcgaccaacatctagttccgctgacgcttcgggacaacctctacaatcttcagctgaagcacatgattcatcaagtatatggaagccaatatcatcttctctggatgcattttacagggtttctcggccacattctggcataggaacagcacttagcatagtctaaggttcgctgctagctgatgagaatatgttcgatgtgtcttcctaggtcctcactgggatgctggaagcagtggtagcagctctctttatgaacatatatatcgtgggatggatcagttgtcgac

SEQ ID NO: 422552 - DNA, 269 bp, Oryza sativa nipponbare
ccacgcgtccggccgccgccgcgtggccgcctccgccgtgcggttcgaccggcgctccgcggcgctcctgctcctgtccgcggcggcgggtgcgggccgacggtggcgtccccctcccccgccaacgccgctggcatcgggctcttcggcatcaggaagaagctggagcgggcggaggaggcggcggcggaggcggtgcgggaggtggaggatgcggcggtggaagccgcggaggtgggtggggaggctgtgaattctacggataatga

SEQ ID NO: 422553 - DNA, 115 bp, Oryza sativa nipponbare
tatacccgctgcttcttcatgcgtgacgtggcgagacactatgcatacgcagagagcgctgagaacatatacgcactgcgcagtctcgaggtattgcggcgcacgagtatacgac

SEQ ID NO: 422554 - DNA, 460 bp, Oryza sativa nipponbare
cgtccgcccacgcgtccgcccacgcgtccgcccacgcgtccgcccacgcgttcgcggacgcgtgggcgcggcggcggcggcggcggcgggcggtgaccacaaccaccaccagcgttgtcggctaccggagggcgctgctttccagggaggcggctgcggttggatccacaacgtttcagctgagactcggctgtgtggtgaagtctgagtatagagactgtgttttgttattaagtgggttcgttttgtttttgtatttttattttagtttcttgacttgtattatctttttttttgttcttttggttttttatgtgactttttattttttttggtgatttctttttttttttatttttttcttgtctattttgtttgtttttatcattattaattctcacttattttttactccagtttatattttattttttttatttttcttataatatccttttta

SEQ ID NO: 422555 - DNA, 140 bp, Oryza sativa nipponbare
ggcgcgcggcccgccctcccggttctcagggggggcacccatcgccgacccgagggacatgaattctgctcttgggtcgtcgacgcggcgcaaggcgcttagtggaggacgcgcgcacttatcgcgctccgggagagaga

SEQ ID NO: 422556 - DNA, 218 bp, Oryza sativa nipponbare
  unsure (1)..(218): unsure at all n locations
accaactatatacacacaaacaggcattgttttaataataaaaacacccccccacccaccacctacaccctacacatatacctaataatacataatttatacccactaccatccataccactacccatcattttttccatcnaccatacaaaaaaaaaacatacattcttacacacatttacacatatacacatccatatatacatatataaaaactc

SEQ ID NO: 422557 - DNA, 266 bp, Oryza sativa nipponbare
acaacaccatatttcattcatcaggttcaaaaccttcacaaaaatacacactacccgtacaaatcttaccctttttccaatactcgtacatccatttaccccttccacaccaatacatacatctatactgtacacgtacctacatttactacaccgggtacacacacacacactctccttcaaagaccctcatcatcttcaacctaactagcttaacttaaagccattcttcgccatttcaacacatcagcgacgtccctcacttt

SEQ ID NO: 422558 - DNA, 289 bp, Oryza sativa nipponbare
  unsure (1)..(289): unsure at all n locations
aaanaattaaattnttcntttaatttaaaccccccataatccaataaaccatttaattaggtaccttttatcaatcactccacaattaacaaaatttctttcccccactttatccaaaatttttaaacttttcattttccaattttttttttggcaactactaccttctttttaattcccggcccatcattctttggcccgaaaaacttttttcggtggcccccccttaatccttctaccgcgccaagttctccctcttttttttttacaaaccaaacacttttacccc

SEQ ID NO: 422559 - DNA, 419 bp, Oryza sativa nipponbare
gggccagggaatccagccttgttttctcattaccaatgtaacaagtcacatgcattgccgtgtgcaaaacaatattgtttctaacaatagatgcagagatcacatactcatctgttattcatctagtcatacaacattccttctttctctatacatgtcggatccttcctgtagtaatcctaatgctatattgaaagcaaaaaagtttcttgataaatcttctattaatcttacaaggcaaaaggagtatcaacgccaatggcaacctgacttgtcgatgtgccatatttctttctgcactctggttacttacagtgtgcatttctgtgggtacctgcaacaattccccttatcaaacatttgtgttaagaacactacaagcgaataaataagctacaatcacctttactataggtaac

SEQ ID NO: 422560 - DNA, 224 bp, Oryza sativa nipponbare
cctccctttttttttttttttttataatacaaagcaactcaaaggtctgtgatttatttacacaacatcttcttttccacaccaaaacttctccaattacctttaataatactaacaacaccatttctatctatcatagcgtctaacactttattatctataatatcttaaaccaaaataatattcttaccccctcctttcatcctaaacctacaacctccttt

SEQ ID NO: 422561 - DNA, 403 bp, Oryza sativa nipponbare
ttttaaaaattttaacgggttatggtttttattaaaaagacgctctcaaaacatttttgaattataaatgaagaattttcaccaaggtgctctatgcaacaccaatgttggagggttttcaacaaataacaattttactgactcttaagactggccttccattacacaaaaacagaactcaattcttcctttaaacgccacacgccaaacaaaatggtcactgccaatccttatttggaaaaaatttgcggggaaaaacatttatcaccaaggcccggcctcctccatctaaatacatttcctctctaacaaacataaaaggcacaacatcttaacctccaaatcttaaaaattgctttccttatcaaacggactccttggcaattttttatgcctttgcaat

SEQ ID NO: 422562 - DNA, 330 bp, Oryza sativa nipponbare
tggttttatccatccaaggccgggaatcatctcctggtgcctactcatttcatttatacatactatatatactcaaatcctacaccactaactctcacacaaatatatatgtatgaaaagcaatacatctattaacactctatacactatataaactactacacacttacagacgtacttgaaagctcacacatccaactttaaccattcacaacaaacaccttacattccgaatacaaataaacaatcgcagaattaccctcattcacctgcccagttaacattttctccctcatgctttcctccaggaacctcaacattgccctcctt

SEQ ID NO: 422563 - DNA, 369 bp, Oryza sativa nipponbare
  unsure (1)..(369): unsure at all n locations
aancttaaattgttttgtgttttttttaaattgagcatacattatttttttatttcattttatcacacataaaaaaattttgtacatttttacttttcggttggaaattttaaaatttttaaccctaaaaattaaaaacaaacacttttttcaaaaaaaacttcttcctattgatgaatagattattttaaaaaattttaaaaacaactcattaattctgtaattccaataccaaatggatcaaacatttactaattttgatcccttcccttctacacaattttcaaaattacaacaatctaaccccttttcttaataactaaccatctcccaactttttattactttttttgcccaatttttttattt

SEQ ID NO: 422564 - DNA, 449 bp, Oryza sativa nipponbare
ggggggggggttttattgattatgatatacctttttactatttaaaccatactaattcactatttattaattttatttataatattacgggggggggacattacacaaattaatacctttttacaaacataaaaacccaaacaaccacctttttaattaatccataacaaaatggtttaattcatcaataataaaaaaacacacaaactacactcatatgggtggctaatattccggactaattaataaaagtgaatcccccggtgtaatatttcaaatatttcgaaacttcaattaccacacttttttgggggtcattatctggtgaaaaaaaaactggaggaccccttcttccttaataatgggacttctttaaaatttatttttctagttttaaatattaacaaaaaaaaatttgttcctttttttaaaaaaatttgtttttttta

SEQ ID NO: 422565 - DNA, 472 bp, Oryza sativa nipponbare
aaaaaaaaaaaaaaaaaaaatttaattttatttaaataaaaatttttttttttttttaaaaaaaaaaaaaatttttttttttttttttaaatgaattaaaaaagaaaaattttttttaaaaaataaaaaaattttgtttttttattaaatattttattttaaaaaaaaaatttgtttaaatttttataatataattatttaatattttattaaaaaaaaaaaaaaaaaatttttttttaaattttttttaaaaaataaaaaaaaattttttttttttttataaaaaaaattttttttttttttttaaaaaatattatatatttattaaaaaaatatttataaaaaataaatttttttaaatttttttataaaaaaatttaattatttttaatctattatttttttatttatttataatatattttatttattaatttttttattttattatgttaaaaatttattatttatt

SEQ ID NO: 422566 - DNA, 391 bp, Oryza sativa nipponbare
  unsure (1)..(391): unsure at all n locations
tttttaattnnatcctgtggnaggtattctcaaatattcatatttacatctcttanaatacatcangactcaaaaaaaatactttggacaactgggacctaattgggataggggctgtactncacattatcatttacaaattattacaataaaactctctatcttgggtcaaccattttcactatcaacaaattccccttatcccctcttgaggcccttacctcttcatcaaaatatataatttctacttcacctttaccactgccaggtgctttgattgaaatcaaattaaatatttttaagtaatcaaacccaactgccactcttctagaattaagaggtaccaagtttgcattaacctcattaaaatagggccacctctccatatttt

SEQ ID NO: 422567 - DNA, 394 bp, Oryza sativa nipponbare
tttctcaatttaaaaccacaacggaacgtgtgtttcaatcatgacaaccacatatccatcattacatatatcttcctataaggaattatttactactattcataaacgctacacagtgcattcttaaacaactctttcaaaagtaaaaaaataaccctctgttctcttactcatccctaagaaatatcacccctccacatcattaaattaccaaagatgttacctctgcacaatctgctaacccccacccttacacctaccaaaacctcataccccacaattccctaccctttcttcaaatcacaccagattttcctatattaacaactatcatagcttaccgcaaacttctcacaaccccgtttcttgctgacaattcaattaattaacaatt

SEQ ID NO: 422568 - DNA, 348 bp, Oryza sativa nipponbare
ttaacctatcacaccatcttagggggcaggtgttcaaaaccatctcccaactacacactaatttacccgtacatataacacattctatcacccttcataaactcatcccttgtcttgcatgcttacatttatattaactacaggccaacaaatactgcacccggtaaacacatttaacactttggcgagatatccgcatcgccggaaatcaaggtaagcaagttgaaggcgaagcggtcccttaggagctcggagagggtctcgatcacttcctcgccactaacttaggcccgtatgaacaaccccagcttttaaaacattcccagacgtcctttcttaatctcttta

SEQ ID NO: 422569 - DNA, 217 bp, Oryza sativa nipponbare
  unsure (1)..(217): unsure at all n locations
tctctttttttttttttttttttttttatttttttgggttggtgtttaaattaaaatttttttttttttttttttttttncaacccaaaaaaaacccaaacttttattataataattattattagggggggcaaaaattttttttttttttccaaaaaaaaaaacaaaaagcttgccctttctcaccttgcctaattttttttttttccctaccttt

SEQ ID NO: 422570 - DNA, 351 bp, Oryza sativa nipponbare
  unsure (1)..(351): unsure at all n locations
tacaataaaatcttattgatctggagtaatacataacatttcccactntaaatntacatcacaaaacttanggaatttccatatgaacttcaatacantttcnccattgcagatttgcaatttcaatttccctcaaaaaaaaatataaaaaaataaaaatttcaaggccagtttaaacattaacaccaccatgatccatcactctatgacaattaatttacacccacagagtcatcagcagataatcacatccagttaagctcttcactgaaagtctgaaaccatccatggcctaaactacacagcactactcattcagcagcacagtgatctctctctctctaggattca

SEQ ID NO: 422571 - DNA, 261 bp, Oryza sativa nipponbare
  unsure (1)..(261): unsure at all n locations
atattaaatagtttttttttttttttttatttttttttaacaataatttatttttaattaatttattattttatatgggggggttatatatattttttttatatatnnntaaaaataaaaaaatanaaacaaatntattcatctgttatttaaaaatataaacatacatatatatatcaatataaaatatgcccgaacataaccatcttaaaaaaaaaatgaaaacaatatatttaaccacaaaaaatataaaccccctca

SEQ ID NO: 422572 - DNA, 249 bp, Oryza sativa nipponbare
  unsure (1)..(249): unsure at all n locations
atattaaattatttttttttttttttttttttttttttttttataaaccccaaattattaaacaaaataacattgggggagagccacaatttttttttttcttttncccaaaaaaaaaaaaaaattccccacccccctttctntcccaaaaacaaccccccttttaaacccctcttttttttatcaaacccccaaaaattaacaacctaaaaaaaacacaacccccaacaaaatttctccccccccaaa

SEQ ID NO: 422573 - DNA, 289 bp, Oryza sativa nipponbare
tcaggatcacattaagagagtggttaatttgatatgtatacgagtgttacatgtaatactactagttatacatgcggtactactaatactgtgtgcaaaattaattaatggggggataaactcaacacactcgtttgctgcatgtgtaatattgtacaagtaggcgtatgcatctccaccccatgaatcaacggtagatagatagcttccctgcacgaatctcaatgcgggttcctcggatcgtggcggctgttggcgcctgagctcaggtagtcctgcgtcgtctgca

SEQ ID NO: 422574 - DNA, 147 bp, Oryza sativa nipponbare
taaccaaaacatattaaatccggggtcgttttttaaaaaaaaagtgacatcttcccttcttttaccattacataaacttaaacaataacatataacatatcctcctcctcttttggggggaatattcatactttttacccttataat

SEQ ID NO: 422575 - DNA, 278 bp, Oryza sativa nipponbare
  unsure (1)..(278): unsure at all n locations
gttaaaatactctctctggtttgaagcacaatgaaaataatacacttccctannatacacaatatcataatcaacaaaacaaatagtcgaataaacaaaaaattcaacagctggttattattcttacctttctcccaacaacaaaataaaatctattaattactttgctgtctcattaattcatgcaactctcgtattctttattactatccaaaacctcccactacaacaattatattcccttttacctacttaccctctccagaatccagttacac

SEQ ID NO: 422576 - DNA, 255 bp, Oryza sativa nipponbare
  unsure (1)..(255): unsure at all n locations
ggaggggtactctttccttcnncttcaaaattttattatttatttcccaattatatgatcatatacaaataggggggggggggaaaatttttttttttataanttgcataaaaaaaaatccgtacaaacatgtctaaaaaaccttttttttcccatttcccctttgaactatcccaaaataccactattccaccaaacttccttttttcttttactacaaaaaatctttttaacccagtaacttataattaatta

SEQ ID NO: 422577 - DNA, 445 bp, Oryza sativa nipponbare
ttttgaaacaaaaggagacattggtgggggaatttcggagaatgagaattctcctcaacatttataaatatctctgtccgtacatcacttattgaatgagtaagagaataggctggcggcatgccttaatattcaagtgcactgtacatcaatctatttagacctaaaacctttacaacagcaactacaggatggactttagtcaacaaaattcattagtcacgtgtgccctcgatatgattaagctagctggaaatcaatgaatcaagaatttagtgttgataatgcccttatagttctaccatttccaacttcacatgagctccatctactgcatacttccagtaccaggttccactgtccatcatttccttgcttatgggatctaacttagcaacaaattctggtccatcttgaacaatgcgcattctatgaccagtgggaa

SEQ ID NO: 422578 - DNA, 406 bp, Oryza sativa nipponbare
taaataaatatataaacctcatgcggtaatatctaaacgggagatttacactttccaaataacattacaccactctactttacacacattctcccattataatcatatccctggggttaagaccttaaacaaccacattaccaggagtacacacaaaacttgtatccataacctctcttgtgcatcaacctcactctttaacaaaaattacctacataattaatctacgtcctacatggcttccaccatatactttatagcttcaacagattaatccagcataccccaaagtctatccaccaacaaccttgaaaattgatgagcacaaacaattaccaacattatacaagtcatctctgaaacaccatgtaatcaacacacgtcatcacagcacaacatcatcatc

SEQ ID NO: 422579 - DNA, 301 bp, Oryza sativa nipponbare
aaattatattattctcttttttttttttttttttttttttttttttttttttttttttttttttaaccccaaaaaaaccggcggttaaaaccttttttttaaaccatctaaaaaaacacaaataaatttttttccaaactttcaattctaaacttaatttttttttaaaacacttttattaacaacacccccttctttttattttaaaaaaaaaaaacccatctttttttatcaacatttttacctacctccccaaaaacttatatctcccccaaccatcttttccatcaatttttaaaaa

SEQ ID NO: 422580 - DNA, 302 bp, Oryza sativa nipponbare
  unsure (1)..(302): unsure at all n locations
tcctctannacgccnccctttttttttttttttttaaataacaaccatnttgccacgcttctttattacatcacactatttacaacaaanatacttcaccacaaatccacattaaaatatatacancccatnnatnatcacctgggggtgaccacccttctttttcaccttacctcnccaaaataaacttcccnatgttccccatcttcaccatcaccttggcgaaatctgcccccaacaactccnggtttgccgcttactacctcaccagcccttccttcgaccctccatttaacaacacc

SEQ ID NO: 422581 - DNA, 157 bp, Oryza sativa nipponbare
ccacgcttccgcggacgcgtgggcggacgcgtgggctagctagctgcctatccaagaacaatccggtcgatcgatcatggtgtctcccgctgtcatcaggcaaaggccatcggtcggtaagcatgctggagacggagagagcgctgctaccggcgac

SEQ ID NO: 422582 - DNA, 110 bp, Oryza sativa nipponbare
  unsure (1)..(110): unsure at all n locations
gcagaccgtcccgattcccggtcgaccacgcgtccttttntttttctttactcattttcttatctctcttttaattatatattttctctatgtacaagtacacatatata

SEQ ID NO: 422583 - DNA, 162 bp, Oryza sativa nipponbare
ccacgcgtccgcaccaaactatccaaaccgctggagcatatggataggtagaacgatggccgcgtcacggctacaccaatgtacctgatgaacgaggaccgtgccttgtcggacagagctcactcctggtgtctcctattacgctgggcgagtcactcatgc

SEQ ID NO: 422584 - DNA, 170 bp, Oryza sativa nipponbare
ccacgcgtccgcccacgcgtccgtagcgagcttccgaacctgaggatgaagcatcacatctcactggatgaatggacgcggacatgatgtaccttttgtcgcatgtgatctcccgtgcggcgtcgtctacctcctccgtgctgttgggggaggcgcggatcaccatgcgc

SEQ ID NO: 422585 - DNA, 307 bp, Oryza sativa nipponbare
ccacgcgtccgcccacgcgtccgcccacgcgttcggcgccggtgaaattctcggcgacattctcgaggccatgaacaaaaccggccctacggtaacaaacctatctgaattcgaatttcgacgtgaactttaaaaattcgatgtaaattcacaccctgttcatgcatgttggtgtggtgaacgcgtgcgcaggagaatggcaagaacgagagcttcgaagacctgtagaggcagttcgaggagctgtttctccggtcgtcggcgccggcgccgtcgacgtttgtgtttttccggtcggcggtacttg

SEQ ID NO: 422586 - DNA, 387 bp, Oryza sativa nipponbare
ccacgcgtccgcattttttgtgctactaaacaactattggtaagaccgtaaaacagccagggaatggataattttctgggaagggcatacatcaattatccggcattcctttcatggcacagttttcttcacattttttttcattttttgtgtaacattcggcattcctttcatggcacaatttgctttcgccatatttttcattagttgtcctgtgttacactcaattgttatgttgttcgggctcattattgttttactatctcagctggagcccattaatgacatcagtacaattaaaagccagagtgctttctttgtcctgaagggtagattataatacgctcttcgaattttttttgtctaaacccttaggggtatatattt

SEQ ID NO: 422587 - DNA, 229 bp, Oryza sativa nipponbare
ccacgcgtccgttcacgaacaaacacaccatttatctagactgtgattgtatgcatgaatacatctagagcatgtacagcgtcttgtactgtgagcgtgcatatacatacttcacacttttaaatccatgtgtattttgtgccaagacatactggtacatgtaggggcatatatacatgcgagataaacaatagattaagttcagattgctttgttttcaaagttttat

SEQ ID NO: 422588 - DNA, 337 bp, Oryza sativa nipponbare
ccacgcgtccggaggtcttggtgacgccagaggtgaaaaacgcaaaagtgacttgagaaaccagagttccagtccaagggttgaagaagaaggcatagcttataacagttcatattcggatcaggaggatggtctaggggacgatgacattgagaagtttcttcattcgagggtgaagcgaggtcgaggggccgttggttctaggatggatgagcctggtccataccttaatgttgcatctcgtagtcaagagaacgaacctaatgctgatactcaggtggaagaaaaatgggtacgaagagtacaaggcccggagaataccagttgttttgagatc

SEQ ID NO: 422589 - DNA, 101 bp, Oryza sativa nipponbare
ccacgcgtcccccagcgtccgcctagaccacagcacgacacggtaggaggttgcggtcgtgctgctgcgggaccggcggggttcctggagggtggagcggg

SEQ ID NO: 422590 - DNA, 210 bp, Oryza sativa nipponbare
tcgacccacgcgtccgaaaatatcaaccaatctccttcgctgccggcgctcagcattttggctgccgcgactgcgcggggagggagcatcgttacgcgactgcccgccatggcgtctcctcgctgcgccccccgcccctcctccacccccggagtccccccgcggcggactcccggctgcctcctctcaccaaacgccgtgtgggactga

SEQ ID NO: 422591 - DNA, 267 bp, Oryza sativa nipponbare
ccacgcgtccggagagatcatcagtagacaccaagggatcaaggagaggatgaggggcgggcatggcgcggcggcgggggagggccgtaacgggtggatgacggtgctggcgttgggggactggaacatgaagaacggtgcgctgccggactactcgatggatctatacaagatccgggagatgcggaagcggatcaagaaggagctgttgcggaccaggctgggtggcgacgactacctcctcgcgcagcagaagcagcagcagac

SEQ ID NO: 422592 - DNA, 366 bp, Oryza sativa nipponbare
ccacgcgtccgcccacgcgtccgctcataaataactgtagtttgcgagacgacaattctgaagccttggacgctctagatagatgttagtaactgtgtagacatctacgtacaattcattatgatagctcgacactatagcatgggtcatatgctgcacctatgcgagccattcactagggataacacatacaaacatgtagaacatatgagtggtagactctagcgaactacagtgaaggcgcaatctgatgaacgatatcactacctttgacttgtacatgtattagaatattttgcatgtgtggtcgtgcatagatcggtaaggttcgcgcgtgtgttgcatgtaggagttaatttaaatagt

SEQ ID NO: 422593 - DNA, 461 bp, Oryza sativa nipponbare
ccacgcgtccgcccacgcgtccggcactcttagcagaatttcggtgcaagcctagagttagacgatgataccctaggtacatccatgttcactaggaggtgctctagcggcgtgattaccaacatacacaagggaacataccctcaggggaagtaagattaacaatcttaaggaagggaggattgttatgttcattactcttttcatttctgccctgatttttttagtggctctagctggattgcgactttctataggtgaaatatccacgcaaagagaaatatttaatagcatcattgttagtttttttcaatttcagcctgtctacaattttttccttaccatggaatctagttcttacaagctggaaatgatccctttcataatccattgtgtacgtctcaacttttttttatgctgacatgtaaatctgtacgtgggtcgtgcttgcttcggaaatg

SEQ ID NO: 422594 - DNA, 402 bp, Oryza sativa nipponbare
ccacgcgtccgcccacgcgtccggtatgaatatgaatatatatgtttcaatatttctgatgacaacaaaaattatactgaaagttcactaagccatataatatatgtaaaatacactattttattagacaagagaatcgacgagggtggtcagttggtaattcaaatagttaagactcacataataggcatcgaaggcatacagatgagacaaacgatttatcttgtagcacaactcctttaagtcaaaagttatataacagagcacacatgtgtcctgatatgtcctctggcaaaacacctgggcacctggctgatggaaacatgaaatacatgatgatcactttagatagctttttgccttctcctgctaattcattatagcaaccttgcttttagtacg

SEQ ID NO: 422595 - DNA, 118 bp, Oryza sativa nipponbare
ccacgcgtccgtgaaccgtgagttggcaatcgaaacaattggagagagtccgacgttaacatggcacccatgccagcgccggcagcaacgaaatcggtagcgaacacaagcgacgaca

SEQ ID NO: 422596 - DNA, 392 bp, Oryza sativa nipponbare
ccacgcgtccgcggacgcgtgggcggctcaccactccccggcgacatgatggtgcggcctccacagatctggagccgcctcttccttgtctccatcacaacaccaggcacgcgtcatccccgacaccgatgccaaaggtcagtttcccccctcatcttctcccttcccccatcctctatacctctaatgtcgtcggaagcggttgtctgcagggtagcgagtggccagaattctccacggtgagcaacggccacaagtggtcttgaatctccaaattcgtgtgataaatgttggtatattgattatgggatgtgtgatcgattattaaatgtgtatattatggggttttcttagattatgcgttcgttatttatgtgtttgtttgggggtgg

SEQ ID NO: 422597 - DNA, 206 bp, Oryza sativa nipponbare
acacgcctccgccccggaggaaggaaggaaggaaggcaaggaagccaagcccgcgaccccgacctacccccaccaattcaaccctccctcctcagatccaccaccaccgagcgcccgcgatgacggccaagggcggcgccgcgccggcgtcgggcggcgcgggcggtctcccgaacgggcgcttcttcaccggggggctcgtcacc

SEQ ID NO: 422598 - DNA, 433 bp, Oryza sativa nipponbare
ccacgcgtccgatgatttaccgtggttttatgttgtttatatataagcgtttgccatgagtctgattaattgtattgttgcggtttttcctaggtgtcatactgtcatgctcgatttttacaaggtttagtgcaaactgatagatgatgtccatccccaaaactccgtctaccagtattggttcatgtgcgagcacacggtatagttcgagttcctgtttgatattgattcgctggcgctggttgtttggttggcgcattacctagagttgtttgggtgcaaaaggtggatcaaggttgcaaaggcattttgagaatgctgttaatagcgtgtaagcatttttgtcaagggttattagattcttatgcgttttatctaaacctatgtttgttttgtttaatacccctttttttttctaaccatgtttttgttt

SEQ ID NO: 422599 - DNA, 229 bp, Oryza sativa nipponbare
ccacgcgtccgtgcactcatgagcggacacgtggtcattcagtgcaggattatcagcatgaactataatgacactgtcatcgcgggctactatacgtggagaggaggtcaactaaactggagccaaaatactattatttcatgtatacggagacatggacaggactgtgaactagctcctcgtcctaagagccgtgagagttgcgttcatggcgatcgcactgaccgtg

SEQ ID NO: 422600 - DNA, 135 bp, Oryza sativa nipponbare
ccacgcgtccgcggacgcgtgggttggaattcgaaatccacacgagcgcggcggcggttgcggcggcgatggcgagcaccattaacgtggcgtcggccacctcgaggttcctgctggtcggctgtaacggtggta

SEQ ID NO: 422601 - DNA, 221 bp, Oryza sativa nipponbare
  unsure (1)..(221): unsure at all n locations
gtccgatcaatatgcagatgataaaattcagaggaaaattatacaaatccatggagatgagaggacaaatcacatgacagctcgtaattacagtactaagtacacgatgaacggaacaaccaaccncatatcatcatcaccatcatcatctagctagctagcaaaacactcatctctctcacacacatgcctgccgcccgcagacaaatgatcaaaaacag

SEQ ID NO: 422602 - DNA, 507 bp, Oryza sativa nipponbare
  unsure (1)..(507): unsure at all n locations
gctgaccggcgtagggtagctgctggttgtccattgtcacctatatatacgtaccttaattgcagtcgaggggtanctgtgtgtgctgtgttctagagcttcgttgctccacatgtgcgacggatcaaacagatgagaactcgaggctggctataggtggcgaagtgcatgtgtgggggctacttatcttctatccagagatcatatcatgcatgaaaatgaagctaagcgcttgcaaacacacagggtgttcccaaaggagatctggaaggagagaaacaggagaatcttcgatcacaatgagacctcagtgcctggtctcctcgcagaaatgaaggaagaggcaaggatctgggccttggcaggagcaaagctactcctacagctcgtacactaaactgcttttcctttttctcctttacccttcggggttgtatttcttactgctatatattcacaatctcgtgtttggttccattcaaaaagttagttatctggtatatgata

SEQ ID NO: 422603 - DNA, 362 bp, Oryza sativa nipponbare
ttacaaaaacaagagtttctttttttttaaccatcttaataatatcggcgtattagacactaaacgtgaaactgaaaacttaacatcccttcaacacaaaaatactttaattaacccacactaaatttacctctataccccccacctcaactctacagtaattacgcgcatttatgcacacctatctcttaccttgactcagataaaaccagacagctatacctccactcggcagtttgtaacactcttgaacttgaggccattcgcgccaaagtagccttttcctccgaactctatgaacaatgctcttcaagtcactaataagtagtattggcccaagatccatcttcctacctttcacc

SEQ ID NO: 422604 - DNA, 299 bp, Oryza sativa nipponbare
tcaccgactaacagattattgctaagctgtaacatttatacgcatgacaaaatggctaatgtgaaagaaacacaccattacaccaactctaaagtcatcacctataatcaagcctcaaacaatacgcaaagtcaaaccattccttgtagactgatggatatttgcttcttcagcaaaactcagcaagtctttcttcgatttaagatcaccaatttcccctccgtacagacaatgtaagtaaccttgttgaatcacaatggtggctggcacgaaataattccatgaattaactttgcatg

SEQ ID NO: 422605 - DNA, 432 bp, Oryza sativa nipponbare
tttgaccgtacgtgtgagatgaataatcaaaaggcaaaatttgctacaggaacaggtaaagagcgtgtaattagctggaagacaccataaaaacgtaatacggctgatggacactacaaaaattgtgtgattggctatatgatactggccgcattattttattatttctggatcaaaagaggtgagatattttccaaaatgaccaaattgccccttctctttacttcgctttctcctttgctcggaacgcgcgcggtggggcgaggttggcgcaagctcaatggcggcagtggggcagcagactgagaggcccgccgtcaatggccctcaggctataccttgacatgtccagcggcggcagtgcgctggcgccgggaggagggtagtcgaataggcaaagccctccggcgtggtgaggtcctagtatatgcc

SEQ ID NO: 422606 - DNA, 258 bp, Oryza sativa nipponbare
aaaaaaacaatttctacccttttatataaaatttaaccccaaaccttccattttttcaattaaaatttccccaaccaaaaaaattttttttttagcaaaaccccttttttctttattttatagaaaaatctttataaaaaaaaacaaaacctaacctcctctcttaaaataaaaaaccttttaaaaaattggaaacacctaaaaaaaggtggaaaacttcttttattcaaagttcaacatttaaccacgttttttttt

SEQ ID NO: 422607 - DNA, 379 bp, Oryza sativa nipponbare
aaaccaaaataaaatttttttttccattgaatttttttaaaaaattcccccttttaaaaaaaaaatccaataatatttttccataacctcgccctaaaattttttcccattttcccccaccccaaaaagaaaaccaacccctttctctttttttccctcccccccttttttttttttaaaaaaacattttttttaaaatctttttcccaaattttcaacaaaaaatttctttttttttcacccccttttttcaaaaacttttttttcccccctcacccctctaattttatcccccccctttttttcctttttaataaaatctttttccttaaacaccttttaaaatttttctaaaaaatcccgtttttttttttttttt

SEQ ID NO: 422608 - DNA, 65 bp, Oryza sativa nipponbare
aaccgcccccccttttttttttttttttttttttttttttttaacctggtaaccaacaataacca

SEQ ID NO: 422609 - DNA, 302 bp, Oryza sativa nipponbare
ttattctcaatacacgaatttttttattcatatcttactcctttttttttatcgggttttttgtttaaattccaaaaacaaatttttattttccacaaattacttttaaacccatattcttcttaaattcacatccatttctcaccctttttttaaatatatttaccccgcccttacatttttttaattttcttattcctccccccacaacatatatcttgttcaaatccctcttttacattcaaacctaaaaatatcccgtcaaacaaaaacaaaagcccttccccgctaatttttaaaaa

SEQ ID NO: 422610 - DNA, 64 bp, Oryza sativa nipponbare
acagcctccctttttttttttttttaaaattaaaatccccttctttaataaccctcacacacac

SEQ ID NO: 422611 - DNA, 54 bp, Oryza sativa nipponbare
gtgtccaggtttcctttggtaagtggattaaaactttgccttaaaatggaaagt

SEQ ID NO: 422612 - DNA, 142 bp, Oryza sativa nipponbare
tcttttacataaaatttacttttttaaaccatcttacataaattttaacttttagcacttatgttcaaattaataaaacttgatctttaatatcctattttataaatttctacaacaaccccaaaaaaacatttttttttac

SEQ ID NO: 422613 - DNA, 297 bp, Oryza sativa nipponbare
  unsure (1)..(297): unsure at all n locations
atgctgcaattgagaactacatanctctgggacataagtatctttttcatgcatacaatgctgtctgctttgttgcttaaattagaacaaccacatatcagtgataacatatcacttctttatttagctcatacatgcctcattattaatattagtttactaaatgttgctgggttgaccaagagtcactaccaaactattctgccaatgtataaaattgctctctcacaaggttgtttcctgttgtggcctccccatatcactagaattgtaattccgaaacagataccaaacccc

SEQ ID NO: 422614 - DNA, 504 bp, Oryza sativa nipponbare
  unsure (1)..(504): unsure at all n locations
atacaagacgctcaaaaaaaaaaaaaaaaccaaacttttttttgtaaattttttttaaagtgggggggggggaaaaaccaattttttttttttttttttnnnataaaaaaaaaaaaaaaaaactcttttttttttttttttataatattttttatttaaaaaaattttttaaaaaaatttttatttttttaaaaaatattgaaaaatttttttttttaaaaaaaaatattcttttttttttatatttttttaaaaaattattatttatttatctttttttccttcttttttatcaaaaaaataatatttttttttaaaatttaataatatttttattattttttaaataaattaattttttttattctcccaattttctatttatttaaaaaatatattttttaaatttttttttatattttttaaaaattatttttttaatattttttctattatctatttatttttaatattaaattttttatttaaaatttttttaattat

SEQ ID NO: 422615 - DNA, 353 bp, Oryza sativa nipponbare
tattcataaaatacttaaggaaacactccctcaaccttgcctttaagttttaatgaataaatggaattaaaaacaattctatccttctccaactcaaaacaatcacacctcaccatatatacattctaaactctggatcattcaaactcttaaaacaaccttatggtgttttaagaaactttaaaattatcttaattaacaccattgtacacaaaatgaccaatatttcctacacctcattgcttcttaggatctacatctttcattctttatactactaataattctctctcatccttcccattacccgacacaaactaaaccttcattttcagagtctaatcataaacatt

SEQ ID NO: 422616 - DNA, 506 bp, Oryza sativa nipponbare
tttgataaatatatgaacattaatctcaatccaaacattaaaattcggcctttcgaggcttacatgaatagtccattcaacttcagtaccaacaaatttattcaaatcatacttactatatacatctacaatgtgtcacacttactcaaggaacttcaatgtgttcagcgaccatactatccatcatatacatgtacaacgcaacttacttacatcatcaatccacgttctttaatgcttcaacctttgccatgaaaccaaaaaggttctaaaaaataggttcagtttgcataattttcttcatcattacaaaataaataacaagcctgcacgataaatttatctgtacaaacatcaaaaatgaaataccacacttgaaatgataagtggacctcacaattattccatctgtactctctcaattcacataatacatgaattctatgatcaaactcattcaatattttattagaggcataccttgattttttatgttttacaacgtt

SEQ ID NO: 422617 - DNA, 310 bp, Oryza sativa nipponbare
agaccgcccttttttttttttttttttttaattttgattttttttgattttcctttttactattttttccgcactattgctctaaatattaaataaggaaatatacccattccaccttacttaaaaaaatatttacacaaaaatatacatatttcacccaccccctacacccttacttaataaaggagggaccatacctattcacctattatccccattcaaacaaaccaaaaaaaaaacttacaaaattttatcatttcatacatacaaccatattctcttacctcctttctattccttcataattaaa

SEQ ID NO: 422618 - DNA, 472 bp, Oryza sativa nipponbare
ccaagagaaagatcaatttttctatatagggtagtggggggcaaacttgcagttgcacctatgttctttccacagtcagaacaggacacttcaggtatcgcaaataaatatttatttgttgttataaaaagatgatttaatccaaagtgatggcaaacccaattgaaacaaatcttctgcaaagaagtgtaaccacaccttgtgttgtcttgacttcatgtagacagtagttattgatccagctggtgatgaagcaccctaactaatctgctgaagtcatggcatcttcatttcaagctccatccagttacagatatctgaggagactactatattaaacagaatggttgagtgcacacaaggtttattgaattcatctgcatgtgaaccttcatcagaaatatcttctatcctcctctggggacaaaaaataatcaattaagcgaagcataggcctgccttttttaaattg

SEQ ID NO: 422619 - DNA, 384 bp, Oryza sativa nipponbare
  unsure (1)..(384): unsure at all n locations
attanagagaaaaacagttctccattccacacgatatcaagtttttggggcaacatgtttcaagtgagaagtaacagtaccaattagaagctaacatgtttcttgtgtacattttttatgctcagcaagcagaacaatcactccctttgccgactttggggatggtnntntttacaatttttanatttcttcttgaatttaaaaaacttctctctttcctgtcctttttctctgaactcttttccttcttcttctcttttttcttggggagttcagggctggaaggttctccatctagtgcttccctaccccaatagtcattaagtgatcttgatctcaaaaacactggtttcttccggcctcttacttttcgttcccattttt

SEQ ID NO: 422620 - DNA, 51 bp, Oryza sativa nipponbare
  unsure (1)..(51): unsure at all n locations
nnnncgagacaatttactcaggtagcaaatatttttcagccacaaatccaa

SEQ ID NO: 422621 - DNA, 448 bp, Oryza sativa nipponbare
ttttgtcaaggcttccattggggatattcataacagagtaacttcggcgttggcgttcaaaacatatttctgaaaccgtctgtcatgaactcctcatattctctcatgcttcttcacagcaatcatctagggaagtcaaactgtacatccttcttaacatatatgggggtggattttttaattaattattgtgaagtggaggaaggttagaaaataatatgtacaagtaggaccgtaccacataaggccctttaaatgcaccatgctcaaaatcttgttcacttgggaagttatctgcgatgccttgcgatgactgtaatgtttgtttgcttgtgagctgtgactttatctctgacttgttatttttgactgctgaattcaccacttttgaactgaaggtgtcaaacggagatccaatgattttgaatttttaaccaagatctatgtc

SEQ ID NO: 422622 - DNA, 222 bp, Oryza sativa nipponbare
ttatccttcaagaaataacaacttatcacctgaattgtacagcaacgtcatccggtgataaatagctaccaaatctcaatgaccaaaatatttaccgtcaccacaaatatattacacatacttctaggcttgacaaaacctaataagcctactctaggggaacgccgagtattttacactgttacacaacaagccatccaataacaaggccctgacagtcct

SEQ ID NO: 422623 - DNA, 345 bp, Oryza sativa nipponbare
aaaaaaacccaacccactttttttttttacattttttaccaaacttttcaattctttttttttttttttttacttcaaggcattcatccattaaaatgggggaaaaaaaaaatttcccaatttttacatattgacaaaaaaaaatacactttacaaacctaattactttatatccccctccctcttttttgcccatatttttttttacaccctcaaataaacctttttttttcttggcacccaaactaaaattcaattctttccataaatttataaccttttatttccccttttacccaaaaagttttttctattaacaattatatattacttttttttttcaaa

SEQ ID NO: 422624 - DNA, 314 bp, Oryza sativa nipponbare
  unsure (1)..(314): unsure at all n locations
tccatccaaaactganttctgcaaatttatcttgttaagttnccatattcttgcgcaatcccggatgaaaaaagtactttatctgatcctaaaacatctctcanaattgaaccagttantatacaacacagtccatgtaccgttctcctcaaattacacctttcacagggaccatgggtacatatatatatgctctctatagcgagaggccaaaaaactaataatcctccttcaggtcggaggtgtagatggtgtacaacgaccatataaggcctaacacccctagcaggatccaccccagcatgttgttgctc

SEQ ID NO: 422625 - DNA, 308 bp, Oryza sativa nipponbare
  unsure (1)..(308): unsure at all n locations
caaccgcccttttttttttttttttttttttttttngcaacaaaccaaacccgtaatttcatttccttcagaataactgtgcttcatttggcaactatggctcttaaacaacaattaacatttctaaaactagcacctacccacatgacagatttacatgtcagccaaaaaaaaaaattgagacttgcgcggtggattattgaaattattatttccaccttgtaagaactagaaaacatgctcaggaaaaattttttacagacttaattttaaaaaaacttacaatgtatctattaaatattcctttt

SEQ ID NO: 422626 - DNA, 429 bp, Oryza sativa nipponbare
gatatgaactgaggctgttattagctctaggtcaaaagagtaattgggagacaattgagacatgaagtgctggccacttgttctgaacggttgagatacaaataaaagtaataaaccacataaacagaaagaaaaaaaaaacatattttgtctaatggccgccggtaggaagaatgcataacgagaatatttcatctgaaggtcccatatatagaggctactattatggcgatgcactgcaggaagaaggccgacagatgctcatagtgaaggaaaaaccagaaagaataaagccaaggggtggagtcggtggaaccgcttaaaaggtagtctctgcctcttgcggaagccaacccagcaaattccttttgtcgctgaattacaggcttaattgaagtcaatcagttgatgccagtcttaaagcattca

SEQ ID NO: 422627 - DNA, 489 bp, Oryza sativa nipponbare
aataaaacaaagacaatattgctattttaaatcaatcaacataagctcacatcagggtctatggagttaccatcataaaatgtacaaataaatagtaaatctactgtatttgtgctatcatatcttcacttaccttatcatccattataaacatcaaccatattaaactcagaggtgaaacaccaccaaaaatcacacatttatcaatactaacctaattaaaaccaatcaaactctttcatcgtatcctttgttatgttccaaagccacaaaaacacaatgaccatgcacgccaaaacccatgaccaaaaggccatattgccaaactctgattactctatccactaaaacatgcttccctccttcaataatactgaagcatctgctgtaataactgccacaccaatcatcaccttgaatactgtctatacctaaatactcacaggctaagcaccgaacaatatgatcataccaacgacgtacgacaac

SEQ ID NO: 422628 - DNA, 220 bp, Oryza sativa nipponbare
  unsure (1)..(220): unsure at all n locations
anntgggcaaacacataatatacacattaaataatcgggcacacagtacataatcaatattacaaaatttatcacacggatttggaaattaagaccacttttggccgttgctcaccttggaaaattctggccactctctaccctggagacaaccggttgcgactacattatatttatataggatgggggaaaaaaaaaaataaagggggaaactgccctt

SEQ ID NO: 422629 - DNA, 152 bp, Oryza sativa nipponbare
  unsure (1)..(152): unsure at all n locations
gaagtatcaacaaccccaaaacatcatataattacccttctnttggagagactgtagcccccactgtgatacagttcacttccacttaaatggagatcataacaaaacctttgctgaccctttagctgactctttggccgacaccttgctct

SEQ ID NO: 422630 - DNA, 424 bp, Oryza sativa nipponbare
  unsure (1)..(424): unsure at all n locations
actagtaagcagcgcacagatcgcatatcatttgacttacancatgggcattaggtcttcaagtctcaacttggattacagcgagattaacgtgcgctcctcctaacacctntacgtcacatcccgtagttaaccggacgtanagagagatagagagagagagggagagagagatatataatacatctattattcagatattaaaccaataaatttctggacaagtagcctaaactccgatcagtctctagaagcctgcccgtgtgtgcaaaatccagaaatcacccaggacaaatttacatgatcccaaccgtatttgaggccattaacattgattaaagtcaaactatggccgttcctactcccaaagcgctatcataattcctcaccatgttcttcgtcaagggcataccagcaacaacat

SEQ ID NO: 422631 - DNA, 247 bp, Oryza sativa nipponbare
acatccgccctttttttttttttttttttttttaattgttttttttttttttttatttttttttcttttttgttttttatttttaaattttatatttgttttttctttttatattttttttttttttttacaattatttataaatattttattttttcaaattttcaaaatttatagggggggtggggggaggatttttttttttttttttttctttaaaaaaaaaaaaaaacattttttttttttt

SEQ ID NO: 422632 - DNA, 235 bp, Oryza sativa nipponbare
ttttatcataattcaatttttttttttttttattattttattactacattttttgggcattggtttaaattttaaaaattatcctatcaaaaacaaacccaaacctatttacaactccacacacacaccatacacataaccctctatctatcaaatcaaactatatcacgtgtgggaactactactaattattttatatcacctattctaaaaaaaaaaaaaaattcccctttat

SEQ ID NO: 422633 - DNA, 249 bp, Oryza sativa nipponbare
gttaaacgggggaactctatctaatcttttatcccttttcactaacaacaccatattttttcaaaagattattatctcaaaaaaaaaactttttcaaattccccctcctgcaagggaaaaaaaacccttcttaacctttttgactaattaaaaaccaaaaaaaaatacctctttttttatccaggaataaaacttattaattcctaaaatatatttattaaaccaaacccgtttaacacacaactttta

SEQ ID NO: 422634 - DNA, 481 bp, Oryza sativa nipponbare
gaagtaacttatataaatggagaactccgttaattaaaaactaaatgactatatgaaccacggccttaaatatcttaaggcgagatatacagcatcccaaatggttacaccctcgaaattacaaaaattatacccatataattaatcattgctattaatagcaggaacgacgccaactcgaaaaatacacctagtacgtgtgttcctagcacgcgtgtggatcgcccagattcttctgcattaacttacctaattaattcatctgcttgctctctagcggaagagattttggttactttttaactaaatttctcccacggattggagcactcaggacctaacatcctgatgcatatatcattcccaaattccaacaagcacactgcaatctacaacattgattaatcccttttggagcccattcctttaagattcggttgatgctgtaacaactaatgattaattccttggatgtggctta

SEQ ID NO: 422635 - DNA, 226 bp, Oryza sativa nipponbare
  unsure (1)..(226): unsure at all n locations
ggatattggggtgttttttttttattttttttgggggttgggtggtaatttattaaggggggttnntntttttttatattttgttantttatttattattttatatattgtgaggagaaaataattttntttgggggggggggggggtattttttttttttttttctaaaatgaaaaaaaaaaaaaaaantttttttttttgccgttattttgtnattttttgttt

SEQ ID NO: 422636 - DNA, 52 bp, Oryza sativa nipponbare
tttcataataaccaactatttttatttcaaaaaaatgcacatactacaaata

SEQ ID NO: 422637 - DNA, 222 bp, Oryza sativa nipponbare
  unsure (1)..(222): unsure at all n locations
ccacgcgtccgcccactctttcnnaccttgagtcgccaccgccgccatcgctgatgctgcttacctactccgtgccgtgcactctttgcactagcccatggcgacagatatgatggctgcgaccgacacctcgagctcccctcgccgcgcgccggtcgtcgcgtcgttgtatcgtgcagcctcccatgctgcagcagtagcatcatccgcggaggggattga

SEQ ID NO: 422638 - DNA, 186 bp, Oryza sativa nipponbare
acgcgtccgagtagaagttgtgcgtttgtgttgttcttcgccggcgccgccgcccatggcctcttccatggccgccaccggggcgcgctctcgccgacagttttatccgccgagaggccaactgtccgcggcggcctattctagcccccttcgccggcgacctaccgctctctccgactccaatcc

SEQ ID NO: 422639 - DNA, 119 bp, Oryza sativa nipponbare
attaattcaaaagccaaactttcttgttcaagggagggatgtgcaatgtcataatacctctgcatagctaacatgacttgaggtctacatatttcatacttcagcgttagaaatttgct

SEQ ID NO: 422640 - DNA, 291 bp, Oryza sativa nipponbare
ccacgcgtccgaggacgctggggctagtgtggacatatgccagggtattcggacgggtcaagtcttctacgcaagacaggagcgaaaccctagctggggatatttatcctattctgctttattgtctccgatgcactctagtgaccgagtgtgcgtgagcgatggtgaccacgacagatctgttaagtggagcgcactagctgacggatgggtgcgcaccgaggtgtgaacggcgcgcgtgccgtggcaccggcgcacccaaaaaggtgcttggagtgcaagccaaatcac

SEQ ID NO: 422641 - DNA, 150 bp, Oryza sativa nipponbare
ccacgcgtccgacgacaggttcgacgaaagcatggactacccaaggaatcaactaattactcacttatctaaccatgtctgacaccatctgcgacaggtgctgcgcctgcaactgcgctgacatgagccaaggcaccaagtatggcacca

SEQ ID NO: 422642 - DNA, 188 bp, Oryza sativa nipponbare
  unsure (1)..(188): unsure at all n locations
ccacgcgttcgtccatggcgtctaagaggaggtggccgtggagacggtggagggcggttcggccgatgctaaggcgccgtactgcnacccgccgactgcgccgttgctgctacactatcgagctgnttaagtagccgttcgaccttgccctcatcagaattcatggtcatttcatgtccgctcatgtg

SEQ ID NO: 422643 - DNA, 364 bp, Oryza sativa nipponbare
ccacgcgtccgccaatatctactttccagtgataaagtgatttctgcaattactttgaattatatcaatcttttgttgagttgattttgaacttcgcacaatttaattactaattttagtcatttcaattcatctatcacggttagcattattttaacctggagaaaataaaacatgacaaaactaatatggttttgtgtttcagatgttattgaggaattcataaagtcaggaaatgagatagaagctattcatatcgcccatgaggctggtttgcttgagcgatttccacctgtaccgcttcttaagtcttatataaagagaataactaacaagactcaggttgcactgagaggtggaagac

SEQ ID NO: 422644 - DNA, 231 bp, Oryza sativa nipponbare
ccacgcgtccgcacatgcaggcgttgcaacaccaagaagttctcagctatcgcggactcgaagactcatgaaaagcactgtggacgctacacgtggctctgctggtgtgcaactaccttctgatgaaaagacatgttatctgggcatgttgctcttctccaagggcacacgcctgctctccctatggatgatgtcaaagttacatgagcatcagagccacctcatggcagc

SEQ ID NO: 422645 - DNA, 127 bp, Oryza sativa nipponbare
ccacgcgtccggctcactgggggggtggagctcacgcgggtgggcgaggcccggtggtgctcgcggcgggtgggggggccgtggtggcggctgacgcgatctgaaaccctaggtggtggtagcgggt

SEQ ID NO: 422646 - DNA, 399 bp, Oryza sativa nipponbare
ggtcgacccacgcgtccgcggacgcgtgggtcaaaatttaaggtcatatatacatattcatttagtcctggtatttaagtaagatccattgcagtgagtgtgtgtatatgaacttttgtatgtaatttgcatatgtcctatttttctgatcaatgacattcttaaatattcctataggatgttagcatctcatacatgagctttgatctatatacaccacacttggtattatctctaaccatgttgaattatcatgacatcgatgcattttaacctgaaggaattataatcgttcagaattttgtaatttacattaagtataccatggctgaataatataatgattcaagtttttaagtagttgtatttctcgaaaatgagttggagttggttgggtga

SEQ ID NO: 422647 - DNA, 414 bp, Oryza sativa nipponbare
ccacgcgtccgaatgatctatacacctgacagcaccggaggacaacaccattatacagactctgtacgggtgagctgataaactgtgcaattaatatccgtgactactacggcgcttgatgcgtgcacgctacatgaacctagcatgggccgagagaagatgcacatctctagacaagagcataactgtctgtgggatcatcgtgaatagacatatgaatggatgtggggagcacagagagagagacgggtggactggggattccgcgatctgggtgggagagcatcatctgatacctgggccagctcacttatcacaaggctggtgagggacacaataatagggattgtactttgggggttgtatgaacagctgcatgctgtcttctaaggataaatgcagctctttccccaa

SEQ ID NO: 422648 - DNA, 197 bp, Oryza sativa nipponbare
ccacgcgtccgcccacgcgtccgaaatatttggaaaagcgcgcgacttcgatcccggccgctgcccggccggtgacttgccgccggcgaccgccccgcaccccgccctcccgtcgcccgtcgcccgtcccgtcgtgccgccgtcgacggtcgaccggcgcctatcgtcgcatcagcgcatcgcgctgcgagcgttct

SEQ ID NO: 422649 - DNA, 74 bp, Oryza sativa nipponbare
ccacgcgtccgcccacgcgtccgcccacgcgtccgcccacgcgtccgctccacgcgtccgcccacgcgtccgat

SEQ ID NO: 422650 - DNA, 393 bp, Oryza sativa nipponbare
cgcgtccggaaataaggatcattcagggagaaaccaaggacggtaagctggattttcctcttgcatatagtgcactgcataataaacttcactggagcatctgggaaaatgtcctgtacagcactggggaattaggcatcctgaacagtaattagttcaacaactaaacaaaaagtgctatctcctgactacatcttgcattttatcatagaataagatgattctagaatcctcatgtaaccaagaggaacaaacgatgtcttatgccacctgaactagcttctccatatttaagacctctaattatttcatactgatacgtgtgtcataaacataagttggttgatatgtaatctgaacttggcagagcttaagataaaatgcattaccagc

SEQ ID NO: 422651 - DNA, 229 bp, Oryza sativa nipponbare
  unsure (1)..(229): unsure at all n locations
gtcgacccacccctccgcccagagcaagaagctcatctcctcctcctctcgcatggcagccatggccaccaccgcgtccagcctactcaagacctccttcgctggcgcgcgcctacccgtcgtcgtccgcaaccctaccgtntccttcgcgccgcgcaccggcggcgccatctgcaactccatctcgtcgtcggcgaccactccctcctacgacctcaacgccatcagg

SEQ ID NO: 422652 - DNA, 316 bp, Oryza sativa nipponbare
  unsure (1)..(316): unsure at all n locations
cccacccgtccgccttcttacctcttaaacctagccattttatttgtttataccgaaacctagacattcaattttgtccggtacttttactataagtggttaggagatgatgccatgtatgatatcttgggacaaaagtaagataattcagtggcttgatgaaactgtacaggaatatgcccttctttaggaatctattgtgaaatcagttgctagatgtttcactaatcatnacnnnnnnnntagaaatatgcgcggagtattaccgggaaatacattaatccacatactgatcatatttaagaggaacaaaata

SEQ ID NO: 422653 - DNA, 214 bp, Oryza sativa nipponbare
  unsure (1)..(214): unsure at all n locations
tcatggaacgtcacccgcttcctgctcctctccaagccgccctcgccggtgacgctgcccatggacgccgacgccaagaccagcatggtggtcgcccaccggtgcggctccatgatggtggtcctcaaggtcctctccgccttctcctcccncaacatcaacctgaccaagctggaggtcatcaacaacaacnacngcggcgggcggcggcggt

SEQ ID NO: 422654 - DNA, 185 bp, Oryza sativa nipponbare
acccacgcgtccagactgttgtctaacatgacgcacggtattgccggcgggcatggatatcctgctcaccagggataccatcctcagggctacccgacggcgacgagagcgtacccgactccttcggtggcttatcctactactactgaggcttacccttcaccacctgaggcataccctccaca

SEQ ID NO: 422655 - DNA, 238 bp, Oryza sativa nipponbare
tccgaattcccggtcgacccacgcgtgcgcggacgcgtgcgtgcatatttacactgtatctcaatctcacatgttgaggtagtaagggatgcgaaagtgaccctgaattacagataagtaagaccaggcaaattcttaacatgctgagttgctgactcagtagtttgctagccgtcagtctgtcacatatgcatgttatgttaaacatttagtgatgtttgatcttgatgtgttactg

SEQ ID NO: 422656 - DNA, 441 bp, Oryza sativa nipponbare
  unsure (1)..(441): unsure at all n locations
acaagaaagaatggagggtgaggatgtaaccaagacaaggggttctctnggcaggcagatatattaaattattgactaacaggacagccaactaataacatggcattacggcaacatatccttgagtatcgacaaagggaaatcgacagcattaatgcagtatcttcttgtaatctacacctatagacacatgaattcatgaaacatcattctgcgattatttctcttgaattcttgatgcctgaagtcagctgctagaaggcaattcatttttcaactcctgaagccttcatggatcatcactaccgacttccatttcttcctcatatagtaattgattatacatcttatcagtcatgatgctctctttaccatcaacagctaggtcctctattgcataggcagcgctgttgtcaccctgttctacgagcacctttttta

SEQ ID NO: 422657 - DNA, 261 bp, Oryza sativa nipponbare
gctctaaaacaatggtatatgggggctatccaatgcacggggattcttcagcctttcaataatagaaagtattgccgatccagacatgcccatattcacgaagacatatagggtctgatctgctataaaagacaatgcatctcacacattcataaccctcaaaaagggtgacttatacaccgaaaaaggcatgatgctattacatacaatgcgacagtgagtgtacatataatctggaaacacaaagtgaacatggtataa

SEQ ID NO: 422658 - DNA, 364 bp, Oryza sativa nipponbare
aataaagctaaaaatatcctggatcgggacacacacacacacaacataggcacatacatacatgcactcttgcaacagcaactgcaaggcaccagcgcgactactacaagtagacacatggcacccagactggcaccatcttgagcgcgtggatgcgctcaatctaatgaaacgaacctggcggactatgcccaagcctaggatacgaccaaaggcatcacgtgaggcaagaggggcctgatggagctcttggcgcacacgaggggcatcactacaaacccacacatgcagaacatagataggccaacacctttgatctcattaaccttgagacctgcgaatgtgacaggggactaatccaagc

SEQ ID NO: 422659 - DNA, 229 bp, Oryza sativa nipponbare
aaataaacaagaaaaccccaggagcgagcatacaaacacgcaccgagcaagaacatacctgcatgcactgttcatactgaaactacaactactgggcgcaatcactacagcaacctacatggcacaattgttcgaaattacacgcaaatacacactgagctattactaaaagctcaaagaatcaagttctttctcatgacaaatttgctactagagctagctagactga

SEQ ID NO: 422660 - DNA, 344 bp, Oryza sativa nipponbare
ttacaaatcttaaagcaattagagaacatgcatgcatacaaagccatctatttaatgcattcacacaagtcaccagcaaaaaactaaaatcatcaaacgtaggctacacaaacacaatttctctctacgatcaccacatgcatatatacaacttgtctatccttagcaaaatatgaagctttgtatctctaaataaatatcgcacctacaacaaaaatatccagcttatgacaaaaacatactggtaattgtactctatattgccagaacagctgcaataagcaagctactagctccaatatccttccaattcagtcaaatgactttgcagtcacttcatcttg

SEQ ID NO: 422661 - DNA, 367 bp, Oryza sativa nipponbare
ctcctaaaaattcaccaccccgggactgggtatataaaccattggattacccactaaaacaatgagcattcagtaacatcaacatccaatccaaagtctaaaccatctttagtgatggtaagattgatgcccaccaccagcaccataaccatggccggctccaaatgtcgctccaggtccaccttacagcaccccagcacggctcatacccatggagcttccctgtgcgaactgctgccaagcacctagtgcctgtcccacaaaacctgcacgatcggtgtaacgcaaagagtgagaggcctggttccaaaaagatcacccgtagttctagttctaaccccttgactacttacagggagggaaggac

SEQ ID NO: 422662 - DNA, 286 bp, Oryza sativa nipponbare
gcatgaagagggctgccattggtacaagaaaagaccgggattgggccccaatccacagcagaggtgtaaaaacaatccaacacattggacccagaaactatttccacggaaccatgatcacagcaggatacattagacacactgagctaacggtacaaggatgaaacagaaactcaaaattgatgtactacagcagttgcagccttgcaggctaatcaggcaccaagagatttttgctttttcgctgggtgcatgtatggccggagcacaaactcattgggcgcct

SEQ ID NO: 422663 - DNA, 387 bp, Oryza sativa nipponbare
taccttatattacagggtacggcaaaaacagaacaccggttccttgtaattgtagtgcacaaaatttgaagttacacatggttgttcatacgctacaaatgataaattcattccccctgaaacatcgaagtagcgactcaaaccaaacaatggtcccaatttgaaacatttcgagctcctggtaaacgttcaattggaacttgtgatgccaaactcgcccaacagcaatcttaagctagcaagttcacccatccacccaaactcaggcccccccccacccgtccgacccagacctgacccaacccggtcgaattccagactccgccaacacagagagagaaacctaacagaggcggctgcctcctctggggaggaggaggggaggga

SEQ ID NO: 422664 - DNA, 311 bp, Oryza sativa nipponbare
  unsure (1)..(311): unsure at all n locations
tttggaaatcagtataancgggggatggggggattatagaggatagggtatacttattgtatattaatatatcagatataaagacgtaaaaaagaaaaaaatcgatgataccaagaggaggcgtacaacgttgtgggcatgggtaattaaaaatatatactcatactcacctccatacatatataattaaaaacttggattgaggaaacaattacccaaaaacaaactataatggaagtatgatgataaaatcaatttttttttttatcgggtcagaaatgttataaaattttttcatgggatagggccac

SEQ ID NO: 422665 - DNA, 281 bp, Oryza sativa nipponbare
tttttatttttatatattctggtttttggttttttttttttttttttttaaaattaattcacaacacccttttttattgaacaagttcaaaacctccacaaaaatacacactaccgggacaaatttcacccttttttcaatacttatacattcatccaccccgtccacaccaatacctatatttaaaccgcacaccttcctacatttacttcacccggtacacacacccacacttttcttcaaaaacccccatttttttaaacctaactcacttaacttaa

SEQ ID NO: 422666 - DNA, 86 bp, Oryza sativa nipponbare
acaagagcttgacggcggggcgcgcgtacgtaaacttgtatcccccatacctgccaccctatattttttttatattttcacctaaa

SEQ ID NO: 422667 - DNA, 221 bp, Oryza sativa nipponbare
ttttagtatcaagtggggtcggagtatattattacatataagtatcgtttttgactatttctacaatatatttattacgatgtgtatgtgcatatgattaacctggtgctagcattcacatatgcatgctcttcaacctatgttaatacatacatatgtacatacatacacagctgatgttgacacaaacaagattaaaaaaaaaaacttgaacaacaaac

SEQ ID NO: 422668 - DNA, 157 bp, Oryza sativa nipponbare
  unsure (1)..(157): unsure at all n locations
tttattattttttttactnggggcctggggttaatctgtgttcttgttttttctttttttctcttgaaaaaaaatattcttcaaaatctcccttacaatgatacaaatccccagggggcacccaaacttttcatttttccttccatttgctcaatcc

SEQ ID NO: 422669 - DNA, 157 bp, Oryza sativa nipponbare
  unsure (1)..(157): unsure at all n locations
cacatcaaaaatctnttatagggggcggggataccaaaagaggantcatnttattcacatttatcaacttaactcccttaaanataatataaacggcatatactttaaaaaatcaatggggatctcataacatcactaagcatcattcactaatcat

SEQ ID NO: 422670 - DNA, 391 bp, Oryza sativa nipponbare
ttacaccaaaattaaaactgggtctgggagaacatggggaatgaaccttacattaattaaataacaaaaattaacacttaactcacgcccttgacccatgcatctcagatcaaaggatgcgggcaaaatattctacaacactcacataaagactaaaacatattatattcaattgttaaactcaacaacgcatagaacattaaccatgagatcaatcaaactccacataaaaaaaaagattaaacaaggagagaacatttgtcattctcaataacacgttaaacatgctgaactcataaaacttcatgacacaccctggccctaattaaattgatcacacgctaactctgacaggacttggataattgtgttgaaacaacgtttacacagg

SEQ ID NO: 422671 - DNA, 320 bp, Oryza sativa nipponbare
  unsure (1)..(320): unsure at all n locations
cccccccctttatatatttttttaaataaaccnccataatcccaggatcgggggcatttatatatacgcaaaactttccaataaccaaatctaatcaaaatccacacatacaagtattatacagatttttctacacatagatttattncacaacctaaacactagttatttatatcaaaccctctacaaaacattcatttcatcaaatacattattaaccacttattttctcaacttaaacataattaattcactatacttttaactttttccatccatctcaacctttaaactttactacccaacttctacatttccct

SEQ ID NO: 422672 - DNA, 335 bp, Oryza sativa nipponbare
aaaaaaaaaaaaaaatttttttttaaaaaaaaaggccccaaaaattggggtccctttttttttttaccaaaaaaaaaaaaaaaattttttttttttttcacaacttttttttatttttttaaaaaaaaaaattttttttttaaaaaaatatttaaaaaattttttttttataaccccccctcccttttaggtttttttataaaaaaaatactcgccccccacctccttttttttattttggaaaaaaatttttttttttttttattattttaaagaacatttctttttcccggttttttttttaaaaaaaaattttttttaaaaaaaatattttt

SEQ ID NO: 422673 - DNA, 248 bp, Oryza sativa nipponbare
  unsure (1)..(248): unsure at all n locations
attaaaataaanataaaattnnccgggggagggttcttggtgtggattgactgaatnncattatcctttcatatcggtaggaatttttagttcactttcctgccatgccaaagagagaaggcactatactcatttatccaaacatgcctagggtacactaaaaatgtgccttgagtagtggtggaaatgtcaaaaaacactcctcgcctatagttattcctttctaaatatactaaaatggctctaat

SEQ ID NO: 422674 - DNA, 328 bp, Oryza sativa nipponbare
  unsure (1)..(328): unsure at all n locations
ttacatcctctanaacgccacccctttttttttttattttcatccataccaccagggcagggaaatacttggagcacaaatttaactgttaaacccataccttaaaccaattcataataatacatcctctttacctacttacatacataccgttttccatcacactcaccatcgatcgtacaaactaacatacatacatacctacacacatatacgcatacgcacttacatacatacataattaaaaactcttaattaattaaatacatagttgatggcatatttaatagaactttaggctcctcacgattttctttttaaccgtatc

SEQ ID NO: 422675 - DNA, 318 bp, Oryza sativa nipponbare
tgagaacgggtttggtattttcagatttacccaaacaaatagttaagcaaaggcactatcctgtcatagtattcatattagcaaatagtttgaaaacagatgtaacaatgatgtaacagactcagcaatttgtaggacataatcatataaacatagattagtttggtaacaaagatagtaagtttcaaactttaggaagtgtgcaccacgacagttcagctacaaataaaagataaacagataaaaaatgttcatgtcgcctaagccaattgcatgattagattctgaactaaaatctcctcaaagtgaaattccaag

SEQ ID NO: 422676 - DNA, 412 bp, Oryza sativa nipponbare
  unsure (1)..(412): unsure at all n locations
cactatacaagagctataacggggcagtgcacgcatacgtaaccttttatcctctatagcagcctcccttatttttttttttattttgaacattaaggggtacgggctatcaatcaagatctatcacaccaaaattacatcaatcctgtgccatcttacactttccttcaactataatgcatcaataccaggattaaaaacctatgcacatacctaagccatcatcaaaaatagtaaaaatttcttattgcatctgtacaaaaatcgcatatcaggcatcatcagcaccatcatcagcaagcaagcaaactatatcatctgtagctcactgaantaaattctgcaatggagagctctaatccaactgatcactgatccaaatcttgcaagactagctgatttaatgtggatc

SEQ ID NO: 422677 - DNA, 219 bp, Oryza sativa nipponbare
  unsure (1)..(219): unsure at all n locations
tttatataagaacaagnntaggggtgtggtgaaatactaagttgaatttatcttagataatttaattncccatttaataccatatttcttacttcactttttttttccacaaacacctttaaaaacacactatttcttgtttttctagccacccctcccacaaaaatttcccccattgctcccccccccccccataaaaaaaaataaaaataatttttt

SEQ ID NO: 422678 - DNA, 386 bp, Oryza sativa nipponbare
tttcaacacatcatatctatggggctggggcacattcgaacacaaatgtgcatcaacgtaagagggcttccaattaatcataagcaagccatatggtcacatgcccacatactaggagtccaaatcataaacgaaggatgggagcatgaactgatcaacactccatcctgcttagatacatacgagaggctattcacaggctacaaaccagccaagctcaagctcttcaagtaaagcctaaacagagttccagcatgatcagaccatgcgcattactttcactgcttgaactagccaccaccaaacatgcccagcccatgcttgacatgcttgaacttgacatggtggcccaacttgccatgcttgaacttgcctgcacggtgacc

SEQ ID NO: 422679 - DNA, 244 bp, Oryza sativa nipponbare
  unsure (1)..(244): unsure at all n locations
atacctaaccttggatcctctacaacagccaccctttttattttattctttataactctctncggggcgggggcccctttcctcactctatttatttcttcataatatacttcaactcatttacactacacttcaaacccaagtcatctttcgcaactacatactacatccccccttattttcccttaatactagaccacctctccaaacacccatatttttagacccccttcctaaccctcta

SEQ ID NO: 422680 - DNA, 337 bp, Oryza sativa nipponbare
ggggttggggccataacctgagttggattcttttattagcaatgcttaaacatatgttcaatatttttcaattttaagggacactttacatttgatattgtatatttgacatatattgttcagtatatatagcgattctgatcaccatttgtatggtattgaaataaccatgcacacattaaaatgcttagcaaattgaacttgacatgatttttcagagctacttgctgaactcaaaaacccaatattttgccaagatgtatgttgttcgcaagtcaccacttaaaccatagtccgtggctagcttgagaaactccaactctttcctcttcttttc

SEQ ID NO: 422681 - DNA, 266 bp, Oryza sativa nipponbare
  unsure (1)..(266): unsure at all n locations
ataatttttatttttnngggggggtggggccataacctgagttgtattcttttattaacaatatctaaaacatattttcaatatttttcaattttaagggacactttacatttgatattgnatatttgacatatattgttcaatatatataacaattcttatcaccatttgtttggtattgaaataaccattcacacattaaaatgcttaacaaattgaactttacatgatttttcacaactactttcttaactcaaaaacccaat

SEQ ID NO: 422682 - DNA, 413 bp, Oryza sativa nipponbare
ctgtctattcatttcatcctgctttggtcatttcttgatttttaatagttgactaatgttacttctttggtatatggaactaaagcactgatattaattaaactattatttcagataacaggccagccaagggttctatactatgcaactttcattcttcagactgctgggtttgcagctgcatctgatgctgccaaagtatcaaatttgattgggttgttcaagttgttgatgacaggtgttgcagtatttaaagttgacgatcttggaaggcgtccactacttataggaggcattgtggaatagctgtttcactgttctaatagcagcttactacaagatctgacagcttccttttgcgctgtagggcttacttctgatgcggtctaccggatcgttgccaatagtgctat

SEQ ID NO: 422683 - DNA, 197 bp, Oryza sativa nipponbare
  unsure (1)..(197): unsure at all n locations
cacgcgtccggctcctgcctcggagatacatcgaagctgctacantcttcttccagctcaatcgtatcgacgcttgcatctctnttgctcagagtgatcgtcgttnttcacagcttgcaggannaaaaggcaaganagactgagagcagcagaagaggaagatgatgatgaccgaggtcgccattcacagcaaaagg

SEQ ID NO: 422684 - DNA, 225 bp, Oryza sativa nipponbare
  unsure (1)..(225): unsure at all n locations
tcgacccacgcgtccgccttcgtctttctctactcttccttcttcttccaccatggctgcaaccgcttcgttctcctncaccgncaccgnctcgccgctcctactgccctcggcccgccgcccgctcccttcctccaaaccgtggcttcccgacggcagggcgttcaggggcagcagggcgctgagttcagcggcgcggcgatgcttctgctgctgctgcggtgc

SEQ ID NO: 422685 - DNA, 143 bp, Oryza sativa nipponbare
  unsure (1)..(143): unsure at all n locations
cgggtcgacccacgcgtccgtgtgaaccatggtgcatgtgaaccatggtgcatgtgaaccactgatnnntttgacttcagctatgntggaaccattgtatgagggatatcggaaccacatgctatcaattatgctacatgctg

SEQ ID NO: 422686 - DNA, 228 bp, Oryza sativa nipponbare
  unsure (1)..(228): unsure at all n locations
ggtcgacccacgcgtccgtgcttcgtagtgcccagcgagaagacgccgaagcatgtcctctggctttctcccctcgacatcgtcttggccaacagaggagccctcaccccgctcgtgcacttctaccgccgccgncatgatgccgccggcggcggcggggggtttttcgacgtgggcaggctcaaggagctctgccaagcgctggggctttaccctcgcggcgttcgg

SEQ ID NO: 422687 - DNA, 80 bp, Oryza sativa nipponbare
cttctatgctgaaggctatgtgcagtactgagtgatgtcctgtggtgtggcatgctgatactatctgcactgtctgagca

SEQ ID NO: 422688 - DNA, 187 bp, Oryza sativa nipponbare
  unsure (1)..(187): unsure at all n locations
cgcagctcgacattactacactgtagctgaaagagagagctgactgagagaacacatgcggtaggcttttcttggaggcagtgtgngaggcatgcatcttagctcaggtctcttctcagaagaccttatgcagcagagcatccctgcagcagtgtgcagcagtggtcgatcagcgtccgactctgat

SEQ ID NO: 422689 - DNA, 54 bp, Oryza sativa nipponbare
  unsure (1)..(54): unsure at all n locations
ccacgcgcccgctctcnnctccggagtctgcgtgcgaacgaagcanaggcgcgg

SEQ ID NO: 422690 - DNA, 129 bp, Oryza sativa nipponbare
ccaccgtccgtgcggcgtgcgttctcgcttcgctttctgctatgcttgtccttgacctcccctgctttgtctcgccgcatatcgagcggccatgaccaaggtgcaccctaacgtctcggtggtggcgcc

SEQ ID NO: 422691 - DNA, 345 bp, Oryza sativa nipponbare
  unsure (1)..(345): unsure at all n locations
cgcgtccgcccacgcgtccggggatcgattccaagtgcctccagttcaagaaggccgagagcgatcagtctgaggacgacgacatcccgtacgggttcggcttcttccacttcgtgttcgccatgggcgccatgtacttcgctatgctcttcgtcggctggaacgccaatcaaaccatggagaagtggacgatcgatgtcgggtgggcgagcacctgngtccgggttgtcaacgaatggctcgcggcgatcgtgtatatatggatggtgattgctccaattgtctggaagggagggcaggtcggctcatcgccagagggcacatgacacaaggagaacatatcag

SEQ ID NO: 422692 - DNA, 160 bp, Oryza sativa nipponbare
  unsure (1)..(160): unsure at all n locations
agatcaaagatggacgatatcatgaacaagctgnggggctactggctcgggcagaaggccaacaaggagatctcctccgccggcgacgacatcgagtcgctgtcgacgagcgtcggggagggggcaaagtggctggtgaacaagctgaaggggaagatgc

SEQ ID NO: 422693 - DNA, 250 bp, Oryza sativa nipponbare
  unsure (1)..(250): unsure at all n locations
ccaccgtcgccaccgtcgggagtacacgtcacgtcgtcgacacatgangggcatcatgttcgcaaccagaaggctgttgttgtcgtcgacccgaccgcgttcaacctcggcgcggctatgctgaacgacatgttcctcatgccggcgtccatgaaggaggaggccaccgatgtcgagttcatccagaagaggagcgcgtctggcgcggagcctgagctgatgctgaacaaccgtgtctacagcctgccac

SEQ ID NO: 422694 - DNA, 54 bp, Oryza sativa nipponbare
aatctctcagggggctcactactgagacccacctgtgcaccgcaagatctcgca

SEQ ID NO: 422695 - DNA, 99 bp, Oryza sativa nipponbare
ctggccgggtgcgacttgtgtgccacggggtcttttcgtcaagctggggagccccgtgaccgatgatggacggtgcgacgacggcgaccgtcctcctct

SEQ ID NO: 422696 - DNA, 76 bp, Oryza sativa nipponbare
gaggctcgcggcgccatccgggccgccacggggcgttacgttggggaccacgccgccgacgtgcgggacgccgacg

SEQ ID NO: 422697 - DNA, 129 bp, Oryza sativa nipponbare
tcgacccacgcgtccgacgcggcgcagctcggtcacgtcgacgatatggcggggattggaatggaggaggtggatatttataggaggatgatggcgagggcatggagctggagctgcagagcacctgga

SEQ ID NO: 422698 - DNA, 84 bp, Oryza sativa nipponbare
gagccacgcgtacggccattaagttttctcgtccggcggcgtcacccctgcgaattaactaactagctaggccggtcatggaga

SEQ ID NO: 422699 - DNA, 70 bp, Oryza sativa nipponbare
caatcataaccaccgccccgagttttaaataaaaatcacctcctccacactaatcctcactcaatactca

SEQ ID NO: 422700 - DNA, 214 bp, Oryza sativa nipponbare
gggggggaattttttttaaaattaattgttgaaaaaaattttttttctggctttgggaaaaaatttggaatgattaaaaagggaaatttaaaaatttttattgaaaaattttaaataaaagacaagggtttttggcccctaaaaacaaaaaaaaaaatttggggggtttttttgcctaaaaattaaacataaagttttgagccttttttttttt

SEQ ID NO: 422701 - DNA, 231 bp, Oryza sativa nipponbare
tttttaattttggggggagggttttttttggggtgtataaacccttattttattatttaatactccatccgttttgaaatgttttacacccttttctttttatcacaagtttgactcgccacaataaacaaaatgattaagagttttgttccttttttatcgatctcgggttgaaaaaaaattcgctctataatgcggcttctaaaatatctgggagaccaaaagaggatg

SEQ ID NO: 422702 - DNA, 233 bp, Oryza sativa nipponbare
ctatacactatctatgacctagcattcacacctacacaaacttaaatcctctacatctacacccctcttcttttttttttaatacaatattaaaaacaaccttcgtatttttttacattcaaaaccaactctattctattaaataatccttcacacaatataaaaatataccactccacctaatattacccacacatcttacatacactcctttattacacaacccttcctct

SEQ ID NO: 422703 - DNA, 287 bp, Oryza sativa nipponbare
ttgacggatacatgctgggggattactagatcgagttacacaaaaacacaatacgaatatacgatgtagacgtacgtacacaagtatgtatacaatactagagtaattaaaacacgtatatgcgcacgtacaaacataagggtacgtacatatgtacgtaccccgcctttgttattccatgtgcacttattagcagttagcgcgggccaaccggagtaattaattaattatttaactgcttgatgatctgattaactaggtaaacacgcactaattaaaacacacgt

SEQ ID NO: 422704 - DNA, 56 bp, Oryza sativa nipponbare
tttttaaaacacggaccgtcgactttttcatattaataccaccttcttatacttcc

SEQ ID NO: 422705 - DNA, 304 bp, Oryza sativa nipponbare
atatttatatttttaactcaacacccgagtcgagttaattcaaacaagaattctctaaccttaataaccttatcaaattacaaaataataaatccctacataaatttccaatacttaaaaaaaaagatattttttcaattattatccaattttacatcataacttaaattacaaattaccataattactcactttttcaaaaaatttcctttatttacaaacatttcttccccttttatatttacaacattaattcttaattttacaatttcctttattaattccatacatttccctatccaat

SEQ ID NO: 422706 - DNA, 368 bp, Oryza sativa nipponbare
caggtataatagggtgaggtgcatcaaaagagaactggagtaaacctactcaagagttctataaacatactaggaaccactacaaaaggaatatgggcatttccacaccaaagaaaccagattcgtcatttggctccaagcaccaggagggaaaaagaaaaataagagaagcaattatgaaccctcacagaaaatcactcgataatcttgacttggagccaataaagaaataacatgagttgataaaataggcttttagtcccacaaaaggttgatcatcgagttggccaacccggcttctttgaaagttttatcactctcgtactccaagtttgtggatgctctaagaatgggctgtacgaaatgga

SEQ ID NO: 422707 - DNA, 203 bp, Oryza sativa nipponbare
ccacgcgtccggacatatatgaggataccccacctgcccgttgtattattgccagacctaatatccaggaaattaactaaatcaaatatgaagatagtattttgcctttgttttaacaccttatgctgatgctatattttatgttttatacaacctatgtttacctttcttcaaaaatcaaatttatttatttaatcattacc

SEQ ID NO: 422708 - DNA, 203 bp, Oryza sativa nipponbare
  unsure (1)..(203): unsure at all n locations
ccacgcttcctgacatatatgaggataccccaccgaccggttttattatacacaaacctaacatcnannaaattaactaaattaaatatgaaaatagtattttgcctatgttataacaccttattctaatgctatattttatttttactataacctatgtactcctttcttcaaaaatcaaatttatttatttaaacattacc

SEQ ID NO: 422709 - DNA, 174 bp, Oryza sativa nipponbare
aaaaaaacaggggggccccttaaaaactacacccgaggcccccattggttttttgtttttttccctaaaatcagccaacagtttttttaagctttccttgaccccacttttttacatccttttttacaaagttttcccacccttccccccacccttccggggacccttggttca

SEQ ID NO: 422710 - DNA, 216 bp, Oryza sativa nipponbare
cccgccccgttttaatttaaacttccctctctctttttatattatatacacaaaaaatacttcccccttaaaaaatcccccacatccccccactctttttttttttttttaccaaaaatcaacaaacattttttttaaacttttaattaccatcctactttcttctaactttaatatatttaaaactagctacatcactttctttctttaaccctt

SEQ ID NO: 422711 - DNA, 284 bp, Oryza sativa nipponbare
agaaggaactaacaatttataatttttgacacaacaatgccacaaaatcctactaatatacattatcatacatgggacaaagtccattttctacaaaaaaatcccttccttgttttttttccctccatcggagccatgccatgccattaccacgttgtggccgagcttcgcccttagcttcttccacccgaacttcttgggacccccgttgccgttgccgttgttgccttccttcaaccttaatttgacgaggattatttacggggacaccttcgacattttca

SEQ ID NO: 422712 - DNA, 244 bp, Oryza sativa nipponbare
  unsure (1)..(244): unsure at all n locations
tctatataaaatcggctgggggtgtccactcanatgatacaaatacacactttgcactacaagcgttcaattatccatgcagttgtgtcatattacaaaggctctaggttcaagaatgtttttatggctgcccaatcattcgataatcattatcacatcatcaccacttcctgatgacgtttgttccatacttgaactttttctttccatcggcctcgatcctcatatcatttgatatgaaatg

SEQ ID NO: 422713 - DNA, 396 bp, Oryza sativa nipponbare
ctacagcacctccccccttttttttttttttttttatctgaagggcaggggacatcaagtccagctggaactaacaagttaatttcttgtcgcattgaaacttctacaatttctcaatggaggacttaaacacaggttccgcttatcctttcacgcatgcttcttgttcttggcataccagttctcgatggtcatgaaccaattaaattggaagcaaattgctgcaaatcgcatgactccagcaccaataatctccaggaatgctgttagcggagaactctgtggggatagaccagcactaactacagctaacattgctccctcgaaattgcacggtacaataaactttccggatttgatgccatctaaagccttactagcaacatcatcagcttt

SEQ ID NO: 422714 - DNA, 278 bp, Oryza sativa nipponbare
gggggggaaatctgcttcacttcgtattgatttttggggcaaattttaataaatccctttttgcatcttattattttgggcttctatacatggggcctggccttctttgcctgttgaactgctgatctcttttctgagggcccccatcaaatttcagggggacaacctgcttgatgtatgaagctcctgggaaattccttttttcctttgcaattgatcggagctctggcaaccagtgggcaacatactttccatcaggatcatatgtcttggcttgc

SEQ ID NO: 422715 - DNA, 249 bp, Oryza sativa nipponbare
attcataaattaaaatttacttattaaaatatattacattatacatattcttttctttacacacccaacctattttttccaacaaaccaaaaactaaaaaaaaacctctaaaaaaaacaaatcaatcaatttatttcccccccccacaaaaaccttccattttttctttgacaaaaaaaaaaaaaaactgcttaacgcaaagctctaccccccatttttattttttaaatgacatggcccccccaaaaa

SEQ ID NO: 422716 - DNA, 258 bp, Oryza sativa nipponbare
ccctcttcttttttttttttttttaagtttaatcgggggggggcctcttctaaatgtgtaacttactcacaaaacagaaatgcgtgttgaaaatctatgcaactgtttacaccaaaaggggaaaaaaacgggtacctcgcaaaaaggagtattacttttcatggttaagagacaattgaactacgacccattctgcattacaggaagggagattaaaaatactgcagtttcagcgtttttgaggtctgaacagacact

SEQ ID NO: 422717 - DNA, 65 bp, Oryza sativa nipponbare
gacccacgcgtccgccaccttcccccgccgccgtcgccgccgccgtcgccgtcgacgccagcatg

SEQ ID NO: 422718 - DNA, 99 bp, Oryza sativa nipponbare
cgacccacgcgttcgccaccttcccccgccgccgtcgccgtcgccgtcgccgtcgacgccagcatgtcttttttcttcgccgactcctccacctgcgcc

SEQ ID NO: 422719 - DNA, 435 bp, Oryza sativa nipponbare
ccacgcgtccgctggatgagtgttctgggactttcaccaagtaaggcttccacaaatgatcaaggctccaaaaatggccaaaagcaggcacaacaagaaacaagcgaggacgccaaaaaacttgcagcgagtgctcttgccgctgtcagagatgctgcttcagctgcagctggaagagggaaagtggagatcacggaggttagggactttgctgggaaggatatcgagatcaagaaactggtggacgccgattcaacagaagcgatagagaaggccaaggccgctggtgctgccccgtctgctctcgaccacatcctcgagcagataaagaagaagcagaagctgagcgtcctggacaagacgaagaaagactggggagaggtcaaggaggagaacaaagggatggaggaggagctggaccagtacaagaagagc

SEQ ID NO: 422720 - DNA, 255 bp, Oryza sativa nipponbare
gcgtccgcgaggtgctccaggcaccagccccccgcgccgcccaccgtggtggtgatcgattaatacgacgacgacctaggcgacggcccctccgatgaggaggtcttcataatcgatggtgatgcggcgaaaggccgcgcgtcttctgggtgcaagactaagagagggaacagctcgtgtagtaatgtgattaacttagatgatgatgatgaggaggaggaggagggtggtggtattattgtttattacctatat

SEQ ID NO: 422721 - DNA, 137 bp, Oryza sativa nipponbare
ccgaattcccggtcgaccacgcgtccgcggacgcgtgggctgcttctcctcttcttttcttggcttgtgctctgttttattctctttgcaatgatggggaggcagagctcgtcggcggcgaggagggtggtggtggt

SEQ ID NO: 422722 - DNA, 433 bp, Oryza sativa nipponbare
ccacgcctccggagataattcgtcgttcgttttgtgcatccatccagaattcgttccagatccagttcatgtttgccatctcaagcttctctcttctcttgttattaagagcaagcaaacagtagtctagcgaagcgagactgcgagagcagagcattgttcttcttctctagctattagtggtggggaataatggctcccgccaccaccgcagcaatggccctcgcgccgcctccttcccatcaccatcaccatcaccatgtcaagcagctgcagctccctccgtctgtctccgtctccgtgcccctccgctccggtttccttggccgcgcactgcctgctgctgcccacccacagccgctgctcgccgtcgagagccgccgcagcagcgccgtgtccgtgcggatgtcgtgggacgggcccctctcctcgt

SEQ ID NO: 422723 - DNA, 429 bp, Oryza sativa nipponbare
ccacgcgtccgactatgcgaacattgactgtaagaagtatcgaaggaactcaggtgccgctcatgttcttagagctggtgttggttaacaagtcctgcgtttagtggaaacgccagtatttttgctcagtaaaatacatgttggcagtggtcgcgaaacgacaatcagatgatgtaatcagcacatgccttccatgctgctctacacagcatgaacaccttttctgtgaaaaaggaaacgatatacatctttgcgtgttatcccttttttgactgccgcgtacggactagtattactgctacacatgctgcaaatccacaacacaatctcatactagctgtctcattagagagatcctttggacgatctgttctagtgtagtggaggctgaagcgtgttggtatgatgtttatcggtgctattttattg

SEQ ID NO: 422724 - DNA, 311 bp, Oryza sativa nipponbare
ccacgcgtccgctcctttcttctccataccaatcctatcccgatgcgggcatggaggttgactttgcattggctggcagcgggggcggcggaggctcgcgacgacgacgaccccgggcgcggaggacggcggcagtcgcggccggcgacggcgcggagggcggcggtcgcggccgacaacggcgcggagggccgaggtcgaggccggcgacggtgcggagggccgcggatgtggcccccgcgcgtgaatcaggacgaatgcgccagccaaatcgggacgaaggcggcggcgacgacgactccccacgcgcg

SEQ ID NO: 422725 - DNA, 492 bp, Oryza sativa nipponbare
accgtccgaattccggtcaccacgcgtcgccaccgtcgccacgcgtcggccctttttttttttttttttgcatactaaagaagaacactagccatttccgcttcaacatcctctagttacatacttacatgcttataactatacaagctcccattgtaatttctctactttgatcttaaacactgtatatatataccagtatatacatataggcctttacatacattgatccgggatcaaaatctacaacaacctttataattagcaggatctttcttacagaaaaccaagaaagtacacatcctagcctagctaccacacacataacttacctacttaatttgcacatgaaattgtgcacaagtacacaacctgccggctgcttcagtgcacacatgcatggaacacttggtacgtatagtatagtggtagggcgccctatttcacaaagatatattctgtcaaaactaacacttcccccaaacaattaaa

SEQ ID NO: 422726 - DNA, 519 bp, Oryza sativa nipponbare
aaagcaacagagaaaaccgcaaaaaaaaaactagcaaatgctgaacaaaagtgtctttgtacaaaggaaacaaataggtaacatcaaattgtacaggtactgatctagatatttccaagcgcatgacaaataccccataaagtggtaatcaattgactgaaactggagtctcagacacttatgctgcataatactacgaaaagagcacaagatttccacagaggactaatgcaacagagaataaaatgaaaatcccctgaactttttatacttcggatcaaagtttcaaacttatataacacagtgggcttcagatgctggacagcattgacactgctggtttgtcagtgaaccaagtgagcactccctcttgctgtgaaaccatcttaacaggcagcaagttttgagagctttgcttatttgagaatgccttatgcactgccccagctttcccagcaccagtgaccacaagtgcgatatgtgccgacgaattgactaaggggaaagtaaatgttattc

SEQ ID NO: 422727 - DNA, 492 bp, Oryza sativa nipponbare
ccaaaaattactgcccagactggcatacataaacaatacatacaagaaatggatacagccagtatcaatgtgcacagcatcttcttcttcttcattcacattgaatcaacagatagaaacagaagagaatgcatagacaaaatgatgttcccatgatcatctaaaaagaatgtctacaaggagctgcaagatgatggaactttttttttcctttttcaggccttctacacatcaatcctctcgcgtatccgacttccgcttcgacatcatggacagccgcgcatccctctcgcgctcaaactctctgtaatcagctctctgcaagaatgacaccttatccaggtatttgttcgagctcttcttgtactggtccagctcctcctccatccctttgttctccttcttgaactcttcccaggtctttcttcgtcttggcccagacgctcagcttctgcttcttctttatctgctcgaggatgtggtcgagagcag

SEQ ID NO: 422728 - DNA, 240 bp, Oryza sativa nipponbare
attcataaattatttttttttttgaaaaaaaaccataaaatatttcaaaaaaaatgctaaaaaaaaattaaaaaaaaaaataaaaacaattttttttgcacttgcaaaaaaataaaaaaaaaaaagaggagaggaccaaagggacaaagcaaccccccccaaagaggggaaggaatccaaaaaaacatctaaagataattgagggcaaatcaaaaataaagggtgattcaaaaaattgat

SEQ ID NO: 422729 - DNA, 353 bp, Oryza sativa nipponbare
tttttatcatttggggtggtttttttttttttgtttttttttacttttttttttttatttttttttaccaggaaaaccacaagaaaacacggttgattaatttcacggaaaatagaacgggtaccttaaataaaaaaaattaattcgttgtttcacccaaaggcggcaaaccccccaggtttttaattaaatcaaaacacacgggtttaatttattctttatgaggcaacacacaaaccacactcctttggggggtttttattggggactaataaagggaggtatctcgcccgcggggaacatatagttggttagggactatattttccccatttgcacttggtgaaagaaaa

SEQ ID NO: 422730 - DNA, 350 bp, Oryza sativa nipponbare
gggtggggtttttttttctttgggtttttttttttttttttttttttttttttttttcttttttttgttttgttgggttgggttcttttttttttttttgttcggttgttgtttttttttttttttttttttttttttttttgtttttttttttttcttttttttcttcttgtttgttttttttgtttttttttttttttttttttttttttttctggtttttttttttttgttgttttttttttttttttttttttttttttttgtttttttttttttttcttgtttgtttttttttttttttttttgttttgttttctttttcttttttttttttttgtttttgtttt

SEQ ID NO: 422731 - DNA, 371 bp, Oryza sativa nipponbare
atcccaatcggatgtgcttagcttcagctctcaagaacaattttaagggagcaaactgtgttatcaagcatgtactatgcttctagttaatataaaagcttggttttcaaaaaaaaagaagcgataaacctcataactactcatttcttccttcacttcactaggacacgacgtccaaaggaaaaacctaaaaagacagctagtataatattgcggactggatttggagcatgtgtcacagtaatactactccgtacacggcagtcaaaaaaggggtaaaacaaaaaaaagggtatcggttcctttttcgcagaaaaggtgttcatgctggggagaccagcatggaaggcatgtactgattacatcatctg

SEQ ID NO: 422732 - DNA, 372 bp, Oryza sativa nipponbare
tttagctctctaagttaaggttgagccaacatagaaaaaaaaggagctccaacaaactttccaaatagacaaattgctcctatgactagccaaatgtagccagccaaatgtagccagcctcttccggctggccaaagatgggtcccaccaccactcccagccccatccttcctctctctcctgtccacccaccactggtccataggagcgccatcggcgagcgaacgaggaaagcacgaggcggcggcggcggcggggacgaaccgagggcgccgtcgacgagcgacgtctggtccacagtccgctgcagcaggcatcatcgtcgccgccgcggggagccgtcgccatctgcatcgctgctgccgggcgagg

SEQ ID NO: 422733 - DNA, 409 bp, Oryza sativa nipponbare
ggatgaagggccggttcgtcaagcgcgccgccgcgcggccgccgctcccgctgcccaggcaccagcatccgccgccgccgccgccgccgtgcgctctgccgccggtgccgatgatgctcgcgccgcgcggcgcgcacgggcgctaccgtttttgagagctaccgctctcgatcggcttccgatgcgcatgcgcgcgtcgtctagctacatgcatgcatgcatgctagcgatagccgtttgcgtgatccaacaataagtacaaaaatactactatatatatatacaaacatacaaactcgtcgaatcatcgatcgtagcatgttggtttcaggtttaattgtttgggggtagtgttagttttgagcagaataaatctttgtgaattagggggccctttcactctgttttc

SEQ ID NO: 422734 - DNA, 376 bp, Oryza sativa nipponbare
ttattttatatagggggggggtttttttatttaatttttatttaccttactttatattaagggacccagaagattaaaatttcaattatgggcaacttaggtgaaataatatctagggacatgcaacttttgatatgcacaataataccaaattggtaaaaaaagaatatacaagacgtgttttttccttttatcagggggaggggtccaataaggcattcttcttttttttcaaaaaaaaaggcaaaccactaattttctcgcccaactttgactggccggcaaataaaaaaattttctatacttgcctttttcaatggggggcgacgataaaacccaatgaattatgtatccctggcctggccttttaaatttt

SEQ ID NO: 422735 - DNA, 320 bp, Oryza sativa nipponbare
tttttatttttttttataggggcggggtttttataaaaggggttttttttcctttttttttttttttttttttctttttttcacataaaaaatttactttttatgcgagcccagcgcgcaacccgaaaaaaccggcccacaacaacaaggccaacaactttcccccaataaacctaaaatgaaaacctgaccgaaaaaaagaaaagaacccccccccgacaaaatatgacaatcacagaaaacttgccaccaaactcctaccagtcctgaaaacttgaaaaaccctgaagcgcaaaacgggacaaaccaccaaaataaaa

SEQ ID NO: 422736 - DNA, 110 bp, Oryza sativa nipponbare
ccacgcgtccgcccactcgaacacgggctgtagcagtgggtccagctgacgcgcgctcccatttgcgcctgtttcagggtcatgaggggcgacgtcaggatcgacggcgg

SEQ ID NO: 422737 - DNA, 75 bp, Oryza sativa nipponbare
  unsure (1)..(75): unsure at all n locations
cacgcgtccgccacgcgtccgccacgcgtccgccacgcgtccgccacgcgtccgccacgcgtncgggcgtacacc

SEQ ID NO: 422738 - DNA, 225 bp, Oryza sativa nipponbare
tttccaaattgacccacgcgatcggtcacttataccctctacgaatatccctctatgaacttgtcatctcccacagaagctgactacctggtgatatacagcatagtgtagtggactcttactctaatgggtgtggtcaagaatgtatgcatagctcttaatgctgatgatcatggttaatgtggtacatattccatgaattccttgtagtggaggcaagtcgat

SEQ ID NO: 422739 - DNA, 333 bp, Oryza sativa nipponbare
ccacgcgtccggtctgttccaatagattattagtggatgaactacttatagtgattagcatctattagacccttttctagggagcccagtgctgaaataaaagccgcttggtatgtgcacatgtaacacgcggggctctcatgtttgctggtcaaatgagacccagacgatataaaaacgagtgatgtacatcacccagattggatcttctgcatgttgtgcgcgctcgcatggctggccaccagaataaagatgatctttgctcgtcctgaaaggagttcgcactgaggatattgcgattagacccgccatctatactcattattgtgtgcc

SEQ ID NO: 422740 - DNA, 121 bp, Oryza sativa nipponbare
ccacgcgtccgcccacgcgttcgtccacgcgttcgtccacgcgttcggccacgcgttcggataaaaaaattaataaaaaaataaatggtgaaagggaaataaaaataaaataagaggaaag

SEQ ID NO: 422741 - DNA, 396 bp, Oryza sativa nipponbare
  unsure (1)..(396): unsure at all n locations
cgcgtgcgcccacgcgtccgcggacgcgtgggctgccgcgactgcgcggggagggagcatcgttacgcgactgcccgccatggcgtctcctcgctgcgccgccgtcgccctcctccatcccgccggagtcgccgccggcggcggagctcgccggcgtgtcctcctcctcgaccaagagcggccggtgtgggggactgaggtgcgccggcgccggcgccggcgtttcttgagccttgagacgccgccgcggtgcagcaagatgtacgtacccggctncggagagggatcgccggagaagaaagcagcaagaaacctgcagcactttttcaactacattgctgtcagggttgtgctcacacagcttgagagttacaaccgggaagcatatggtgagct

SEQ ID NO: 422742 - DNA, 407 bp, Oryza sativa nipponbare
ccacgcgtccgcccacgcgttcgttcgactaatgggccgtggagcagaggaaattaaatggctcaatccaccttgaggtatcaaggacagctgctagggcaaaagctgcagttgaagcagctggtggaacggtaagactggtgtactataataaccttggattcagggcacttgtcaagcccgagtggtttgcaaagaaaggccgacttttacctaatgcagcaaggcccccacccaagcaacgagacaaggttgatagcattggccagctgcctgccccaacaaagccgatgtccttcacaccagaagaactggaatatgcagcaaaacgtgaagctgctcgagtgattgcgtacaagggagcatgaagatgctccttctgactagagttttgaattgggcatgca

SEQ ID NO: 422743 - DNA, 349 bp, Oryza sativa nipponbare
ccacgcgtccgcccacgcgtccgaaatcaccaattacaaatcgagaatccagtcggtgaacgataaaatgtatgacgattgcgtcaaaacattcaaaatgctgttgcacgcattacgcattagggagcgacatctcgtatgtcctgaatattgatacgattatggtgtcttcgacgctctactgattggtgatgaggtactggcgtatggagaagttgtagtgatgtccgactcgaacgacgcggtggtggactggactgtatgtacgacacgaacaacttgccgatgtaggacgtccgctagatcgacgacagcttcacactataatgcatcgatttgttcggcgctc

SEQ ID NO: 422744 - DNA, 432 bp, Oryza sativa nipponbare
ccacgcgtccgaattcatgcaatggcttctaaacataatgttacttgataactaggatataaattaataattacatggaagaactaatttatatctataagttgctttcaattttaccatgagttagtatgtgctaccataatccttggaattggagggtttgtagcagatctcatcagttgtaaggaaagtggaaaaagtttatttggtcagtgttaagctatcttaccgtgcaatgtacattaggtaatgtatgctgttaacagttatttttgttgttaaatccaatccattttcttaaattcaataaagtattgatgaaacaacttagatgcatccaaacaatgctagcaatgctcttaatggggagcaagcaacctgagggtagagtcacccatatattctggtatattttttataaatggaaatgtg

SEQ ID NO: 422745 - DNA, 178 bp, Oryza sativa nipponbare
  unsure (1)..(178): unsure at all n locations
acccacgcgtccagccacgcgtncgcccacgcgtacgncacgcgtccgcggacgcgtggtcggacgcgtgggcgaactcgatggtcgtcgaggagattgagtcgcggaaggcgatgctgggcgcgttgatctgcgttatgaaggtgatcctgagcaagaacggcgtgaagctctgtca

SEQ ID NO: 422746 - DNA, 71 bp, Oryza sativa nipponbare
gcgtccggcattatgccacaaagctaatggctttggaatttttttttttttttttttttttttaaacgaga

SEQ ID NO: 422747 - DNA, 335 bp, Oryza sativa nipponbare
ttaacacaaaagtaataccactgtattcatatttcaatggaaaaaaaacatattttacaaggcaaaaatattcccaaagttcaacatatacatatatagaagacctaataattgaaatacagtcacgcttcattagaagaaaactaattaaacagagaggatgtagatggagtgtattgtatccttgagcgaacttggatgagtgtatgcatcttggtcgtccttgtagacgaaatccagcacgcgtgtggcgttgacgactgcctccagcagtcgcggactttgtgccgcccttgaaccacctctcttcgccgggctgtgccttgcagatttac

SEQ ID NO: 422748 - DNA, 267 bp, Oryza sativa nipponbare
atattaatcagatataatataaatttattaatatcatggatattattaaaaataaataaactcacaaatttttatgtctaagttttttgatagatggtattattaatttgaaattctaacatttttttttttaacaagaactagagtttttttttttggttatttacaaaatctgttttaggatacttaataaatatgtctcataaacaaatataaaaatttttataattataggatattataaaatttttttttatttatataaaa

SEQ ID NO: 422749 - DNA, 332 bp, Oryza sativa nipponbare
ggaggaaaagaagttgatttattgtcatgatgggattaattaataagcaggggtggtagtaggtaatatcactttggccggatccatactgggggattactagatcgggttccccaaaaacccaatacgaatttcccatgtagacgtccgtccccaagtttgtttacaatactagggtaattaaaacacgtttttgcccccgtccaaacataagggtacgtccatatgtacgtcccccgcctttggtattccatgggcccttattagcagttagcccgggccaaccggagtaattaattaattattaaactgcttgatgatctgattaacta

SEQ ID NO: 422750 - DNA, 150 bp, Oryza sativa nipponbare
aaaacaaacaagatctccaaatttttttcaagtaattcaaaacctcacacagattacacacatttttttgctccgagtaaactggccgggagcccgggaccgaaactaaatcgttgggctacaactacatgcaagtttttggacccgtgg

SEQ ID NO: 422751 - DNA, 382 bp, Oryza sativa nipponbare
aaaataaaaacgggggtgtgatccttttgatataacatgtaaccaccatgctgattacacgacccaaatcacaaacattcacctgcggaacgacctgaagaaaacaaaaactaccaaacaaaaacggcactgttatccagaacccacatggcgctaaactttgacaggagaaattgatcatgacccacgtggcaatgggggcaaacaagggtggtaccttaaactttaaagatgcaacaacgtaatctagtatacggtaaagtccaaacaacattaaccatgaaaattgctgagcaccaacacttacgaacatttgacaggtgattactgaaacacacatgtgatgagcacaggtgatcacagcataacattatgatcttgg

SEQ ID NO: 422752 - DNA, 297 bp, Oryza sativa nipponbare
aggacccaggggcggacccgggggcggacccgggggcggacccgggggcggacccgggggtccacccggaaaaacaggcccggacccggaaggggtcccaagattccctaaaaggggaggtaaaaaagccgggggaaaaaaggggaaaagggcccgccagggaaaaaaagtaaaccgctaaaaattccaaaaaaaaaccaaacccgaaaaaaaaaggaaaaagcccggggggccaaataagggagcaaacccaaaaaaatgggccggggcgaactgcccacttcccaggcgggaaac

SEQ ID NO: 422753 - DNA, 629 bp, Oryza sativa nipponbare
  unsure (1)..(629): unsure at all n locations
ttggttccaccaacaaatcgttcgtgttaatcgcaggtagatgatacagcctggtgtacaaatgtgataaactataaagtgttacacctgtgacttgtctaacataacagaactaaaattttacagtcaggagcaccttcagcaaaatcaccagaacaagaagagtatctgaagatcctgaacaatctcatctcagcactccttatcagattgcttgccgctgcccggcaagtcatctgacttaaatcttggtctttttgtactgcatccctcatcctctaaggatttcaacttgtgctttatggcagctatcttcgcggcacggtcagtctgtaccgatttgcttcctgaaccacctgccagtttcttgggaaaaaagagctttgagttgactgacatggccgtgcttttctttttcttccaatggcctcctccacccaccgttccgtttcctcgccgccgcctccgccagtagcggcagcagctactcgattccccatgcgcgcctccgccttgccgtcactactccgtcgaggctaccttcccccatctaatnctcgcccgacccaccgnccgacgtngcccacgacgaagacgaacaggaaggtcagcaccacaaggaggagcgg

SEQ ID NO: 422754 - DNA, 403 bp, Oryza sativa nipponbare
ttttttttttttttttttttgtttttgtttttttttaatatttaaatttttatattttattttttttttaattaaatttatttttatttttatatttttttaaaatttttttattataaaattatattacaataattttaaaattaattatagaaccaaatgtaatgcatatttagactagagcttatttaaccaacaaataatgctatactattgtggactacaaataattacaaaaaaacttatacagataatattatcaaaaatataaaattattctttggaaaaaaaaaaatcctaaaacatctttttaactgttggtactgagcctaaaaagccaatattctaaaggtagagctaataacatacttacccttgagctttagacttaaaaagatttttg

SEQ ID NO: 422755 - DNA, 150 bp, Oryza sativa nipponbare
aactaagaccagtttgattgcggggttggtaccaaaattaaaaagggccggattcacaaaaaagcaccttttactaaagcttaacattacagggccaacaagaagttgcttgcgggccaacaattggtggccaagccccccccattatta

SEQ ID NO: 422756 - DNA, 380 bp, Oryza sativa nipponbare
cagagctaaatatatatctaaaataatccaaatgctggactcacagcagttgatgaccgtgacacgggcatctttgagttttagatcaagaggtatagcagtgctgggcggctgacgtgttggtgatgtgactacgggttaagaaaaatgacatactggcctaaatggcaagcgaacataccgaacttgctaccaagggatccttcaaataaaggacatgagattcttgtgcatgcccaattcaaaactctaggtcagaggagcatcttcatgctcccttttacgcaatcactcgagcgggttcacgtttggctgcaaattccaattcttctggggggaagggaagcgggtacgttggggcaggcaagcggccaatgcta

SEQ ID NO: 422757 - DNA, 328 bp, Oryza sativa nipponbare
agcccaccaggaacaattaacgaaagatgaaattattacagatatgccaacatatggttagagcatatatgtgcttcactttacagagaaaaaccatgtagttggagaatacttcagggtaggagtacagcactggcaggaaaaaggggtgacgggatgtgagactttttacaaactatatatattccaaaattttggttgcggggtttgtacatgaaaaccaagcaagctagctacaaagaagttgggggttaagatttacatttctgatgtaagcagtttgaaagaacaatatgggagggcacatgggggagacctggactgatct

SEQ ID NO: 422758 - DNA, 359 bp, Oryza sativa nipponbare
  unsure (1)..(359): unsure at all n locations
ggtgnttnntttgcgcccctcgaatcgaggaacacatgttgagattgctagcacgtacggcttctgaatctcactatcactaatatatgatccgtcctatcatttactcatcaatgacaaaaatggtaaatcctgaaaattcaaagaaaaaactccttttccaaaattgtaattgcctttcatccttggaccaccaatcaatcaaactgggaaggccaattgttttggggccttaggaggaattattcaacgcatgctgccaatccacaccctttccatataaacttaaagcctaatggcataaggggtagtaattctgatcaatcttatgacttcctgaactcatcctaaattcctga

SEQ ID NO: 422759 - DNA, 76 bp, Oryza sativa nipponbare
aaaaaaaaaaaaaaaaaaaaaaaaaaaaaaggggaaagggggaaaaaaaaaaaaaaaaaaaaaccggccgcgtggt

SEQ ID NO: 422760 - DNA, 323 bp, Oryza sativa nipponbare
aaaaagaggggggttttaaaatttttaaaaaaaaaaatgaaaaaaaaaaaaaaataaggggggggaaaaatcttttttaaaaaaaaaaaaaaagaagtttgtaaaaaaaaaaaaaaaaggggggggggggggtaaaaaaaaaaaagatgtaaaaaatttgggaaaaaaaaaaaaagggggggaaaattttgtttataaaaaaaaaaaaaaaaaaaaaggttttttttttggggggggttttattttaaaaaaaattttttaaaacggggggtttttttggaaaaaaaaaaaaaaaaatcacactcttttttaatttttcaaaa

SEQ ID NO: 422761 - DNA, 312 bp, Oryza sativa nipponbare
aacaaaaaaaaatcgtttttgaccatttggccaatttttttattaccatgggtttgggcctatgattagcccggggctagcattcacatatgcatgcttttaaacctatgttgatccatacatttgtccatacatacccaggtggtgttgcccccaaccagatgaaaaaaaaaaactggacccaccaactgggaaaggggaaaccaatgccggggggccccatttaaacgtttaaagctgccaaaacccaatagatcaatcgagtctcctttgtataaagctcacaagtgagcttgctggccggacccgtgg

SEQ ID NO: 422762 - DNA, 573 bp, Oryza sativa nipponbare
ttttgctaaatcgcattggacgggaaattatgagcaaaatcttacaaattttgatcttaggatctgctcggcaattcatacccgtcctcctcctctagctacagcaagatccaacgatcttaggcagtcaacggtgatcagtggtggagccagaattacattatagtgggggctgaactaaaattggccgacaaaaatcgagacatgtcttatgtaaattgactatatatctaatacaaagtgtaaatatatagaattaacgagaaataagtattatccataccaaaacaatcttgaaatatccaatagatgatgacacgatgtgcgacactagcacaccctatcgccaattattcttcatcaggggtaatctatacaaaagaaatgtcaaattaatgaataatgacaatttaacaaccattagcttcaaataatttaaagtagggaatggaggcatggagtagtaacatccgacttgctttcatatcttcaaacctttggataattttttcattactaatacttttaaaaatttgcttctcactatctcagtatagcatatcatcgagtcat

SEQ ID NO: 422763 - DNA, 374 bp, Oryza sativa nipponbare
  unsure (1)..(374): unsure at all n locations
tgtacatcacaaaacgtagggaattgtgatatgaacagcaatacanattctccattacaaatatgcaaggccagttccccgcaaaaattttttacaaagataaatatttaaaggccagtacaaacactaacaccaccgttatctcatcacgatgcacaaccaacgttgctccaaccaaaaatccactacatatcacatgcaatacagcatactaactacaggatttaaacacatatggccacacaaactaaccacaacgcgaaaagcacatttaaccatcattaaatggttaatactatatccgaatgtgactctactcaacaaacaatcctaggtcgacctcgtgcacgaaccatgattctgacctctacatt

SEQ ID NO: 422764 - DNA, 307 bp, Oryza sativa nipponbare
gggttaaataaattttttttttgccggaaattgggaaagtgttttttgatttttttttggaaaaaaaaaaaaaaatttttgggtttttttcctaaaggccttcaactttcaatttttttggcccacaaaaattggggttttttttatttaaaatttgaaaaaaattttttccggtttaaccaaaaattggggttttttttatttaaaattgtaaaaaaaattttggggtttttacccccaaaatttttaaaggggcttggggtttaaaattcattgttttttttaggggatggtaacattaattttt

SEQ ID NO: 422765 - DNA, 300 bp, Oryza sativa nipponbare
ttttttttttttttttttttttttggttttttttttttttttttttttttttttttttttttttttttttttttttttttttttttttttttttttttttttttttttttttttttttaaaaaaagagcaaaaaccattgtggaaatatggggtttaagccaaaaaataaactaaatttattttgggggattcattttgttctaattaagggaggtgaattgggggggaaaaaaaaaaaaaaatattttgtcttgtaaaaaaatttttttttttaatagcaacaaaaaaaaatttgagcg

SEQ ID NO: 422766 - DNA, 317 bp, Oryza sativa nipponbare
aggaatgattttcaaaaaaagcgcgggtttttttgcaaaattgccagctccagcgccgggggacgtggtttttaccggaagcgaacaccccagccaaaaaagccccggagcgctgggggggctccatttcgcgggcccctttaatttctccgatactgtgaccttcacatttcaagtcacttggtcagagaatagaaattcttaccagcttgtttcggcccaacacttgaaagcttagaaccagaaggcaggtttgaaaacagattatgctttttcataattggagcccaaacattcaggtaccctttcaaaaataa

SEQ ID NO: 422767 - DNA, 533 bp, Oryza sativa nipponbare
  unsure (1)..(533): unsure at all n locations
aaaaaaaaaattaaaaaattttaataaaaaaaaatttttttttttttaaaagggggaaaaaaaaaaaaaaaaaaaaaaaaaaaaaaaaaatttttttaaaaaaaagaagtttttttttttgaaaaatttaaaaaaaaaaaaaaaaaggggtagaatgggaaaaaaaaaaaaaaaaggaaaagggggttttttttttttattttggaaaaaaaaaaaaaagagaaaagggggataaaaaaggaaagggaaaaattataaaagaaaaaatttgtgggggggggggaaaataagttgtgaggaaaaaaaatttttaaaaaaaaaaaaaaaaatgggtggggagaaaaaaaaaaaaataatatttanttaaaaaaaaattttaaaaaaaaaaaaagttttttttataaaaaaaaaaaaaaggggaagaaaatgattaaaaaaaaaaaaaaattatggntaaatggtgtttttttaaaaaaaaaattntttaaaaaaaataaaaatggaaaaaaaagagggggaggggtggaaatttt

SEQ ID NO: 422768 - DNA, 398 bp, Oryza sativa nipponbare
  unsure (1)..(398): unsure at all n locations
aaaaaaaaaaaaaaaaaaaaaaaaaaaaaaaaaaaaattaaaattttagaataattttttaaaaaaaaaaattgatttttttaaaaaaaaaaaaaagaaaataaaaaaaaaaaaaaaaaaaggtgataaaaaaaagaattgaggggtttaaaaaaaaaaggaaaatagtggaataaaatacaaaaaaaaaaaaaaaatancgaaaatgaaaaaagaatccacaaacggaacaaagagaaccttgccgtcgtcaacgtacgaatgcaaaaatgccagaaaaagggagcaggtgcacggacataaaaaattattttgttgaaaaaaaaaaaaaggaaaaatacaaaaaaaaaatgtttttggaaaaaaaaaaaattcggaagaatttgggaaaaaaatac

SEQ ID NO: 422769 - DNA, 368 bp, Oryza sativa nipponbare
ataacaagggaaagagcgcggggcatacatgccgctgatgcaatcaaccatactcacatgttgaagacgggcctactaaaaaactactaccgcagtctggtatcaaatattaaaacgatcacgtttataatatagagacagaagccttatattccaacttaaaactgcccttgatatatatacctgactcacaaccctaaacatgcattcggaagatgttcaatactttatacattcaccaacttaactagatcatggctttgaaggctaggcatgaccgatctgaaaaggacccgccgcgcacacacagagggagtgggatgtaccaaagggtgtctgaagaatgacgttcttcctggtgaggaatg

SEQ ID NO: 422770 - DNA, 101 bp, Oryza sativa nipponbare
gtgtgggggtttttttttttttttttttttttttttttttttttttttaaaaaccacacccaaaaagggttttcctttttttcccccggacccgggggttt

SEQ ID NO: 422771 - DNA, 346 bp, Oryza sativa nipponbare
gaaaaaactttttcaccaaaaaactttggttaaaaggtaaaaaaaaacgggttttaattgggcccattccaaatggggggggtttaacaattgggtggggtttttttttttttttttgggggggtttttcgggggcaaatggacgttaggttttgaccccttcactttggggaaaaaacagttttggggtaccccaaaactttgggaaaaggtaaacgggttaaaatttggttaagtttataaaaacaacaatttttttaacccaagacaaattttttttgaaaatttttttaattttgggtttaaaaaaactaatttgttaatataaaatccgcccccggggggg

SEQ ID NO: 422772 - DNA, 424 bp, Oryza sativa nipponbare
ggggttggggtttttttttatttttttttttttttttttttttttttttttttttttttttattttaccaacccaaggccaaaccccaaaaaaaaaaaaccgacccccccagaaaaacaaattcccaaaaaaaaaggcaaaaaaaaaactacacaaaaaaaggaaaaaaaagccccccggaaaaaaaggtaaaccccaaaaaaataaaaaaaaaaaaccccccaaaaacaaaaaaaaaaaaaacagggggcccaaaaaaagaaaaaaacccccattaaacgggggggaaaaaaccaaaaaaattaaaggggaaaaaccggggggccatctaaaaaaaaaaaacacccaaacccccaaaaaaaaaaaaagggcaaaacggcaaaaaaaggggttttttttttaaaaacacgaaaaacgggaaaaa

SEQ ID NO: 422773 - DNA, 276 bp, Oryza sativa nipponbare
  unsure (1)..(276): unsure at all n locations
aaaaaataaaattttaattatttttaaataaaatatttttaaaaaaaaatattatttntggataaaaaaaggagaaaaaaaaaataaaaaaaaaaaaaattttaattttttaaaaaaaataaaaaaaaaaaaaaaaagttgggaaaaaaaggggggggggggggaaaaaaatagggagggagaaaattttgggggaggggtttagggggggggttgttattaggaagaaaaaattttaaatgggggatatttaaaaaaattattatttttttaaat

SEQ ID NO: 422774 - DNA, 524 bp, Oryza sativa nipponbare
tttttttttttttggtttgagttttttttttttttttttttttttttttttttttttttttttttttttttttttttttttttttttttttttttttttttttttttttttttttttttttttttttttttttttttttggaaaaaaaaaattaaaaaacaaaaaaaaaaaaaaccaaattgataaaatttttaggaaggttaaaaaaaaaaaaggggggggaaaaaaattttttttttttaaaacctaaaaagggggaaaaaaacttttttttttaaaaaaaaaaaaaaaattaaaaggcgtaaaaaaaaaaagggggtttctccccctttttaaaaagggaaaaaaaagccctctataaattttttaaaaaaaaaaaaggggggggcccccccttttttttggggtgggaaaaaaaaaaaaagggggggattattcccccacacacccccctttttagaaagggaaaaatattttttttttaacaaaaaattttttaaaaaaaagggggggttttttctccc

SEQ ID NO: 422775 - DNA, 554 bp, Oryza sativa nipponbare
caaaacaaacatacaaatatacgtgctcatggcaagttttttacaagtaaccaatttgataaacaaattagtaaccgcatacaaaactaaaccatctgtttcagctatgttctgcttgcaagcttttgtacagattgcttcaaactcatcaaccatgttctgcttgcaagcttttgtacagattgcttcaaacttatcaaccttagtatatctacacttgatctcacaagtttttccattatcacattttcctgaaacatagtaaaagtaaacaggataacctgtacctttgaaacagtacaggatctgagttgcagagatcaggtcgcaagagcatcaacacttaatagtagtattatctttaccaaaggagcaagtgcagagtgtatcggtttcatataaaaacttgatcatggtaaaattcaagggtggttaccaaaaaaaatgagtacatctgttgatatcaaaagatgaacaaggaacttgatagtatttgcctgacatcaataactcgaaaatgtagcaaatatgtgcagaaatttgacatcattgag

SEQ ID NO: 422776 - DNA, 564 bp, Oryza sativa nipponbare
ggggccagataaaagaattcatttgcagcagaaatgaccaaagaaagtaactccagattttcaaaactggaagtatagtattgaatcagcatgatacaattcagggcttgaacaatactatctatcgaacatttcagcggccgagtattccactctgcaagtaatacaatgtctgaaaattttcagagaagtttaggactatctataaaacatttcagcgattgagcatcccactttgcaagtcatacaatgtctgcaactcctcttctcggaagcacatccatctgaagagtcctgccatttcttgaggcaactacgccaacagaaggcagcgagggatccgtaactggctcaatctcaataaatctcaaatccatcgagcctgtaccctttaaggctaagaacaaacacaggcacaatccaaccaaacatggtgatagcccaatagttattcattccatgaaccaaaccccaggcaattgagtagccaacaatgatccctgataagtggccaatgaaactcgcctgaggaaccatgatagatgtgaatatcagcgattcaaa

SEQ ID NO: 422777 - DNA, 387 bp, Oryza sativa nipponbare
gcaaaaaattgtcaatatataccattaagaatgatggctcaactttacatcaccagacatatactacacagcacgccggatccgcaatataaattggacctatcgctataaaactatcactataatacaattacaccgatatacaataagagctatcacaaaaatggttggacaaatcggagccacttgatctacttttggctactattgcttagataacccagcttctgcgctaatgcatcgacatatctaggtcttcttcgctccatccctggaatcccagcatcatctcttgctccttcattcagaagctcctcccagaagtcgtcggttaactcggtttcgttgctagcctgatttcgtggctgatttcgagtcctgttgaca

SEQ ID NO: 422778 - DNA, 305 bp, Oryza sativa nipponbare
ggccgattcccgtcgccacgcgtcgcacgcgtcgactgtttagatcgcgcggcgttagagatcagctacgtcgcggctggacgcatagtgtgtatagtgcactaattcatcactgccgcgttacacgtcgtgctggaaacctgcgtaccaactatcgcttgagacatcccttcgcagtgcgatagaaagccgacgtcgctccacatgcagctgatggatggcccctgacggcataggcgcggggaggacccagggacgtcatgcaggctacgcgtcttgttttctctttgcgtgcgttccgagtt

SEQ ID NO: 422779 - DNA, 87 bp, Oryza sativa nipponbare
ccacgcgtgcgcccacgcgtccgagcttcagcacttcagttcggctccgtccccgagttcggcagccgaggcgagtggggcaatggt

SEQ ID NO: 422780 - DNA, 76 bp, Oryza sativa nipponbare
gctttcccctggagcccaggcgagcctactccagggagcagcgcgtggacggcggcacgggttactgcgttcggag

SEQ ID NO: 422781 - DNA, 156 bp, Oryza sativa nipponbare
cttgtatgctgtatttgagctgagctgagagggaagagagatctctacctacctaattagacaagcatcgcctagtgatcacagatggctgcttgtgtgtgtgtgtctgcgtgtgcccagcaggagtgaagcatccaatttcagctatgacaagag

SEQ ID NO: 422782 - DNA, 93 bp, Oryza sativa nipponbare
cgacgcgggcgcgcccacatcacacgcagaaatccgcatcaacagccagccatggcgtccacgctgaccaacgtcggcctgtctaccccgggg

SEQ ID NO: 422783 - DNA, 363 bp, Oryza sativa nipponbare
ggtcgacccacgcgtgcggagacatgaccggaccttcaagttagtcgatcctacacctgagcattgtccaaccagaaagttattcgggaaattccagtggctgagggggtcccggtagatggtactttaaaagcatactgtgatgaatcaaggaccaggctaaagattattgttccaaaataccgggtttggtctgaaaacatgaagtcatgtgccatgatgcccccttgtatggtgcagtctaacatgttaagctcgaaggagacgtcagagcatagcatacaaaaaattgtctatttttgctattggaagggaagggaacaatcgtattgattgagcattcttgttttggcatttgaacat

SEQ ID NO: 422784 - DNA, 55 bp, Oryza sativa nipponbare
ttcccggtcgacccacgcgtccgcccaaatccgcgagtcccgggcttggtgcacc

SEQ ID NO: 422785 - DNA, 403 bp, Oryza sativa nipponbare
  unsure (1)..(403): unsure at all n locations
ccacgcgtgcggccttgntcaaaggtttcaacacctgcaaaagaagagatcaaatccttaactccattgccaactgaacctgattcgaaaattgctacagacgcacctgggggaccatgagaaaatcaccaaaatgggcaagaaatgacactgcagccttcactgtgatggaagatgtattaatggaagatttcgctcaaagaccaatgagatcataattctttgtgtatctgatgggccaatttctctgcgaatggctggggtttctccttagaggatgtggcaagggaccaatgaattgtcaacataacatggtagctgctctaagatggcattgcagtcagtgacacctcactgcagaacattacggtgatctgtgataagtacatctatgctggtaatc

SEQ ID NO: 422786 - DNA, 83 bp, Oryza sativa nipponbare
ccacgcgtccgcttagcgaatccagcagcagaagcagcagcagcagctcagccgccgccgatggcgtgcacgatcatggaccc

SEQ ID NO: 422787 - DNA, 88 bp, Oryza sativa nipponbare
ccacgcgtgcgaaaccttgtaaaaagcaaaacccactcgccactaatcgacgccattggcgagagctcgagcgcgcaacaccaccacg

SEQ ID NO: 422788 - DNA, 56 bp, Oryza sativa nipponbare
ccacgcgtgcgcacacgcgagcttcacctgcatcggcgaatctctcggcgcgctct

SEQ ID NO: 422789 - DNA, 132 bp, Oryza sativa nipponbare
  unsure (1)..(132): unsure at all n locations
ccacgcgtccggaggaagcagaggtatatccttttctgctgttgtatctaanaaaaaaaaaaacactaaacttcactaacctcagaacccaaatactaaaaaagaggagcgcccaataatttatgaggaaag

SEQ ID NO: 422790 - DNA, 85 bp, Oryza sativa nipponbare
  unsure (1)..(85): unsure at all n locations
ccacgcgtgcgcccacgcgtncggtctcgctctcgcgccaagaaagcaccgcgagttcttcttcttcatcctgcatggccacaac

SEQ ID NO: 422791 - DNA, 149 bp, Oryza sativa nipponbare
acgtaaagatacacaagcttcctgtgaagtagatggtgaaggatgagttactctgtgtgaagaaaggctcaagactgcagaaatccttttcagcccagattgaggagtgcggctatgagctgataagcagatcttgtgatgatcactgt

SEQ ID NO: 422792 - DNA, 144 bp, Oryza sativa nipponbare
ccacctcgtagttcaatcgcacgcgtcgtgatctaactagccacctcgccacctcgatgatttatcaatagtgtaaacaatattaaattttcatataattgctggtgaaaatgtgtttataactaatcaattgagcagttactt

SEQ ID NO: 422793 - DNA, 290 bp, Oryza sativa nipponbare
ggaaagcctttcgcgggggcaacttgggttaacaccacccgtagggaatgccgttatctcttatgagtccagaaccaagcttgtccttggcgaaccttaattccaaaccgccagctaatttgggtccttggttatggttaacctgtgttaacttttggcgttggcattgtggttttgggcaccggcaaccaagggttttaaccgagaaaccaccttcacacaataacctgatatcccaatggccttactggaaaaactggcctttttgaagaagccgttttcctggccct

SEQ ID NO: 422794 - DNA, 220 bp, Oryza sativa nipponbare
ccacgcgtgcgccagcttatgctgattgtggtcatgccgacctgctgctctccgtccctggatttcgcggcggtgagaacccaaaagcttcagctcggcaagaagaaaagacgattggatgaagtgtgccttgagagatttcaacagtatagcaggacgtacatccaatcatggattcttcagggtaaggtcctttgggatggaagggttgggatttaat

SEQ ID NO: 422795 - DNA, 89 bp, Oryza sativa nipponbare
ttacactactgataatggcgggcacatggcgctctctccgtgtggccggcgcgccgcgcctcctcgcgctttcgcgagcgcgatcacca

SEQ ID NO: 422796 - DNA, 63 bp, Oryza sativa nipponbare
ccacgcgtggcgccaaatcgaacatcgatgagagagatgagagatgaggtctaaaatccctaa

SEQ ID NO: 422797 - DNA, 99 bp, Oryza sativa nipponbare
ccacgcgtccgggtacttggagttcgtgcaggtggcggcagcgcatgcgacgatctgcctcgcggggctctacccgcttgccaaggaccacgccggccc

SEQ ID NO: 422798 - DNA, 80 bp, Oryza sativa nipponbare
  unsure (1)..(80): unsure at all n locations
ccacgcgtgcgcccacgcgttcgnccacgcgtccgtccacgcgtnccgggcgcgccccgaagcttctcttcctctctctc

SEQ ID NO: 422799 - DNA, 170 bp, Oryza sativa nipponbare
  unsure (1)..(170): unsure at all n locations
taccggtcggaatcccggtcgaccacgcgtgcgcggacgcgtgggcttcttcctcattccaatctccccccaatntcggttggattcgtggaggcggattggggatttggatttggatgggagagtaggggggagataggcccanttcctttaccaggcggggagctact

SEQ ID NO: 422800 - DNA, 88 bp, Oryza sativa nipponbare
cggcgtctcgcttgtcttcaccgacggcaactggatcacttttagaagttgagctagacaggtcttacaaacattgaacaaaacctga

SEQ ID NO: 422801 - DNA, 84 bp, Oryza sativa nipponbare
  unsure (1)..(84): unsure at all n locations
ccacgcgtccgcgtcgcaacagctacaaacgcccacatcacacgcagaaatncgcatcaacagccagccatggcgtccacgctg

SEQ ID NO: 422802 - DNA, 150 bp, Oryza sativa nipponbare
ctcttctctctattgtcaaccaggaagtgaggtcgcgactcggactgagcctgtctccgcgtctcgcgcggaggccgtcgtcgtagcatcttcttcgtggcatctcctctcttcgctcgcgcatcgcttcttacactgggtcaactctct

SEQ ID NO: 422803 - DNA, 145 bp, Oryza sativa nipponbare
gtgtgggagcattgatcttagctcaggcttttctcaggaggaccctcatggcagggagaagcactcccctgccagcaggtgctgcaggcagctggggtcgcatccaacagtcctgagctacctgatggacgctttcggagactcg

SEQ ID NO: 422804 - DNA, 309 bp, Oryza sativa nipponbare
ccacgcgtccgcccacgcgtccactaacgcgtccgagaaaggaagagactagaggagagagatggctcactgcatgatgctcccatggcgagccaactgatgaagagcaccttggtgtgctccaagccgtgggggctagctggctgactgcaatgacaaggaggccccgcttcacacacaaggtacatacacgtatgagaagccacacgtaccaagtggagcatgccatcaatggctaccttttcatacgtagtcaggagacgcctgtgacctgaagaccgctggtagcctgggacgcttgcaacctga

SEQ ID NO: 422805 - DNA, 363 bp, Oryza sativa nipponbare
  unsure (1)..(363): unsure at all n locations
ccacgcgtccgcccacgcgtacggagaaataatgctagctagctagcaagaacatatatatataatgatgatcaagcactgtgagcaaaacacgaatcgcgagcggaagctcttgaacccgctatgctgcacgaccatcttctgaattctattcatgctactcctcattgcnctcatagactggatcatcctccgccccaccaagcctatcttataccttaacgacctcaccgtcgtctgcctgaacgtcaccaccggtggttcctacgccggcgccaccgacttctgcggttacttatccttcctcaccgtcaccatgcaaaccagccttgtcgcccgtaacggcaacgaggcgcgtgggca

SEQ ID NO: 422806 - DNA, 210 bp, Oryza sativa nipponbare
tttggtttgttttttttttttcttctttttttttttttcattttttttcttttttcctttttcctttttttttttcttttttttctttttttttttttttttttcatttttttcatttttttctctttttttttttcctttcgtttttttttttttcttttttacttttttttttgtttttttttttttttttttttttaattttttttt

SEQ ID NO: 422807 - DNA, 358 bp, Oryza sativa nipponbare
ccacgcgtccgtggttcttgacactcagctgtatggagaaggtgaaggtaggctccagccacggcttcccagactctccgccgccacattcgcgccacaactcatgacctgcaagacctactatctctgctaggtccatggggacactaccatcactgaggatgagcaaggaccaggacccacaggcatctcggcagcagacatacatcgggctgcatccacatagcgatgatgatgcaagacaacgcactacactcatgctgaacggagggcgggctgagctgctgccgactgcgatcaggaatgcatcggtggtgctgatgctggaggcgcgcgactgactgactgcagaccgact

SEQ ID NO: 422808 - DNA, 380 bp, Oryza sativa nipponbare
ccacgcgtccgggcaagcgagcgagcgaatcgacagcgatgtagtgacggtagcacggcaaggcagcgcgcgcgtgcgacagctagcgccgtaacgtctccacctcggttggatggggggcgcaccaaagggcggcgccaagccgagtgctactgcatcagctgtcccgcgaggcggcgcactagcgacggcaagcgtatatgcagccggacctcgtcagcgggggtgcatgagcccgaaggcaaccgtcaagccgacgcttccagtgccaggtgagggaccgtggagagacaagctacaaggcggtgcgcgcacaggggtcaaccggctcggacccgaggagaccggaaagctcctacaagcagaaggacactaaatcc

SEQ ID NO: 422809 - DNA, 76 bp, Oryza sativa nipponbare
  unsure (1)..(76): unsure at all n locations
tccgtccgnattcccggtcgacccacgcgtccgttcacgcgtgcgtggacgcgtgggcgaacgcgtggttcgacaa

SEQ ID NO: 422810 - DNA, 57 bp, Oryza sativa nipponbare
gctgctgatgacaggtatcaccattgggcagagaggttccgatgccctgaggtcctc

SEQ ID NO: 422811 - DNA, 161 bp, Oryza sativa nipponbare
  unsure (1)..(161): unsure at all n locations
ccacgcgtccgggcgcgccgaagcttctctcctctctctcaactccggcgagaggaggaggcggcggtggggcgttcgtcgggagagagaccagggccggggggctagggttcggccnnncananangcatttgtttgttaacgaggaggaggaggatgag

SEQ ID NO: 422812 - DNA, 114 bp, Oryza sativa nipponbare
ccacgcgtccgggcctgatgccgtcatctcaccatcgactgagctgtcgcaatcttctatgcttaggctccgtcactgatttgctcaaatgctagaggcaaatactactgtgcc

SEQ ID NO: 422813 - DNA, 405 bp, Oryza sativa nipponbare
aagagagcaattttaattttttaagaaataggaattacatttactttttttttttttaccaagggccaacaaacgaaattcacaaaccaaaacgctttttacatgaatgaaacttcaacacattcccaaccaaccatttaattaatttgaacaaattaaccatcacattttttgtttttttgcctgtccggcccctttcgcttttcttcacatttccagggcatattaaggtgtgtgtgtatgtggggtgggtctgcttggcatatttgcaaacgaacgagtgggtcacaaaccgatcgtgtttttgatcgatcagggggggcgggttttgaggatgggagggtcggcaaacgggccgtaaaaccagcccttggcgatttggccctaagaccccttcgtgagggg

SEQ ID NO: 422814 - DNA, 139 bp, Oryza sativa nipponbare
ttgaatgagaagagatgggcaaatagtatgaatcctagaaggagatacaagaatgtaccagagggtacattctacggacgctatatgcgaaaaagcacaacaagaagtggtggacgtgaaccaagtgggtagccacacg

SEQ ID NO: 422815 - DNA, 381 bp, Oryza sativa nipponbare
tattttatattatttattggttttggtgtttattaatttattatattttctttatatacatattttttttttatatattttttactttttttttacatattattactcaatttttttgtttttcccccccaacaaagccaaccccacccattttttttgaccaaaacatatgttgtaaaactaaaaacccccacaaacaacatagcctcactgtggaccaaaaaaatatccctaaaacaaatgggaaaaacaacccccttgccccacccaaaaaagggtccccccaccacacccttttttcccacacccccacaccagatcttagctcacctccctccaaaccccaaaaaacaagtgggattaaattctttggaaataccc

SEQ ID NO: 422816 - DNA, 322 bp, Oryza sativa nipponbare
gcaaaacggagggaaatgggtactctgccaaatggactatataatgcacctcttagaccacttcatcttaatcacacttgcagatagtactactactatacaccttccggaatgtatcagaaatatcctatgtgaatgtaattatttcgccactgtttatttagaacagacagaggtgcgcaacgcctggttcagtcacaaaaccaaaacagagtacactttggaacgctgccatgtacatgtgcacttttacgttcagctttgacgctaaatattgagtgcggatttagaccccctaagcttgccggaaatctcccgtctc

SEQ ID NO: 422817 - DNA, 358 bp, Oryza sativa nipponbare
tttttttttagggaattggttttttttttaaatttattttttattttttttttttattatttttttttttttttttttttggaaacaataagaaattatacaaaggttttttttatagcttccccaaaataaagaaaaacacttaaacttgcccggtttttattttgttttaaggtaaaaaaaaaacaatcaaattggccatactaaaatgcaattttacattttttctaaaaggtgccccaaaaaaacctcgggttttaatttattttttaaaaactttttttccacctatcaaacaccgttacaaaaaaaatttaattttgacattttaacaaggtcaaaaactcgggcccctttt

SEQ ID NO: 422818 - DNA, 375 bp, Oryza sativa nipponbare
ggctcctcatgccccaattaatgtttttcacttttagcttaccgatttgttcccttagaattgacatgaaaaaaaatagccttgtttttttacattacacacgggttgatctgatgacattgttcctaacagttttagcaacacagtttttaattcagtattcattgtagtcgtcgtcgttcctgttgagaaaccgtttgacagcgccaacgattgtttcgggcccgatgaacagccccagcgtttcaaagccgccgccgacaccgacgggcacttttgggccgggagcgaaaaacgagaacggggaccaaccgtagccgtagccattgccgtaaccgccgaccaaaggcggggccaccggtgggttgatgtaaa

SEQ ID NO: 422819 - DNA, 309 bp, Oryza sativa nipponbare
ggcggggaagttttttaaaccttttccagcttttttttaaaacattggttttttacatttccagtggttaaaaaggtgccaaaaaggggttaaattttccaagtttaaaatggtgccttaaaaaaattccacaaaatgaaacttatcctttttcggccacagtgaccgtttttttaagtgcaatgacttcaggaagttttttttttttcaacagtttcaagcttgcaccaccttccgttgaaatgtgggttataaaattttgaacttccacctttttaaaaaggggaacaaaattcggacccttgggtt

SEQ ID NO: 422820 - DNA, 333 bp, Oryza sativa nipponbare
aggcaactgaactttccagctaaagaaggcgaaaacaacgcgggcggaactcgggtttttttggttttttaaaactttagcaggctccctttttaaaacatcggggaactggtcggggcggtttttagcaatgactttttggaaaccagctttttaaagcttttgtccgtaagccctgacttcgggaaggtcataccccctttgtttaatggaagctgcgaacttttttgaaggtttcccggggcccttgcagtaatcactaattgggcccttccccccgggtttgggccccttgaaaaaacttttaaatagggggggttttttttgtttggg

SEQ ID NO: 422821 - DNA, 527 bp, Oryza sativa nipponbare
aagcctgtaaaatatctctatttattctgcaattttatcttgtgaacgtaagtaacacaggattgagcagtagctagtgacgattattaagccatgcacggcggcggcgcccgtgcgctcgcggcggcgttcgtgctggccctcctcgcggcggcgccggcggcgtccgaggtggtctgcagcggccggcgctacgcggcgaacagcagcttcgatgccagcctccagcaggtcgcccgcaccctccccggcaacgcctcctcctccccgctcctcttcgcgacgctcgccgtcgccggcgaggcgtacgcgctcgcgctctgccagggcggcacgagcgcgggctcctgcaactactgcgtcgcgcagaccatgcgcgacggggagcacgcctgcgccggcgacgccgacgtcgccatgtacgacgacatctgcaccgtccgcttctccgaccgggacttcctcgcggccaccaccaactcgccggagaagctcgtcgtggccggcttgcagtcgcagaagctggt

SEQ ID NO: 422822 - DNA, 386 bp, Oryza sativa nipponbare
aaacaaagcttttttcataaacacgcgttccgggccgtgcttgcatacagatacatacaggcccttcattttttttacaaccattcacacttttacactgaaaggcccaaataaaactgacaacagacgcatgcattgatcattttatttgcatgatcgtccataggcggagattggaaattgaacaacgaaatcaagaacaatttattaagccgctggtcgatcttttgtataaaatgaacattggggtttttctcacgccgtcacgctggtgcttctgaacgagctgagcgccttggggggctttccgcgcaaaaccagtttggggtaccccgccgccaaaaacgccccgatcaccggcccaacccagaagatccaggggtttt

SEQ ID NO: 422823 - DNA, 421 bp, Oryza sativa nipponbare
aaaaggtcctttcacccttaacaattatttttcaataaaaataaaagggttttgacctaaaagttggaagcattaaccctaaaaccaaatttttttttttttcacccccccccccactttaaaccaaaacccctttaaacatggtttaatttttaaaaaattcattttttatttgaaaacacatgccgctccccttttttgcttaaaatattgccgctggggaacaaaaacccggatttgtttttccaactaaaacatattttaaaacttgttgcccaaataataaaaatttttttttaaaacaaccaattccataaggcccccttttttttttttgtccttacaaaacttacggaactgttttcaagttaactttattttttgagcaccaaaactgggcctttttctttttaaattaaaa

SEQ ID NO: 422824 - DNA, 265 bp, Oryza sativa nipponbare
gaaaaaaaaaaatttttgtattttttttttgagtgggaaaaaataaaaattttttttttttttatttgtgtggtaaattttagagggtttttaaatttttttttttttaaaaagtttgggtggggatattttttattgtttttttttatttttaaagggaaaaaaagttgtgttaaaaattttaaaagggggtttttttttttaagtttatttttttggaggtgttttttggggggttaaaattttttttttttagtgggttttt

SEQ ID NO: 422825 - DNA, 281 bp, Oryza sativa nipponbare
atatcactcagggtttctggctagataaaaaagtgcaccatccatctgatgagcttcttgttacacattccataacctcgcaagatattgtcagcctatcgaaggccatatacaaacaaagcccatactgcggcagtgccaactttcaaactgacgaacactgttctttgtgtttgcgtaccaccaattgccctccgggtgggtgcatcttatcacgcgtaccggttttttggtgcgaagcattgagggcagccatattcatcatgctgtgattcgaaagg

SEQ ID NO: 422826 - DNA, 386 bp, Oryza sativa nipponbare
  unsure (1)..(386): unsure at all n locations
ggggttggtttttttttatatattatttattattttttttatttttttttatttaaaaaatttaatttataaaaaattataaaaaaantttttttttttataaaaaaaataattaataataaataaattttttaaatttaaaaaaaaaaaaaaaaataataaaaaaaaaaaatttttggagaaaaaaaaaaaaaaaaaggggggataaaaaattgggttttataaattaaaaaaaaaaaattgaggcgtttataagggggtttaaaaaaaataaaaaaaaaaaattttaaaattggtaaaaaaaaaaggggggtaataaaaaaaaaaataaaagaatggggaaaataaaaagaagtatggagaaaaaaaaaaaaaaaatataaaaa

SEQ ID NO: 422827 - DNA, 414 bp, Oryza sativa nipponbare
  unsure (1)..(414): unsure at all n locations
atattttnattattttgaggtagtgtttttttataaaaaaatattttatttttttttttttttaaaaaattaaaatatttttaaaaaaattttttattaaattaaattaattaaaaaacgttttatttaataatctacatttttttgttaaaaatttttaatttatattttttaaaaaattattttttttaaaattttaaataaaattatttttttttaatatattaattaattatttttattattaattttattttttaataataaaactttttttatttattatattattaatattattatattatattttattattattttatattcattttattattaataatttttatatattaatttttcttatatttaaatattattatttataattatattactatttaattaata

SEQ ID NO: 422828 - DNA, 244 bp, Oryza sativa nipponbare
gaattatggggaccggggttgcacataaaaaatcaatcacttttgagtcacacctcacatgtagctacgtatgcgcaatcactcatcaacataagcttggtggttgtaccacactgaactaacgaggataccgttcggatgatgatgatggtggctcgatgacgctctgcgttggagtatatacgtacgtagaattcgaaaggattcttcagccttttttggcgaagagggcgccgaggttgaa

SEQ ID NO: 422829 - DNA, 477 bp, Oryza sativa nipponbare
  unsure (1)..(477): unsure at all n locations
ttagttcacaaaacaatagatttcaggatactccaagtataactgaatacctgatttagtatttgctgtctaaccatgctaatttagttatcaagaaaatacaatcgtaggtgtacaagattgtgatattcactagaaattgtgtacagtcccagttgttggcagtggttaacttccttgtttcctagaaagagcattacagcgccaaattttgagccatgcgccaaaaaacatcccctgtggatttctttgttcccaatatcattgcaacttgtgaatcaaacaggcagcagctgctatcttccatcgtatgatctctcatactaccatatcattctccaacatgatcggcccagttgaacaggtggagttttgtgggcatccagttgtcttcattgcccctagcggctatggacctncagaagtaagttcccatgtgtaacgtgcagcatagtaaagtaaatgcccagatattac

SEQ ID NO: 422830 - DNA, 331 bp, Oryza sativa nipponbare
cggtcgacccacgcgtccgcggacgcgtgggctgaagagagaaattctcagtttatttcaggtgaggtctgagcgtggatgggtagatggcacaggcaatggcgtccatgaccgggctgtcgcagggcgtgcagctgccggccgggcccaggcgcgccggcggaaggtccaggctcgccggagttagggccgacgcggcaggtgcgcgcgatcaaaccgatcgcgtcgcagaacttggtctggcgtgcagcgctagaggcgttcggcagccaccttaccaacaagtcctctgagggccattccggggctcggtactatggcgggaaccatg

SEQ ID NO: 422831 - DNA, 421 bp, Oryza sativa nipponbare
attccttgggccaaacattcttgttctggttggtacagacttggtgagttgcatggttaagttggctacttctactaccattttggaccgaagttgtgtatggggaagggtgtaagacattattcatgaaaaatgttacaaaaaaaaaacatagaaaaacatggagatgctcgtcttagttcttgataaaaaaaaaatacaaacatgtggttctccaggaaccaaaaatgacttgtgccacatgaacgatagcttgagaatgtaccttcaacagataaaaaacgggggggggccgttttaaaggatcaaagtttacttccgcgggaatgcgagtttaaagcttttttttagggccccctaaattaaattcatggcccgggtttttacaacgtgcggactggaaaaacccgggctttaccaa

SEQ ID NO: 422832 - DNA, 453 bp, Oryza sativa nipponbare
  unsure (1)..(453): unsure at all n locations
ccacgcgtccgcggacgcgtgggcgaggggaatgggagtggttggatctactcagaacatcttagatttcattaaaaaccatttgatggaagctttggataggaacatcgatgatcatcttcagtttgtgttaggaacagaatccggaatgatcacttctattgttgctgctgtccgtgaattatttgattcctataaaacttctcaacaaagtgccaatattgaagttgaaatcgtgttcccagtttcttcagatgctgtttctaatacatctgtcaatggttcccaccatcttgattcttcaacagttactgatttagacaatgttagtgttgttcctggtgtgagttctgggcgaaggtgctctatacatggnggctgcgcttcatgcccatacatgaagatgaattctttaagatcactgcttaaagtatgccatcagcttcctgacag

SEQ ID NO: 422833 - DNA, 449 bp, Oryza sativa nipponbare
ccacgcgtccggtgatcttgaatttagtgacaggcctgtttcattctagcatcacacttagatttgttgtgtttgatattttgcatgctttatgtggttatgttgaactagcatccaagctcttatagttgtatatgtcattagaatatcatgttaagaggaaaacttttctggtacagaatatctcttcaagaaggatgttcacttagtaaaatacactgctttgaaatttttgtggtagaaaatagggcaaataccctttgcaactaaaccataagcttcgtactggtattgttatggaaaagattgaggcaatgttttagcagtgaatttgaaatgttgctgaggctgagcaacgttttgcacaatagcaatttgactctggtacccaatcattaaacgggaaggtgtgcaggcacataagatttatgtagtgtcagcactctttt

SEQ ID NO: 422834 - DNA, 467 bp, Oryza sativa nipponbare
ccacgcgtccggggaactgaagttgttgaacctattgatacagaagaagcaccagaaattccgatcctccagagtgaccaggattttgtggaggtgataaaagaaccttccatgcagctgacaacttttaaactgccaatttggcttttagggccttcaattctgttggttacgagtatagttccaactttatggctaccattgtcttcagtgtttcttggtcccaacattgccggccttctatccctagtgggacttgacttcatttttaacatgggagcaatgctgtttttccttatggctgatgcttgtgggcgtccggaggccaattcatccgaactgataaagcagatcccaacttcttacaggttctggaatctggctgccagcatagtaggctttcttgttcctttggccctgtttttcgcatctcataagggtactctgcagccacatataccattcat

SEQ ID NO: 422835 - DNA, 324 bp, Oryza sativa nipponbare
cccccccccaaaaaaaaaaaaaaaacaaaaacaacaaaaaaataaaaaaaaaaaacaactaacaaaaaaaaaaaaaaaaaaaaaaaaaacaaaaaaaaaaaaaaacaaaaaaaaaacaaaaaaaaaaaaaaaaaaaaaaaaaaaaaaaaaaactacaaaaaaaaaaataaaaaaataaaaaaaaacacaaaaaaaaaaaaaaaaaaaaaaaaaaacaaaaaaaaaacacaacaaaaaaaaaaaaaaaaccaaaaaaaaacaataaaaaaaaaaaaaaaaaaacaaaaaaaaaaaacaacaaaaaaaaaccacaaaaaacaaaaa

SEQ ID NO: 422836 - DNA, 332 bp, Oryza sativa nipponbare
tcccggtccacccaacccttccgaacttcccttggcattaccttccacacatttccgatataaatattttacagcaacaaacaaagggcccaagggaactacacttactttaaaggtgttatgatagggaatgccctgatggacaacaagacagaccacacgggcatgatctactacccctgggaccccaccctcatttctgacccggtgtacgcccacgtcaagaagtactgcaactctttcatggagaacatgaccgacgcctgcgacaacaccctcaccaagtacttctccgtgtaccgcctcattatcatgttcaacctttacacccc

SEQ ID NO: 422837 - DNA, 145 bp, Oryza sativa nipponbare
ccacgcgtccgctcatgtgttccttgtgtactttacgtagcactaggatatagttagattaataatctatacgaggggtggggcggtgcggattgagcagtcagctacgttcgccgatgtccgtatcacatagctacaagaccag

SEQ ID NO: 422838 - DNA, 364 bp, Oryza sativa nipponbare
  unsure (1)..(364): unsure at all n locations
gtcgacccacgcgtccgggtaagactgctatttttatgctagattatagaatttcaggcttatttgtccttaacatagaaattttcctctctttttgttcctatctattagttttggaagagagaagctgttaacattccaacaatattgttttaagcagaatatgcatttcagatttgcttatacaaggcaagcttcgtgtgcaatgcgcaagagccctgtgagatatataattagagggattacgtggaggattacagacaagacangagcacaggggatcgcagtatcccaaagagtacacatagatttgctaaaaggattaatagcaagaagaacatgtttgatgattattggatgcaaa

SEQ ID NO: 422839 - DNA, 490 bp, Oryza sativa nipponbare
gtcgacccacgcgtccgcggacgcgtggcggacgcgtgggcggacgcgtggggttccttgtgcggccctgtaaatcttgttggagaacagtgttattgatgcactgagggtactgagttacagccagatgttggttctgaagtttcttcctatcaatcatacagagtatggaacaggcagtttctttctggtttttggtggatgaacatgcagtttcttaggtagtgtatctgtcagagtaacccttctacacaggccagtaggttaccattggtaatttctggcaaggctaataatctataagtgaccttcatatataagttcccaatagtttctagtaaggcgagcatggacatatttaagtgaccttcgtcaataagcagtttacatcactggcatagctggcataatgtgggcatagctggcatattgtggctcaagcagtacaaggttaggaactaggatccctttcctgtgtgcgaccttgtag

SEQ ID NO: 422840 - DNA, 178 bp, Oryza sativa nipponbare
aaaaaaaaaataaaagggggctccccaggttttttaatgtttttttttgggaaaattttttaaaaaaaaaggtttaaacccttcccaatttttaatttggggcaaaaaggggtgtggggggggcaaatttaaccttgcaaataaaaaagttttgcccaaaaaaaaaaaaattttttgg

SEQ ID NO: 422841 - DNA, 331 bp, Oryza sativa nipponbare
  unsure (1)..(331): unsure at all n locations
ggactgaaaatagactagaggcaggttatttttaaagtataaaggatattgacttttatttattttttgttatacacattttttggcaaaaccaaaaaaagattcatcaccgtgacaaatttgcccctggctatattttacaataacacgcctggttaaccacaaatttttaattctatgtcccagactgcccgacccacaattgtgagaccagaattgattcactgacttcaacacaacgggagtgaacgcctagaaaaaacaaacatcaacctttaacccggtctccccaaaaaaaacaactgaaanaccgacccccggcccctggaca

SEQ ID NO: 422842 - DNA, 399 bp, Oryza sativa nipponbare
attatattattttttttttttttttttttttttttttttttttttttttattatttattatttattttttttttttttttaaaaaaaaaaaaaattgaaaaaaaaaaatattttttgtttttaaaaaataaaaaaaaaaaaataaaattgaattattaaaagtaggtttttttttaatttaaaataaaaaaatgagtgtaataatttaaaaaaaaaggtgtgggaaaaaaaagaaaaaatatagtgggggttattgtttttttaaaaaatagttattttaaagagggaagattaaatttttaatatttattaatttttaaaaaataaataataaagaaaaaaaggggtaaaatatttttatttttgagtaaaaaaaaagtaaaaaaataatattttttt

SEQ ID NO: 422843 - DNA, 525 bp, Oryza sativa nipponbare
aataagatgtttttttttttatttttaatttttataatttttttaataaatttttatatttattattttttttttattaattttatgtttttataaaaaaagggaattatatttttataataaaaaataaatttgtttattaaaaataaacaaaaagaaaaaaagcctttcaaactaaagtttattataaatatatacctttttatttaaagaaaaatatttttagagttttttatcccggcgctttttttattttttaaatcaagaaaaatatttcttcaaaaaatttaactttgtattttcgaatccattttaaaaaaatgtatattattttcaagagaaaaaaaattaaaaaattttttttttttaaaaaaagggggttatatatattggagggacatagatttaaaaatgaggttgtttataaagggggtaaaaatttttctcaaatataaaaaatttttttttttttaattattcgaaaaaaatttggggggactaaaaaaattttaaaaaattataaaa

SEQ ID NO: 422844 - DNA, 370 bp, Oryza sativa nipponbare
tttttagttaattctctaggcagggtttttattaataagatctactctttaatacactgttttttttcttcttttatttttctattcatatttttttttttcaaaaaaacccaccctaaattactttttttaaataattaatttgccagccaaattttttacatttttccaggggcccaaaaaagaaaaaataaccctgaaaaattgtttcaccctttccacaaattaaaaatttttttttttttctccccgccttcccgaaaaacataaatctttacacccacccttgaatcaacccctatcttccttgagaggggttccgggaattttttctcaaaaaaaaacggcctcagagtcaatcccatatttg

SEQ ID NO: 422845 - DNA, 190 bp, Oryza sativa nipponbare
ataatatatttttattttttatttttatataaaattattacataaatttattgtttaatattaatatgtaaattttttttgtgatgtaggtatatgtattggtatgggttaaaaaaaaaagattgttttgtagagtaaagaaattgttttaatatatttagattaaatgaaagaaatgtaaaatatatgg

SEQ ID NO: 422846 - DNA, 520 bp, Oryza sativa nipponbare
gggactaattgtatcaatcccaaagagacagatacaacaattaaatgagaaccactattttgattacaagaaatacaaaggagacctacaccacaatctgcactgggtgtagtcgtgtaagctgatcaaatcaatctaaaatcaagggatctgaaaatcatataatatctaaagttacagatgtaagttcgactaccacagcaatccttgtggatccaactactaacacaaaatccatgttttagccctgaaataccaaaattaaacagtttattctcaacgtccaagacatggggtgcttatattacaagacttgcttaagcaagcatgcattccagtgaaaaacttagatactagataacaagccaacaaatcattggttccaaaagttatctttttaccaccaatatggcaatagatgtatggaatgccaccaaactctaacaggacatcggcatggcaaattttagcaaccatccaaataagaccaaattcaaggggtagtatcaaacaattgaaa

SEQ ID NO: 422847 - DNA, 516 bp, Oryza sativa nipponbare
tcaccgaggaaatgtaaagacatatatttctgtattataaaaaaaaactttgtatgtacaagagtgattacacacagtctgataattgttcgtctatacgatctactgaactagttgatgaagaaggcacctgtgagcaaccccagacggtgccaggagtagcatcagaatagcatttcgtgctgcagatggcagaggcatgagcaaaacatgtaaacctgaacatttttttcttgtccgaatttacttattatcatcacttgctccgtaccttgaagtgcttgcaaatttgagtccagcaaaccaagccacgcgcatcagttggatgcctagaaccagaacccaccatgacaccaaaccacgaagactttgcaccatccatccaggcgcagtgatctcatcggctaactgaagacccctcatcagctgtagaactcggtaaccctcataaaccacaggggccaccaaccaaactggcgatttccagtgccaagtaagcatcttagtcaaaacttg

SEQ ID NO: 422848 - DNA, 382 bp, Oryza sativa nipponbare
atccttttctttttggagggtttgaattttggatggatcatattatatttattacatttttttacattttttttttgtttaaaaacataaagcgcggggctgagatatttttaataaaaataggtgggacacaaaaaaatttagggtgaactagtcccccttttcccaaaagttgaagggagatcaggtgaaacaaaaacaaagcagggtctcggggggtcaattgcaaagggacgttgacctggggggaacacccgaacatgggggggaggccttgtcggctattattggacccattaaacaggggtttttttgactgtgacggtttatttgccaacaaacttctagtaaacagggggtttgtgggggaaaaaactttttg

SEQ ID NO: 422849 - DNA, 466 bp, Oryza sativa nipponbare
ggctggttacaaggaaatggattacacgtaatcaccgtattgtttaatgaacaagttaatggtacaacggcatttctataaagcaaatataatatgaagttgagagagatctaccaaacagaatataggcactatatgaaatacacattcaaataagtgagcgagtgtacggcacagttgacagggatagcttataaagctaatgactacaattataagggcagattctttaccagagctttaacaattagtggaaccaaactgaagctcgtgaaggagcacgtagtctgtcatgggtgtacactaaccagttctggtgggtctgaagcactacactaccacagtgccatgagttaaagaccggaagaggatgtatacaccacgtgtagttctgtctgattgggatacatacctgttttctttggtgaacaaacatgtattttgcccagtgcagcaagggacgtgc

SEQ ID NO: 422850 - DNA, 352 bp, Oryza sativa nipponbare
gataaatggcaaatgcctgtttgatttgggttcagtctcagaaatcacagcaatgtatgcatgatttcttgatcaaataattaaacaactaaataggctgcagtcctatatatgaatatgaatatatatataaatatatatatatatatatgtttaaacaatcttactatgattcatacagatctgataaatactacagcccatgtataattcctaccaccacagcctgcaatcaggtactattttctccaatgtaatttaggtgtttcactaactccctacagaacgcatactgttgtatttatggaagtattacattttggcagagacacaagggtggatttgcgaggat

SEQ ID NO: 422851 - DNA, 266 bp, Oryza sativa nipponbare
acatcaataattggttgttacaaacaaaacctaaacttttttttgttttaaaaaccttcctccttcttttaataccaaaaaggggggggttgtgaatttttacctttttttatttttatttacccctttctttttgatttttaggccttgtcttaccttcttgggttaaaccttttctttggaaacactattggttttttttgtttttttttattttcaaccaatgttttttttttttttaaatgcatctttttctattttttctg

SEQ ID NO: 422852 - DNA, 398 bp, Oryza sativa nipponbare
  unsure (1)..(398): unsure at all n locations
aaaaaaacctttttttttcccatttcccccttgaactttccggaaatcccaccattcccccaaactcccttttgttttttacgacaaataattttttcaaccccgtaccttttaattaattcccggggggttggccaactttttaggggaagaatcagttggcgtaggggcggccctcgtgggtctccgggttggccttgcagtaggcctcgagggggggggggggttccttgggcttggcgcgcgcggggtttgcccccccgcttaatttctccacctgggcccacgccggcgggcatttgccggttggcgggttcttcgggcacgcgcttttttgttttggggaggctttccgccatttttgtccaagatgtccggggggtttnccggcccttttg

SEQ ID NO: 422853 - DNA, 394 bp, Oryza sativa nipponbare
gggggatggaggcagaggctaaacactatgtatgtattttaaactcgttaaaaaagattaggggcttgaataacatgcctaaccaacaaggtgctcaaggccaaatcaatgaagagcaacatataaataactttgctcattggaattaacctggagctgcaacgacacactggttacagagccctccaagtcctcacggattggaatgggatcaggtggccttgcacaactctcccacgataactgtctcgcttggattggaaccacttagttgcgctcttcttgagaaacatgcccttcttggcctcctccgcctccccacgagaaacatactcaccaagctgtgccaagaggttggcctttgggtacatgagcacgttgtactcctccccct

SEQ ID NO: 422854 - DNA, 366 bp, Oryza sativa nipponbare
tacatttgcaattcaaattccttggatatagaatttattagcatttacattcatatattctagtttgccatgtagttcgtgacagtctcataatgaaaccaattttgatggcagccacagctatatgtatatatgatcatttcttcttagctatcaattacataaccaaatctgagatgcaaatcccaataaagcgtgcttatttcttaaagacgaaattgagattgaaataatgataattccaattaatattacaggtcaccaagtcacttactgtgccacagacggttagctcaaacgtgtgaagataggttggcaaggttccccaaacttccccaaggttgttcattaacaaaaaaggcgttt

SEQ ID NO: 422855 - DNA, 146 bp, Oryza sativa nipponbare
  unsure (1)..(146): unsure at all n locations
tttcacataaattcaggtgggtgatatatttgtttttacatccctgatacagatagtttggaaaaggtgcaaacaaagangaaaacaaaactaacatgctgaggctaatccatctactataaaagtgttctgttctatgttaagag

SEQ ID NO: 422856 - DNA, 594 bp, Oryza sativa nipponbare
gaataggcgagcaattgccatacagaccaaccgcataagaattgtctgtattccacagcaaatggtagtgctccatagcaccaatataatcagacgagcgtgcctagtgatcttctcaaatgtgactagaattgaaccacagaatatgctgaaaacccagctcattgctagagtcatacagcacgaacaatgggattgaaccactgaggtggataatttacatggtgtgtaggacagcagctcttatcatcacttcccagacgctatttgttttcagttcccatagtttgaactttgaaataagtccagagtcatgcggataccagcaaggaactcctgcaaatgcaaaatggagttcagacttcaaaggtttcaggaaaccaaattacaatgacaaatggacaacactgattgttaattcaggggtaattaattgataaaaaggatgaacaagactaattgttgatgctcctacttgatttgaaataggacactccaaaatgtaaatgaggtgatcaggcacatatagttaccaaatctcattccagtaatgtaaactgcttactgatgaaggtcacttaaatatgtccatgc

SEQ ID NO: 422857 - DNA, 471 bp, Oryza sativa nipponbare
ccacgcgtccgatcagagtattgactgatgtttgaagattactgctgatatgaaaccgaatgaacctagctaaaaattaaccgttttaatctgaataacttcaaattttgttgcaaatgcaaggacaaaattgcatgatattttatctgagtttttcttggttatattatgagtatcatgagacatccaataggtgtggttaaacatataaacaatttaagcaagctagctgtgaggaaatgtagaagaaaatgcagagacattgatttggtatcgtagctagtgtttgcctgatttcagaatatatgtatggattgaaaagctactgaatcaattacaattaaaatcctatatctggtcctgtcatatatcataatattaccatattattgcaaagttctactctctgatcaatccctgacaatgcattgtcaagcactgcaatctcattacctaaatagctccaaactg

SEQ ID NO: 422858 - DNA, 58 bp, Oryza sativa nipponbare
ccacgcgtccgcccacgcgttcgcccacgcgtccgaccactcgttcgcccacgcgtcc

SEQ ID NO: 422859 - DNA, 299 bp, Oryza sativa nipponbare
ccacgcgtccgcccacgcgtccgccgagggtggctgtgagtggcactctttagcagccgagaacatcattcagagactcggacagagtgaggggagggaagcagcactacaaggtgacggtgctgacaagaacgggggcacggtacaagtgcacaagagcaccaggttatgaggagcgacacgcacgacgggagagcgtacatttgaaatgcccatggacccgacgaaaggtggtcgaagggcgccagtaaggactcggagagcgcatcctggtctacaagggcatcatgagcgaatta

SEQ ID NO: 422860 - DNA, 52 bp, Oryza sativa nipponbare
tcgccacgcgtcgacagacttcgtcagagttctattgaatatagtctaccaa

SEQ ID NO: 422861 - DNA, 371 bp, Oryza sativa nipponbare
ccacgcgtccggccaaacagggcaggagaaatggaagccgaccgcggcgacgtactcgagcatgcactggagcgtgatcctcgacatcatgatgaaccccgcgatgatgtacgaccagatggacgaccacatgcaccaccggtgccacagcgtgatgaacaccgacatgatcctctacgagcacctctacgagctcgaccggtacctccaccgcttcgtccagtccggcatcaaggcccggatcgggaccgagatgctgcgcaacacgctccgcaagatgatcgtgcagatgaactggccgaggaactgcatgaggtagtgcatcagctactggctgagcgactgccgcggggacttcctcctgtgctccg

SEQ ID NO: 422862 - DNA, 278 bp, Oryza sativa nipponbare
ccggcctgaattaccgggccgacccacgcgtccggtctgagctgaggttgagagatggcacaggtcttggtttccatgaccgggctgtcgcagggggggcagctgccggccgggcccaggcgcgccggcggcaggtccaggctcgccgtcgtcagggccgacgccgccgccgccgacgtccagaccggccgccgcgccgtgctcggcctcgtcgccaccgagatcgccggcggcgccctcgcacaggcggagctcgccgaggcccccaaagccatcaa

SEQ ID NO: 422863 - DNA, 160 bp, Oryza sativa nipponbare
  unsure (1)..(160): unsure at all n locations
ccacgcgtncgncaacgcgnccggccaccgnccggcgcacgtagccttcgccgctccaccgccgcagggcgacgggctccacgcaactcccccacgccagaccccaacgccgaccaactncttcacccacctncctgcctaatcctcctcttcccccacc

SEQ ID NO: 422864 - DNA, 410 bp, Oryza sativa nipponbare
  unsure (1)..(410): unsure at all n locations
ggcccacaccgggggggagaaaaaanggaggcaagggctggacatataccccttcagttttcatgggaaagctattatcggacaacgggagtcaagagttcggtgattccaagctcgctatacatagaaagctgtctgtatctttatgaaaaaagaatgctgttatgtccatattgattttatcccatatgcaatttacttgctgctatagcagatcagcaatgctttaggcttttccatgctgctgtaatgtaaaatcattaggaaattcccgaagtacacatcgcttacaatgattgacagacttagtgttgttttaaattgaacgcttgtttgctactacaattgttggggtaaatgaacttctatattttgtttgatagaaaagagtttctggctcccctaatacc

SEQ ID NO: 422865 - DNA, 398 bp, Oryza sativa nipponbare
gaggggatttaatctctagcttagcagaaccaaacatgcccatgtgatgtcatcccaaataaagctgaccggaatcacattacaacaaggtcttagcataggaacaataagcaaatctgcatgtaaatatgattcagcagagcagttcatgttcaggagttcaatggttgcggtgatgcttcaggcttgatcaagcttctgcaatcgagatttcgccatgtccagttgcttctgctcagacgtgaccgcagatttgacgctcttgcggaagaagaggttgcaggtcttctggtacaccgccagtaaatcttgacctaatttggtgcagatatcgtgacatttgctgccattggtgaccaaagatctaaaatagtgaaagcaacaagctttcttgcaaa

SEQ ID NO: 422866 - DNA, 305 bp, Oryza sativa nipponbare
accccttggattagaatatcctttttttttgaaaaaagctttaaaaaattttcaaaaaaaaaaccaaagggattttttttttaataataataaattttttttttgggggaaaaaaaaaaaaaaaattttttctggggcccccccccattaaaatgtgtttttttaaaaaaaaaaattttttttttttttttcccccccaatttttttttttcattttttgggggaaaattttcccccccaagaaaaaaaaacttttttttttataataaaaccttttttttttttccccccattttttttaaaaa

SEQ ID NO: 422867 - DNA, 305 bp, Oryza sativa nipponbare
acgggctgtcctttttttttttttttgacataatacagagatatacgctttggtgcttgaagaagcatcaatcctggagcacaaattgttcaagatgacacaaagtggaaatattacagattcctcaaaattgctcaaatacagattcctgaccctaaccaaaggacgaatatctgccattctcactgctctgcaatatacatcacgcgatctcattaatgcacctaataagtcaacctcattgcttttatcggacaagaatttccggtttactctggaaaggcacgctaaaggttcaactttaa

SEQ ID NO: 422868 - DNA, 392 bp, Oryza sativa nipponbare
cctgcggaattgcggttccttattttaataaatgatcaacaaaaactaacaagttacaattgatacaaatgtcacatctgctgctaaagaatttttacttaggagcttccttaagctggggcttctctctacaacctgctgcttaaactaaaactcctcctactaattatggtgcaaggagaattccaggaaaagcaatggagggaccaaggatatctataacaataacagaaaaaatccctcctgctagtaattaattaaggagattttcagcatgtatacgcctctctttgacaggcacagggagcaccatagatgctgccactgctgactgcttctggtccttctccgttggaaacctcaagcttgacacacatctacgacgactgcga

SEQ ID NO: 422869 - DNA, 443 bp, Oryza sativa nipponbare
gggttgtgttttaatatggttgggttttttttttttttttttttttttttttttttttttttttttttttttttttttttttggggaaaaaaaaaaattttaaaaaaaaattaaaaaaataaaaaattttttttccaaaaaaaatgaaaaccggggggggcgaaaaaaaatttttttttaaaaaagaaacccaaaaagggtaaattacaaaaccaaaatttcccaagggaaaattttaaaaagggcaattaaaaggggaacgtaaactttctttttttttattccaaaaaaaaaaaccctcaaatctttgaaaaattaaatttaccccaacccctttccggggggaaaaaaaaacccttcaaaaataaacaaaaaaaaaggggaaagattttaattggggatttcaaaaccccaaaaaaaaaaccctttttaaaaatttaaaa

SEQ ID NO: 422870 - DNA, 299 bp, Oryza sativa nipponbare
ttcaatccaatttctagcagagggatcattgattttatactgatcacgagaagttcactgaaattacattcttaggagaagcagcgtatacacacggataaaacacggagaaaatctttaccagagatggttggtgtttgggaggcaagaacggccggcggcggggcggccattacccggatgggagcaccttcttgacgatctcgtcgctaagggaggcaatctggtctttatgcgcatgaccggttacttgctaccagacttctagcaggccgagggcttgtaggcgatgaagtttc

SEQ ID NO: 422871 - DNA, 357 bp, Oryza sativa nipponbare
aaaaaaaaaaaaatttgcttaaattaattatggggtgccaattattaaaaaaaaaaggatcaaatttttttaattaaagtttttaaaaaattaaaaatttttcccaaaaatttaaaactgatgattaaatacagttagtataaaaaattgaaaaacatttttttttttattaaaaaacatttatttaccaaattattatttgagtccataaaaaaggcttgttggaattttaaaattttgggcaaaaacaaccattttttttttaattgcctggaaaattttttaatggacatttttgaaggcggcgttaaaaaattaaaaaagtttttaaacacccatttccattggagttttggg

SEQ ID NO: 422872 - DNA, 342 bp, Oryza sativa nipponbare
tcttgaggtgagccctgaatacaaacgaaggcgaggcggatggcacggcacatgtcaatggaacagaattacttgagctttcagaataccaggcccaatgggtagccgactttgtacacgtaccaggatgctaaacaacatgtaaattgcgagatgcataacagtatcatattaaactctactggactacataaggatgaaataaaacctctcataaagcatagactttgaataatacagtcataaccactctaatcaaaaaaacaggtgcaggaatacaatatgcagcgactactagatcgctgacaagcgtcttcatgaaatcataaagtgacgcgtagc

SEQ ID NO: 422873 - DNA, 387 bp, Oryza sativa nipponbare
ttttttttttttttgtgtgggtttttttttttttgggtttttttttttttttttttttttttttttttttttttttttttttttttttttttttttttttttttttttttttttttttttttttttttttaacaccgaaaaaaaaaattttttttaaaaaaaatttttttttaaaaagggttttttttttttttttgaaaaaaaaattttttttggagggaataaaaaaaaaccttttgtaaaaaaaaatagactttggggaaaaactgggggagaacacttttgttacacaaagaaattcgggcggtattttggagaaaataaaatttttataaataaggggaaaaaaaaagggggggaaaaaaagggaaaaaatttttttttgtg

SEQ ID NO: 422874 - DNA, 223 bp, Oryza sativa nipponbare
gaaaaaaaaattttttaatccttaagataaaaagacttggaattttacaagaagaactaaaactttttcagagttacaaaataaatgtcacgctacagggaggatcaaaaacttttttgaaaataaggcaatttttacctcctaccaaactaaatgttttacaaaaaaccatccaatccggttgggatccaaaactaaccggacccgtgggcggacacaatgg

SEQ ID NO: 422875 - DNA, 286 bp, Oryza sativa nipponbare
ggcaaaagaaaacccagtacagttttattttggaaaaaaaaacatgcaaattaaaaaattttaacaatgtaatcggtactaaaaactggggattggcaaaaaaaaaaaaaaagtttaacattattggaggctagggggggggggtaaaattaaaaaatcttacatgagctggggtaaaaaaggcaaaaatttttttccactggaagggttgtttttccaactccacaaagggggcaaacaacttaaaaaaagtcatgagctgggttttttgaaagcatttccatgg

SEQ ID NO: 422876 - DNA, 371 bp, Oryza sativa nipponbare
tttttttttttttttttttgggttggttttttttttttttggttttttttttttttttttttttttttttttttttttttttttttttttttttttttttattttttttttttttattttttgggaccccccatagataaaaaaattttaaatataaaaagggaaatatattttttttttattcggggaaaaacgaaaaaaataagcgggggagaaaaagcctgggggggaaaaaaaaaaaattttagttttttttttccaaaaaaaacttccaaaagttgaaaaaaattttttttttattaaattgcatttaaaagaatttggggccccaccaaagggtttttttaaaaaactttttaaagggggggacc

SEQ ID NO: 422877 - DNA, 350 bp, Oryza sativa nipponbare
  unsure (1)..(350): unsure at all n locations
ttggagcggaaactgaaaacatatttcattattgttgaattaaaataggtacatgagcagctcatcagcaataatagtattttgtctgctttgagccaggggataagatggaaataatggagggaccagtctcaaaacgttagcaacctcctcttcactggcatggctgccgacagatgcagtcctgctgctctctgatttacagaaatcttttcgaaatggtatgaaatagctgctgctcccgtgattcattgaggtgcctngatttgctacagagcttcctgctgctgaaatgagttcgtatgaacacctgataccatcacagctagacctgcaagtgagctgcatgc

SEQ ID NO: 422878 - DNA, 394 bp, Oryza sativa nipponbare
tacgtgtaagaaaatgtactgcctgtttaccctgctgtcaaatgacgtttacaagtttgtaaatatatacaaatttaaccacctatggttttgacacatgtaaatgtcatggagataaaaaaagttagtcgttggatcgagtcaacagtacacaaacataacaactttcagggggatcaataatggcatgagaccacaatttatagccaaattgttcgtcacaactgacaacagtttatcatccctaagatctcaaagtttgattaatgctcatcagctcttctgtgccggggaccacacatgtgtatcatctcatgtaagcgttcatcctgatcatccttgcatgcatggtcagagcaatatatacctgcggtgaggtttctatgatgtcatt

SEQ ID NO: 422879 - DNA, 205 bp, Oryza sativa nipponbare
  unsure (1)..(205): unsure at all n locations
ccacgcgtccgcccacgcgtccgcaccggacgaacaccatgctttcgttttcgtcgctgccgtccaccggggccgggtcaccgnttccgctgcgtttctcccgccgtcagcgagcgcgcatccagcaagcgccttcgccccgcccaacgccgccgtgtgcctcaggcactcgccgcggggggggttgtttgggagcccgtggtac

SEQ ID NO: 422880 - DNA, 60 bp, Oryza sativa nipponbare
tccgaattcccggtcgacccacgcgtccgcggacgcgtccgcccacgcgttcgcggacgc

SEQ ID NO: 422881 - DNA, 200 bp, Oryza sativa nipponbare
ctacaccggactatccaccctccacaacaatactaaactacgaacaaatggccctctaaggactgcaagcccctcaaggctcctcttctttatgcgcgagcacaccccgagcactgctaccaccatcatatacaacctccaaatcaacatcccggacaaaactgttcataacatcagcaagcgccaactgatgaaccccc

SEQ ID NO: 422882 - DNA, 439 bp, Oryza sativa nipponbare
ccacgcgtccgcttatacaacacgtcagtccagtattgatttctcttttttgagagttgaggacttgagtgacaattattaccctgtttggagttgagatacaaatattaaactaagttgaggagtgagaaataaatatctgtgggcccttactgccgcggccacaaacaatttctttaatacgagtaaagttacaccatgccagttatttagtcacgaactaaagccttctgtccactggaatcttgtttaacttgtatttagtttatatattttactgtggactagtggtactggatgccatctgacctattatattggtattatgttggtactatgtcccatgtagattttgttcctgatgtgggttaatggcgtaagctaacttcaattctgtataatgcataaataatctagacaatttgtctgcaaatcttta

SEQ ID NO: 422883 - DNA, 130 bp, Oryza sativa nipponbare
cggattgccaggcccgacccacccgaccggggcaaaacagtggaggctgggaaaagaccattttttgtttgttcaaggttccaatcacggttggaaagcgtgtccgttgcaaaactaacatataatcagg

SEQ ID NO: 422884 - DNA, 219 bp, Oryza sativa nipponbare
ccacgcgtccggagaaacgaacaagaacacgagcacacacgcttctagtaaagttgttggattgcaggcggcgaaggccgatgatgtgaagggacccaatctgcagaaataggcttctgaatgggtaaatgggcgcgttctggtggttgaaaatgttagagcatacaaggctgaggagaagaactacacatataacatctagaagcttgccatggtagc

SEQ ID NO: 422885 - DNA, 440 bp, Oryza sativa nipponbare
ccacgcgtccgaactgggaatcccccctcggacggcggcggaagcggaagcagcagaggagagcatctggttcccctgcgctgcccgctttttggtggtggtggcggcggccggcggcggatcgctgcctcgccgtgccggtaaggaatcgaggctcctgttgagaaactctactactccaccatacaattatgctagttatagaacaaccacattctcatgatgtaccatgcaaagaagttctctgtaccctttggaccgcagagtacacagagtaacgagcatatgagtaatattggagcttttggcgggtcaaacatgggcagccctgctaatcctgcagggagtgggaaacaacggctacgttggacctcagatctccataaccgctttgtggatgctattgctcagcttggtggacctgatagagcaacacctaa

SEQ ID NO: 422886 - DNA, 217 bp, Oryza sativa nipponbare
aaaaaaaatcaaaaaaaaaaaaagacaaaaaaaaccaagaaagaaaaaaaaaaacccataaaacaaaaaaagcacaacaaaaaaaaaaaaacaaaaaaaaaaaaaaaaaaaaaaaaaaaaaaacaaagaaaacaaaaaaaaaaaaaaaataacaccgaaacgaaaaaatcgcaaaaaaagaaagaaaaaaaaaaacaagaaaacaaaatacacacac

SEQ ID NO: 422887 - DNA, 312 bp, Oryza sativa nipponbare
tttttttttttttttttttttttttttttgggttgggtttttttttaaaaaattgccacattccatatgcaattaggctcaaagcaaaaatcgataaaaaaaagacccctccctcacttttttttttctgctttttaaaaaaatcacacacacattccttggctttttttttttttctgcgaatctctttgatgattttatttacatgcatgttatttactaacctagttcaccttaaaacttaatcaaaacttgttcaaagtgcttttgggtgtcaacaagttgtaaacacattaacaaatttttctcttg

SEQ ID NO: 422888 - DNA, 446 bp, Oryza sativa nipponbare
ccacgcgtccgctgaatttgattctcatatacctgaagttcatgccaacctcctgcacaatactccagagagggaagaacgtaatgagccagatgctcctaacatttcccgtgcttctgggggtgatcaaagacaatctcagatgcctgaaatgtctactgcacgtgctcctcctcggactggtgtttcaccctcttcaagttctcatgtgcaagatcgtgatgaccgatctccctaccaccattccagagaccagaccccacagaggccccctatgctatcaagaccaccatcattccatggtcgtcactcttatccaccaggggatactccaagtgagaacaacccgcctcaaggatttgatcggccctacaactgggctcatgaaaatgcacctggggcgactccagtccgccaagaatcagagcatggtagtcaagacaaac

SEQ ID NO: 422889 - DNA, 82 bp, Oryza sativa nipponbare
ccacgcgtccgtaaaaaaaaaaaaaaatttaaaaaaattttattttttataaaaaaaaaaaaaaaaaagagggggggggaat

SEQ ID NO: 422890 - DNA, 263 bp, Oryza sativa nipponbare
  unsure (1)..(263): unsure at all n locations
acgacccacgcgtatcgcccacgcgtnacaagtaatgacaattgcaaatttttgtcagacgcgtggaaccaacacgcgggggatgaacgctgatcccatctaagncncacaccgaacgaacaatgcattatgttttgtaactgttggagggcattaatttagattcaagattggcggatttttatgagcaaaattgtccaagaataaatttatttttataaaaggttttaaaaatttccagcacacatttggtgaagatgatc

SEQ ID NO: 422891 - DNA, 200 bp, Oryza sativa nipponbare
gttaaaaaaaaaaaattttttttttttaaggataaaaaaataaatttattttaggggggaaaatttttttttttttttttaaatttgaaaaaaaggtttttttttttttttttaaaaaaaaaaatttttaaatggtaaaattttaaaaattttttggggttttgggtgttatgaaaataaaaaagggggaaagggaaaaa

SEQ ID NO: 422892 - DNA, 424 bp, Oryza sativa nipponbare
acattctaaacaatggtgagtcgtatattacattttaggctcctaatactatgctaaatgatactactcaccatcaatgctacatgctatgctttcccgattaatgtaaaatgatgcgatgatcttaaaatatagtattgagtattgatttcaatcatttctcccttttatctttacatgtaatgttggctagaaaatttattatcatgccatgtatactccttttattcagacaagcaattagccagaaaatcattgcaaataccaattggtaccatggaccttgtactacaatatcctacacaatgcagcagcacatcttctaccttgttactacctggtagccgtcgcatagaagcggctgaggccgaccttggtgccgacggccttgatgtcggcctgcacctgctcgcggaattccctg

SEQ ID NO: 422893 - DNA, 418 bp, Oryza sativa nipponbare
ctcgccctatttttttttttttacacaataatcaaggttgaggtgaaaaattagatttgaggctcctaatcttttcccaccaatcatcacataccgaatgatcaaaattaattggcaaaaataggcatccccctttttttttacattcttccctaaaaaaaaaacaacaatgctttaaaaaacaggtggatcaccctcatttgaaaagtcaccttgaacaatccctttgaatggaccgatttaaaagaaattgggtgaaagtccataattttaaaggagcatttaaccccatcccaataaattttaaaaaaacccaaattcttttattccccttccaaacaaaaaacctggcggatttttcctaaaccttttacccagcccttaaattggccataaaaggcaaatcccaatttttttt

SEQ ID NO: 422894 - DNA, 234 bp, Oryza sativa nipponbare
gggaaaaaaatcaaaagagtattccacttttttcacagttcttcaataattaaattcatcaccattaaaaaacccaagaacacgaacaagaagaagaataataagaagaaggaagtgttcacttcagcaaagcaatcgcctcccacctgacctcacgtgctcgacagtagggacctcctcccaggcgtcattgatcacggggtcatctgccaccctcccgaaccttggcaccct

SEQ ID NO: 422895 - DNA, 292 bp, Oryza sativa nipponbare
ggaaaagccgaatttttttaaatattttgtttttggttgggttatttgaatttaaagaaggggtgtgtaattttggacaaagtttttttattttatgagtgtaaaaaaaagaattttttatatgggggttggggaatataaaaaacaggggtaaaattgggggggtaaaacaaatttttttttgtaaaggtgatgtagatgagtatgataatgtttttaaaggggtttttttcggaaaatattggttggacaaaaaaatcgaaaatggaaaatatggggggggggctttttt

SEQ ID NO: 422896 - DNA, 253 bp, Oryza sativa nipponbare
ggtcggcaaccaaacaagaattgctttgataaaatgaagagattcacagcgtgccaaacccctttaatacaagttcacttttttaaaccacctttttaaaaacataactgcaaacgtccatcccccattttaagatttaactgcggccgatggtaacaaacctattgatccaaaaggcccaaagtttttgacccaattgcctttatctttccaggttttacagggcctgcttgttcccttgcccctattcatt

SEQ ID NO: 422897 - DNA, 319 bp, Oryza sativa nipponbare
tgggaagttattcgggcgggttgcaccatctctagaaaacaaacatctaaaacatgtcctgcggggaagaggggcaagagaggagaagaagatagcaggttgaaaacggcacatgaacaagatgcggcaaggtgaaacgtagccttatacagccacagcgacagattgatcaagggcaatgactgcaacacggtgctgggcttccaacagcgacaagctagcaccacctactgttgaaatgtgggtcataacatctgcaactgccaccttttaaacaggggcggccgaatgacccacttcaataatggacgccacaccc

SEQ ID NO: 422898 - DNA, 213 bp, Oryza sativa nipponbare
tttttatttttttggtttgtttttattattttttttttatttttttttttactttttttaaaattttattaatttattttaactttcaaaaaaatatttaaaaattttcacattaaaaaaaaacataaaaaaaaaatttagcaaaaaaaaaaaataaccaaaatttttaaaaaaccaaataccccaccaaacccttatttaacaaaaattcaa

SEQ ID NO: 422899 - DNA, 184 bp, Oryza sativa nipponbare
ggggggaaaaaaaaaaaattaaggttgaaaagcactttttcccccccaaatttaaatgataattaaatttgccaaaaaaaagggcctttttgttttattaaaaataagagttttgattccggtgactaacttaaaaaaattgattatcccaaaattttttccaagacccccattttttttaggc

SEQ ID NO: 422900 - DNA, 349 bp, Oryza sativa nipponbare
tcacagcaaatgtattgcgtgtaaatgtgtactctttctggctacatgattcaactcagggcaatttcccttcaaaagaaggaaaattgcttgctagggcttttaggacatcctgataattacaagagctgtatgatgatgatgaatactacagtgacgacaacacctggccgtggtgaaggaatcagatgtggatccaaagatccttacaaggctcgctctgttgttaagaggatatatattcacatgcgatcggcccgcagtggaggttaacatcttggatcaagaatttccgatgagtgaggttttgctttatgatttggtcagaccagggtcagctttaaattca

SEQ ID NO: 422901 - DNA, 360 bp, Oryza sativa nipponbare
acctactctttcttttactcttgtatttttcgggagggacactttttcgagaaagaaaccaattcaaacagcttatgacattccttatctcccaatcaacatcacattttctcgtcttggagaacggctactacatcgcatgagaataccacccgatcctctaaagatattggcggcgattctatccaatatatataaggagttctcggcctagtctaacgatattgatccctattttcaagccctacacactaaatggattgattacttagaggccaacacaatatatgatattcttcttaagttgactccagaaagcctgaacatatttggtccactatcaagtgctcatggatcttg

SEQ ID NO: 422902 - DNA, 192 bp, Oryza sativa nipponbare
aaaaagttgggtttggattacatttatacctggttttttcaacttgaaaaggaaaaaaattattttgtaccctttggctaccccatgggtcgacctctgtggcttcccctggtttaacccaaaaatttcgaaccggttccttgaggggttctaatttttctttttgggaggttgattaaagcttggcggaaa

SEQ ID NO: 422903 - DNA, 270 bp, Oryza sativa nipponbare
tgaaggaattttatttgtacacttatcagatttcattaaatgagatattggtatgtacttcatatttgcatgttctgcactgtgatcacaaattcacaatcaggtatcgatcaatctgctttttctcctcttcctgtttagtaaataagaccaaggaaactaaatctgcatttcctccatttctccccaatgcagttctagcaaattgtggtacaatcttgaattttagtcatgtcattgctacgagaagtaatgcaccgcttgaatcaa

SEQ ID NO: 422904 - DNA, 305 bp, Oryza sativa nipponbare
gggccaaagtctaaagagcacgtcctgtattgaactctgcattttgcagtgacatcaagtaggaatagcagcgatccaccatttccaagcaagagcagtgcaacaaagttttgactaaatatcaaaattcctatttcacatgttttcttaaagaaaatcctatttcgcaagagcgttgtctgcttaggaaagaacagccattacgtcggataccctgagaacaatttttcgccattttcacccttaaactcgcttcccgcgtacttggagtacatcacggttttcccaggagtgattgacaaggg

SEQ ID NO: 422905 - DNA, 298 bp, Oryza sativa nipponbare
ttacacacacaatccaccggtatggtttatttgagtcgtttagaggtaaaacaaaaaggcactaccggacgctgattcaatctactgccccctgaagtatacatcggggtccaagaccaattgagttaaatcttcatcacctcaacaaaagtatgcttcttactccttaccataaagcgtgtctagcgcccccctaaaaatgttaccttacttgcgggggccaaactatatgcaattggaataattcgccctttgatccttgtgacaaactgcagacataaccaatcaatgctaaaaa

SEQ ID NO: 422906 - DNA, 249 bp, Oryza sativa nipponbare
tatttttttttttgggttggttttttttttatatttttttttttttttttttttttttttttttttattttttttttttttttttttttttttttttttttttttttgagagcaaaactaaaggggactactaaatgtgaatatttgggggcttttttttaaaaaaaacaacatttggaatttttttcaaaaggttttcaccccccccccacttggaaggggtttttttatgggggaggctaaggcctt

SEQ ID NO: 422907 - DNA, 225 bp, Oryza sativa nipponbare
agagaaacgggcttgattttactatttatgttaaaaacaattgttcaaaattaattccggggcattttggatgtaaacaactcaacataaatgccctgtaaatggaactgctatcctaatctggttctttctctgcgattctctgtgaggattatatttacatgcatgttatctactaacctaaaacacatagaactaaataaaacactgtacaaagattgcttg

SEQ ID NO: 422908 - DNA, 349 bp, Oryza sativa nipponbare
cgatctcaatgggaatttcattagggatatgatcgttcatggcacaacacatttctcatcagcaacgcagaatgatgagaccaccgttttctcgataagtacaatccaattttgacagcaacaattaaattaccgtacataaataatcatcaagttctgctaaaagtttgctgtccagctgaagggggctgtgtagggggaggtgggggaagtgacatctgcatttgcatcggcatgggcatctgcgctagaacaccccggtcaccttggccagaaagatccctacctggtatgcctgaattcattgagccatcaggcatgactccgaaaccaccttgcaggaaaacca

SEQ ID NO: 422909 - DNA, 319 bp, Oryza sativa nipponbare
ccacgcgtccgaagcaagccgatcggcagccacaccgcatatcatttactcttacacatttcgctcgaccgaggcgcgcgcgcacggagaagatgtgggtgacgtcgatgccgcaggtgtgggacgaggagggggtggcgaagggcagcgtggtgacgccggcgccggcgacggcgctgctggggtcgctcgcgggatggatgtcccgcgccgtcgagccgccggcgccgaggccgtgcggcacggagggtggcccgccggtgaccgcgacgaggctgaggctgcgcgacggccgccacctcgtctactgcgagagcgg

SEQ ID NO: 422910 - DNA, 407 bp, Oryza sativa nipponbare
ccacgcgacgcgtacgcttggaattcgaaatccacacgagcgcggttgctttggcggcggcgatggcgagcagcattgacgtggcgtcggccacctcgaggctcctcgctggccggcgggaacggcggcagcggcggcggcggggccagccgcgtgagcttcacggcgaacagggtcgggaggaggatggtggtggtccgcgcctaggacgaggccgtgtcgtcgctgatccacctcacggtgtaagaggacggccagcgcgcttctaggagggacgcgctgtataactggatggcagacctccctgggagccttgttctcggcggcgtcgccgcgttctctgaggctagcatgaacggctacttttctgacaaggatctctactactacgcgctggatttcatcat

SEQ ID NO: 422911 - DNA, 234 bp, Oryza sativa nipponbare
ccggggcgacccacgcgtccgcacggattgcatatgatggtaaaaggatttttattttcatggaccgccatgagaacgacggggatgtggtcaaacgtgggttttacccccacccgcgtggggaaccaccctacaaacaccaaaatgcaggcgaagcacctgaaaactctaacagcacagaccaaggctagtgaccataatagagcgctccatggcgtagacgcgaagaatgag

SEQ ID NO: 422912 - DNA, 417 bp, Oryza sativa nipponbare
ccacgcgtccggatctagttgcaagtaaatctaccgaagataatccagcggttataatccctgatcatctacaacttgcaaatgcagactgtgggcatctgagctttggtagttttggatctggtgccttctctgggttgcttccatcaaaggtccacaaaaatggagtggaggaagtgcctgttccagatgaatctccatcagttgatcaagaagatgtcaggaatcaagacaacaatgttgctctaaattcttcaacaaatggggacgttgaagccagaattggcactagcatggagaatactgatgaaccttcagtttcacagcctgatattctgacgcagggtgctgtagatgtgtcaagtctacaatacaatctgccatcagtttcagatcatgtatattcaaacacaacac

SEQ ID NO: 422913 - DNA, 397 bp, Oryza sativa nipponbare
  unsure (1)..(397): unsure at all n locations
ccacgcgtccgcccacgcgtccgcgcattcctcggtgtaggctactacaaccacgtcaagcttcaggcgctcaaggcgaaggaggcgcagaagaaggccgcacaggccgacgaggaggccggctcgctgctgcaggagcgtgactcgcacggcgaacgcaagagcgacaaccaggcctaaagcgtgggatctggtccaacagcacacgcaatttggttggttctaatgaattcatcaatgtggggatcctctactagtttgatgcaaaatctgttcatttcttgtcttaatttgcggtaggaaggcaaataaatacaggaaaagtacgatctttgtgtcgggcatatgaaaatatgagtcaaattttggccacttgtangtactttgacaggatatg

SEQ ID NO: 422914 - DNA, 321 bp, Oryza sativa nipponbare
ccacgcgtccggataattaagcataagatgatgtagtacaacgatcatgaccaacatcgcatcatcgctgctcgcagggccatgggattgtcccgctggtccgccacctgctgataactgtggcgatcctgcatatttaggctagcatgacgaggcgcaatgcgaggtccctcgccgtccgctgcgagcacagagccagctgcggaggcggactacagctctaacatctggacgtgtgcctcagacgcgtgccaccgctccggttgctaggcgtcatcagcgcagatctacccaacaggccaaggtgtgatcaagaactgg

SEQ ID NO: 422915 - DNA, 442 bp, Oryza sativa nipponbare
ccacgcgtccgcccacgcgtccgcccacgcgtccgcccacgcgtccgcccacgcgtccgctttaagatgcaacgcaggcgaagagtccgaaaaatatcttcagggtcccattctttgttgtctttgttgagaaaggacttaagagatggcagtctgcagtcctttcttggtggatcatcctatgtatctaatcctcctgctgctgcaccagatccatttttgtcatctttaatttgtagtttgcctgtggctgaaccatccaaagatttacattccgactcatctgacaataactttttgctaaataaattcccagatgacaagactgcagaaaggtatgtcaccttaagctttgctttttctgccgcctcactccgctccctctttgccacaataccactgtatctgagctgaaccatctctgtcggagaaggatcagaag

SEQ ID NO: 422916 - DNA, 181 bp, Oryza sativa nipponbare
ccacgcgtccgggcggaggtgatgcatcagcccgtgccggtgttggaggtgccgtaccaccggtgcgtcgccaagggtgtcgaggaggtggccgtcgcggccccaaacatctaaactcttaatactattgttgctccattccaatgtctcaagttcactttcttactaattataactcgac

SEQ ID NO: 422917 - DNA, 285 bp, Oryza sativa nipponbare
ctggaccggaatacccgggccgacccacgcgtccgggcggatgatatgcataagccctggccgtatctgttgctccaccaccaccgccacgagaccgagtgtatcaaagaggcgcacttccctcacccatacactccgtacatcgagaataatctaacaccaaaagccgtggctatgcccgacctggggattgctgatactagtggattgaacaccttacaatccgtgaacggtcataaaagtaggaaccgacaactcctatgcagcaaatgcacctgaggacct

SEQ ID NO: 422918 - DNA, 333 bp, Oryza sativa nipponbare
ccacgcgtccgggggcggatcagatgtcttgctgacaccgactgctttccgtccaaccatccaaagcatcgggggaggcatgatccagggattatcttatgatccatactatatactgagtaacaacacgctgaatgcctgtggatcaaccagcaagtggatgtcgacccccccaatgaagatctggatcatagggaagggggcggcttccgatcctgaaggcgatgcggtgagaatgccacggagacgagcacaagcgcaccatggtgagagccaggaacatctgcagcaagctttggcagtggctgagtgtgctcggactgtaacaccacc

SEQ ID NO: 422919 - DNA, 161 bp, Oryza sativa nipponbare
ttcccggtcgaccacgcgtccgccacgcgtccgggagtaggagagaaggccatggcgtcgaaggaggaggtggccgtggagacggtggagggcggagcggcggcggctaatgctccttactgggacccgcctctctcgccgtagctggacacgagctagct

SEQ ID NO: 422920 - DNA, 349 bp, Oryza sativa nipponbare
agtaccgtccgaattcccggtcgactcacgcgtccgcaattagttgagatacagaaggcaaaatagcgatgatgtacgataagaacattcgtgtatccattggtcttcagttaatgccggacagacaagggcgaaggacagacatttggtatgcaacttcttgtccagcaatttcccatgctcttctggctaggcaacatcagcgtgtgatatttcagccttattttagaactacataactcgatttattcggtattactggaataggtttgagatttaggcatatatgttgttcatatccattgggaaagttgttaattgttggtcaagaaattgcttacctaatgtc

SEQ ID NO: 422921 - DNA, 99 bp, Oryza sativa nipponbare
  unsure (1)..(99): unsure at all n locations
ccacgcgtccgggaacttttctgcttgataattttcgcatgtgttagtatttgtatatgatgatataagtgggaaataaatcatcaaattttccagcnt

SEQ ID NO: 422922 - DNA, 60 bp, Oryza sativa nipponbare
  unsure (1)..(60): unsure at all n locations
ccacgcgtccgcccacgcgtacgttntatgcttgataatatttatatgagtaagcatttg

SEQ ID NO: 422923 - DNA, 366 bp, Oryza sativa nipponbare
ccacgcgtccgcccacgcgtccggttcttaacaagctcgagagaaaaatcgaggtttttaacatggacgctagaaggtttatcagttcaatatactcaagccaacatgtgcatccagtcacacaagtagtaatgaatttgcccaatgatgctgcagaatttttagatgtgttcagaggaatctcatggaaccaccatttggctgtgccttcttgtgtaatgccaaatatacacgtgtatggattctccaaagcagatgatcctgaatatgacttccatgagaggataaatttgacgctgggtgagaacgtgtcctatgttgaaatgcattgagtgcgggtcggtgctcctggaaaatggatgcttt

SEQ ID NO: 422924 - DNA, 243 bp, Oryza sativa nipponbare
ccacgcgtccgcgcaatggcgacgaccaccgcagccttggcgccgccgtccacctcgacgtcctccgtcctcctcccctcagccgccgtcgccgtcgtcgcccgatgcctcgggccgctgccccgtcgcgcgcgcctccggaccgcgcgccacgtcgccctcaccccccgcgacttgtccgcggaggacgtggccgcggaggaggcctccgacgcgcccatgtatcgggtagcgcgtgctagt

SEQ ID NO: 422925 - DNA, 332 bp, Oryza sativa nipponbare
ccacgcgtccgatgaccttaccgcccaaatctgcgtcaaggtcggcgaggcgtttgggaagtcggcgaggatggacgctgttgcttaggcctacaagtgtgtcgaataatgcctatctcaaggctgcatactataaataccctactgtaagcatggatcgccagatgttgcatagcaatggtacataatccacctggtgaatcaccatcattttctgcctcagacatagataatctaaattacaatgtattatttaagggccctttatgcaaggatgtctattcgttcctagttaccgggaacagttttttactatgctgttcgcaattatc

SEQ ID NO: 422926 - DNA, 273 bp, Oryza sativa nipponbare
ccacgcgtccggacgaggagtacagcggcctgtcgctctagagagcctatatacatgtaaacatggtggcagtgaacggcgtaatcggaggagaacgtacatggctgtgtctgatctaaactgtggcctatgcctgagagatgtcgtatcatcgagacaaagaactgtgtacatgggtgatcgtgcacgcgtgtagcacgttaacaagataaattcgcagaactcagttttggatggcaaaaataaatacaacgacaacgatcaagccaaggg

SEQ ID NO: 422927 - DNA, 278 bp, Oryza sativa nipponbare
ccacgcgtccgccacgcgtccggtacggacggccggctacaacacaacacagtaactgtaactgaagaagccggcgccaccattcccgccggcaatatgctcaccgccggcgacgccggcaagctctccacggccgggaccgacacggcgcccaagatggcattattcaagccccttcaccttcctcccctcttcgccgtcgccgccgtctgcgacgggccacgttctctctccctctcggtgcgccccctgttccggcagcaggacccgttattcct

SEQ ID NO: 422928 - DNA, 97 bp, Oryza sativa nipponbare
ccacgcgtccgcggacgcgtgggcagacgcgtggcatacgcgtggagacagttcagtagagtagaggatgttacctgtgctcagcagagcggaggtg

SEQ ID NO: 422929 - DNA, 239 bp, Oryza sativa nipponbare
ccacgcgtcaggccacgggtccggatgtgctaagctcaacatcgcgaattcctctcgaatccgttgccgacgatggataatactacgctggaaagcttgtcccatttctcctgcagaaaatctcagaagatgttgaggctggagtcaagcctgtgcttaatctcaagggctatctggatggcaacccgggtaccggcgaaagcatcgattacgagtcgaaagtgccttacgctcacgga

SEQ ID NO: 422930 - DNA, 209 bp, Oryza sativa nipponbare
ccacgcgtccgcccagcttcgtccccgccgagggcgtccccggccgcaaccgcatggacggagtcgacgacggcggcgactcgcggatgtacatcgactgtcgacacgtacgcgccctacttcgacgatactactgggccgacctggtcgtgtggtaccttatgaccggggagcggtattaaaaattttttcttatgcatgataatgtg

SEQ ID NO: 422931 - DNA, 494 bp, Oryza sativa nipponbare
ttaaattctaaacgtggatctaataatttctacatacatcatcatacccaaatactaacacattcaaaacttatcaactttaaaaactccattcatattccctcacacaaacaaattttaacatccttaattttacaattatccccaacaaataccattccaccaccaccatatcccctaactcacctcatgcttatacaacaaaccatttctaacccccaaactcttatattaaattccaaaaagattatcatccttttaaactacacactcccttcttttcagccccagaacttgctgataacacccttcttcttcttcttcattctgatctcaatgtttgtcaacttgatctcattgcacgccatattaagaacaatactataacacctaacttattgcaatgcaggcgggaattctccaatgccacattgctttttgcactcttacttacccattgctaattcatacctctttatcatctcaataaccaa

SEQ ID NO: 422932 - DNA, 300 bp, Oryza sativa nipponbare
cccccaaacttttcctacaattttttaaaaaaaatttttttcccaccatcgatcttttcccccataataaaaaactaaaaaccccccccccaaataataaaaattccttttccttccccccaaaacacaattatttaataggtcttttttgaaaaaaaaaaaaaaaaaaaaagatttttaaatttcaaaaacttttttcccgaaaaacttaacctcaatgggcctaacttttttcccattttttcaaaattttttgccaacccctttcttgccggttttaaccttttccggtaaaacccc

SEQ ID NO: 422933 - DNA, 264 bp, Oryza sativa nipponbare
  unsure (1)..(264): unsure at all n locations
ggcctaagaaacaaaaatgggatccagaaggccaaattgcgagggtggccnataggaaccttcgggtttccatgggtcttaaattaaggcccgacacacaagggcaaaggccacccatttggtatgcaactttttgtccagcaatttaccacttccacaaaaatttgaaccacatatttgcccaaattccaaacctattccagaaataccgaaaaaatggggttggaggtcctaaaaaaaggctgaaaaatcccccgctgtggt

SEQ ID NO: 422934 - DNA, 97 bp, Oryza sativa nipponbare
gcgggaaaatttgatgatttatttcccacttatttcatcatatacaaatactaacccatgcgaaaattatcaagcaaaaaagttcccggacccgtgg

SEQ ID NO: 422935 - DNA, 289 bp, Oryza sativa nipponbare
gcaataaaaaatcccaattttttgaaacgttcctgggggctggtgggaacatttgagcataaaaattcctggaactttccagccatacaagggggggggcctttgggggggcattttcacagaccatacttacaattgccacaactttgatagggattttggaaactaaaagttagataaggggtctgccccttacattttaacccttaaggggaatttttagattttcaccgcttagcccaaaatgggaagattttcaccaaggggggcctcataaattgatttgccg

SEQ ID NO: 422936 - DNA, 476 bp, Oryza sativa nipponbare
ttcaaacagcaggtgggtcgatattaagtatggctttgttctcaacaacataccacaagccgccctaatcaaccagcaaaatgcaattttcgcgaaattgcacagctgttgcatttctaaacgaccgaaaaaaactatagctgagacaccagataacaacagatactacaaattgctggaaacggttgtccccatcacagaaactgagagcgactactcagtaatgaaggtgccaaagctagatcagcttgttgctaaacagctacagacatcccagaaacaaatgactccaagataaaagctaaacgagcatgttctacaactccaaaggcacagtagttgtgtaaacatgcagctccactgtcgcgccagtttaatgtttagggtaacaagcttggatttgctgctccagctgaagcatagcctgaaacttgttacgaagatcatagaattcagtcctcaccaaatccaaagtc

SEQ ID NO: 422937 - DNA, 401 bp, Oryza sativa nipponbare
gacaggcaaaaatgcgctgtgatttcatctgatatttcacttaccttccatgccaaagggaagggtacacttgggaaggggcatgaacatttacaggtggtgaaccgcagttgatgaaccggctttacttttcactaaaaaaaaagaaccggctttatagatctctagaactgtataaacagagacgggacgggacgagatgttggtactcttgcagacttgctcagtgctcttcgaaaactggtccttgtcccggcagaagctggtgatattgctcagtgctcttcacagatattcacaatgaatatgaaatgtggcttgcgaaaagaagccaatgaacacagccccacatcgtcaaaagaagcctgcaagctgactactctgaatctaatctgaatctt

SEQ ID NO: 422938 - DNA, 360 bp, Oryza sativa nipponbare
tttcacttcaggccgggtgcttaaggtatcatcatatcataagcgaaacattgcactgcactaataaaattcaatacacaaccttggtacacgcgaaacaaggggggtaacattctccatgttatgctacccaataaagcaaggctaccaatatctggtgcccccaaacaggacaccagatatattccaaatctgggggcctgtacgctaccaatatccatatatgtaccaagaagaattgactgaagcctttgaaacatccgaaaggctgatggaacccattttagcacataatgagccactggaccaacttggcgggggactggcaccccaaaaatgactgattacaaatggtccaca

SEQ ID NO: 422939 - DNA, 258 bp, Oryza sativa nipponbare
ttagagaaaatttggtgcaggcatccaaaaataagatacaaaaacacatgttcacaaaaagccataaactttccctaccccccatggataaagcacttgatctaaggccaaaacatttttcatagttggaccatctaacattcaacacaatcatatccttactatttaaataacaccgtgcacacccactatgtctacatgtttagaggctacttaaaccgaaaagcctccgaactcattggccctgactcgtggttg

SEQ ID NO: 422940 - DNA, 374 bp, Oryza sativa nipponbare
ttttctttctgtgcgtggggtttttaatagggggggttttttttttttttttctttttccctaaaaaaaaaaccaaagggggttcaccgaaaaatctcagggttttttggttcctttcattttccctttaataaacatttaaagcttggtttggttctttggggcatggtctaccataaagcccctaacctgagcttcctttttgcccaaagaactggccaagggttgtttcattcatttgataataaacaaagcagtttccataataactgatatccacaatcctcaaagggttttttttgaaatccatttcccaaacatttgaagacacctttccgggtgggtctctgtggccgtttggccacccccctttt

SEQ ID NO: 422941 - DNA, 492 bp, Oryza sativa nipponbare
acattccaaatttctaatatgttttgtattgccattcacaaattctaaaagaatgtacatctaaatacaatttggaaatcacctgaaaaaagtaccgtgttacagtttcatcgtgtcaggaaataccatggttggaaccatcggctaatatcaattccaaacatcccataattttgtggtcgccacagacattccatgtatttattctaatgccaagctcctctttcctttgtctttgtacttaagtccccattcttgtggaaacaatcaaattgcactttcttatccttactgattaggaagaaataggcagatattgtgcgttcgcgattaattcaacttgcttaagagaagagtcagaagccagaagatggagattcaccttccattgaatgttcagaaaaatcggctgaaacatttcttcttccgtcaggcatcagctataagtaatttcgtctaaatttcctatgcaaccctcatgtgtttcatgta

SEQ ID NO: 422942 - DNA, 503 bp, Oryza sativa nipponbare
ttgaacttcacatagaaatggtattgaaatagggacataaatatatccaatattcatcctgagcattcaattttgtttttcatctaccatcagcataactctcctactttgtattattatttcgaagaaaacatccaatcttcctagctaagacaaataaaatgcagagaccaatatatctaatctactaccgcagcatgcctattacagatgtaatacatttttcctggtagctaacaggagggattgaagactgacacaggggtggatttaaaccaattctttacaaaatatcagctggggtttcggggccagtcgagcaaacgatttgagctacgtgcaactgcaactcatgcacatcatgagatcacagacctgatgtcagatacccgtggcgtatcctgcttgaaaacgtcagtatttccttgcctctgtcaacacattggatctcatgggcttcaatggaacttccagtcattattctgtgacattagcatttggga

SEQ ID NO: 422943 - DNA, 332 bp, Oryza sativa nipponbare
agagaggatttgtctgggattcatcaacaaatgcagctagcatcatgaattcacaatcaccaacagcagcataatggttcagggaggatttttctcagattcatcatcaacaacaactagcatcacaatctttcatcaacaacaacaactagcattctcagatctggttcgtatgcgtgctcaccagccggcgagcatgcttgcagcagcaacagcctcgcaccgctgctgtcacggaactcatccctgttgtcgtcgcggttgtcgtcattgtcgatgaggccctccgtcgtcacggttgtctttgaaatcaccaaggccccttccttgtt

SEQ ID NO: 422944 - DNA, 106 bp, Oryza sativa nipponbare
gtaccgtccggattccgggtcgaccacgcgtccgtccgcctcggcgtcgtccggcggcggcggacacgggtccggccccaagtgcgtttgcgcgcctgtgacgcac

SEQ ID NO: 422945 - DNA, 81 bp, Oryza sativa nipponbare
ccacgcgtccgcccacgcgtccgactaagttcaaataaaaaaaaaaaaaaaaaaaaaaaaaaaaaaaaaaaaaaaaaaaga

SEQ ID NO: 422946 - DNA, 112 bp, Oryza sativa nipponbare
ccacgcgtccgtggactcgtgggccgatggtggaggccaaggaaccagtggttcttatgaaccaaatcttagcctcctttgacggggccgtgctaattgtagaaaccaaggg

SEQ ID NO: 422947 - DNA, 330 bp, Oryza sativa nipponbare
ccacgcgtccgctaaacatattccttgtaatcggaatctgacttggtcaaataacgtcattgtcttaactgttggactctaaccgaagatgccatacctgatatatgctttccatgccatgtatggattgttccagaaaaggtctattatagcagtgcctcgctaaccatctaagagcagccaacaatgttgtatgtgaattctgagcctggtagactcctgttatattataatcatacgtcactattggaacaatctgtatatttctacattagaacttactgtggatctgaagccattaatgataacttgttgttttctgaatttttg

SEQ ID NO: 422948 - DNA, 199 bp, Oryza sativa nipponbare
ccacgcgtccgcagacacatccagttatcaattaactactagctataggagtcgtcctacaactatcagtgtgctgctaagcggctacatcttcttcagcgcattgtgaaggacaaatagcaggcatcacacgatttgctgatattggtcggtgagatttcggacgattcttgcggtccgggacgcgcttgtatgcgtg

SEQ ID NO: 422949 - DNA, 154 bp, Oryza sativa nipponbare
  unsure (1)..(154): unsure at all n locations
ccacgcgtccgcccacgcgtccgcccacgcgtccgcccacgcgtccgnggacgcgtgggcgccatggatggcatcgaaatcaagttgttgtaatatgatgatcattgcgaattccaggtgataaaacataaacttattattaaaattaaataaa

SEQ ID NO: 422950 - DNA, 277 bp, Oryza sativa nipponbare
ccacgcgtccgcccacgcgtccgccacgcgtccgtaatggattaatggatgtctcagtgtatgactcagaagataaaaaaaaaaaaatatataataaaaaataaaaaaaaaaaaaaaattttaataattaataaaaataaaaattaaataaaaattggggcggccgttttatatgatccaatcttactttcccttgcttgcaacctattatttttttttttgtgtcacttaaattcaattaactgtccgtttttttacaactttgttactggaaaaa

SEQ ID NO: 422951 - DNA, 367 bp, Oryza sativa nipponbare
ccacgcgtccggggggagacgtcggcggcggttggtggtgccgcggcggcgggtctgggcgacctgccggagctgtgcgcggcggaggtgctgctccggctcgacgcgccggagatctgccggctcgcgcggctcaaccacgcgttccgcggcgcggccggggcggattttgtgtgggaggccaagctgccggagaactaccggtatctgatgagcttcgtggagggcggcggcggcggcgactactggagggcattgcggcggctgcggtggcggccggctgggaagaatgagaactacccgaggctggctatgcctgtgcccctcgatggcggcttaaaggagttttgggttggagaagaaacaa

SEQ ID NO: 422952 - DNA, 94 bp, Oryza sativa nipponbare
cgacccacgcgtccgacacaacgcaccaatggcgctcgtctccgactcctcctccaccaccgccgtcgcggcgctccccggcgccgtcagggac

SEQ ID NO: 422953 - DNA, 150 bp, Oryza sativa nipponbare
ccacgcgtccgcccacgcgtacgccatctcctcctattaacaggcaagcgcgagaagagacaccttcatcgatacatgggcggcaccgcgaccgccatagctgggcttatgttcttggtcggcgggctagcaaggtagttatttattgtt

SEQ ID NO: 422954 - DNA, 139 bp, Oryza sativa nipponbare
  unsure (1)..(139): unsure at all n locations
tccgaattccgggtcgaccacgcgtccgtnatcacgttcgttgtcatgcactctgtcaccatcttcaaaggctggccgttcaaccctaaagacctgtatgcaaatgagcacaccgtatactgatagctatatttactga

SEQ ID NO: 422955 - DNA, 85 bp, Oryza sativa nipponbare
accgtccggattcccggtcgaccacgcgtccgtccacgcttacgcccacgcgtccgactacatgaacaggcactcaatggatgac

SEQ ID NO: 422956 - DNA, 358 bp, Oryza sativa nipponbare
ccacgcgtccgcaaagccaaagcaagaactagatcaagaagagagaagaagccaagataatccagcagaaataatttcagaaatctatagctagatagatcatagatgctgcctctgctgaacatgcaagctgaagctgctggtggcgatggtggtgatgcagagaagaagagtggcaacaacaagcagatgatggtggcggcgaaggtgtccatctccattctggtgatgtcgctgccggtgctctacgtctccttcctccgcatcccgccggcgacgctcttccgggacaccaccttctggttcctcatgtccaactccatcatcatcgtcatcgccggcgactccggcatgctct

SEQ ID NO: 422957 - DNA, 87 bp, Oryza sativa nipponbare
ccacgcgtccggctgaaaaaaaaagagaggccacgaagagagctcatctgctgcctctagcttacttggtgataaggaggaggaggt

SEQ ID NO: 422958 - DNA, 372 bp, Oryza sativa nipponbare
ccacgcgtccgggatgatgttagtttccaggtcttctgtgagcatcttcaaaggctggccgttcagtcctaaggacatgtatgcaaagttgtacaccgtatctgatagctatatttactgagtttggtaggtctgagttgtgggagatttctgctttccctttttttgacctcatgtgttcttattacatcgtgtcaggttttccgacatcagacaattttttcgggaaataatcttgaaagcatgtataagttgtccccataatattatttatccactatatctacttctttgaaagaactcaatgcaatgaagggctgctggtctagaggatccaagtttacatacacggtctcacaccgtgttatataa

SEQ ID NO: 422959 - DNA, 272 bp, Oryza sativa nipponbare
  unsure (1)..(272): unsure at all n locations
gcgtccacgcgtccgcccaatatntgagttattacgcgtgcaagggagccttcgcgaaagcctgagctggcagctaatcgggtaaagagccttgtgccaaaggcactgaggtcatgttnttcagcagatgctccaataaatagggatttagacattgaatctacagttgcaggagcatgatcacaaatacatcccacacgaaaagagctgcggaatgtataccctatcgaacctgccaacaataaaggccgggtagagctgcagaggtacaa

SEQ ID NO: 422960 - DNA, 294 bp, Oryza sativa nipponbare
gggggtggagtaacactaatttgggatagttttttttttttttattacaaaatattttattgaatcttaaaccaagacggaaatggggtaaaattacacacgaacactgttagtacaacaaatttttttccttcaccaggaacataaccaacggcaaaactggggttgggctcttatggaacatcttccccagaatgtaggttatcaaattccactgcagtttgtctacggatagagtttggttactcctttaaaacatcttccctaagggggtgaccaaatgacactgcaata

SEQ ID NO: 422961 - DNA, 352 bp, Oryza sativa nipponbare
taaaaccttcaattccacggggggtacaataaagactacatgcttacactcttcatagccagaaatggggatataccgggaccgacggagtacatgttaaacgacaaaaaaaaaggagaaagagcggtcaccatagtgccacggaaagataatatcctagaccggtggtcaggactcgaataaatccaatattgaacaaacctcaaaccatgctgcatccccgtgtagtacacaacaccaactcgatcatgcataataggccacataacgaaggaacaccgggaccaaatacaacgaacttgagggcgacaaatccattcaaccactatgaaccacagcttagcggccgtac

SEQ ID NO: 422962 - DNA, 358 bp, Oryza sativa nipponbare
aggacaaaaactctcgacaattcatatcatttgccttggtactggtatctggtacagagttacataattggtgcctcggtggcatgacccagtagtagcattgccgcatagctctccatttccctaatttataacttaatgttactggagaaacacaaggttttgacaatttcaaaatctctttggcagttcaaagagcaaaccatttagtcgtcggcctatgttgcttggctgggtaagtcgtcagctcaaccattatataattgccgaagttttgtttaagagttagcacccctagaatagaatcctttaacacggatctacctcaaacagcccttttacttgccgaagttgtgtg

SEQ ID NO: 422963 - DNA, 207 bp, Oryza sativa nipponbare
ggaaaaaaaaaaaataaaaaaattttttttaaaaaatttatttagggaaaaaaaaatttttaaaaaaaaaaatcctgggttaaaaaagggaacaaaaaaaaaaattttaatttttctaaagggtaaaaaaaaaaaaaaaaaagggggcgcccctttttttttttttttttggaaagaaaaaaaatttaaaaggctcaaaaatagggg

SEQ ID NO: 422964 - DNA, 364 bp, Oryza sativa nipponbare
actgcgaactaaatttactgagtaggcatgggccagacatacattcatcatgatatgacgacagtctagttcatgtacaatgtgaactttccaaagatgttaatgcagaatatatagccctagctattaattaaacttgcaataaatgcaaatatatacattattcaaagaggctgactcacgagtctaaaagaggatgctggacaacacgattgacacaagacgaaaacggcatctagctctccatggtagatacaaggaagtagctttggtgcaaaacgctgtccgaagtgatcttgaataaagcctcatctgtatgtgggagtgtaatcaaaccgaaggccggaatcgatacgaatgaact

SEQ ID NO: 422965 - DNA, 384 bp, Oryza sativa nipponbare
caagcaaaaaatctaacggcgtcatttaggcagaaccacctttctacatcatcatagtcatagcacaagaactcgacgaattcagaagaaacattggcagctacacctacagaatgaaaaatgaaaagaaaacacgatctaatatattacaagggatccttggatatatcctaatagcattgtttcatccggagcaccgagtcgcgacttgtggcgaaaacgggtgccatttccatgcttatgccattactgcttcgcctgaaaaaatgagatgttttttttttggttagagattcacacttatgttcatgaattggctcttttgtgaaaaatgtgatttggtaaaacatgtgcggaaaatctacctgagagtagatgaaagtt

SEQ ID NO: 422966 - DNA, 121 bp, Oryza sativa nipponbare
ccacccacaaatccgaaattgaaaatttaaaaacacactttgttataaacatcaaaatgggccccaagatggttggactatcatatacaaaaacaccatttttattctttgtttacattaa

SEQ ID NO: 422967 - DNA, 365 bp, Oryza sativa nipponbare
ttgctacaaaacagagcggcggacataaacactcgtacagtgccatgcatgcatacaaatacatacaggcactccaattatcttacaaccattcacactataacactgaaaggcccaaacaaaactgacaacagacgcatgcatcgaacatatcatatgcatgaccgaccatagacacacatagcaaagtggacaacgtaatcaagaacaattaatacagcagatgatcgatctatatgatcaaatgaacatagttgccatcataacgctcgcacgctggtgctcctgaacgagcaaagcgcctaggcggacttgcctgacagcaccagattgtgggacgccgacgacaagaacacggtgatcac

SEQ ID NO: 422968 - DNA, 241 bp, Oryza sativa nipponbare
ggttggtgtttttatttattttttattttttttattttttttatttttttttttatatatttattttatttttttttttataaatttttttattataattttatttataagaggataaaaaaaaaaataataattaatttaattttttaaaaaaaacaataaataatttttaaaaaatgaataaataattataataaaataataatcacttatttaaagatataaaaaaaaatttttgagg

SEQ ID NO: 422969 - DNA, 337 bp, Oryza sativa nipponbare
aaccaaaaaccaaccattttttttattttccacaaaattataaaaaattctctaaaaacaaattttgggagtataaaacccgaactttttttttaaatatcttcacccaaaaataattgtaatacttttaaaaaaaaacccccccgtaagggagggaaaaaatttttccatattttttaaaaacaaagcccatttaaaaggtcaataaccaaactttaaaaaaaaaaaatatagcattttatattttggtatataataaaaattgcccaaaaaaaaatttcttacttttattataggcagaaattcaacaacccgaagcttaaacttaacttaaatg

SEQ ID NO: 422970 - DNA, 78 bp, Oryza sativa nipponbare
aaactgagaggcaaacccccaaacatccattaaaccattaccgaccccttgccaacccccgggccaacccctggttca

SEQ ID NO: 422971 - DNA, 329 bp, Oryza sativa nipponbare
ggatagaaagaaaagggtttatttttttgtagcatccaaacaatacaaaactttcccattctttatttttaagggaaaaccgaatgcaaaactggcacacaaattattttttttccgggttatttaaaagcctagcatgatcttatttgaagctccagttttccattggacaaaaattgcagttttcagttagaccaaaatagtcagcttttttataccctgaaaaagctcaaacagggcaacttctgtcaagtaggagctgactaataaaggggctggggcattttaggatttcaggaaaatgacgggacatttttaccttttttttg

SEQ ID NO: 422972 - DNA, 422 bp, Oryza sativa nipponbare
ttttttttttttttgtttttttttttttttttttttttttttttttttttttttttttttttttttttttttttttttttttttttttttttttttttttttttttttttttttttttttttttaagaaaaaaatatttttgggtggaaattttaaaaaaaaaaaaaaaaatttttttttaaaaaatttttttaaaaaaaaaaaaatttttaaaaaatattttaaaaaatttattataaaagtttttataaaaaaatattaaaaattttttttttttttaaaaaaaatttttttttaaaaatatttttttggaaattaaaaaaaggggtttgttttatttaataaattttaaaaaaaaaaaaattttttttttttaattgaaaaaaaattttgtttataaaaaattttaaaaagggtttaat

SEQ ID NO: 422973 - DNA, 377 bp, Oryza sativa nipponbare
tattatgtgcaaacttagggggggtgtttaatcattaaaagaaaaacgcaatttttttctaaaagcataacccacaggttccatgaccaggtaaatgtacaaaactcactgaatggacacctgggtttgatactacacgatgccaaacataaaccactgggaaatattttttaacacgttaaccaaccaacaaacgggggataaattattgcactctatattatgtgatacgcaagctgttacaaggtctcattactgaaccaaatagggggttaacttagtcccaaatgaccaaaatagcttattggggacttagcaaccctgctcgatcagataattgccaagccttttcaaaatcatgttgcactggcctgggg

SEQ ID NO: 422974 - DNA, 474 bp, Oryza sativa nipponbare
ttttttttttttttggttgtgtttttttttttttttttttttttttttttttttttttttttttttagaacccctgggggaaccccccggaaaacccctgccgaaaccccaaaaaaccaaaccggaccccaaaggcagaccaacttacccaaaaggaaaaaagaaaaaaactgggcaaaaaaaaaaacaaaactcctcccacaagaaaaaaaaaatcccctaaaaaatccaaaaaaaaaaaaacccggaagaaaaaaaaaaaaaccccacgggcccaaaaaagagaaccaacaaaaaaaaatttcctggccccaaaaacccccttcaaagaaaaaaaaaaaattcgcccacccccaaaaataaaaacacaaacccccgggaaaaagggggttttcaaaatgaaccccacaaaaagtttttttttttaaaaagaaaaaacaacaaaaagagtataaacatttaccccctggcccc

SEQ ID NO: 422975 - DNA, 331 bp, Oryza sativa nipponbare
acaagtttacaattgcacatacgcgggatgaaatcgaattaattaagccaacacaaacacgtacgtacacgtgcagcaaaagtttcatgcagctgcactaccgttctcttgtagcatacagaatttgaagccatggatctcatgtcatacgtcacagctacgcaaagaagcagctatatcgatcaggtccgcttgacggggtcgaagttggagacggggactactgcgccgtccatggagacgagcacgactccgacggacgcgacgctgatcaagaaggacttgatcgactgcaacaggtcggacactttgtcgaacaagtgctttaccg

SEQ ID NO: 422976 - DNA, 353 bp, Oryza sativa nipponbare
ggatgggggggggggctctatttctaatacaactgaacatccaatacatgtcaacaagggtgttcacaaatttcacctaaaaacacgaactaccatcttaattctccagtcaaaatttggctcggtatatgcaagctacattcagggaaccccagtcagcccactacactatggatgttgatgagatcagcagtcaggcttcagcagcaacacatttagggctctgcttcatcattcaatttttctttggctgtatccttgggtttcctcaaacagcggccctcaaatagcacttcgtacaggagccttttactcccccatttccaccaaaaggggcctggccctcctgcatg

SEQ ID NO: 422977 - DNA, 426 bp, Oryza sativa nipponbare
  unsure (1)..(426): unsure at all n locations
tttttttttttttttttttttttgttttttttttttttttttttttttttttttttttttttttttttttttttttttttttttttttttttttttttttttttttttttttttttttttttttttttttttttttttttttaaaaaaaaaaaaattttttttaaaaaaaattttttttttttnttattttttaaatattttttttttttttaaaaaaaaatttttttaaaaagtnnnnaaacntttaaaatttttatttttttttaaaaaaaaaaaaatttttttaatttaaattttttttaaaaaattttaaattgtaaaaaaaaaaaaaaaaaaaattttttttttaaaaaaaaaaaaaatattttaanttttttttttcttttgaaaaaaaaaaaaaaaatttttttaattataatattatt

SEQ ID NO: 422978 - DNA, 394 bp, Oryza sativa nipponbare
aaaatattccgggaggggatttttataatagtgcaacttttcccaatctttttttttatcaattccccgaagaaaaaattttcccaaaattccccctaggattttcaaattcccctgggggcccaaaagggtttaaattatttatttattcaattttgttccacttgtttccctttacattttttagaaaaaaaatccaaccttgtttctaaattccccaagtttcgacttttcccaaaaaaaatcttttttccactctaaaacaaaaattttttttaaaaaaaatttctaaaaatttttcggcgtggggggcccccccttttttttctttttggcccgggggaaaaaggttaaataaaccccctttttggaaaagggggggggttccccccca

SEQ ID NO: 422979 - DNA, 439 bp, Oryza sativa nipponbare
tccgttgcagttcgccggagcttctcctccctcacggcagcgatgctcttctcctgcaccaccggcggcgtcatcatcagcgcgtggtgcgacgagtgcgacctgcttcgacgacggcgacgcgccatcgtcgtcgtcctctccgcctcactgctcgccgtcagccttgtcggccttgctgctgcctgcaccacctcgccgccgtagtacggcaccaacatcatcgtcgactcctcctccgccggctcgccggcgacgacaacaccgtcatcgtcttcttggccacctctcggcggcgccaccaccaatgcatggctgaggctgacatcggtgacaaccatggcttgaagctccgccgagcttgaggcgggcctagcggcgaagagagcatgccgggagtcgcggcgatgacgatgatgatggagtgggacatgaggaa

SEQ ID NO: 422980 - DNA, 372 bp, Oryza sativa nipponbare
aaaaaaccaccttaactggctcgccatgtattatgttctcaggttcaaacaatacaatctaattgatcatactaatctgcatatttacatatgcactcaaatgtgcccgcatcaaaactcggtgctgcatttagttattagaaagctatatttcaccgatccaacaccgctacgacaacaatgtaattgtgacattttgacagtgtcgatgactcatgtgcctgttgcaaaagtctcctcgaaaccacttaagtagtccttggtcttaatattggaatactgcctcagacttttcttatagagcaccacctgccgtgccatctacagctctttctccggatccagcgcgtaaaacattaccaacaacactct

SEQ ID NO: 422981 - DNA, 324 bp, Oryza sativa nipponbare
gggaacaaaaaagtaaattttttaattgaattcccagggttaaacccttttgacatgctttcagggtcaaaccccaaacattctaaaaaaagctccccccgcccaaccccaaagagaaccgatttttaaaaaaaagggactggccaaaccaatgatccctttttgaaaaccaaaagtccaaaaaacctttactggtttccgcacattttaccagacacaatcaggtaaacttttagctttcctatgaaaccccctccaagtcctaaccaaaagccacggggaaacctccaagggaacctcaaagggtcttgaattgccctgatt

SEQ ID NO: 422982 - DNA, 178 bp, Oryza sativa nipponbare
  unsure (1)..(178): unsure at all n locations
aaagctggccagccaggcgtaccgatcctcaacaaccgggtcgacccatgcttgcgtcatcatcgactngtacttcagcagctgattgaattatcataatcaaattagacctgatctgattcagctgcattaagtaaattagacttgaacgatcagagctttgcctgtaagtgggact

SEQ ID NO: 422983 - DNA, 340 bp, Oryza sativa nipponbare
tccaccagccgtaccgcacccgaactacacaagagacccacgcgagagacaacgcgtcccaaacatgaatagaaaagagagagagaggtcccatacagtatctctgaatagaagcctgctgctatcatcatctatatctgacttaagaggagcacatctctccatatgaacccaagctatgcaggaagtaatggctgccaacgtgagcaacgttgcagggagcagcagatccagactcaatgaacattcttgggacgggctgaaccacatggatgggcgcctagtcacactagctactagaggaggaggcgcactaacccacattgtgcactaaaagaaa

SEQ ID NO: 422984 - DNA, 265 bp, Oryza sativa nipponbare
gaccactcagggaagcatggacagccagcacgtaccggtcccgcattttccgaaacgacccacgcaccctcgtctccctcgctgccaaatgcggcggggacgccttgccgtgtcgtgggattcgtctcctgcgccgtctgcgccttcgccgccacgtgtgtcctgcactggctgtcgcaccggaggcccggcgtgggggaggtattggtggaacaggaggggtggtctgtgcattgctgccgccatttgtgggctcatgtgggta

SEQ ID NO: 422985 - DNA, 162 bp, Oryza sativa nipponbare
ccgaatcgacccacgcctgcgacagtaaggcacaaagacaagagggcgatgggatggcattggtcacacagcctggcttctgcagggctcggactgcactttctattgtgctcgaagttgctgatgaacgacgtgttgatactgcaccaattcttcggggcc

SEQ ID NO: 422986 - DNA, 168 bp, Oryza sativa nipponbare
taccggaccggaataccctgactgacaccacgcttacgtagacacggagacgctcactgatcgaagctgacctagctgcgtggatcgatcactccatggcgctagacagatatgagggcgttggaacttcaaggcggcggccgccgtgacggtgatggcgatggcggc

SEQ ID NO: 422987 - DNA, 327 bp, Oryza sativa nipponbare
gtccccctgccgtaccgcacccgtattaccggctcgtcctacgcttcctcccacgcttccgatccacccatgctctgatccctgatcctctcgcgtgcgccgccgtgacatatctacggccggctctcccgtttggccttgatctctccaccggacgctctcgtccgcgggctctaggcggacaccaccggctgcgggctctcgacgccaggcagatcccaccgcgcgcgtaagtttcacccggacttgggggaggccaaggtctacacctttcttggacgtgaggtggatgaggctcgccaccggcgtggagtgcgttcacagaac

SEQ ID NO: 422988 - DNA, 382 bp, Oryza sativa nipponbare
gacccacgcgtcacggcatgtgtctcacacaaccgagagcactgaacgcatgaagtatattgttggtggacagagtttacttcgaaaaaaaaaaaaaaaaaaaaaaaaaaaaaaaaaacgactatggctaaaacgagccaaaaagccaaaaacaacccgaaaacaacataacttatgcaaaaagaaagggcaaaaaaagaaaaaaaaaaaaaaaagggggggggccgtttaaaaggaccaaagttaccgaacagggggtcggaaggcaatatgttttctaaggggcaacaaaaattaaatcaacgggcgggggtttaaaaacggcgaaacgggaaaaacccgggcgttaccaaattaaaaggcctggaaaaaaatccccttt

SEQ ID NO: 422989 - DNA, 262 bp, Oryza sativa nipponbare
cgccgattccgtcaccaccgtcggagatcagctgaggacgcgtgagcttggcgcggtgggaagtgtgtggaggccatcggcactgttcatgtcggtcctacggtggacatcatgcagggcaccaggccggcgatgtacaagctagcagctgcgtaacagggtgctgttcagggtgtacacagaggaaggactcaaggtgcatataatgatggcggtgcacgcctgcaaaacgaacgtggtggacgccgttaccatcataatg

SEQ ID NO: 422990 - DNA, 424 bp, Oryza sativa nipponbare
  unsure (1)..(424): unsure at all n locations
acccacgcgtccgccacgcgtccgcgccacgcgtcctctgacgcgtgggcgcagacaagggcagttcctggtcttgatctgccagcaagaacccctcntttcttggcaaatccaactggtgagtcaagcaaccatgggaaaaatcttgcacctgcaaacgcttcttcctcggcaatatcatcagggcagccatctgagagattgacgtacactgggcagtcgatattctttggcgggccaattctgagcacctcaggtacgaacgctcagaggagcgaagcgggcacaagagcacgacctgatggaagtagtgatcctcctaatgccttccagcgtgatacccggggcgagagagcacgcacgggctccttcccggtgtttgcttctgggacttttcagaagaacccaccatttgacaagggat

SEQ ID NO: 422991 - DNA, 464 bp, Oryza sativa nipponbare
tcccacgcgtccgccaccgctttggggtgggcatggggcctctcgcccgaacccgcagccgccaatacacacgcgagaagccgcgccagcttccagaagcttccccagggagactggtcgctctcactcatgagcgtctgaccggccgtcgccatgggttgcgccggatccacacctaaaaccgatgataacagcatgaagcttaaaaagcccccgccttggtagcacaatcaagcaataacaacaacacaactgaaacagatgcgtgatgaattctgggacactgctccacattatggagggcagaaagagatttgggatgcgcttcgagctgctgcaaaagctgagttatctgttgcacaaacgatagtggacagtgccggaatcattgtatcaaattctgacatgacaatttgctacgatgaaagaggtgccaaatatgaattaccaaagtatgttctgag

SEQ ID NO: 422992 - DNA, 446 bp, Oryza sativa nipponbare
acgccccacgcgtccgtaacggtgcaacaaagatgccaagaaaaaacgttgcagattggactagaactacgctcctatcatctggtgtcaggtcaacaattcagtcagcattcggtgtctaaatagaggcgccctaatgtcacatacagtggtgtgcaatttatgaatcagatgatgcattctgcttttgtttactttgcctagttgcttattgaccctatacatctttgtgtcccctgatatccttggtatcgtttgattcactgtgacataagattgagggtcaagataggcacactactcaacctacaagcccttgtggatcttggattgtataggcttggggacctggtttttaagcctcaaaggtgggggggttttggctaaagtcccccttaatttttgcaattgcctagcgctcgctcctgggtttttttttttttttt

SEQ ID NO: 422993 - DNA, 305 bp, Oryza sativa nipponbare
  unsure (1)..(305): unsure at all n locations
ccgtgattattggaccccatggccaatgctcgggctagccggttcaagatgcctaagggaggggagcccnaagggggagggggggagctgnntattcaagtgctgtcgtttnnnctggagcatggagtaacacggtgaacattctggtgggncangctccagtctatgaggtggctgagggttattgcctgtcagcatccctgctctccattatcaacaaatgggcagtcatgaaagggccataccctggagcatnagcagcgtcacggcactccactagtgctggcggagctctgctgatgggg

SEQ ID NO: 422994 - DNA, 202 bp, Oryza sativa nipponbare
  unsure (1)..(202): unsure at all n locations
agaacggatgatgaaacacatcacggacagtgaggggtttcttaattttgttggtggggtctcgnaataaaaatgattttattgtnnnctatcccggnctaaacctgtatgttgcgacgaaaacgtnnctattggagacttggagaanataatttgacatttgacacttctccaaatataatatatttgtaactatttaaat

SEQ ID NO: 422995 - DNA, 332 bp, Oryza sativa nipponbare
  unsure (1)..(332): unsure at all n locations
ggcccggaccccantccacctaggccccctccacccgttctgaaggctggctctgctgccctgcagcgcctcgtcgtcgacgtcgtcggcggcggcttctatacctgcnggagcggcgccggcggcngtaggactcgcaacagaggtaggntttgcccccccgtagaaggaggtggggagcctgagcgcggnatggctggcggaggagcggaccaaggtggtcggcaccttccctcccaagaagaagggatggaccggctacgtcgagaaggacaccgccggccaaaccaacatctactccgacgagccgacggtgtacgtggcggagagcg

SEQ ID NO: 422996 - DNA, 275 bp, Oryza sativa nipponbare
  unsure (1)..(275): unsure at all n locations
cacctaaaaaaaggacaggttccacagggagaccaacgattattttgttgatgggggggtggcctaccaatcaacaattaaggtncatgtctgatatcnacgttcagcttacatctggctttgatccatttgctgaggcatatgctgaggactcctagcgctggccctggagcaaaggattatgtgcatgtgcgcatccagcanctgatcggcagaaagagtctaactattgttcatgtttttaagaaggagtacagttacaacatgatccttaa

SEQ ID NO: 422997 - DNA, 318 bp, Oryza sativa nipponbare
  unsure (1)..(318): unsure at all n locations
tcttcttgcgagggaggtttatatttgggcctggtgtgagattgaggttggtgacgtaggtcctcattgttgctccagtggtgnccttctgcgngttggtcgccagacacctcattgttgactntcccggtgattggggtatctcggtgatggttgtggtggttgtcttcaccgtttatgatttgacgctgcttctccttacttctggtagagatgctggtgtnatgccttgtatcgctcatcctcctgagcctgatggctttgatgggagcaannttggggnntgttcagactccacaacagttgcgtctgcctcgg

SEQ ID NO: 422998 - DNA, 290 bp, Oryza sativa nipponbare
  unsure (1)..(290): unsure at all n locations
cacgcgtccgctatattacaaaccattcctatagatttaactgcttatcgctagtccagcctagtacttgtataaaaaaannattcattttttttatatattttattttanngnnncaggacaaattcacatcctcttcagctcctgggattaaggcagatttttttttttatggtgattatctatatgaagttcgttttatctcataaactacttatgaaactcacagtactcgcactttacttttatgataatataccagaaaaatgttcttttcccattttccacta

SEQ ID NO: 422999 - DNA, 72 bp, Oryza sativa nipponbare
cacgcgcccgggaacaaaggagttgatgctgaccacaacgttgtattgctatcctaacctccacccaacccc

SEQ ID NO: 423000 - DNA, 313 bp, Oryza sativa nipponbare
  unsure (1)..(313): unsure at all n locations
tnttntnttcccacgcgtccgcccacgcgtccggcaccaaccaaccgcgcgtcgaagcttctgggccacgccgccacaaaagccgaagcgnnnnggaaaaatttatttggatttctattattnnnnnntccacctcctccacgtcccctctcctcctcgcctctcgcctccgcggaggccccggctgcggctgcggcggcgcccctctcctccaccggacgcgccgcggcttcctcgcgccgagcaccaccaccacccagaccacgaggaccagtttcgcggcgatgaactggctccggaagctggggccggg

SEQ ID NO: 423001 - DNA, 383 bp, Oryza sativa nipponbare
  unsure (1)..(383): unsure at all n locations
ccgggaacaaaggagttgatgctgaccagaacgttgtattgatatcagttcctactgttcttggaaatggggtancaccgtgtggaaagcacgtgagacatgttntnngggaggaacagaacctttcagtttgtgggaaggactagataggaaaagcgnncagtatcgaacgctgaaagaagaacgctctgaggtgatgtggaaagccgcggagcttgcccttggtccaagatttagcagagaaaaatgcgatgtgaagctggttggatcaccattaacacacaagaggttcctccgaagnnnnngaggcccctatgggccagccataaaaagctggggaggccactttccctgggcaggcaacacctatccgccaactattc

SEQ ID NO: 423002 - DNA, 475 bp, Oryza sativa nipponbare
cgacccgcgcgttcgcccacgcgtccgtggacgcgtgggatttttgccagctcttagcaagaccttttcagctaagaagagggaaagcaagcttcagaaagcatgggatggaacaaaagttatttataatatagcatcatggagtgcaactgctattggcatctaccagaatccagcaattctaaaagcagcaactgctgccttctggacttcctgccgtgtagcatccaagtttttgtgaatagtccatggctggtcgttgtggtgctgtgtacattgtgtgactacggcaacgatgttgcttccccgtgccatctgtcaaggggaaaatacttttgccaaaacattgtagtacactcaattatatgatgatgtaattctattgagatccttcaccacaggttcacaggttgattgacagttatttcatgtgtcaggaaagatttcagcttaaaccacattttggtatgaacat

SEQ ID NO: 423003 - DNA, 476 bp, Oryza sativa nipponbare
cggacgcgtgggaaaatgaatcaccatgcatgtcatttttatatccaggttcatctaatattgttcctactccaaaatcgccagtacatcgctgctatgttgattttgtttctttacatgatataataatggatcacaatgtttaactgcagtactactgttgcttaccagtccctagttttaccgcgctgcttatggtcttttttccaggtgactgctgttctcctgatcagagactaattaaccctttctacttatttgcaccatgtaggtacactgcctttataccgctgtatccaattggagtaggcccaggagaaatgtggactatgtaccaagctctcccatttgtgaaggagaggaaactctactctggcttctttgggaagttctccatgagctaccattccttcctagtggtaggtcaagccatagcctgtgaatgtctgatgaaactgaaacatttttttcagata

SEQ ID NO: 423004 - DNA, 462 bp, Oryza sativa nipponbare
cgccgcggtaccggtccgggtccaggtcgggccacgcgcacgcgtccgaacattttctgcaccgataaaaaaaatgcctggggcgacgccgctcttgcgacggcggcggaggacccgacgccctcgggcaaggcggcgctggacggcggctcatcaatacgtggtggcggcggtggtgcggaggcgaagcggcgaggtggtgcggcggcgcgtggcggcaacggctcagcggtgcgtggcagcagcggcggcggtgcggaggtgaagcggcgaggtggtgcggcggcgcgtggctgcgagcggcggcggcacggcgtggagttctcaacggcgcgcggcggtgctgcggtgcggcggctcgactcatcggtgaggaggcgaggaggaggtgaacggcggcgccgcggcctccatccccgaccgccgggggccacctccatcccccaactgacgggcgccacc

SEQ ID NO: 423005 - DNA, 381 bp, Oryza sativa nipponbare
cggaattgcagagtcgggctagacgtacgcgtacgcgagcctaggccaaggagggcatgtacgataggaactacgggacctgctcgaaacaaggagggtcaagacagggaacctgatgttgctgatgctacatgatacagctactggtataatggtagtacctttaggtcactggagccagtgggttagcacaactgccggatgagatcgatggacaaacaataaactcttctgaatgaagtaatagagaccatgagaacatacacacgcgaataagggatggaattacatgaatattggataaagcggcctatatacatacaacctggcctatcttatgaataacaccatgtgcacacgaattatgaacatacctatgtg

SEQ ID NO: 423006 - DNA, 371 bp, Oryza sativa nipponbare
cgaacaacaacacaaacacagacggacagagcacacacagcaacacagagggccccccccgcgagggcggcacgcggacccaccgacgccccccaacaggggcacaagcgcaccgacgccacgcccggccgccggcgggaccggaacgccagcagcggcaacgagaggaacggcggcaggaccaggcgcagacggcaagcgcccacggaaggcagcacgacatacgagaccaacatgccaccaggagcaccgacaccggggaaggacgcgcccgaaggcaggacacagtaccgcgcgcccagagccaaggcgggcgcccgagccagggaggagcaaccaagaggcgcaacacggacagaccagagcagcaa

SEQ ID NO: 423007 - DNA, 333 bp, Oryza sativa nipponbare
  unsure (1)..(333): unsure at all n locations
aggccaccggnnnccggaattgcccgggntcgagcccacgcccgtccgccacgccgtcccgcgacgaggcggtcggcgtctgcgtaccgacgagggcaggaggggactacgnntcgtcatcagagcgacgccgcgcctctnntcacctccaccgtcatgaggcgcgcctcctggcgccgccccaacgtgaagcntgttcaacgctcgtcgccgtcgaggaccctcatcagtcaaggagaggccagcgtcaggcgagcgtggtcacacaactgggcgctggtgtccgatgaactcacgacacgcaggtcgtgcatggaccgccaaccgtgatgg

SEQ ID NO: 423008 - DNA, 404 bp, Oryza sativa nipponbare
  unsure (1)..(404): unsure at all n locations
gtcgacccacgcccgtccgctccacgtnnngtccgcgtacggaccgactnggcatgnnaaacaaatgnnngcgtggcannngttcgacccgtcggcgagggtgcggnncgagcctacncnntgatcannggttcncnnacttcnntgtgacannntcgtgaggcangcnngtgcnnctggccccgccttccaaccatgaacccgcctatgnnntcgacagcntcnncaacgcngnnattcaagaaaatctcgacnnctctnnccgccattngnngcaatggcaccgccctggcgnnntcccgtattacccagagacttcnngtgctggctgcntagcactttccatccggcaagggctcgccgtctacccgttgggtcgaccgtcgcaagaagatcaacgacac

SEQ ID NO: 423009 - DNA, 113 bp, Oryza sativa nipponbare
  unsure (1)..(113): unsure at all n locations
tcccggtcgacccacctccgaaacctctccctctcctcgcacggagttcggtggccgcaacgccgcgccgcgatgcgtcccgttnctctctcntccttnctctccttccctcc

SEQ ID NO: 423010 - DNA, 325 bp, Oryza sativa nipponbare
  unsure (1)..(325): unsure at all n locations
ggaaggnccgggacgacccacgcgnccgcgccaanangcncgccgccgccgccnccgncaagcncnccacggccgggaccgccacggcgcccaagagggcannanncaagccccnccaccncccnccccncnncgccgccgccgccgccgccgccgggccacgnccccncncccncncggcgcgcccccngnaccggcagcaggacccgnnannccgggcgncgcgcgacgcgncaccggcgccgccgccgccgnccgccaccgccgacggcgcccggccggnggaggcngcaccggcgggcgcggagccggaggagacaggcaa

SEQ ID NO: 423011 - DNA, 397 bp, Oryza sativa nipponbare
  unsure (1)..(397): unsure at all n locations
gacccagcgnccgggaaaaaangggggaggaccgcgactgcaggacaacacaaagcaaacagcggccggaggcaangaagaaagaacgcaaaggccagagagggacagccaangaaaggaggacaaagacaaggccaggaggaaggggaggaccgacaaaccagcaaggaacaaaactngaagggaacgagaaggggggcagaccaaaaagganaccgagcgccagncgcacaagcaaggaaggagggnggagaagcaaaggcgnacatgccagggacggagcaggaccacggacaggggaaacnaggagacaccagaagggngggaacngcnngaagggcagacaaacccgggagcaagcggaaaaaggaagcangagaaaacacggaaagaaacg

SEQ ID NO: 423012 - DNA, 284 bp, Oryza sativa nipponbare
tttatttcctatcgagcacccacaaagtgctgcgcttcaagaggcctattcaacccccatccttgcacttgattttcttgctgataggcctccataaaagaagtttgaatggcctaataggcttgtgtcgaactactggtcgctggtgtcctgtgttggcttgtttggagtgtttatctacctgattgcaagccctttaaattccatcgtgtcaaaagcatgcaagttgaggctttcgtaatacttgtctaccatatataacgctgtcgtttgtccttttttat

SEQ ID NO: 423013 - DNA, 52 bp, Oryza sativa nipponbare
  unsure (1)..(52): unsure at all n locations
gggaaaaaaanccnaanggagcaaaacanaaaacacnanggcagngccccag

SEQ ID NO: 423014 - DNA, 499 bp, Oryza sativa nipponbare
cggtccggaatgaccggactgcgacccggttatgacgatgcccgtggttgtgcaaacctcgaagtaattataagtgcatgatgcaaacaatgtgtgagagcatgatgacatagctactgtccagactgtaggagcagttgtcatcaacacaaagacattggtctgccaaccatcattatgatcatgtccattcatgcatattcaggctatatcttgttaggccgtggcatgaattggtgatgagcatgatgagtaaattgactgaaaatgtgctcatgttggtcactcacgagcgaatatagcggatcgagatgcgacatgctttacacgaattcttgagctcacgattggtgcaattggcttgtctgaagtggaggctgatgcaaaacctgaggagccgataaagaagtcacaatccacttttcttaaggctttgctggaatctccaaaggttgatgtcgctggagcattgaaaaaatggcttaatgatggcaataca

SEQ ID NO: 423015 - DNA, 153 bp, Oryza sativa nipponbare
ccatattgcagctgtcacatatcactatccttgtgtcagtctgtctcgggaaagagcatcaataaaattcttggaacgctcccctcggttgaaaacaaaaaaagatcaaacaacaaaaccaaaaagcataataacccaatcaaccggcccccg

SEQ ID NO: 423016 - DNA, 98 bp, Oryza sativa nipponbare
cccacgcgcgcgtgcacgcacgtgttgactcagacgcgtgtgaccataactcagagtgactgtcatgattcgcgatgcagagtcagactggaggatgg

SEQ ID NO: 423017 - DNA, 352 bp, Oryza sativa nipponbare
  unsure (1)..(352): unsure at all n locations
ttggcccaccccttccgcaccccttccgttacttgaccaaacttccctacttatatttcccaacttccccatccagtccttaagctttatattgccgcttttaaccggtaaggggtggtggcggtgattgtggttgccctttttttttgnnttttctttttttatnttttatattttattttttatntgctggcgaggagagcttcttgccacctgcgtgggtcttgtgtgctctatgcctattcaatggcttctgatttgtgttccctcatggcattgagacaactttacatgctttattcattcaaaatattatgcttttcctccctttctcaagatcattctcatttga

SEQ ID NO: 423018 - DNA, 408 bp, Oryza sativa nipponbare
ccgggactgaatggccggaccgacgcatgcgtagcctgaactaaggaaggcttgtaataatttattggattttgataatttattcgtgcaatatgggtcgcggttctgttgatgtggcaatcaaagagatggaggctttatgtatcggacaaaatcaagaaaccaaagaggaagtcggttttgaaacacaggaggcctcattaaaagcaagcaaagttgcagatagcaaaggagcttcgtactcaccaccagaaaatgatgatgatgcagaagtggactatccgtctcaagatggagcacaagtaatagctgccaagaagaaaaagaagaaaagcatagcgaaaaagaagaatggactctttttatcagacagatccttcatcgatcccttttgatgaactctttcca

SEQ ID NO: 423019 - DNA, 67 bp, Oryza sativa nipponbare
ggcgggggctaaagtagacttcacttgcccttgcagggggccttttgagcgatcgagtcctgctccg

SEQ ID NO: 423020 - DNA, 76 bp, Oryza sativa nipponbare
ccgtccgattcccggtcacccacctccgcattcctcggcgcgtggcggaatggccgcggcggccggcggcagccct

SEQ ID NO: 423021 - DNA, 140 bp, Oryza sativa nipponbare
ggagggtttccaaactcacgttcacgtacctccgccttcatagctattctttttttttacctaaacccaaattactgtcactgggcttacatcttcaaacactgggaaaaccaaaaccctacccaaccccaacttaattg

SEQ ID NO: 423022 - DNA, 225 bp, Oryza sativa nipponbare
cccacgcatccgtgaacaaggagctcgagtgatccactctccatgtgctacactgtgatcactctgctgagtcaggcctacaattctttccaaaaactgaatcttctatggtcaagatggtttaacaaacatcaaacccttccatggttgcgtgctgttctacgcatcatatcatctgtagtccccaccaactgctgtttggctggttttgattaggccattata

SEQ ID NO: 423023 - DNA, 308 bp, Oryza sativa nipponbare
cttacaccaatcccaagagcagctttctctaatcacattattcccattctctcctttctccatttctacaatttctactatctcctccttcaattttaccattcttaattaatttttcccttacatcttctatttactaatcacttttataatcaaccacttcatatcttcattacttctttaagtacttcctcacttacttctacattcataactcctattcttcttcttttcttttattcatttccttattatctctttctttacattctcttttatctattttcttcattacttcatatctcctt

SEQ ID NO: 423024 - DNA, 178 bp, Oryza sativa nipponbare
  unsure (1)..(178): unsure at all n locations
ctcgagatcgtagtgcgaaggggaagggagaaagtacaaagtgccggatcccaacgtcttcttggaaatggtgatgatcttgatgatgatcatnncgatcgattggccatgccatgaaatacattccttgtacctagaacctttgtgatatgacacaactgcatgcataattgaacgc

SEQ ID NO: 423025 - DNA, 334 bp, Oryza sativa nipponbare
gtaccgtccgatcccggccgacccacgcgtcacccacgcgtcgccacgcgttcgccaccgttcgcagcgttccggactcttgcggaccgggggtacaccttattgctcaccaactcactaaattgatgccttgaacagcttgtttgaatatagattgattccatatgctggtcatgtcatataagatttttaggtgctccaactattctttataggtttatgttggtaaatgatgaatgcaaatttaaagactgtggcactgtttagagtatactatattatcttttaacttgaacaccattttgtaagttgtaacgttttatgctgccagaca

SEQ ID NO: 423026 - DNA, 287 bp, Oryza sativa nipponbare
ccggaccgcaaataccgacgcgagccacccatcaggggtaccctcatgcgtcctcccacgagcacgacgaccatggcgattgaagcagtagggtggaatacctcacctcttcgacttggcgaaacggccaactctttcagcagtcagcagatacaggaacacctgaaggagacgctgatccataagagcgaggggctaagaacatccagactcgtgggagactgaggagaaaaagacagtcccaaagggagacatcccgtttcaacaggacctcaacacgatggacc

SEQ ID NO: 423027 - DNA, 386 bp, Oryza sativa nipponbare
acactccccacaagattgaacacgggatggatccagcacaagtagagagcgatggggaaggcgtggaagaagaaagggatcaactagaccatgaatcaattgagacgctttcagagctagaattgctggactcacaaaacctggaggcgaacgacataggggaagagtagtacacaaggggcatgaagaccaaagaactatggcaaggggaggaggagatattggatgaacacaacatggcggagcctctggagcgactagagacactattaaacactgagtggaagaaataacagaagatcgacagagggccagactggaatccaagccctcagctactagagacaaagaacctgagaagacaaactaacaagaatcggctgaaa

SEQ ID NO: 423028 - DNA, 159 bp, Oryza sativa nipponbare
cgcgtccgctccactgaactctaagcgatccaactgactaaatgttttggccctcaccttgatggcgctgggcgtcatatgagcgcgcggatcgcaagggcttaagtccaccgtcggtctccccgtcagccttcgtttcaccaacttggacttctagtc

SEQ ID NO: 423029 - DNA, 308 bp, Oryza sativa nipponbare
cggtacgggattcccatgtccgacccagacctaccgcgctcgatcttagaagcttattgtattggtgcttcctttggggtgctaatagctttgtggacaccatgtaccattttgtggacaactagttgatcctacaaagtttcataccagatagtggagattagtgtgtatattaggtccgaagtgtatgggtttcaatgaagactctttgcaaaacgaatttctcctggctctatgcagatcgcagagatctatgatttttacacaacttttgggcatatagcttcaatggaaaaaggatttttttt

SEQ ID NO: 423030 - DNA, 253 bp, Oryza sativa nipponbare
ggtgcccacgcgtcgcgcgagtgcttttgtgcgggtaccgtggggggaactattacaccgggcctggggttttttaccgggggggcttcggcttttgttaggctatctacttatcgccgtggcgccatactttggccgtctgttctcgccagagtttacgtgaaggaccactctgtcctggggggcagaagggcgttttttgatcttccatgcaaaaaaaaaaggcggcgttagaggatcagtactcctgctg

SEQ ID NO: 423031 - DNA, 312 bp, Oryza sativa nipponbare
gccgcgccgccgaatcgtcgacccacgctcggaccgggccgcctgtgatgcggctggcgctgccgatgcgggaaggcggccctccctgtctgagaaagaagcatcagtaggcagctacctgtgaattttcaaggcccagctcatataaccttgtttgaatggggacccaggcggtgacacattactgaacacgatagatgaatacatgtaaagtactggtggagcatacattggcctaagacagcgttaccgtctgagatcacttgtgggaaggacttcacttatgggagattagctttagtttatgttttg

SEQ ID NO: 423032 - DNA, 269 bp, Oryza sativa nipponbare
  unsure (1)..(269): unsure at all n locations
tcctccaccggcgccttcttctccacttcctttctcctcctcctgcctcacctctcctcctgtaggctctgatcttatattcgtgggcttcgcctcctcctnntctccacctatcatcagcatcatcaaagcaaacaatatgttgatgagattgtgtacagtaacttcctctagtactgcattatttancttaatgataatatatcctataatacttctctttgtgatatatatcaggatttccttcattctctttattccttctacta

SEQ ID NO: 423033 - DNA, 188 bp, Oryza sativa nipponbare
  unsure (1)..(188): unsure at all n locations
tccgcccacgcgtaccggttggtttgtctcctcttgctgcaggtgcgatgtcacggtgtggaacatgaccgggagcgcgtggcgcccggtggtgagcctcggcnccaagtacgagccttcaccggccgatgttgcttcgtcttgcgatgtgaccttcgcgatgcttgctgatccggaaagcgcggttg

SEQ ID NO: 423034 - DNA, 124 bp, Oryza sativa nipponbare
tcctgattcccgttcaagccagtcgtccaactatagctaagccccccaagagacatcgagagcgagatcgccatggccgccgccgccgccaagaacgaccgcattgccatcggggggctcctcc

SEQ ID NO: 423035 - DNA, 184 bp, Oryza sativa nipponbare
aattcccgttctgcccacgcgtccgcccgaatccaatccgaaccggcagcggcagccatgacgccctccgccctcgcccacctatgctccggctcgccgctcgcgcgcctgctcccccaagcccagggcgaggcccggctcggcggcggggcccgcgctgcggcggctggcggtggcggcgccg

SEQ ID NO: 423036 - DNA, 304 bp, Oryza sativa nipponbare
gtccgtacgctttctcggactcgtggacagacgcgtggtctgtcagtggatctgggtatggtgcgggctgtggaagctacaatggcggttctattcatacaaacgcttaggctgaaccttctcaaagtgccaaaataacaacgtgactgatgtgactgcttaagaagaaaacatatgtttgtgcagcctttaaggatgagagcgccactgcaatccttacagctctgcactaggatgatgtttcggtgttcagccgttgcacatggtgatgctgtttcttagattgtaactgaactttatcatc

SEQ ID NO: 423037 - DNA, 97 bp, Oryza sativa nipponbare
tcgattcgtcgaccacgcgtcgctgagtccgccttccagcattaagctttatactggagctttatctatatatattagagagtgtcattttgatttt

SEQ ID NO: 423038 - DNA, 77 bp, Oryza sativa nipponbare
  unsure (1)..(77): unsure at all n locations
accggccggaancccggccgaccacgcgtccgcggacgcgtgggtggaattcgaaatccacacgatctctgcggctt

SEQ ID NO: 423039 - DNA, 256 bp, Oryza sativa nipponbare
ttctctactagccgagctgctactctcgggttggcccacggaggctctggcacctcgggctcatcagctagtcacgcgctccgtagcgcgtccacactggcttggacgcgatgggaggacgtctgcgggggcatgagcataagaatcggccctatgcctgcacataccgggggactttgagcaacggtcctgtcgatccagggggcctgctggtcagcaggtggatcgcaccgggaccacagctcggtactacagg

SEQ ID NO: 423040 - DNA, 348 bp, Oryza sativa nipponbare
gtaccggaatcgccaggtccgacccacagcgtacccgccacgcgtgacgcccacgcgtcacgggccacgcagtgcgaacacacttagcgcagtctactctcgccggggtcttcctatactcgcctcgtctcgttcgtggccaaacgaagctcgcgcctaccggccactcgcagtcgaagcccagcaaccggcggcgagccgatgacgagcaacaatgcagaggtagataggctgctgagacagacgatgacgcgaaggcatcaactgacacagcgatcagcagcttgccattcatgcaggggaacccggctgccctaacacgctcggtgaccttccaagagggatctt

SEQ ID NO: 423041 - DNA, 66 bp, Oryza sativa nipponbare
cgtcgcgttaatatacagaaattaacacaacatagggggtaattctaacatattataagggggtta

SEQ ID NO: 423042 - DNA, 172 bp, Oryza sativa nipponbare
  unsure (1)..(172): unsure at all n locations
aattccccccacgccccccacaaggtttaccacgtccacgactacagattcaatatactgtgctgcgtcccagctccngggagtatgactatacagcgcagcaggtctcctgcttatagagctagcagtactaccttggaaggagaaaggtatatgtctttcgatactcaag

SEQ ID NO: 423043 - DNA, 406 bp, Oryza sativa nipponbare
  unsure (1)..(406): unsure at all n locations
ttcaccccgcgccgcaggtctactggaacaataaggcagacctggaatattttcatccctgaaccacgttgatcagtgaaaggtgcaataaagggntgaaacctcgaccaatatctacaaccttgcttcttaccgggcatcaagacaataaaaattacaaaaaggagacagtttnnngaaccgccaactgtcaggttgggtgatattcatttccttgaagaactctanatgnctcattggccgaatttgaatgagccacaaagcttgggaatacctaccctcaagaagctcaagctggttaattcttggaattttctggaaacattgagtgttggttttttccttcttgggtttttccctttggcatgtaacctccattcccttgcatgtttggagcagtaacttt

SEQ ID NO: 423044 - DNA, 225 bp, Oryza sativa nipponbare
  unsure (1)..(225): unsure at all n locations
cacttattatcgctgcggcgccgacggcgatccgtcatctgctcgtcaggacactgagcatccagccgttgcgagaggttgcggctcttcatcggcagctgaccctncaattgccgccatcaagtgtcctgccatcgctgccatcaacaataatccttcttctgcggctgcaccatgccatgacagtgatcgtgctccacggggtattccacacacgcctactat

SEQ ID NO: 423045 - DNA, 416 bp, Oryza sativa nipponbare
  unsure (1)..(416): unsure at all n locations
atgccctacattcaatggtgtgcagtttaaaggcgatttctacagcaatttgaaaccttctggagcaagaaagtnctttataaatcatggccgcggctnncatnaaactttcaacggcaaaacatttccttttgtatgaattattattcttttcccttttcaattaatcctataatttttttttcccttatatataatttttattaattttttttttttttacattattttattttttattataaatttattttttaataaattttttattttcatttttttatttttctctttctatttgtggtgtgttttctttttccttattttttccttctttttttattatctttttccttatttaattttttctttattttatcttatctttttttttatttaatattttttatttttat

SEQ ID NO: 423046 - DNA, 462 bp, Oryza sativa nipponbare
  unsure (1)..(462): unsure at all n locations
cgcgtgcgcggacgcgtggagtttttggaagacctatgcaagcagattttgaatgacaaaactgatgaccgtcagaaggacctaacattcatccgccgtggcccctgcgtgtgtggtgattcgtgtattgactccagtatatgccaccctccttcctgctggcccatttatctggagagtattttggatcctgctttggtcagtcctgacctacttcatgctcgccgtattcaagatactagtgggattggtattgcgctgccttgcaacttggtatgtaaatcttcgtctcaaaaacaaacaacatgtggactgagcattttgcacttggcaccaaagtttggtgtgaaagataacatccncgggaagacagacatttgctgtggttcgtgaagtacaagaaaccgctgcagctgctgctagagttcagatatacatatatgcccatatggcaaaattctt

SEQ ID NO: 423047 - DNA, 498 bp, Oryza sativa nipponbare
gcgtactccacgcgtccgcacccttctctctgcttctccgaccaccatgtacatatccacgcaagcctccgccgggaatagacccttctcgccgactgggcgccggcgaatcctcgctcatccaccctctccatgcccacctcgagggcacccacctccctcagagcggcggcggatgatcagcccgccgcggctgctactgaggatatataacccgtccccgccgtgtttctacacccctttcttgtccgtatcacttccttactcttcttacggttttcatcttttgtcactttctttttccacttttccatcctttttattatttttcttccttttcctcttttttttcatttggtggggggggggggctcctttttctcatttttcaatttttttataatatttctagtttttccaaatttttcatgcttttcgataattttctattttttttgaccttctttctcttttttattccattttctattttttttg

SEQ ID NO: 423048 - DNA, 353 bp, Oryza sativa nipponbare
cggtcgaccacgcgtccgttccgctatataaaggggcgagcaaccaatctgaattaatctgtgtagctcgtcgtcactgcccatagtactctggcttagctagcgtagcttcttcttcttcctctagcttggattggattggattggtggctggccggcgatgaggacggcggcggcgaatcgccggtgctcggtgcctttcatcctggcggcgctggccgccctctcctgcgtcttcctcgtccacggtttctgcggcggcggcggcggcggcggcggtgaccacaaccaccaccagcgtcgtcggctaccggagggcgcttgcttccatggaggcggcggcggtggtgatt

SEQ ID NO: 423049 - DNA, 231 bp, Oryza sativa nipponbare
aagttcattatcggacctcgctgactaacgtgcgactggctcgcacgggagtgcagcctcactgactgacgtcttaccaatctatgcatggtgtggcggttaaggtgtgccttgaggcaatgggaggacacaaaagagagcgcgtctgaagaatcccaggacattcaacaaactggtgctatctagttactctggcttacatttgtatcagcactgatgaactcccacgta

SEQ ID NO: 423050 - DNA, 346 bp, Oryza sativa nipponbare
gtccggcgatggatggatgcaaggcatggacatggaggagaaaggaagaggtgccgataattcttccgagaatccgagtgtgactgaggtggtggactccaacaaaactgcaggggcttccaagcaaacattatctgctgaagatatggaggatcaacttgaacagtttaccagcttgatgcaacagaagttcctgtccggtgaagactctgagcatatggactactctcggatcgataacgacgagatgctggatgaccattggtcaaaagaagccaactatgatgcggaggagaagtatttcgaagaggatttgttcaaagttcaaactaggctgctggtatag

SEQ ID NO: 423051 - DNA, 76 bp, Oryza sativa nipponbare
tctgatcttctgataggaaggacaagtgtttgatttgggctgagaaatatttgctacctgagtaagagtgctcgaa

SEQ ID NO: 423052 - DNA, 184 bp, Oryza sativa nipponbare
cgcgtccgctctttacacaagcctctctctcgccggcttcggcgtccgtctcctcctcctcctcttcgtctagccttgtggcggcgtgcggtgcggtgcggtgaggaaaggagggagctttgaaggtcgggggagggcggaggagatgtctgaggtgtccgttatggccgaggtggaggagacg

SEQ ID NO: 423053 - DNA, 263 bp, Oryza sativa nipponbare
tccatgaccgacttctggctcgcaacgagaagttcaaggagctgtgaacgacctccgatgcagagtgggcatgtgacaggttgagtatgtctccatagaggacatcaagagtgtgcatcaaggagaaagagatgaatgcaagagaggaccttatcaaacctgaaacatcagagaagatcgcgaagcgatatcgagagctgcgtctgccctctgagcgctttataaggtgcagaagacggtgaagatctggaaggagatatcgc

SEQ ID NO: 423054 - DNA, 351 bp, Oryza sativa nipponbare
gacgtacgcgtacgcgtacgctcgcggatacgtgctcaacgcgcatgaggttcagacgaatcaagactagctgtcactggaacaggctgatccgttggcggtttacaagggcaatcgtcaagcaccggtgttggaggtgttagcagcaacaatgctgaaagtacaaattctgaaactggagactcttcgtagcctaacaccgatgagtactgcaccaccacaactccacatgctgtcatggtagatggagtatcaacagcagtgcaacgatgcatgtgcgtgcgcatggggatgctatctatggtagttgccaatacaggttatatgttttaccgttatttgtgctgtgta

SEQ ID NO: 423055 - DNA, 363 bp, Oryza sativa nipponbare
ccttccagccaaggccggcctttgcttatttggtggtaggaagggttcacaaggttgtttgtaaccacttgcggaaagggccgttccctcaagatttggccgggaattgacggaataacaaaggctagagcaacacacatttgccttgattgtggatacatatacttgcttcccaaagccttcgaagaacagcctgatgaatatggctgcccacaatgcaacgcaccaaagaagcggttcgcgaaatatgatgcagaaaccgggagggcgattggtggtgcgctaccacctattacagtgatcgtcagtttgataatcggcattgccggagtaggggctttgcttgtatatggccttcaatag

SEQ ID NO: 423056 - DNA, 327 bp, Oryza sativa nipponbare
  unsure (1)..(327): unsure at all n locations
aggcgcacgcacngcaggaagcagccgcagaaaacaagccaccaccacgggaccaaccaccaaggaagggcacggaaccagaggacccagaaccgaaccnngaaagaaagcccagngangacgagccangggangggngagcgngcaagaacacgacggacccangagggggagcaacgacanggngcccgcagagacccggggaagcnngggnnngccgggcaaaacgaacacaacgcaaacaaagacaagaaggaaagaaccggaaggcgacnagagacgcaagcgaacagcaaggaaganacaacagcngcggnggcaggggac

SEQ ID NO: 423057 - DNA, 185 bp, Oryza sativa nipponbare
  unsure (1)..(185): unsure at all n locations
cggaagccggggcggcccacgcggcgcgggcgcggggcggggggggcggcccggagcgggccaaaaggagaggaggggcacgaccaccacgncaccaccacagacacggagcaccacgggcggccacccccgccggagaaaaccgaccgccggggaccaggcgcgcggccccagggggaccacca

SEQ ID NO: 423058 - DNA, 93 bp, Oryza sativa nipponbare
  unsure (1)..(93): unsure at all n locations
tacangagcncngactcgngtcatggagatgtggaggcatgcatggagccttggattgtgcatttaattgatgtataataatatttgtgtaac

SEQ ID NO: 423059 - DNA, 204 bp, Oryza sativa nipponbare
gttcgacccacggcgtacgcgtacgcgtacggatacgtattgtatatttcaattaacagaatatgttagaggggaaacttaatggggggagtttaacactgacaacatggattcaaagtatttgttgcagtcgtagcatggactgtatttatgtagcacaaagagaaagatactgtgtgatcgaaccgaggagataatatcatg

SEQ ID NO: 423060 - DNA, 164 bp, Oryza sativa nipponbare
cattgggaaccgatgccacacgaaacttatacctagctctgctatagagcagacgtggggtctgttcattggaacaaaatgactccgatccatagagggtctagaatgaaactggtgctgatgctgatggctgcactaactaccgctcgtactagataaaaagt

SEQ ID NO: 423061 - DNA, 129 bp, Oryza sativa nipponbare
gacttaagaccataaaatgagcccgtaacacgagtttgaaggtggagaggtggtatgatccttttcaaggagatggacaagatcaagaaattactacgcagcaaaagcctgaaaggaaagaggcgctga

SEQ ID NO: 423062 - DNA, 243 bp, Oryza sativa nipponbare
gccgccgccagatgcaaggcctcgcgatgcacggatgtcgagcaagcggcggctggcgggccaggcagaatcggctgggtgcgggtccgtatcccgacgcacatgtcgcggcggtgttcacaactccatcaaagtcaccaacgctggtttatgaggacgtgactcgtcagatggacggattgcagtcttcgctaactgagtcgcttctagcaagagcagaccaatcgctgaccagagatcgac

SEQ ID NO: 423063 - DNA, 92 bp, Oryza sativa nipponbare
ccgccgatcgtcaccactcgcacctcaaagctcaaaaaaaaaaaaaacaaccgtaaagaacagaaatcgaagaaatggggagagcgaacaat

SEQ ID NO: 423064 - DNA, 113 bp, Oryza sativa nipponbare
ccacgcgtccgctgacgcgtgggcggacgcgtgggcggacgcgtgggcggacgcgtgggcgcggacatggcgttcgcgcactacggacccttctggcgccagatgaggaagct

SEQ ID NO: 423065 - DNA, 229 bp, Oryza sativa nipponbare
tccgatccgtcgcacgcgtcagaccgatgactataacgtgggcggcggatccgctgtgcgacactactcgcgtgtggtgcgttcaggagtacctagtgcgcgagtgctgcgcgtgctaacatctctctctcggtgacatccatgcaggacggctcacggtttccaacaccctactatgaccgattacaccctctgatctcgacatctccccaggtccccaggtccccat

SEQ ID NO: 423066 - DNA, 482 bp, Oryza sativa nipponbare
gacgtcgatccggtcgacacgcgtccgagtactgatgaaggcggatcactgatgtgatctgttatacgttgccactagcaaactttttgccagatattgtgatgtttgtttcttccaatccttttactttattcatattttgtttttattgtttttttttcttttttctttttattttcatttttatttatttttttttttctttttttactactattttttctttcttttttattctttttttaaatattctattctttcatatttttttctttctttttttttttatctatttattttatttttatatttattttttattttttttatttatttttatttttgatctcttttttattctcttcttttttctttctctttttttaactctttattattttttattgttcatttttatttattttttctctctttatttatttttttttacatttttttttttatttgttttgactatttct

SEQ ID NO: 423067 - DNA, 96 bp, Oryza sativa nipponbare
gttgtgtgttttttttttatttttttttatttttttttttttttttttatttttatttttttttttttttttttttttttttttattttttttatt

SEQ ID NO: 423068 - DNA, 151 bp, Oryza sativa nipponbare
tcgcgatcgcgccaccgcgatgctcaccgctacacaaggattaccgcagccttctgcaagtgagattcgtgctgattctgtatcagactactcccaagctctctacgtgtgacggtcagcactgtatgggtaatctaatatctggattttg

SEQ ID NO: 423069 - DNA, 372 bp, Oryza sativa nipponbare
cgacccacgcgtgcgtccaagcgacgcgtgcaccacgcgtacgtccacgcgtccgggagatcatcccctcgctgaaggcagctctggaggctgaggacgacgtgtcccaagtggagctctccttcgaagataataggttggagggttccttcataaaggatgaagtgccttattacttctgggccttctttccaaatggagacctcacaggaccgaagggcttcgcgctgtcatcgtatagcacagaagtgagcaccatcgagccgttcctgatcgacgagaagagagcaaacgccaagtatgtggtgttctgggtttacaagaggctggctggccaagggatcctccctgtctggaaggaagaggagggtg

SEQ ID NO: 423070 - DNA, 125 bp, Oryza sativa nipponbare
ttccggtcaccacgcgtccgccacagcatggccactcgagcacacatttatctcaccactgctacgcttgggaagaggaggaggagcttgtgcttggagagagacatcaatggttgtttatgctc

SEQ ID NO: 423071 - DNA, 225 bp, Oryza sativa nipponbare
cccggtcgaccccgcgtccgctcgcaccctccactacgcctttctcacgcgtcgtcggcagcataaccatgacagcagttgatttagttttggtgaatgacatctagggtgtgttgttcaatgaatgagatagcaattaccgtttgtctgtcaaacaagtattgagtgaatataacaatgtacatgtattgctaatatcactctgttcaaggaattatattattt

SEQ ID NO: 423072 - DNA, 72 bp, Oryza sativa nipponbare
cgaccacgcgtccgattccctttcccctgttctgatgattacttgctcaagctgtttgattattgtcagtgg

SEQ ID NO: 423073 - DNA, 212 bp, Oryza sativa nipponbare
ccatgtacggcgtcgcctcttcgcgagggcgagcgtcacggcgccacctacgctaccggcgaagaagaggcgacagctgagaccgcactgtggcaagtaccggggttttctctcggattccgggtcatggctattctcttacggtgactccgacttttagagatctttgttgagtgctgacggtgatgcttgtgtgacgacgatgtgacatg

SEQ ID NO: 423074 - DNA, 380 bp, Oryza sativa nipponbare
  unsure (1)..(380): unsure at all n locations
gcccccccaaaaaaaaagcccccccccccacaaaccccccccgcgggggggggtctttttttttttttttttgtttgggggggggggaaaaaaaccaaccccccccccccccccccccaaaaaattaataagggggtttttttttttttttccccccccccccccccccgggggggggggtggggggataaaataaatanacccccccccccccccccccccccaaaaaaaaaaaagaagggggtggggggggggcaacaccttttctttttttttggcgagagggagggggggcgcccccccccccccttaaaaagggggggggtggggtgggggcctttcccccccccccccccttttttttttttatgggggggggg

SEQ ID NO: 423075 - DNA, 311 bp, Oryza sativa nipponbare
  unsure (1)..(311): unsure at all n locations
aaaaaaaaaattttggggggggggggtgttttttttttttttttaaaaaaaaattnnnggggggtttttttcctcccggcaacttctttttttttttttnnngggcggcggtttnaaaaaaaaaaaagagggggggggggggggccccaagannnccccccccccccccccctttttttttttttttttaaaaaaaaaaaagggcccctttnnaaccaaaaaaaatatatccccccccacccaanatttttttatatttttttttttggggggggggggggtgtgtccctttctttttttttttgggggga

SEQ ID NO: 423076 - DNA, 86 bp, Oryza sativa nipponbare
gctgtcgcctgcgtacgtccgatccggtcgccacgcgtcgtcagcaggcatcagcgcgagcacagccacgccgcatgcgtcactct

SEQ ID NO: 423077 - DNA, 56 bp, Oryza sativa nipponbare
gccgcagtccgtccgattcccgtcgccagcgtcgtctagccgtagctgctactact

SEQ ID NO: 423078 - DNA, 72 bp, Oryza sativa nipponbare
  unsure (1)..(72): unsure at all n locations
gtccgcctgcagtccgtccngatcccggtcgaccacgcgtccgcgcgtagaactgccttggagggacacact

SEQ ID NO: 423079 - DNA, 84 bp, Oryza sativa nipponbare
cccggtacttgcggtctccgtcccaccgggaccacacgaccaaaacgctctttagcagagcgccaagcagccgcgcgactctag

SEQ ID NO: 423080 - DNA, 56 bp, Oryza sativa nipponbare
cgcgtccgcgacacctgtctacccttgctcattaactactctactctgctctcaag

SEQ ID NO: 423081 - DNA, 127 bp, Oryza sativa nipponbare
cgtcgatcccgtcgccacgcgtccgcagccagactagatggcaaaaccgacaaaagcagaggcgggcggcgtcgctgcatggacacctcatggccccctgtctcccgcgtgcgccacacccatggat

SEQ ID NO: 423082 - DNA, 185 bp, Oryza sativa nipponbare
tgtcaggctctgccactcctagcattgctgattctgctgttgcactcatgtggagtgtccggaagcccttgtacctgcaaaaatggcccttatttttcctggaattggtggtcctccgcttgggttttttaaccctttggccaatcttggggtttccaccagggttggccaaagtggttaagtgg

SEQ ID NO: 423083 - DNA, 379 bp, Oryza sativa nipponbare
cgatccaggtcgaccacgcgtccggaggaatctcagggacgaacttgaggagcgtgagaggaagcactactcgtcaaaggacaagtcctatgctgaggagagagagaggggggaaagcacaagcctactcctagaaggttcaaggcgagaggctgtggatacgatagaccctatagaaatcgatgcacatgattctgatgtggaacccataagcgatgatcaaagcgatgaggctgatgaccacgatcatcaccctgctgctctcctggcaggacttggcagaatcaacactgaaggagctgtaccaaaccttcataaggaacgccggccggcactagacgaggctcctatgaagggagctcaactgatgcagcgaaac

SEQ ID NO: 423084 - DNA, 75 bp, Oryza sativa nipponbare
gaccacgcgtccggcgaaatgcagctcaagaggatcatatgtttggtggagggccaaccagttagggttctgaac

SEQ ID NO: 423085 - DNA, 136 bp, Oryza sativa nipponbare
cctacagacgttactcaactataaacagccatgaactactggtttgaagcggatctacaccgacacatacttatgaatttcaaccgtggatggattatggtacaaaaaagtgtactacctttcattgtaatttttg

SEQ ID NO: 423086 - DNA, 195 bp, Oryza sativa nipponbare
  unsure (1)..(195): unsure at all n locations
cacgcgtgccgcgttnctggcgctggctattattttccacggtcaccggttcacccccattcccacccccggaggtttgcatcggaaattccaccccggcttttccttcctcttccgcagatcagatcagatcagatccgatcaggtgaaaaagaggaggggggaaagatggggttggcgttcgggaagctgttc

SEQ ID NO: 423087 - DNA, 221 bp, Oryza sativa nipponbare
ttctttctaccaattgttttaaactgtccatcttccattgtgtgtgctgtaatgagtggatcatgattgcatgacacattcatagcgttctgttgtaccagtgtaattagcaacgcaactggataatctgtgtataaattacggaatgtttctgtacaagaattttaagttcacattgttcgtcaaaaaaaaaaaaacatttaaaatcactaatatatata

SEQ ID NO: 423088 - DNA, 217 bp, Oryza sativa nipponbare
  unsure (1)..(217): unsure at all n locations
cccggcgtacgcgcggagcaagtcggtgatccacgacgagctgcgcagcttccgggtgttcctgcagtggtgcgcgctggaccactcctcccgcgccgcgcgggccgcgtcgtacgcggcgttcctcgcgctggcgctcgccgtccccgccgccgtgtcgctctcgctgcgcgccgacgccggggcgtnccccgtgtccgcgttggcgatcacgttc

SEQ ID NO: 423089 - DNA, 262 bp, Oryza sativa nipponbare
  unsure (1)..(262): unsure at all n locations
cgtaccgcagcgtccgctactccaccgnctccgccatggcggtggccgccacctcccctaccattgccactgcgccattctcgtctcttcctctccgccttcgcctccgccccaaacccctcctcttacttctcgcctctcctcccgtccaagtcctcctctggttgaatcgctcggagaagggagaaaagcggaggagatccaggaatcggccgggggagacatgacggaggacacacaaagcccgctgagccgggcgctt

SEQ ID NO: 423090 - DNA, 215 bp, Oryza sativa nipponbare
tcgtgtcttcactacataaatgctgagtcatcttggaatgccactctcttgtcacagaccatccaacagcggcatgaccacacttcaaggggtggtcagcttatgcaactggtaccgggtgcctataccggagtggtggcaacggtcaaaaacgtggtggtggcagtggttattatcataattcctggaggggatcagtattgctataagtggtg

SEQ ID NO: 423091 - DNA, 403 bp, Oryza sativa nipponbare
tccgtccggatcccggtcgaccacccgtccgaccccagttctactcggagcgtttcctcaagttcatccagaccgtctttccagaaaattcatagtgccccagccagcagccattgcgattatttcgtccgcggatggattctcctgccttgtgttatgacatgaacttcattcatagtgcctcagcagcaggtactaattttttgccgagcagcatcctccttgaaacgatatggcactgcgggatggcagggaaagcacgccgaattattctttagttctgaaggtgctgaaactgaaatgtgcgaaaagcggtcatggagaactggagatgggagagaatttgacgtctttctcttgatggaaggaaggcacaccgcacatgtctagggcaatgtactac

SEQ ID NO: 423092 - DNA, 101 bp, Oryza sativa nipponbare
ccttcttgtataaggtatctctgctaacttacattggtctctgcgtctataagctgaaactctgcgacacagctggcctcgtgagatacctgtctgcacaa

SEQ ID NO: 423093 - DNA, 496 bp, Oryza sativa nipponbare
  unsure (1)..(496): unsure at all n locations
agaaaaaaaagtacatgttcctaatccatcagacttgaatatataggggtttactgccatatcttatgaacaatgagctggtcttctaatccatacactttgcttctttgcaggtgtttttgtgccaggttgagccatggaaacaaatggtacagagaagaataactgttccaaagagttgatggtacccttggcccttttcgctgtggaattgaacagcaagaagcgactgctgtttgatgtttcaagccgaaagatccatggngtaaccagtacggtgtttccagatgctttctgtgaatttgagaatggtgggtggctcctaatggcgcagcacaagccgttgtccttccaagatcagatcgtgttccttgttcatcctagcaccggcacgcacttggacctaccggtacttcgttctcctaatgagggggttcttggtttctatgttggtctcatggaatgcctctagggttgcattaatgagatcatgagt

SEQ ID NO: 423094 - DNA, 230 bp, Oryza sativa nipponbare
accggacccgtatgcccaggcggacgcacacgtgtgcgcacacgtgtgcgcacacgtgtgcggagacgtgcggtaacgggtccggttaggcttccggcgacacgccgtactggataaggttaagatgctggggggaaacagcactgaaaaacaccaacgtgatgtcgacgaacaggactgagacgtactcggggaaggtgcacggcgattagacctgggtgctcagccag

SEQ ID NO: 423095 - DNA, 273 bp, Oryza sativa nipponbare
  unsure (1)..(273): unsure at all n locations
agaagcgtcccacgcttacgaaaaatagacgcgcgagaagtagttacgcatcatgaaatatgccattgaggcgcacgtcacggaacatgtgaaaatgccctggagagcacataactcagacgatatatctgctctacatgccctggaatcaagatgcaatgaggcatgggcatgccttgtggtcaagtacaatgtgacgggggtttgagtnaaaaaaaaataannnaaaaaattataaaaaaataaaaaaaaaaaaaaaaaaaaaaatttatt

SEQ ID NO: 423096 - DNA, 189 bp, Oryza sativa nipponbare
ctgagctcacatccattgattgggcatcgtcagccgtgattcacatgtcactattgtacctgacatgtgaggcgctctatagtggctactgcctgacatttgtggcgctatatagaggctccgtgaccggttgtaatgctcattccagttctctgcggagaaaggaagaatgctcattcgtgggctgtg

SEQ ID NO: 423097 - DNA, 202 bp, Oryza sativa nipponbare
atcaacacacgatcgaaaggcagggcatcatcggagttcgtctcgcgtggtctgggtgctctacatagagagaacctggaccgtggcataatctgttctcaccgttctggccctgctgaagaatgattcgcatcttcaatcgctgaactgaatagaatcctgtggtactttactggcctgcgtttacccttagctatgtaat

SEQ ID NO: 423098 - DNA, 348 bp, Oryza sativa nipponbare
agactgatcgacacatgcgtccaagagatcgaacagactgatgaacaacttgctcgtggacacggtaccagagcaggaactaacaattgctggtgtcattacgataatgacacatgagaatcacatatttggtgtcgatcatgatacctgacaggctaatgatctgactcattcaggctgattgacggattggttggagtgctctctcatggcgctataaaggacatgctcgcgagatatatcctggctgattgatgacatgggcacgacagatagcatggttgattgggaacacgaataaataagggatcttgctgacagtgttacacagagcaataagagctgatg

SEQ ID NO: 423099 - DNA, 163 bp, Oryza sativa nipponbare
cgtaccagcccacaattctctggctctacccccgcgttcgatacgaacgcatgcttcctttcctacagatcaccatgatatgatacaaccgagcgctaggtttgatcaccatgaacgataaacttgactgcgacgtggcagatcatgctctggttgctcgcct

SEQ ID NO: 423100 - DNA, 218 bp, Oryza sativa nipponbare
accacgtgagacctcacgcgtgacgactgatactgtgacacattgagcctgggagggatgactgcactgtcgtgcaatttgacaaaggaaggctagcacctcttttgtgaacttgacataagactacaatggcatatcgtgcccatacgacatgagtgcgttattgcacaaaaccactatctctaacgagtgcaacaccgtacagagaagctacctat

SEQ ID NO: 423101 - DNA, 228 bp, Oryza sativa nipponbare
tggtcactgtgtgcacagtgacttgtcacgcgtgtgacactcagcagccagggaactgacatgcgccatgaataacaccaatgacgcactgtgcatgagccactactaacactgcccgcacaaggcgtctaatgctctctctaatctgcatgacgatgagcatatgtgctaactatgatgaggataaggatgtgcctatttggaatgcatctgatgtataggatgctg

SEQ ID NO: 423102 - DNA, 275 bp, Oryza sativa nipponbare
agtaacaggattgcatgctcgacccacacatgcggacaaaatgaatgtatacacacgagagagtataggccgcgatctatctgcacacatgacggactatctgagacgggctgcccttacttttggaaaagcgcgtgaaaggggcacccctgactatggaagaggcagggcgagaggcaccccggactttagcaggggtcgtgaccgaagggggcctgcttatgagatgagagcaagtgcccacggaaccaccacaagcgatgacaggggcgaac

SEQ ID NO: 423103 - DNA, 56 bp, Oryza sativa nipponbare
aatcattcacgccccggccatttccatttttggaagcctttcgttacccccttttt

SEQ ID NO: 423104 - DNA, 142 bp, Oryza sativa nipponbare
gtccgacccacgacgtatcgcggacagcgtggacagactcatgcgtttatactggatctacaattgaaggcgagtgggcggtcgcaatctttttccatatacaaataaggcttcatgttattatgatgaaaactactataag

SEQ ID NO: 423105 - DNA, 232 bp, Oryza sativa nipponbare
ctgtacaccagcacgtacgcggacccgaattaacaggtctgatccaggcgtccaacgacacgttcgaaaaaattgatggcaggtcccaaagacagggtctcgacgatggtgagctagttgcgctatcaggggctcaaactatcggaaattgccggggtgtcaggtggcgacagaagctgtacggccaggtgaacaaggtcgggaaagaggatgtaacgctagaatcaacagt

SEQ ID NO: 423106 - DNA, 64 bp, Oryza sativa nipponbare
actacggaatataccgggtagcacgccacgtcgtagcaggactacaagctaaatcgcgcgcgca

SEQ ID NO: 423107 - DNA, 138 bp, Oryza sativa nipponbare
cgcggaccatacctgctcatgcacaccaagagaacggtggctagctagtcgacaccatgagggcagaccggttggtggttctctggcacaatgcgggcgggctggttggtgatcctcgtggcggcggcggtggtggtg

SEQ ID NO: 423108 - DNA, 248 bp, Oryza sativa nipponbare
gcgccatgcgttcggtctctgaagggggcaacaatgggactaacatggatctttgtgtaggtgaattacaagacttacatgatgccagggagagatgtattaatacagatctaggaattcagggagacaggaagaactcctgcggtaatgaataagtacagcaataagaacggaagccggaatggatgaagatcgttatcgagagcgatgatctgtgatacgatgctatataaagcgaacgataatat

SEQ ID NO: 423109 - DNA, 63 bp, Oryza sativa nipponbare
acccaagtttccgtgattcgacctacgcgttcggatatgctggcttccgatcctctctattgg

SEQ ID NO: 423110 - DNA, 245 bp, Oryza sativa nipponbare
acgtaccggcaccgaatatgcggaacgacccacgcgtccaccgcactcttggatggccaagcgcgctctcggccgatgggctcgcggccatcgatgccgcgcttcgcaacgccgcaagggggctaagatcccggccgttccaaggcagacaggcagggaagccgtccgcccctccgctggatacgcccaggaacgccgccggcgcctgagaccgtcccacgcgcgcgaaagtgacggattttttc

SEQ ID NO: 423111 - DNA, 367 bp, Oryza sativa nipponbare
cacgtaccggcacccgaattcccacgcggacccacacgtgcgcgcacgtgtgcggccacgcgtgcggccaggcagtcgctcttacaaagctggagccagtgcttgaaaaagccgggagaaaacatcgggccaggcgcttacgaagagtaccgaaatgagctccccgtgcccctgcagtaagtacaccaatgagcgcccacgctgactaaagaaacgatagccgtggtgcgcaactctgatcaaggaaacgattaccacatgaagtactacacacccgaacaccgtctagaacatcaagtacgtacacgcgacactgctacgaaagccagacctatagcggtacatggttgctaagcatgccgaacct

SEQ ID NO: 423112 - DNA, 207 bp, Oryza sativa nipponbare
actactatagggaagctgtacgccagcgcgtaccgctccgtgaataaatgaagcgacccacgcggacggacgcctacacacataaagctagtgccgaggaagggactccaatcagatcgagctatggttaaaatggtaactgcgatgagacagaccagtgttctgcatgacaaccggctcaagcatcgcgagaataacgctgcagat

SEQ ID NO: 423113 - DNA, 187 bp, Oryza sativa nipponbare
gggaacgctgtccgcccgcacgtaccgcacccgtattcacggaacgaccaaagcattcgagcacgccatcaaatgaactggagacaagattcaagcactgcacgtatacatctgctaactaaaataatggactgaacttatacatgattaagtcgggtgatctcactatggcagaccagctttatgc

SEQ ID NO: 423114 - DNA, 115 bp, Oryza sativa nipponbare
gacgggattccagactcaacgcacgcgtccgggtgacgagcatgaattcacagtgctgagaaactggatgcagagcttctatgtatgcgtggcgaaataacatgaaggaccgaat

SEQ ID NO: 423115 - DNA, 83 bp, Oryza sativa nipponbare
atagggaatagcggtcagctgcaggtccgggtgccaatttccgtgtagacgcatgcgtccagcttagcgcacatccatgaaca

SEQ ID NO: 423116 - DNA, 59 bp, Oryza sativa nipponbare
cgtaccgtttccatattcacggatgcggccacccgtgcacatctacatgaactttcttg

SEQ ID NO: 423117 - DNA, 96 bp, Oryza sativa nipponbare
tagcgactatacactactatagggaagctgtacgcccgccgtaccgctctcggagattgactgctctgccacgcagtgcgtcatgaatacagactg

SEQ ID NO: 423118 - DNA, 118 bp, Oryza sativa nipponbare
taatctaaccatgcgtccgctttcatgacagctgtttaaacaacatgtgtggggggaagatccaagtcgagtgccatctcaaagtcgagaagctttcccgctgcttgatatttaagat

SEQ ID NO: 423119 - DNA, 172 bp, Oryza sativa nipponbare
  unsure (1)..(172): unsure at all n locations
cctcgccaagttatgtacaataagtaatcgttctgttactcaagagatgaacaagtagaaacgagaggcttaccttgacaaataatgcaataaaaccacaggcttacattaagaaaaaaaaaaaaaaaaaaagtaaaactatgttangtgaaaaggggggcgcgtttaaagg

SEQ ID NO: 423120 - DNA, 337 bp, Oryza sativa nipponbare
aattcccgattagagccagcgatatcaaacatatttcacacatatcaaggataggggatcatttcagtcttgcacgtcggaaccatcctattactctacaggcatgccactcctatgaaagctttacacgggaggatacacaacacattcgtaagcgtgatacttgtgtctggggacattgggcgttgtatggacaacgcgtgctgggacatcacccaccttaaggaaaccactgttcttgaaaacacctttagtggcgatatgcactttacattaatccaatttcaaaaggggtccacatttaacactatttacatgtgcaaagagtaccactcta

SEQ ID NO: 423121 - DNA, 234 bp, Oryza sativa nipponbare
gcccacggcatccagcgatgacgctggggagctcttgcgccggatcgagcggcttgaacgtggtgaacttgacgttgctagaagagcttgaacctattgaatgggtcattcaaaagacatctacatgctatctaatgactgatgcataatacagtctacatactatcttggactgacgccatatttactacacatagttgtgtctcatgcagggactatctaccaaatgcagct

SEQ ID NO: 423122 - DNA, 245 bp, Oryza sativa nipponbare
gctggtacgccggacgtaccggatccgagtcccgaattcccgcaacgacccactcgtgttcccacgcgttcaaggccaaggggagcctggcattcgggtgcgttgcggcatcctacatctacacaatgcgccggccttcctggatcgccagactggggaggacgccgtgttctattgtcacgcacaccggcgtggccgggagaacatactgcctggcgtcgcatgactccgggaagaacaccgcg

SEQ ID NO: 423123 - DNA, 306 bp, Oryza sativa nipponbare
gcagaatataacgacgcgtccggacatactatctgctgaaaatgaagctgatccaggatctaatatatgatactattggagctgcatcatgattatctatgaagatgagctataagctgaataaccactatctcgatggggaggaagcggtagctgagcatttagtatatagaaacaaagtccgtcttgttccaataccagtacagcatcaaactacgacttgtgaccttagcaggcaaacatagcattacaagtaggcttttttacgggcatacatagatatcaaatactgctaatactgcgata

SEQ ID NO: 423124 - DNA, 72 bp, Oryza sativa nipponbare
tacagccagccgtaccgtaccggtatatccggagcgagcccactcttacgactacaagctagattgcgcgcg

SEQ ID NO: 423125 - DNA, 212 bp, Oryza sativa nipponbare
atagacacatgcttccgggcaaccatctcttcggagatccacctgctccggcgtctcagccgtcgaggatcacatacgacccatgcgtgtcacgcgagaaggatgacagacgcaccatatgtgccacgtgagaagctgattacacaacagtgatagtgtgagactataaccaaacacacctacctgaaggggcgtgactatgtgataacatc

SEQ ID NO: 423126 - DNA, 190 bp, Oryza sativa nipponbare
atgacccaagcgtgcagcagctttgagaccacagatgttcccatgtggggtcctgctgctgaacacacactgtcacctgatgtctcttggagcaaaccgcacactggcgctacatcttcatttgaagacggcatatttgagggctacctggtagctgtcacaatatatattcggtgctgcactgagagca

SEQ ID NO: 423127 - DNA, 96 bp, Oryza sativa nipponbare
aagggaagacctactcgtccggtagcgtattgggtagacaacgctagttcgccggctgccgtcttgggtgcactgaggtagatcacaagatgtcta

SEQ ID NO: 423128 - DNA, 87 bp, Oryza sativa nipponbare
aataggacccacgcgtacgatcgctacctgataggagaggagacctgagcatcattgctgggatattacaaatcacaccggagattc

SEQ ID NO: 423129 - DNA, 52 bp, Oryza sativa nipponbare
tcgaaattgagcggtcgactctacacgtatccaatctagatcgcgcgcgcat

SEQ ID NO: 423130 - DNA, 291 bp, Oryza sativa nipponbare
  unsure (1)..(291): unsure at all n locations
cttcctggaggatgagcgtgagcgtgcgcacgacatagcacaccagagcaagggattccagaggttggggctcagcagcgcgcatgcgtcggggtcngccgccgcagccctccgcgcgggggcgatggagcaccagtgctacggccggagcaactcgcggtactagggcangtggatgagggaggcctgcnttgactacggcgacaaggagaacctgctggtggtgtcnatggccgaggcggaagcccangcggcngcngaggagccgcaccactaccaccacccgttcta

SEQ ID NO: 423131 - DNA, 335 bp, Oryza sativa nipponbare
  unsure (1)..(335): unsure at all n locations
ccctcggtaccgtccgaattcgccgggtggccgcgcgcgtccgccagctcctcacctctccagcagccgacggcaatggcgaaggcggtggcnctggcgtgcctcgtggtggccggcgcgggggcgcttctnnccgtggcgccngcgccggcccgcgccgtgtgcaacatgagcaacgacgagttcatgaagtgccagccggcggcggcggctacntctaacccgacgacgaacccgtcggcgggctgctgctcggggctgtcgcacgccgaccttaactgcctctggtcctacaagaacttgccgtgtgctcagcatgtacaagattgacccta

SEQ ID NO: 423132 - DNA, 136 bp, Oryza sativa nipponbare
  unsure (1)..(136): unsure at all n locations
aagacggctaatgatactcccactatatgccaatgtatggcggcgcngttgtggtggttactcccaacgagacccgttcactattctgttggataaaagacaatacatcgaatggataaaatggcggagtcgccac

SEQ ID NO: 423133 - DNA, 372 bp, Oryza sativa nipponbare
  unsure (1)..(372): unsure at all n locations
attccctttcggccgacgcntgcgcccactcgtcctcccacgcgtcccaggacatcaaggccatcaacgtgctgctccaccccaacgggaacggcctnctctgcgacttgcggctctggcnccgctctaccactcactcaccgaccctcacacaacgcacctcgtgggcaccatgggctacctggcgccttagctctcgcacacccgcaatgcttccaaagcgtccccaatctctcacgctccgggccttcattctcgatgtctcctcctgtcccaatcccgttccccatgaccctcgctcactccgcctcgttctcgtccactgggtccttcatcaacccggcaccgagccgatcaccgacactgtggacc

SEQ ID NO: 423134 - DNA, 64 bp, Oryza sativa nipponbare
gggcgcacacatccagttactctatacactaaacttactagtgaagactgtccttctatatata

SEQ ID NO: 423135 - DNA, 189 bp, Oryza sativa nipponbare
cgcgtccgccacacgcttccgcccacgcgtccgctcactcgtacggactccggtacggctaatccggagctagggccaatcgggacctggccacggcgttcttcgtcatcttcgcgctgctcgccggcagtcggctgctacttccacctcgttcacctgcctgcacagacgtaagtcaggggtaccctt

SEQ ID NO: 423136 - DNA, 381 bp, Oryza sativa nipponbare
acacatcaccaacattattattcatggaccggggtacattggggatgggcatctgggaccggcatgttgggcaccttgccgacggtgtacccgccgtcgacaacgagggtgtgcccggtcacgtacttagcctcgtcggaggggaggaacaccggcggccttgccacgtcctcggcctccagtggcacgccatccatctcgtttatggcattctccacgatccggcggtgggcgtcggcgctccggctggggtaccaccttgcgaaggcgaccggcgccatgggcgtccagatgtagttggggggagatggcgttcacgcgcacgccggagcgcgccatctcggccggcacggggcgcaccagcccgagcaccgggggctt

SEQ ID NO: 423137 - DNA, 385 bp, Oryza sativa nipponbare
  unsure (1)..(385): unsure at all n locations
gtccncgatgatctgatcctcnacatcccaaatgcacaggagaaggttggagcatatntngggggcggggcggaacggggagggggggttccacccttcncctangcggttaaacttgatgaatcttctcaatggacatctccacccctgctggctttagcacggtaccaaaaggtttcctggtcctagtggacttggtggggtaccgtataccggaggatgatagggtggttggccgtgttggtacttggtgagggaggggtcatcattggtttgggttgggaggttatgccctgggagaggtatgaataaccatatcggttcagggtatgacatgctatgcaatgaacaatagagctggtcatgagccagggaatttttggga

SEQ ID NO: 423138 - DNA, 442 bp, Oryza sativa nipponbare
  unsure (1)..(442): unsure at all n locations
tcgccgggggtggcggctcttaccccaaggacgctcgcgcgccgtgctcaccatcccctctggtcctggtggggtagggtgatcggcgtgggaggggcgggtcangtgtaacagttactagcagagaagctgtgagcaggtctgaagggtcttggacaccagaaggcatggaggcacttccttatcttaaaaagggatatgggaatgagttgcataagggtctccatgtgggccctgataggtggacaggagtttctaacttggtgaagggagggaagggtgaagcatggggaggggagccttatgatttggaggatactggtaggagctgcaaaagccttgggcgcaagggctttggtcgtatgggtgatatcaaggtccctcttccataccggcaagattcctttaaccttggtatcgtgtcagatgctttggattattt

SEQ ID NO: 423139 - DNA, 489 bp, Oryza sativa nipponbare
  unsure (1)..(489): unsure at all n locations
accctccgaattcccggtcgggggggggtgggcccacacntccggtcnatgataggagttcaaatgttctgcatactgaaacanaaggcttngctggggaacaggaccaattgagaggagcgccaatgctngantttctnattctgctagttcgtcagatatttctgaacatgcagttgaatccttggtaaggagtggtggtccaagttctagaacccgtagacagaaggacaaagaattgaatttgggtcaatcaggagtttgctcttcgtcatgtactaacaggcctactatatcaagatatgctcctgccgatgtgaagcgaccgtgtaatcatgctagcggagtacaacagcatggtcataacaatctggactgtacttcagtacctaattttctgccatcagggtgctcatctggttctggttatagcaggaggtttgatgcaatgagaaaaaggacttctgatgggggaaggttttctagatc

SEQ ID NO: 423140 - DNA, 460 bp, Oryza sativa nipponbare
  unsure (1)..(460): unsure at all n locations
gcgggcggggcgtccnggcacagggattggatttgggtttgaccctcgcagcagcaagtataaagtggcaagaggttttggtaaagggatgacaaaacatcaatgttngtctgtaagtttgaagtgcttaccctgggcactattaatgtatggaggcaaactgaagacccaccttatccaattggtaagtcgactccagttcatgtgaaaggcgctatctactggatgggttctcgaacatcactttggccagatccacccaacacacttgttcgattctggttgactgatgagaagtttagtctgtttccatgcccatgcaatgtaaagccttcctgtttgaccggattgggggatgaattgtactgtggctattttttcagtcaaccactccaactggagatttggggttgtaatgtgtgtgggcaaaaacctgaatggactcgacgctgcgctttac

SEQ ID NO: 423141 - DNA, 443 bp, Oryza sativa nipponbare
cgtaccgaattccctttcgacccacgcgtacgcccacgcgttcgtgaggccgcaaataacgcgctgtcagaacccaaacaagatgcatatctggagggttgtcacaccaataacatgatccgatttgaaccaaagtatcatgtgaatttcaataatccaaatttccgaaaaaagccacctatgtcattggaggatatgctacaaaaggtgaagccattcatagttgcgtatgagggcatccagaaccaggaggaatgggaggaagctgtgaaagatgtaatggcaagggcaccccatatgaaagagctgattgatatgtacagtggccctgatgttgtaactgctaagcaacaagaagaagagctgcatagagtggccaacactctcccaggaaatataccctcttcagtaaagacggttactgataaaactctactgtctct

SEQ ID NO: 423142 - DNA, 314 bp, Oryza sativa nipponbare
gtccggttttcccttttcgacccactcgtccgaaaaaaaaaaaaaaaaaaaaaaaaaaaaaaaaaaaaaaataatactaaaacaatatcaaatggagcgaggttaattacaaccttatataaatctccttccttttcttttttttaatctttattccaccccctttctcatctatttaccccccttttttccccctttatacctctttttttccctccttttttcacatcttaccacttttacaattcccctatctttcccatttcaacatatttcacctcctttcccccttccaaattttttcaaatcccaat

SEQ ID NO: 423143 - DNA, 525 bp, Oryza sativa nipponbare
  unsure (1)..(525): unsure at all n locations
ntcgatcccatcgtcgtccgaagtccatggtccctttctgggtagcgcgcatgagtcatccatccaccacgtcnntgatcggctatctatggcgcgagggcgagatcggccggtatgctagggccatctcgcatcgccatcgacgtggcccgcatcattnatgtaatgcgcnngcggcatgtggtgggaaaacctaaactgggagaagggctcnnggagtttggggagaatcgagaatgnngctgttcnnacgttgtggcttctttcgccgttngccgtgcggcggcggcgggcgggccggagggggttcctgcaggggcgttcttggcagtannctcgttcctggtggtggcacgttcaaacctcgtggctgtccgtctggcgcgccatcctgggccgcgtcgtctgcagtctgcgcttccgctggcgccggcaggatgttcctcnngccggcgagaaatgcggnnatgttcctgaatgcgggcggcgcaagggtgcaagnnntgccgcatgctgtctggctac

SEQ ID NO: 423144 - DNA, 292 bp, Oryza sativa nipponbare
  unsure (1)..(292): unsure at all n locations
aaaaaggggccgaccgacgcgtccgcccacgcgttcggtaatctgtttgtttgtaaagatatattgacggtggcctatttgggcacgtgacatatccatcttaaaatataacccntatattttccatattgactcaagcatacaatcaagaaatgttgcagctgcttctggtgggttttcaatgtttgtatattttgctaattcatccaactttaacacttctacacccaacacaatttgttttgtcttttaccgctatcaatgatacaaagcatgatatctccccataatc

SEQ ID NO: 423145 - DNA, 367 bp, Oryza sativa nipponbare
cccacacatacaaccagggtatttcctacaccgatggtttcaatggggagcaaacattttgcttggcaatctacaccatataatcttatgcaacgatgctaaaaactgcgtatatcacacgagcagtcagattatcctacacaaatcacatgtacaacctactccaatttactctgataattaataacacacctgaacaaaatcctgatctatacaaccactacaaaataaacgttctatattatgatgacaaatccttcactgtcaatcggactcatacgtctacctgcctttatttccaacctcaaactatttagcacgctactataaataatctgatgccccacaccaataacatatcctaacc

SEQ ID NO: 423146 - DNA, 312 bp, Oryza sativa nipponbare
  unsure (1)..(312): unsure at all n locations
taccggtactcggagttctcgacgctcgacccacccagtcgcgcgccacgctgtcgcgtaatgcttcatcggttgcgttatgtgaattaatcgtaacctgaaaccgggtagttgctcaatccattggttgggcatcgtcgtccctgattcacattcactattgttcttgtgttagtagttcgtttttgtatggaagtaagctgacatttgtggcgctctatagaggctactgcccccttttaatgtacaatacaatttttccggagaaaggaagaatgctcattcttgttctctgcaaaaaaaaacccanna

SEQ ID NO: 423147 - DNA, 492 bp, Oryza sativa nipponbare
  unsure (1)..(492): unsure at all n locations
cgtcctgtattccctgttcttccctctcttccgaaaaaaaaaaaaaaaaaaaaaaaaaaaaaaaaaaaaaaaaaaaaaaaaaaaaaaaaaaaaaaaaaaaaaaaaatttaaaaaaaaatataaacctaccttatattaatttcccattcctttccacctcttaattcttctttttattttttttttttcccccccttttctctcttttctcaccttctttccccctcttcccctctttttacccccttttttccccttcctttttttccttctttcccccccccctttaatcccttgccttaccccccttatccccctttccttcccttttttacaatttttccccctcctttttgccttttttacctcctctttttccgttttttctttcctttttccttctttttttccccttttttcttcccntctcttttcttccctttttttaccatttttttttttttttttttctcttttttttccttttttctc

SEQ ID NO: 423148 - DNA, 78 bp, Oryza sativa nipponbare
ctatgggactcgcccttgaccgaggcattaatcgctgatggtgtggcgtatacacgcagactgaccgctactcttgac

SEQ ID NO: 423149 - DNA, 183 bp, Oryza sativa nipponbare
tgccattgacagtaacgaggtcgctgaagattctgatgttgatgaccagggagattgggagtatggtttcgtccttcggattgtgctcttgcttgtactggcatggatgactctgctgatattcaatgcttgaatgattgttattccaatctcacttggtcgtttagtttttgaggctattcc

SEQ ID NO: 423150 - DNA, 110 bp, Oryza sativa nipponbare
gcgattccgtcgccaccgtcgctgcatcagactctccgcctcactcagcgcggcggagccgcgcgcgtgcgctctcacctgacttctgcgctttacctctctcagtgctc

SEQ ID NO: 423151 - DNA, 206 bp, Oryza sativa nipponbare
cctgcggtaccgtccgtattcccggtcgtccctcgcgtccgaaaaaaaaaaaaaaaaaaaaaaaaaaaaaaaaaaaaaaaaaaaaaaaaaaaaaaaaaaaaaggggggggggaatttaattagaagaaaaaaaaaaaaaaaggggggttgtttttggggtttttttttttttttttggttgattgagaattttttggttttttttt

SEQ ID NO: 423152 - DNA, 465 bp, Oryza sativa nipponbare
  unsure (1)..(465): unsure at all n locations
tgcacgtgccgtccgattgcatttcgagcccagacgtacccgtcgggaccagcttatcacagttgtgcatgggtgcaacatctgctgacaagaaggtgtttgaggaccagttgagagggattgtgtgctacagagatgacaagggagagatggtctgtgaagggtatgatgaaggtccaaggctcggaatgcggctgccggagaaggcctgcttcccatggcctatggaggttcagatcactgatttcattgagctggcgacgttccgggtcttcgaagatgccgatgttcttcagatcaagaatgatcagaagaggcagatctgagaagaactgatcaatgatcatgtagtgcaaggcagtagttgtatagaaatgctcatgtgtaagaataattntcaaggtatggaattcaagtacactgaagaggcagttctgatgtaattctgtaccctctctctcttct

SEQ ID NO: 423153 - DNA, 164 bp, Oryza sativa nipponbare
cgtcctaatatacctattccttcaactccttttacattcatatttccatcctctccaccaaacccagcaagattttacttccatttacaattccccctacaaactcaaatccttcctctacaacatcaacttcaacctcttttaactatcgcttcatactcccc

SEQ ID NO: 423154 - DNA, 407 bp, Oryza sativa nipponbare
  unsure (1)..(407): unsure at all n locations
cggttctgaatttccgggttggacccacccttccgggggcagacaaggaggacctgcagggtcttcaactactgattaatctacaagtttagctgcgggattcaattacctggtgaagtacgtgctcaacgatgacgacgtacacggtttgatagtttcacaccctccttgatcaagtcgcaagcgtacgtgttgatgatgttatgattggatgtgactttcgcttcacatttatgttctccctttttgttaccattccttatttcctcatttgtgaaccccaaggttaacatgctatggatttctttgttttgacctaattgtgtaataaggtcatatgtacttggaataattgtaagttaagttttctgcnncnaaagnntctcttttgctccacgagtgtaatg

SEQ ID NO: 423155 - DNA, 313 bp, Oryza sativa nipponbare
cgaatcccggtcgaccacgcgtccgaaataaaaaacaaaaataaaaaataacaaaaaaaaaaaaaaaaaaaaaaaaaaaaaaaaaaagggaaggaactaggggtggggcaccaatacccaaccttatggcgcgcactgttatttccagttttcgtcacctgttttcggctcatggttttcatttttatacctgaaataaatttattggccggatttaaaaaactgggcttgaaaaacctttgcctctcccattttttcttttagcccaaatccttttttttttttgtcttttaaccaaaagagcccccaccgg

SEQ ID NO: 423156 - DNA, 268 bp, Oryza sativa nipponbare
  unsure (1)..(268): unsure at all n locations
cgacccacgcgtacggtaccactgccctgagaaatatgaaaatgaagaacgtctcgctgatcataaggcccaggggaggggcagacctgttacctgccccaatgatggatgccgagcgaaagtttctgttcgctgcatgcaagaccatgattcagcttgcctggttaaaatccttacatgtgagcagaactgtgagaagcggcttttgaggcgttacatgaataggcactgcgtgactgngtgccctatgaggcccatgaagtgccct

SEQ ID NO: 423157 - DNA, 160 bp, Oryza sativa nipponbare
gtccgcccacacgtccggccggatagctcactggtcatgtccgcagtgcaatctccggagatatcgcctgctctgacatatgcacttgctgaagccatcatgcaagagagcgtgttcaagacagggttcaaaacagatgatgcgatctatcatgcagact

SEQ ID NO: 423158 - DNA, 318 bp, Oryza sativa nipponbare
ggtatccgaaaacaaaagggagtatacatttctcgcctacaaacatttcatgcgtacaatgcaaatgtttcacatcgtttgtacccatagagcatttcagattcagcattcctgttagatgggcaaacccaaattcctgaagctgctgaacagtcttatgtctagtagcgtccaggttgacccattgatgtaccttgcttcattctacattgcatctcccagataggcgttgcaggcttgcagcacagggtgtcctctaagttagatctattgactgagtctgtagctccttcctctgaaggcgcctgatccggtgtt

SEQ ID NO: 423159 - DNA, 165 bp, Oryza sativa nipponbare
gtcgagcacgcgtccgaaaaaaataaaaaaataataaaacaacgcgctaattaaaaaaaaaaacaaaaaaataaaaacgagtcgggggtgaacttgcgtaggcctccaatcctcccactctattagcccttgtctctgcttgatgagccgacgtggcgggccttc

SEQ ID NO: 423160 - DNA, 232 bp, Oryza sativa nipponbare
  unsure (1)..(232): unsure at all n locations
tcttttccccnnttcgagggaggacccactcgtcctctaaaaaaataaaaaaataaaataaaataaaataaataaaaaatataaaaaaaaaaaaataaagtaatagaaaaaaaaaagaaaaaaaaaaaaaaatataaaattataaattcgtcccccactttataaaaataaaacttaacttccccttccctccataaaaaaatcatttctttttttccacctaattccaata

SEQ ID NO: 423161 - DNA, 264 bp, Oryza sativa nipponbare
  unsure (1)..(264): unsure at all n locations
acgttcgggccgcgcgtgcgcatccgagcatctcagcgacacattttttgcactaggattggcgcccatcactgcacagcatcggcgacggcgagaacttcacgatcgtcttagccgaccacttcaactgttctgtgtatntagagctcatgctcatcatttcatcanaagctcattttcagctgatgcgatgttcaacttgggtgtgttgggttcagcatctctcaacacagaccattgcgatcactttcctccattgcatca

SEQ ID NO: 423162 - DNA, 121 bp, Oryza sativa nipponbare
aaggaactcataagcgggtgcgggggccaaattgatagctagccgactagaggaagtccgtattttttgcagttcggttgcaccaaatggtgctagctcgctagaatctcttcaagacgat

SEQ ID NO: 423163 - DNA, 104 bp, Oryza sativa nipponbare
  unsure (1)..(104): unsure at all n locations
atatgtctccacttctaaccaagaaaattataaacaacgagaggaaccctctcaattttcacatattttaccatatcacttctttnataacatttccaattata

SEQ ID NO: 423164 - DNA, 84 bp, Oryza sativa nipponbare
tttctacccactcgtcctcccacactcttcctccccatcctcatcccttcttaccactcctttcctccctcctatatctctcca

SEQ ID NO: 423165 - DNA, 346 bp, Oryza sativa nipponbare
  unsure (1)..(346): unsure at all n locations
gtgttgacccgaaacggagggaggacaaacaaattatatccattgtatattacagctcaagtttatttattaatgatccaaaataagcaagcatcatggtgtacgtacgtgtaccctcgcacacatacgagggagtagtatactatactcgtatataaataccggatatgtattttgtacttcaatatatccgacggtggagaagcgtccgatgcaacaatcggacgggtaggatcaaaaggaggtgcgcgggttgagcgccnagtcttctttttggcaacttcaactgctgctcttcttcttcctcatgaacaatgctccaaccagaggaatcaacgatttcttc

SEQ ID NO: 423166 - DNA, 490 bp, Oryza sativa nipponbare
  unsure (1)..(490): unsure at all n locations
gccggggcggccgcccacgcgtccgcagattaaggcgtgaggacagtgactggaataggacttcaattgtgtcacagaggtgggtgcgagcagcacggccggttcctcgggtgtatctgacgcatcttctggtgctctcatcgaagacgactaggcaaactgcagcctcccagatgaagcaattcctgtgcccagtgcggcaatggcctcaagggcgccgtcgatgtgaggcgccaccagcttggagagcctgcanaagagagtccatggtggagatgtgacacattccgaggcagcatcagccttgtcaatgcctgaagctactgctctggaaccagctttgtagtgctgccaatatatggcttactaagggttttggtaatggtctaatggagtttgtggcatcaggatgcatagtttaccttcagttctgtcatgcccttttttggattatctaatcactaatatgacatggcactaataatcaaca

SEQ ID NO: 423167 - DNA, 510 bp, Oryza sativa nipponbare
  unsure (1)..(510): unsure at all n locations
gcggtgggaccgatcgcgtccggcccaccgaattccattcctcgcgattcctctcccctcgcctcctcgtcctccccctactgtagaatcgcctgagaggaggggcgcggangaaaaaaaaagaatagggcttcctcgtcgactaagttaaaaggttgccatggatcacaaggtgaggggatgcctgcagccatatattcccttcctttccataaataactgaggcttgtttgacttacatgataccacaatcatacgctaaaagaacgacaaactgctacttactcaacacgttcagcataaactacccttactctttactcacaaagaactgcatgggtcccgctgtggcgctgcacataccctacattagcctcctcgaagtcggtatgatctactatgtctaaatcgatttttctgatcatgcttggcctactacccattaatactagcttttgtttgagcttaatcttctgtttgtcatccttaaatgtgtacgttattttggtt

SEQ ID NO: 423168 - DNA, 152 bp, Oryza sativa nipponbare
  unsure (1)..(152): unsure at all n locations
cctcccacncnttctctttctcnttccctaactcttcttctacatacctncccccncntttagaagattttaaaaaaaaaaaaacccccttcttctaccttccctcnctcattcactctttttattacctaatcctttacatacctccccta

SEQ ID NO: 423169 - DNA, 505 bp, Oryza sativa nipponbare
ccggcgcgtgcggctatctagaccaagcccgactattataccggacttgtgccataatgcctcagatcatggtaagtctgtgccaagagttggggcaggccacatgaactttcatgctccgccagtagccaacagtccacaaactctgcttgatggcattccaaaccgcgagcaatggtttttcttttactcaggctcacagtaattttgtagatggaaacaacttccaaggaactgaaggtgtctagagcaacagcaacttgtcaagcaaatatgtatgcagagtacaagtacttgctagaagaaacccacaaacatattcaggggagtaaaatgtgcccatcgatgagaggcttatggaaatcgagacaaggggacgctggttgtcatcccttcatgtcctcctagcaattgctgtcattctccgggcaattattcttgttgaaaatagctgttcatcatgctgcttatctgtcagcaatgtgatcgatgacataaacggcat

SEQ ID NO: 423170 - DNA, 437 bp, Oryza sativa nipponbare
cggtccggattcccggtcgccaggcgtccgaaggatgaagcatttggctaaaacaattgctaattcatcttcaggaaacttgggcctgaaccagacggggtttggcaaagtgaagcggataagcctctcatcttatcttagacattctctgcacagtggaagtgactctgatgcacctagtccagcacccttgcctcaacaaggccatcacaatcatcatcaacatcaccatcaccaccaccaccaccatcaccaccaccatagtcatgaagaaaaaaggcatttgtgtccgtctcctgcacctgtacattctcctgttgaacaacccaaatatagatctccaccgtctagtttttcacatccatacaccaataagccaaagaatagaactcctgtagcaccagcagctgagccagtacctagtaaacacaataatc

SEQ ID NO: 423171 - DNA, 326 bp, Oryza sativa nipponbare
  unsure (1)..(326): unsure at all n locations
gcctgcagtaccgtccgggatcccggtcggcccgcgcgtccgcccacgcgtccgaccggacaacgaggcgccccgcctccgccgccggcggcggcggctacgcggctcggccgtgccggcgggggtcttcncggtgctggtggggccggagaaggagcggttcgcggtgcgggcgcggtgcgccaaccacccgctggggggggctctgctggaccaggcggagacagagtacgggttcaccgggtgcgagggccccctcgagctcccctgcgacttctacgccttcatggacattatgtgggagatcgatcatgcctaccccgcct

SEQ ID NO: 423172 - DNA, 132 bp, Oryza sativa nipponbare
  unsure (1)..(132): unsure at all n locations
cccttcctcaccccttccgccaccccttcctccaccccttccgaaaaaaaaaaagggaaggcgcttttaacagggggggttgctctnttcccccccttttttttttctcttacatacaacattatagctctt

SEQ ID NO: 423173 - DNA, 175 bp, Oryza sativa nipponbare
cctgcagtaccgtccgatttcccgtcgaccacgcgtccatgcataggagaatgagactgagctctgctccatctgcgtccacctcatggcgcccggaccaacaggccgggttcttcccggatgtacccaagcctttcaccacaactacattcaacgaaggagaaccatatcttca

SEQ ID NO: 423174 - DNA, 227 bp, Oryza sativa nipponbare
  unsure (1)..(227): unsure at all n locations
tttcgtgncactataagtgcttatattttgtttggttttacaacatttactgtgctgtccatatgtacccgtttgttctgagatggtctantaaattgatatgctttgtcaaaaaaaaaaaaaaaaaaaaaatataaaaaaaaaaattaaaaaaagaggagaataattaaaattttttttaaaataaatcttaaaaaaaaaaaaataaaataaaaaaatttataata

SEQ ID NO: 423175 - DNA, 111 bp, Oryza sativa nipponbare
  unsure (1)..(111): unsure at all n locations
gccgcgcgcgttcagtaagggatcaatctgtttcgatctcacctcgttcgctgccgtttgttgattnataatcggggcgggccaactaacacggggcgggtggtctatatc

SEQ ID NO: 423176 - DNA, 260 bp, Oryza sativa nipponbare
cccggtcgacaacgcgtgcggggaaagagggtgaaaagctcagatatggcagggtccctgaagatgtaaggccatcagctggccagagctggtgtacaggtttccagtggagacttctgctggtgaaacttgcatgctactttccagtcaggtttactcatttaaaagcgtttcaatggctgatctctctcctgcaccattgcaactggatagtggtagagctgcaagtggacagcagggcttctcacccatcaacacag

SEQ ID NO: 423177 - DNA, 182 bp, Oryza sativa nipponbare
ccttattcccttttctacccactcgtcctttccttgtcatccctcaaccccaaaccctactccctcctctccaccttcatgtccttcccatcttgtcacctttatgaggaggaggatgcctcttcttcttcttctttccattactattacatcctctcccatttctctcccatcttcaatct

SEQ ID NO: 423178 - DNA, 432 bp, Oryza sativa nipponbare
ggcgcgcgtccgcccacgcgtccggcagcacgcggccatggggaacatcttcgtgaagaagcccaaggtggcggacggggacagggccatcctgaccctcaatactcatcgccggaagctcgcgcagttccagcagcagcttgagaaggtgattgaagcagaaaaggaagctgcacggcagctagttcaacaaaagaagaaagacagagctttgattgcactgaagaagaagaaagcacaggaagagctgctgaaacaagttgacacatggcaaatgaatgtcgaacaacagctgtcagacattgaactagcaagtaaacagaaggctgtatttgacagcctaaaagctggaaatgctgctcttaagtctatccagaatgagataaatattgatgatgtccaaaagttgatggacgacacagctgaggccaa

SEQ ID NO: 423179 - DNA, 320 bp, Oryza sativa nipponbare
gcctgcagtacagttcccgggtcggcgggacggtgaggccactcttccgcccacgcgtccgcatccagaagaggagcgcgtctggcgctgatcctgatctggtgctgggcgaaccgtgggtgcgcgggggcagagtgtccagtgcccgcatagcgactatggatacgggttccttgaccggaacgcgcgcaacagccaccaatacacttgcaaggacaatgatccactccagcagagcacggagaacaagccatcgccaccggccatcttcccggcaacctacaacacgccgaaccatgctcttaacaatctagattgct

SEQ ID NO: 423180 - DNA, 381 bp, Oryza sativa nipponbare
gccgttccggacttccatttccgacccgcgcgaccggtccgacagcgcttaacctcataccgcccaggcgggaactggcactccgtgcacaagctcatgaggccctactacaaaccgggactgtggattcgcctaccataaactcaccctggactagaggatgaggacgcacgatataatgtgtaagttaatgatcggaatcaaatcttgagtacggctactaactatatgtaactactgatggcttgacctacagagacagacaaaaaactcacagagtgacgataactaacgcatgcgtgcattgtgggcaacaatgtcagctaatgtgcatcatgtcatagatcagcgtgttatagattgacatatagatatcggatg

SEQ ID NO: 423181 - DNA, 327 bp, Oryza sativa nipponbare
gcacgtgccggtaccgattcgcagtttcggcccaggcgtacgcccacgcgtacgcgcaggagcagtgcaaggaatgcctcaacaccttcctttttcaagcaaaacaagtgtactttggcaagagccttagctgggttggtatgaattcggtgtggtgcagactgatgtatagtgtgcggccgttctacggaggccgggcgatgctgcagctgtcggcgccaccaccaccagcagccgaggctccggttctatctctagagcctggagcaggtatggagtatgacctactctgttcttcatttttcctgaagaaaaaaaaattcccca

SEQ ID NO: 423182 - DNA, 302 bp, Oryza sativa nipponbare
accgattctcgcaattccgacctacgacccacgcgtacgaccactcgtacgcgctcacccgaaaaaaaaaaaaaataaaaaaaaaaaaaaaaaaaaggggggacactataaagagatgcaggcttacattcccttgcatccaacagaaataactcttctatatatgccacctaaattcaggggcggtcccctttaatatacaaaatcttccactggcataaccctacttttacccatttttatagggtcgacaaaataaaaaattttgccagctgttttaatagacgaaatgttggaacacc

SEQ ID NO: 423183 - DNA, 184 bp, Oryza sativa nipponbare
gggcggacgcgtccgatctagcaaggacagtactttggacctgtagcgcgcatattatgaattttgatactaaggggtcttaccgagcaacagctcattgtaggcccctgagatgttgctttgcaaagtcctcatgtagatatatatatatatatacaaggtacaaaatgaaattattttggtt

SEQ ID NO: 423184 - DNA, 265 bp, Oryza sativa nipponbare
  unsure (1)..(265): unsure at all n locations
aactttgattcatcataaagccaatctcttctagaataaatttcatactattatactttaatacatgatatggtctggttaaattaatttcctaataacattgaagtattaatcacaatatacccacaactttattatccagttagtaatttataaaaaagatgttcccttgccctttttgtctccaccaatcttnaaatgctttcacctctttatggggtgcttggattaatgctttcagcttttgcattcaccttcatcacaa

SEQ ID NO: 423185 - DNA, 311 bp, Oryza sativa nipponbare
cggtcctccattcccggggggagcgacgcgtccggaggaggcaacactcgtccaatgcttcagtgcaattatacatagacatatgcttgttacggggggggatattaagcgggggggacagtctacattcatctactaacaaggatcgacaactggatgcactggaacagtgcgtactgcacggggcgatcacggatgctggctacagctaatgaggaaataggtaggctagaactcatggatgacccgattgtgttcctcttggacagtgtttacctgatggacctatctaatgatctgagctaagtatt

SEQ ID NO: 423186 - DNA, 481 bp, Oryza sativa nipponbare
ccgtccgaattccggtcgacggggcgtgcgcggactcgtgggcggacgcgtgggtcttgacttgcttgggagaggaagagagaggagttggggggggtcttcagagggggggggggggcttagaatcctaattagagcaaatacatgatatcctaggagataaacacacacacaaaaatctaattgaggaaactgattgccactagcttcaccaagaaatggagagggagcagatgaggatggccatcctgaggcatgaacaaacattcagacaacagggtcatgagctgcacagactgtaccatgttcagaaacagctgatgaaacagatgcagatcggcaagctgaaccaagctcatgcaatcgctgccaacgccgaaaccaaaccgaaattcgagatcactttcgccgagaattcaaccaaccatcaccaccaccaccaattctacagcttccaaagcagcaagatcatgtcttcccc

SEQ ID NO: 423187 - DNA, 136 bp, Oryza sativa nipponbare
tgggccctatatcaggttcaatcatacacaggggaccgggatgtattgtcccacaacataaccaactggtgatgagtctgcccgacacatgctggctcctgtaccaagacattcagaactgtaactgacatggcct

SEQ ID NO: 423188 - DNA, 297 bp, Oryza sativa nipponbare
ctttcctaatcccggacgaccacgcgtccgaaacttataaaaaaaaattattttttttaaaacatataaacaataatataataattttaaatggggaaaaagggtaaaataaaatatgtgtattatattattaatccttctaaaattattttggcgggccattttttaaaataaaattttactgtgacatcctatctaaatataattttttttttttttggaatctataattacattttacgggccgtggtttaaaaactagtgaattggaatatcctttgtttaaattaatttatt

SEQ ID NO: 423189 - DNA, 231 bp, Oryza sativa nipponbare
tttcctttccgttatggccgggtcgtcccactcgtccggtgatactgaatatcggttcaagccatgtcttattaggtctgagcaatgcattaagggctcagaggctgcagagggatcaaggcatacatcgcttgttagtgtcacaagaatggtatttgcatttgagaagggtagctttaagttggaagagcgttatgacgcatttaatcatcataccatctctgtaatagt

SEQ ID NO: 423190 - DNA, 181 bp, Oryza sativa nipponbare
gaaacagggacataaactcgttggtctgcatcccaggaaagatcagattgggaagctcctgaaatatgggttctgaaaatcagacatacaaggcctaagaattgctacatgaatttgctgttactctattcatttgtatatttactcattatcatttctggctgctaaatgagttttagta

SEQ ID NO: 423191 - DNA, 353 bp, Oryza sativa nipponbare
cactcctgcactaccggtcccgaatttcaatggcgggggaggcgtacgcgcacgctttcgatcacgcgtgcaaccactcgttcgtaataaaaaaaataaaaacgaggaggggggaacctaagagtaggtgggatcaaatgctaacctaaataatatgcgagcaggctaagaaaagctcagttcttctgttcaacctattcttttggagccacctccagttatgagtgtcgtcgaccatcgttataacggcgattcgggcttctcatttttaccatgtactgaagaagaataagaagaagaagaagctgacagcagcataaggaagcgtacaagaaggagatagatgaacgaac

SEQ ID NO: 423192 - DNA, 397 bp, Oryza sativa nipponbare
ggtaccgaatcgcaatgtgcggggtagacctacgcgtacgcctacgcttgcgaccactatgaagataccagctacatccgcgacaagcacactcacggcgccgaaacctcatcagagagcttgatgttcaaggtgcctagataggcataggcgggaagctaataaaaactcacggacctacaaaacctacacattaaaggaactgattcatgagaatgggcacatctcacactgctgcaaggccatgtgcagcacgaactcctcgatgcacgccgtgtatgagtatcctagacgaggacgcctctacacgatccaagctataacacgaatccctgcatacaccatacgtgtgatatagacctacctacaattaattctctgccgcgagctttacaac

SEQ ID NO: 423193 - DNA, 372 bp, Oryza sativa nipponbare
cgctgaggcgaaccaggcaaccaagcggctgctgcaatgctctactgcgaggggaggaagtttggttctggcagcgggttatatacgggtacgcccagcctcctaggcgtgggatttaaaggaaggcaagataggggaagaacggcaacggaccccggaatgcggcgtctgttcataatccatgttttcaagctccgccgtgcgagaagacatctttgcagtaacctccctatggtggaaagcgcccaccacaaccaaaccagccattgatggggatggagggggacgcggacggacggacggacggaggaggctggcgccatctcggcgaccacaggctccgaggatgggacgagctcctgcggctgcggc

SEQ ID NO: 423194 - DNA, 145 bp, Oryza sativa nipponbare
atctatatctctatctttccccctccatctagagacggggtccttttttgtctgtggcataactctatctctatttctacctatgtttctaatgcttcattttacctatttcttttcttaataagcggaatctttattatcattt

SEQ ID NO: 423195 - DNA, 469 bp, Oryza sativa nipponbare
cctttattcccgtgtcttccctctcttcctctcctctcgtcctctcctctcgtccgaaaaaaaaaaaaaaaaaaaaaaaaaaaaaaaagaaaaaggaaaaaaaaaaggggggggattttaaaaaaaaaaataaaataaaagtggttggttttaaattttatattttttttttttaattaaagttaatttatattattttttttttttttatagaaataactaatttatttgggcgcgtttttttttttttttcattttttttgccctttccctttcctttttcttttttttttttgttacttgaaattttctttttttgccccttttttttttaccccccttcttggtacccctttccctccccctttttttccctttttgaaacttccttttttttttccttgtagttttaccattaaacctctgagtgttgtagtttcccccacttttccccttttcttttcctttt

SEQ ID NO: 423196 - DNA, 448 bp, Oryza sativa nipponbare
ccggtccggagtggcgggggcggcccacacttcctccctctcctcctctgcttcccggtctcgttcctctacgcctgtctctccgggggggtggtcctcgggggggggcggacaagccctctctggtggcactaagcaggagacaatgcttctaccttatcacggcagggtgggggggcatttctttttggatcacttggttgaggagaatgggcactctacgatgtatacttggattctgagcactgggtggggggtaggccgtgctcctatcaattcggatgcaggggttattggagggcttctttgtatttgcctcgtgctggggggggggtgcattaacagagtgaagcatgaaaaatcagccactcaaaaatcaaaccaatctttcttcctcatcggggggatagctatcttggactggatggggggtgccactcagatatac

SEQ ID NO: 423197 - DNA, 387 bp, Oryza sativa nipponbare
gcggggggcgcgtccgcacaaactgccacacatatcaagaacaaaaccaaatttctcttaaatatatataggggtaggggaaggcgagggggcggacttcactcctcctgcccctccgtcggcgccgccgtcgcctacgacacacgtcacggtgatcggcatgggggtcccgatcgggggcgtcatctggctcggcctcctcggcgggctgctgtgcgtcgtcttcacgaggcggccgcgcgcgcggctcgactaggaggaggaggaacctaatgtggaggaggggcaggacttgaagtgaaggtgacggagcacgtgcgcatcgtggagggcgtcttccgctaggccagggtcccctgcttggcggtcgggggggccatcagctgc

SEQ ID NO: 423198 - DNA, 391 bp, Oryza sativa nipponbare
  unsure (1)..(391): unsure at all n locations
ccttctaatattgatcagaaacaaatcangacattacagataattttggaggggggctcaagggggtgggggggtcnctnccnganggatttnttcagtatttctcaagccgattcccaaaggtggtaattaaagggtgcgggggcatgtccgagcattggaagggcgaagaagctttcagcaaatatttccttggaagctcggcgtagctgtgacctggaggaggggtgaagggcctgccctggctagtgtgtgcactaacactcttctagcaaaaatgtgtggacatgggatttggaccatatatcataggggaaagaaaggtcagcctgtacattggattccacagaattggggattacttataggaaatcaaatcttttacctgact

SEQ ID NO: 423199 - DNA, 287 bp, Oryza sativa nipponbare
gctcgtttacatgatccacgctcacgcactcatgcatgcgacttcttctcctcctctcataccgtcatggttcgccgaatctcatcaaggtctcgccctagcccacgtgctgctcccgtgaggaaccctccgcagccagcaaggcaggctcctactccagcttctgcccagaacggaagtagctctatcctgggaagaattggttccactattgctcaaggcatggcttttggtactggtagtgccatggcacataaggctgttgatgctgtaatgggtccccgtac

SEQ ID NO: 423200 - DNA, 51 bp, Oryza sativa nipponbare
tacgtcgatgcaggcgcccaccgtcgatagcaggtacatctgctggtgcgg

SEQ ID NO: 423201 - DNA, 388 bp, Oryza sativa nipponbare
aaaaaaaaaaaaaaataataaaaaaaaaaaataaaaaaagggaagggaaataaaaaaaagggaggaaataaaaatattaaaataaaaaaaaaaaaaaaaaaaaaaaaaaaaaaaaaataaaaaaaaataataaaatttgggtcgcccttttttaaaaaacaatttttaaatactcttccttccaatgtattattttttttttattgtaacaaaatttaaaataaatggccctgtttttaaaaatattttaattaaaaaaccctatttttaaccaaaattattgcttttataaaaaaactcttttttactttttttaataaaataaaaaaagcccttaccattttcctttttaaattttttcccctcttatattgttaattttaccccc

SEQ ID NO: 423202 - DNA, 422 bp, Oryza sativa nipponbare
cgtgcgccgcatccatgcccgaggcgtgagtcctccgctagctgtcgagttccgccgccgcatcggcggccaagccgcagggtgccaaccagccctcaatcgagctcgagcgcctcgcgcgtcgccgcccctgagcgcagctgcgcagggccaccgccggtcgccgcatctcctccaccgggtgcagcgtctccactggccgccaagaccaacaccatcagtacgccaccaagctacttggttctttcccattgaaggctcgatctgcatttcttgcgtgtttccccatctcatcttagtgctaagtgttctctcctctcctaaatccaatgagttttagaaggggcagtgcatctctagcactcgtacggactggtactggtagcgtgggtatgcggctgcactttgcagattcattagta

SEQ ID NO: 423203 - DNA, 364 bp, Oryza sativa nipponbare
tgtcggggacgcgtccggtgtggatcatcttcactgcgcattgtcacattacaagtttgttcttgcaattgacaatactgggacagaaagctgtgtgaccgagaaattgttctatgccttttaggctgcgtcattgccaatatacttcggggcacccaatgggtgggacttcattcctgcgaattctattatagatgcctgaaaattcatctcactccgccaggtggcattatatgctaaatctggtgcaaatgagcccttatctctattcaggataccatgcatggaggaggtgttgtaccctgggtaactttggaaggtcgggtgaaaagagcctttacacactgcctttgccgactttttt

SEQ ID NO: 423204 - DNA, 154 bp, Oryza sativa nipponbare
ccaacaaaccgcttcccgggggaggacaacggtggggggatgagccatctatgatcacctcacattacgctcgtgattcaatcactaccactattaggcaccccgatctgcacctacgggcggaagatgtgattaatgctagattttttgatgc

SEQ ID NO: 423205 - DNA, 409 bp, Oryza sativa nipponbare
tttccctttcgacaaaaagatggagtatttgaataaaaaaaaaaataaaaaaaaaaaaaaaaaaaaaggaaaggaaaaaaaaaaaaaaggaaaaaaaaaaaataaaaaaaaaaaacaataaaaaaaaacataaaaaaaaaaaaaaaaaaaaaaatagggccggcctctttaaagaaccaaattttcctccctcggcctaccaagaacatactttttttttggttccacaaaaattaatttcccggcccttattttccaaccctgggaactgaaaaacccttggtgtgaccaattttattccctttgaaacaatcccctttttcgctaggtggtttaataggaatatgcccctcccattccccctttccaaaaatgcgccatccctaattgtatattggccccccccttt

SEQ ID NO: 423206 - DNA, 56 bp, Oryza sativa nipponbare
taccggtccgaatgtccgggggggccacacttcgtcacccgttcgccacgcgttcg

SEQ ID NO: 423207 - DNA, 283 bp, Oryza sativa nipponbare
ccgtcatgatctcctagaccacacttttatcttacctgaactaatccgttcgacgggcgggatgccttacattagtgggcgcagaacaatacaagatcctgaaacatactctgcaatatatcatacgtgtctattcaacattggattactagctgacctaatattctggaatatatttaattttgaacagttacctctagcctccattagcaagcgactcttgctttgcctgcacctactaaaattgctcttttgaacagtaaaaatggttctactgttattt

SEQ ID NO: 423208 - DNA, 283 bp, Oryza sativa nipponbare
aacccgttgatgcccgtccgtttccttaaatgcagtctctgcgaccaaaattttatctactatcatcttccattcctataattacttacattcacttattaatcaacactattatctacgtcatcagattctaacatacaaccctcctatttttcacctattatctgagcttatgaggaaccaatatatctcatatacacattaaatccacgctagtcctttaaatacttttcttaaagcaactgttttacttctagattaatttaaatcttttacctttacc

SEQ ID NO: 423209 - DNA, 163 bp, Oryza sativa nipponbare
ccacgcgtgcgcccacgcgtccgttttgtttttctgtgagctggctcattgtaatttggtgtgtgtctcaatagttgtgggagtagcttcaaagtgcaattttattcattttatgacatgtgtgatattcagcaatcaatttattacaccttcacgaattaaa

SEQ ID NO: 423210 - DNA, 360 bp, Oryza sativa nipponbare
tttttcttttctttatttttcttattctatttttttttttctattttattttttattttttttttatctttatttcttttctttatttttttctttaattttttttcttatttttatttttttaatttcttcttttttttttttcttcttatttattttttttttcttttttttttttttttttctttctttttcttttcttctcttcttctttttttttttcctcctttttttcatatatttttttttttatctttacttttttttcctctatttttttctttttcttctatctttcttttacttttttttcttttctttttatttcttcttttttttttttcttttttctcctttttt

SEQ ID NO: 423211 - DNA, 454 bp, Oryza sativa nipponbare
gcgggcggcgtccgcccacgcgtccggccctgagctgtgggcggacccagcattctccaattcaccacctcctagttgagtcccaatccccaaggggtgtgtgcgacagaaccgcagcatctcacttgaattgccactatttgagcgggctgatgaagtggaggtgaagccgcatgctaaatcggctccttcctcgccggtgggtggatcagggtttgacttcttcaatgataatgaaactgctgttgcgacggagaatcttaggaggattctccatctggatatttccgatcattgaatgatgggaggatggaagggtagtgtctgtgtacataggttatcatccactgactttagttgttcacatgcatagtattgtatagagtaatgagaataataagttaggtagtactgtatggtcaatgttatggtggaggtggagttttgtaggtga

SEQ ID NO: 423212 - DNA, 355 bp, Oryza sativa nipponbare
  unsure (1)..(355): unsure at all n locations
ggcgggcgtccaagaggaggcgtcttctgtatcngccttccaggggctaacgaatccggggatattcatccgggggggcctttatcagaggggggcgggtctccaactataccctctcattctacgntcactactacatctacctttaccgcttgctcctgtctggccctgcaactgacatctggttcttgatctttcacacgcttctcatcacataccgcctcaccaacttgaagggcgttgacaacatatgctccaactatttctacttctcgagggtcacaggcatcaatttgatggacatgatttatcttgaggggggggggctttttgttatcttcttcgacctgaatgt

SEQ ID NO: 423213 - DNA, 388 bp, Oryza sativa nipponbare
  unsure (1)..(388): unsure at all n locations
cgcccacgcgngcacccgggggaaacaacataaacaccaaatcgaggagggagagcaccgaagagggggacaaccaagggggggaggggtaggaaaagaccaccctaccccgcgggcacaggaacggcagaaagcgaaacacgcatgttccccacgaggcactcatacggaagaactacacaagtggcgagcgcgacagcggctgccacatagaaccaggcgcagcgcacttacagacaacagagaaacagggcaacggacgcagagaacccagagggggaatggacaaaaagcaaccggacgaaacacaaacccagatagagaaataaaggcgagagaagtaccgacgcaagcacaaggagaaaggcccagcacgagtcacagaaac

SEQ ID NO: 423214 - DNA, 436 bp, Oryza sativa nipponbare
  unsure (1)..(436): unsure at all n locations
gcgtccgctcgagagctcaatgattcgattcagaggttgaccatggtgtccacgatgtacaaggaggcgggcgccacttgcggcgacggggagcactactcgcggctcatccgggagctgtgcgcgctgctcgccgccatcatctccccctcctcctcctcctccaccgcggcggcggcgaggtctccggggatgtcgcccgcggcggcggcgacgatgctgctcggcgcgtcggtggcgctgatgctgtgcgggtcggtgacgttcgcgatcgggctcctnctcatgccgtgggtcggccgcgtcgcgctgttgttcggcctctccgccgccggctccaccctctcctccggcgtcttcggcaaggccgccgccggcgcctcttctccggtgagccacgcttcttcggataataagcctgtattagtggtagctt

SEQ ID NO: 423215 - DNA, 66 bp, Oryza sativa nipponbare
  unsure (1)..(66): unsure at all n locations
attactccttcactctctcctccaaatttccttacaattttctttgtactttcctnttcatatttc

SEQ ID NO: 423216 - DNA, 110 bp, Oryza sativa nipponbare
tagtctagatcgacggcgcccgactaaacccttacacgggaattatggggggggctgggggggggggggaatcattgctgtttaatgagtccttaatacttctgattttg

SEQ ID NO: 423217 - DNA, 524 bp, Oryza sativa nipponbare
gtatataatttaataaaatccttaatttttaaaataaattaataattacaacaaccctccaaaccaaattaacacattaaatccccaatcatttcataatcacaactcccaacatttttagccctcttaaagagcaccttgaaccccccacaccaaaaaaaaaaaaaagggcctgccatttaaaccatccaaacttacctacccgtcccttcaacacaataacattcttataatgacaacaaaatacaactaccccgccctcattttacaacccataaacacgaaaaaccctgtcgctacccaacttaacacccttaaaaaacatccccctttcaccagaaggcactaaatcaaaaaaacccccccacaccttacttacaaacaatttcacaaccctaatcacaaatctcccaccccctttacccccttaaaaaacacaacaagatttgctttcaccacccaacaaaccccctacatttttccaactccccaaccccccccatccttttaaatattttaccctt

SEQ ID NO: 423218 - DNA, 263 bp, Oryza sativa nipponbare
ccccccaaaaacttaaataagcagcgccctttccctaagcgaggaaagggaccacctcattaaaaaacccccttcaaacttatcctataaaggggcctctccccagataatcacctcaccgccccgacatcccaccaaatagttcccattaaataactctaccctccaccattcgcgcattctcctccccagcatcagcagcacaacagctgcccttccttcatggaaggatgcttggctgccctctccttctgctgtctcct

SEQ ID NO: 423219 - DNA, 173 bp, Oryza sativa nipponbare
gaaccgggggcgggggggcctccctttcctccatcaacgagggggagacccgcgtggcggtgcttgcgtctcttgccaagcgcggcggctcggatgcgatcgtgaacatctacggcgcggtggtgcgcctcttggccgagctgctgctcgggacggagtggtcaagggagtgc

SEQ ID NO: 423220 - DNA, 348 bp, Oryza sativa nipponbare
  unsure (1)..(348): unsure at all n locations
gcgtccncccacccgttcgggaaggggaagaggagagatctatatcggagagatccatccatgggggggcgagccctgagcagggagagccgttccatgaacgtgcaataggtgccggggtacctgaagccgctgctgacctggcataacaagaagaatagcagcgaccagaccttccaccgctacatcgacatggacatggagaccagctcggcggaactcttcttccgactgatctacagtcttatggcctgattcaaccttataaacctgcccaaggagcgccggcacctatgccacctcgaggagctcgaaaagccggacacctccaacgcgcgccaccactag

SEQ ID NO: 423221 - DNA, 225 bp, Oryza sativa nipponbare
gcgtccgaggtcgcttgtgcggacgcgtacctatacacgggtatgagagccatggaagcaggacaaaggcagcgccggagacgacagagacgactttctcacacgtcatcgcatcgctaaatgtgattgcctacgtggctgcgaactaagactcgactctgttgttgtcggacaggaccctactcctaataagacctaagaccttgctctgtgtaagactctagt

SEQ ID NO: 423222 - DNA, 325 bp, Oryza sativa nipponbare
acccttccacccgcctacccatattgcataggcctccgcacctaatcctagggggggctaccttgggtattaggcaagctgctcctattctcttcgctggatgccgtctgcatgtctacttctagatcatgtatataatgtgaccctacgttgtcagagacatcggatcgaccttgggtatagtcgatgttagcgtctgtctctaccactgtatcatggcggggcgatatgagaacacgttcaccctcataactcaggatgaccagaccttgctcgcaattaacgatatctggccggcttgttaaatcaagaggccgtgaaacgg

SEQ ID NO: 423223 - DNA, 277 bp, Oryza sativa nipponbare
aggcgtccggtcagtcttggaccgagctgagccgccatggctacgactcggccgtgcgcgcaacgacccgcacctgccgggggatgaagcggcgcgggtggaggccaaggtccggggctacttcgacagcatggccaggaggcgcccttccaagccgccgcggatcgacccggcggacgccggggagggtggggcggaggccgacgccgacgccgacctgccgagagcttcggatgctccgtgacctctaggccataccccagaagttgatgctgga

SEQ ID NO: 423224 - DNA, 289 bp, Oryza sativa nipponbare
ccggtccggggttcgcgccaccgcgcccggagacttgctgtgtcgcttaaatgacgacagaaatgtgcgtgctttgtttgagcgagctctgagcttagtttctcctgaagaatctatagagggggggaaacgatttgctcaatttgagcaaacatacggggatttgtcaagcatgttaaagggggaacaaaaaaagaagggggctttatctaggacatactgagacgccttatctgtcttggaaaacacactttatgacgctggttctcgatacacctatatggatctt

SEQ ID NO: 423225 - DNA, 302 bp, Oryza sativa nipponbare
  unsure (1)..(302): unsure at all n locations
atataatggttcgcggggaaaggcgcgctgctgtctctgtcgcgtattgatggctcccgcgcggcgcgaacgngacaccggggtgtggctagacgtcagcgagaggggccggctgcggggtgctctgacacggcggaccgtgacgtgtctgacacacaggcagaggctgcactgggacaggcttcccaggataaagcttcccacctgttttttgnctgcgtcttcaccaccagcaagtgcttcggcttcggggccctaatcgatcaatcgatcacgtcgtcgtctcggctcgtcatcaaatc

SEQ ID NO: 423226 - DNA, 63 bp, Oryza sativa nipponbare
  unsure (1)..(63): unsure at all n locations
aaaaaaaaaaaaaaaaatagatataaaaaaaaaaaaaacaaaaaanaagggaaaaaaaaaaaa

SEQ ID NO: 423227 - DNA, 302 bp, Oryza sativa nipponbare
tacggatcctcgggtcgagccacgcctcacgccaccgcttcggtgttcttacctaataaggggggttctttttccggcttgggccccaaaaggtgggggggccctacattgaaagaaccacccaaccgtagcattctatccaggctttaacgggaccttaggacaaggtcaacttgtatcaaggttacggaaggtggcccccctggaaaatgactaacaagctgtggccgtctgggatcttgacatctgaagcttgacatatgaagcaagattataacactttgctgtcaacacctgtgctc

SEQ ID NO: 423228 - DNA, 326 bp, Oryza sativa nipponbare
  unsure (1)..(326): unsure at all n locations
cccacgcgnccgcggacgcgtgggaaaaaaaaaaaaaaaattttaaaaaaaaaaaaaaaaaaaaaaaaagcgcgggggggaaaaaaaaaaaaaaaaaaaaaccccaacccaaaaaaaaaaaaaaaaggggcgcccggacacggggcacccggcacccgaccccgggccggcgccggaaccgccccccatgggggccccctggatgcacttccttgcccctcttttaacacctctttggtttggcaaacccttggctttccccatctaaacggcctttgggcacatctccctttcccccgctgcttaatcccgaaagggcccccacc

SEQ ID NO: 423229 - DNA, 219 bp, Oryza sativa nipponbare
  unsure (1)..(219): unsure at all n locations
aagtgttaatantttaagtaaatctgatattaaaaaaaaagtgtaaaaatataaaagaaaattgaagtgtgtaagaagtaaagtatcaaagataactattagatgtgtgttaatagatatttttaatattgtattgtataaatgaaattgaatgtctagtagtttaacaaatatttttaactgataaaattattgagtttaataatatatattaatttt

SEQ ID NO: 423230 - DNA, 461 bp, Oryza sativa nipponbare
cgcgtacgcgaacgcggcacggctagtcgacaccacgggcatgtgccaactgttcttttatgctacaaggcctgcgacgtgaatatggtgcatttcaagcgctgaagtcagctgagagctttttccatgcttctaatctatcgagtaaaactgattcttcattattttctattgatgttaccttatcagatgagcaggctcaggctgcaatgctgcaccatgaatctggttctgtagaaggcaactctacaaagcttcatagtggctgtactggaacatccttccgtatttcggtgtttgaacaaatgccaggcacactcctagacagaggttcattattgaacaaagcactggcagggatcttctcatcgacattcttacaactagaggacacattaaagatggaatttctcagcaaggctcggaagtttaaggccatcattagggactgattcatgaac

SEQ ID NO: 423231 - DNA, 485 bp, Oryza sativa nipponbare
ttcccggcacgccgccacgcgcacgcgtaacgtccacgcgtgcgcgtgtatggactccaggaagaaatcgccgccctccaccgccgccggggccgcgccggcggcggcgaacgggtacttcagcaccgtcttctccgcgtcgcccacggcaaatacgaaagacgcgaagcaggcggacctgtacgcgatgctgaacaagcagaactccaaagggcagaatggcggtggctttgcagatggcaaatcgcacagccctactaaagctcgtggtgcatacaaggatggtaaacaatcatatccaaacgagtcatcggagtcgccatattttggctcttctgtgcattacggtgctcgggagttttatggcaacactccaccaaagcagggtgatgcatcaccaggaaatcaaaaggagcaggagcagaatccagatggctccctggctaccagaggtgattggtggcaaggttcactctattactaag

SEQ ID NO: 423232 - DNA, 435 bp, Oryza sativa nipponbare
  unsure (1)..(435): unsure at all n locations
cacgcgtccgggatgcctcggcttcgaggccgccgccgccgtctgccccgcggacttccaggcgtaccagaagtactacgatattgtatcagcgttttcaaacgtgaacacacgagaaggattggctgagctttcacacgttatagatggcatggaaggattgagggatgcgatatttagtgacatccccaagctcatgtcagctcttgacttagatgatgctcaccgattcagnatcttctatgattntgtcttcttcatttcccgagaaaatggccaaaagaacatctctgttcagagagctgtgggagcatggaggatggttctaaatgggagggttggttgctcgacaggtggtgtaaccttgttgagaggatgtctggcagcagctgctagctttcagcaggtgtgtaaatggagatttggaaggttatg

SEQ ID NO: 423233 - DNA, 358 bp, Oryza sativa nipponbare
cgaatgacccagcgcgtccgcggacgcgtgggacggacgcgtgggcgacgccatttgtaagaaacctttttgtttctggcggtttactagatgcgtaatggttgctgtgtagcagaatctggcagcaattgtgcggcgagatgaacacatagggggaggaaacattgttgcagacttgcaacatagcatcaggatcactttcctgaatcctgatgatatttattactacatgtttacatcaagatgagtgatattgtacatctctgatttaagttggtgtagttgccaggaatgtcttatgtttagttatgttatatacaaaatacattttgccatcaaaaaaaaaaaaaaaataaaa

SEQ ID NO: 423234 - DNA, 228 bp, Oryza sativa nipponbare
gtcgaccacgcgtccgttcccggcgggatgatcatgccgccgccggcgccggggagcaaggacgccgccgccgccagggcgatggcgacgacgcgggcgtggccgtaccactaccagccgtcgccgtacggcccgtaccaccagcagcagcagtggcagccgccgtacgccatggcgcccagcccgtacgcgtacccgtaccagtaccacccgtcgccgatggcgatg

SEQ ID NO: 423235 - DNA, 71 bp, Oryza sativa nipponbare
gactagcgtgctgcgagagcggcgctgttgtaggggtgctcttcttggcggatcctttgtcaaggttgttc

SEQ ID NO: 423236 - DNA, 301 bp, Oryza sativa nipponbare
  unsure (1)..(301): unsure at all n locations
tcgaccacgcgtcctcttaaacatagtagataatgatgatactggacataaacactgcactggtcaatatttcgggtaggggtcattcattgacaaatgtncaacacccaaactccttaagaagctcaaatgattaccaactgctacttttgtatcattgacttgttctatttacgtaacctttttcgcactttaaactgaatgagataattgtttctattgtaactgtcnttctttcatgacttttaataaaaactcacattttactaatttaaagcattttgatttattctctcttaat

SEQ ID NO: 423237 - DNA, 163 bp, Oryza sativa nipponbare
  unsure (1)..(163): unsure at all n locations
gtccaggaccgatgaagatgcaggcagggacgaccagcgattttgtggncgattacaagtaccggcgagacatcatactgaacattgtcatagccggcaaggacaccacagctggggcgcttgcttggtgatctggcatggtgtgcaagcacccggaagncca

SEQ ID NO: 423238 - DNA, 73 bp, Oryza sativa nipponbare
acgatgatctatctgcatatctgccgtggttagtgggtattgatgtgttatttgtactcgatatactgtgtat

SEQ ID NO: 423239 - DNA, 562 bp, Oryza sativa nipponbare
tcccgtcgaccacgcgtccgcccacgcgtccgctgacgcgtggtgtcgatgcagcttatcaccgagaagagcgacttgtacagcttctgcgtggtgatgctggatatgctgactgttctataccctttttaccccacacttccactactttttcacttatatcactatttccttaatcactttcattttttttcataacatactaatttcttatttaatatatatattataatttttatatttttttctttaaattttattattatttttttatattatattcaaatttatttttttattattttttttcttttatattctttattctttattttttataattattatatatttattatttttttaaatattattattttcatttttaatttatttttatattatttttaatttcttattttttattatattttttaatttttattatatatttaaactattatttctaattttatatttaatttaattatttacttatatttattaatatttcatactttattatatattcttttattattaatattttatattatttata

SEQ ID NO: 423240 - DNA, 209 bp, Oryza sativa nipponbare
acgcgtccgccacgcgtccgccacgcgtccgtaccgaacacggcacgttctcggatcacgtgacggcggacccgtcacgctgtcgtacagcagctgagctggcgtcgggatctaacaagtctacagcccgagcagcgaggacggtgagcgggggtgatgggacaagtgcgtgacggcggaggcgcgctgcggcgggaaggagcgcagat

SEQ ID NO: 423241 - DNA, 188 bp, Oryza sativa nipponbare
  unsure (1)..(188): unsure at all n locations
gaccgtccgggatcccggtcgaccacgcgtccgncgacgtcgagacgctgtgctcgccactccgcgccgggctcgccggcagcgccggtacgccgtcaacggcggtgcgtcgggtccccgacacgccgataagctcgtggcaactacaacatcgccaatgtcatcggttgggacagcgtaccggcgag

SEQ ID NO: 423242 - DNA, 333 bp, Oryza sativa nipponbare
  unsure (1)..(333): unsure at all n locations
cgaatgaccaggcgaccgacgacgtcgtgcgcaacgcgtccgctccgatgggtcctggacctatgccagcatatgggatgcctccaatgggaagctactgagttatcatccacttgtgaagagttcatttagataagaatttcaatttacacagaagaggaggcatctttcaagttgtagatgtgctattattggttgtttaaactgattcttttggtaccaggacaattttggcgagtgaaatctctagccaggtcgagttaattgctggttgctatatatattatgttacgatgggataggatgaggggatggttgtnggttgagcgggat

SEQ ID NO: 423243 - DNA, 306 bp, Oryza sativa nipponbare
caccgtcgcttgctctctctagccaccgcgcgcgcgcgcgcgaccatgccgactcgcggtccggcctgatgtttagcggtgttggggggcttggcttgacccgactgggctcgtagtgctcggccgaggtgccgagccggtgctcgggtacagggattacagccggccgagcttctgatctccggctgcgacctcagcaacgtagcatgctttgacaggtgatcttatatatcgaaagttcaatttccctggtcgtgcacacttactaaggaaattttgggggaatttcttgtgatgcattttgct

SEQ ID NO: 423244 - DNA, 96 bp, Oryza sativa nipponbare
gcccacgcgttctgttcctagtgtgcaagagttgtgctggaccttaaaactgacttgataacctgcgtggtttatgcatgatgtttatcatattaa

SEQ ID NO: 423245 - DNA, 157 bp, Oryza sativa nipponbare
actgctacacctattttatcaacggttgcatgcggcggtcttatgggctaggccttcttttacatcgactacaacagctctcttccataccgaggattcctacccgtacctgatggatgaaggcacctgtcgccgatgtagtatttattgggactac

SEQ ID NO: 423246 - DNA, 168 bp, Oryza sativa nipponbare
cacgcgtccgggcatgtacatttgaatatgtcaagaggacatttagtgtgttactactatcattttgtgatgcctttgcatgtagaattgatgaacatggttattttgtgctgatatagggaaggtggtgtcaccttgtgtttttcgttaactgctgttgttgttgtt

SEQ ID NO: 423247 - DNA, 66 bp, Oryza sativa nipponbare
  unsure (1)..(66): unsure at all n locations
tttttcttttnnttttttttttttttttatttttttataatatttttatttttttttttttttttt

SEQ ID NO: 423248 - DNA, 120 bp, Oryza sativa nipponbare
tacgtccgaattcggtcgccacgctccgggtgcaaaggcaatcaggagaagtcatgcaatgctcttctgctgaggttaacaaattgatctgcactgaagtattgaggcggaaatgtaaag

SEQ ID NO: 423249 - DNA, 214 bp, Oryza sativa nipponbare
cgccgcgccgatcgatcaggagtagcaatggccaggttctccgcagccgccgtgatcgccttcgccgtggtggccgctgccgcgctggccaccgtggcgtccgccgccgacgcgccggcacccgccccgacctccggcgcggtggcggtcgtctcggtgtctctctccgtgtgctgcgttgctgtcttcttttgtctagctccgccactgaagc

SEQ ID NO: 423250 - DNA, 194 bp, Oryza sativa nipponbare
gcgtcgagccatacgtacgactacgcgtccgcatgaactcgtatgctaggcccgaacaagacattgtgcaggagggtatggctccattagctccaatggatgcctggaaggtgatgcggattatcacacacattcattgctagacatgctctaccaaagcggttaacagaactggagagcaccactataatgtt

SEQ ID NO: 423251 - DNA, 285 bp, Oryza sativa nipponbare
acggccggaacccccgtccacccacgcgtccgggcaggcgcgccatttaacaacctaagctagcttactggtgctggaaatcaaccgagacaaagctctctttccctttcggtcggggttctttttctgccgcggattatccacctggaggagagaaggacctgttggaatgccgtggaatatatcgatgattagacgcggggaacaattaattagaagcacgccagcacctggttgggtggcccggcccggcaaccggcaagaacattgggagggtcatgtaat

SEQ ID NO: 423252 - DNA, 436 bp, Oryza sativa nipponbare
  unsure (1)..(436): unsure at all n locations
ccggtcgaccacgcgtccgacctgtcagggggttattgcttccaaggtgtggggagatgacccgcctctctgtgtgtgcgacgattgctattgaggcgggagtaggtttattttagatcctacttttcattaacctcagctcacacatgcactgnnttttattantanggttattctattatcgctgttcttctcttggatccttctgtatgttcatgtccattttacaggcatttatggtgctggatgccttatcactgaaggttcccgtggtgaaggtggtatcttntttattctagtcttttattgtgtctgttgatttagcgttttactgctaattatcttgtttcttcagatgctggttgatgatctatgacaatggtaatttgataaggccgtggtgttgggccattgaaggaccacatctatctgcatc

SEQ ID NO: 423253 - DNA, 307 bp, Oryza sativa nipponbare
  unsure (1)..(307): unsure at all n locations
tttattttttgagctttcttgtttactcgtgcatgcgactcacctagtgctcccttctttctttattcatttcttttnctcgcctctcnctatacacattacctccatgccgacgagctctcaagggagatagctaggctgctgtactgcaccacatggtccggagcggctcccggtttaatggatccatgcttcccaacgcgctcttgcggcggtttaacttttttttagggttaactaatttcaatgaactggccgaatgttcaccactgcaattattatgataaccttgccttaacccacattt

SEQ ID NO: 423254 - DNA, 300 bp, Oryza sativa nipponbare
atggatcccattggggttcaatggagttaatggagaagtttttggagattggaaggggttcctggagggggtcaaggtgggggacaagccacagggggcctattgcgtacgggaccaacgtgggctggagaggctactggggcaacaccctggagcttgggtcggcatgctggccgagacactggagctggagttctttcaggaatttggggaaggaaggataccaaaggtggaggtgcgttggccaatcttggtgaacttttggagggcaactctaacccatgattttggaatcggggg

SEQ ID NO: 423255 - DNA, 384 bp, Oryza sativa nipponbare
ggggttggttttttttttattttttttttttttttttattttttttatttttattattttttttatatttttttttttatttttattttttggggggggaaaaatacacaaatttaaaaaaattttaaacgggggggttaaaaaaaataaaaggtccccaaccttggtggcaaaaaaaaatttttagccataaaaaggggtgaaacaaacaaggaaaaaaaaggggggggtggggggcccatttttaaaaaaaaacaaaaaaattcctcaaaaaaatccggcccgtttaaaaaaaaaaattttttttctacaaaaaaattaatatgcttacattcgaaacattgagggcgcttttttcaaaaaaaggggggggggggggggggg

SEQ ID NO: 423256 - DNA, 114 bp, Oryza sativa nipponbare
  unsure (1)..(114): unsure at all n locations
ctcaaggtcgtagcttcacctggctttntgcattgcagctgtaacanaattaaactaaacgaagagaaacaaacaaatcgtaaagacaaagggttccttttcttactatgatgt

SEQ ID NO: 423257 - DNA, 290 bp, Oryza sativa nipponbare
gcccacacacttcatcacgcttgccatcacccccgcattcacgcgaccgaaaccaacagggggagcggattctacaactattcctcaccctccacaaaatactacgcttgatgaacaaaaaggaactctcatccgtctcggaataccacatttcgcagcatctgcaggcctactctatcaagctatagacgcaaaaactagcaaccattgggacttaatcagaatggatcatctcgaaaaggtatccccaatttgctgcaaagacaaaatcgtactttgggacacccttg

SEQ ID NO: 423258 - DNA, 51 bp, Oryza sativa nipponbare
tccaggcacgacccaccgcgtccggtcggaggcgttcttcccggaagaggg

SEQ ID NO: 423259 - DNA, 414 bp, Oryza sativa nipponbare
  unsure (1)..(414): unsure at all n locations
tccggagttccgagggacgacgtcacgcgtacgcgtacgcccagcggcgaccgcccacgcgtccggaatattctatgaatattccttattcccagaatttgaggactctagcatggacatcctaggagttcctacactggatattaactacgtcattcagatcccacagtaagctaattacgcccaacgatctaacacaattcctttctcagctaattatgcactcttttgtcaggaagagctgcattcctggttctgctgtaactgagggttgatctgcctgatgttgatgtgctgttcagctgttgctgttatgaagtgggaatctctattaccaaatgatacctntcttattgttgcctcctctgatggcgcatttgagaaaatgactatgcaggatgtctgggatctgat

SEQ ID NO: 423260 - DNA, 150 bp, Oryza sativa nipponbare
acccatcgacggacgacgtacgtgtgctctgcttaattgggagctggtagaagaggcccaggtaatttgaatttctgcaaagggggaaagatcaatcaatggcgcttgtcccgtcgttggccaccgtccgttaccccctgttcgggttgc

SEQ ID NO: 423261 - DNA, 241 bp, Oryza sativa nipponbare
cccttccaccattgaataccaccttgccaacagctatgttttctcggagtctgctccgaaacactcacctaccatggcggacgaagccaaccatgctactatagcggcgctgctggttgggatgatctacaccaccgggacgctgatgcacccgcaaactcagatgcgctctacggggggtgacaagatgcatgctcacctcacactggaggaacttcgtctattggagagaatacacaca

SEQ ID NO: 423262 - DNA, 63 bp, Oryza sativa nipponbare
gcttcttatacaacccacttactggtttatgggaatacaacttcttttgcatcttgttgatac

SEQ ID NO: 423263 - DNA, 52 bp, Oryza sativa nipponbare
  unsure (1)..(52): unsure at all n locations
tcgaccacgcgtncggcgcgggttctacgacgaggcgcgtccgctgccggcg

SEQ ID NO: 423264 - DNA, 268 bp, Oryza sativa nipponbare
  unsure (1)..(268): unsure at all n locations
ttcacatagaaaaatgttctatacaattttaattttttacatcccaccnaaaaaaaacaggataatgggggattgttttaatcactacctccaacctcctataactttaatctcctcacatggctatatattaccttctcccacgcagttgtcttcttttttcaaaatcaaataaatgaggggcccctcttttatagagcccaattttttttccccccactacaaagtcctttcttttttttttggtcccccctatttatattttttg

SEQ ID NO: 423265 - DNA, 238 bp, Oryza sativa nipponbare
ccgaacggtcgaccactcgggaccgtgtcaccttcaactcacttcggatccaaaccacgcccccccgcgaccgggcgggctctcacgcctcccaccctctctcgtcccgacaccaatatccgtcggagaaggggccataaaacccgttcatcaagactttaaaattatctgactaccgcttggaagctctgtggtaaactaatccaagctaagagcgtctgattcgctgattactgtc

SEQ ID NO: 423266 - DNA, 204 bp, Oryza sativa nipponbare
gcacccacgcatgcgtccacgcgatcgcgtacttccaaaaaatacaaaaaaaactcgttttcttttcttctcttctcttctcttgttgcggcaaagggggagaggaaggtctaggtccactagatgggcggcggcaatgggcagaagtcgaagatggcgagggagaggaacatggagaagaacaagggcgccaaggggagccag

SEQ ID NO: 423267 - DNA, 109 bp, Oryza sativa nipponbare
  unsure (1)..(109): unsure at all n locations
tccgaaagaaaaatccgtcgagggcacacagatctgtantccagaagtttcttggttttccctctttcttcccctttttcgcgttagcngnnagcatgtgtnncccgga

SEQ ID NO: 423268 - DNA, 118 bp, Oryza sativa nipponbare
gaacaaatacttgacaatattatggaaaaaattacatggggggagtattgcatatttatacagtttacatacatgcctcttatctgtttgataaatgccaaactgaacagatagagat

SEQ ID NO: 423269 - DNA, 222 bp, Oryza sativa nipponbare
gacgccgaattccggtcgaccacgcgtcgccacgcgtcgatgcgtgaagcaagactagcaaggacggtgggctactgcgagtacttgtgttttggagtactaacactgagtttgaactggtggaacgctgcaggatctgagtaagcttaccctgcattgagttgcatcgggagagaggctcgcacttataaggacatgtgggaggtattctaatcacagtct

SEQ ID NO: 423270 - DNA, 123 bp, Oryza sativa nipponbare
  unsure (1)..(123): unsure at all n locations
gaanggaagggccgggccacgcacgcgtccggcgtacgagatgtactaggcctaccggagcaggtgttgtggcgagtacgtttacttaccgggggcgcctattattcctatactcttcattcc

SEQ ID NO: 423271 - DNA, 379 bp, Oryza sativa nipponbare
cgggtggggccgcgcacgcgtccaatccaggctcacgttcaatcaaatgcatgtgacgagcataccgaagctggcgctggaggaggtgtccgacaagaagaaggagatcgcggaggcgctggaggaggaggtggcggaggccatggcgccgtacggctacgaggtgatgcgcgcgctcgatgtggacgtggagcctgaagaggccgtgaggcgcgccatgggcagagagccgggcaaacctcttatatcatttatatcattttccatatgcaaatctgtggttcatctctaaattgtaatgactgggtaagctctctggtcctcccatgtccttgacaataacagtaatatccttcaacttttcaacttatcttcattc

SEQ ID NO: 423272 - DNA, 329 bp, Oryza sativa nipponbare
ttccggagtcgacggacgcgtccagcgcggtcgtcctctcatccgcatgtaacaacaatgcaagcctatcaatgccatgtgtcgtatctgttcagcacccaaagttacaagtgatgttttgagaaaatgatttggtgctgagttttcgttatcgggagggttgtgctccttcaagttaatatggaacggtttgtacaaaatgggatctatatgtacagtagtatgtcgtttgttgtttgtgttggctaagacttttctgtaccgttgtgcttgcacatgaattggatgttttgcctgatgatatgagtgctgtggtatgccctttcctt

SEQ ID NO: 423273 - DNA, 108 bp, Oryza sativa nipponbare
cagacaaaaaaaagatatgagttgtgtgcgtatcattttttctggggttaatggtatttgatcaatcagcatgtccctgtaaaatgaggtcgtgtagatcatgtgcta

SEQ ID NO: 423274 - DNA, 322 bp, Oryza sativa nipponbare
acgcgtcacgcgaactgtgtgcattcatcaaacatgattgagaatcagaagtcagaattgatagtgtttgccttgtgcttcagccttatctcctacctatatgttctggctacaaagaaggatatgcggtttcaaatttcgtatgatgatactactgaaggtcagcagcaaccaacactacaactgatttcagatcttctaaactcaataacagttgctatggaaagagtagctgaagaaaaaatatgttgctaaataagattcgtgacttaaattgagtatctagggaaggaggttgatgatataataaaattatgcatga

SEQ ID NO: 423275 - DNA, 288 bp, Oryza sativa nipponbare
  unsure (1)..(288): unsure at all n locations
aagaaaaatgtcccttttatttgggggaaactaattgttacatccataactaaaaaaccaaagtctcttaataaatagatgttctatgcacacgtacgcgtgcgcatgcacgaattattaagagattataaaaaaaaagattcttgatcgatcatacacagaattcttgaaagttaacaatattatcgtgactccatgcatgcagacgangattattattatatttctatttcccttggcactcctctgggagagggccaaacttgtgctgcaaaaccgcgatgaatt

SEQ ID NO: 423276 - DNA, 187 bp, Oryza sativa nipponbare
acgcgcgattctcggacaccacgcaccgatttcggcaccgcgccgggccacgctggcgcgcgggcggagggaggagcgtgtgcatgagggatcgccgcgcggcgcgcgcgggcgcgtagggcagctgtgctggactgccatcagcgcgagagaggaggcgcgcatttctttaatgggtgtttttatt

SEQ ID NO: 423277 - DNA, 95 bp, Oryza sativa nipponbare
ccgaccgcctctgtgggtcggctgagacaccgtctaggaccatttcgtgagtatatgagcagtcagaagaagcaacagttcagaatgctgatact

SEQ ID NO: 423278 - DNA, 293 bp, Oryza sativa nipponbare
acaaccaatgcgtgcgatacgccatacatgccgcacagccagtgtccgtgtacaaggaaaacatacggaactggaaggataacttacacggagagcctgacaagagcataagaaaacttgaacttaagaactgggatgaccatcactaacttaggactgaagataagcggcacttgacactgcatgacgaagactgcttacgggaagtggggaagggactacagagacataagctgtgaggctaagaagtcccttaagggggagaaggctttggcctaaaaacgggctttggg

SEQ ID NO: 423279 - DNA, 137 bp, Oryza sativa nipponbare
acatcgaatagaccaactcgtccttactagaaagacattcaagatgccgagttgaccttactagaaggagcgtgtctgagcatacctcaagctactgggtgagtatagactgaggtgcacgcgatacctgacaattc

SEQ ID NO: 423280 - DNA, 452 bp, Oryza sativa nipponbare
ctctaacgactcaatagggaaagctgtacagccagcacgtaccggtacccgatatttcaaaatcgacccatctcgttaggctactcatgagtaaaaatcgggcctgtttagaggcttttgataatcatagaactggcatgtttagagaaaaaaaaaaaaaaaaaaaaaaaaaaaaaaaaaaaaaaaaaatataaaaaaaaaaaaaaaaataaaagggggggccgttttaaagaaataaaacttaacaaaacggggggacccgactaaagaactcaattttagtgacccctaaaatgcaaattaatggcccttatttaaaaaccccaaaattagaaaaaccccggggtttcaaaaaaaaattgcctggaaaaaaattccctttccccaagttaaataattagcaaaagagcccctttttaacgccttgttaaaaataaaaaagcctaaaatgg

SEQ ID NO: 423281 - DNA, 167 bp, Oryza sativa nipponbare
tcaggacccacccacacctacgctaacaaacacctaattacacactctgcgcgagcctaatctaggctgaggtaggactagtacaacagcacatcaatctcggccgcgagaggagtagcacttggccgtagcgctcgccgcggccgcggcgatcctcgcggcgagcc

SEQ ID NO: 423282 - DNA, 132 bp, Oryza sativa nipponbare
acctaaatccctggagagacccacgcgttcggttaactaatgcgctcatatagcactccaagtggaggagggccatgcgcattttaaatatttttgaccaggatttgatgtacagaaaaaatatatgaccaa

SEQ ID NO: 423283 - DNA, 299 bp, Oryza sativa nipponbare
cttaccgagtctgagcccatctcttctcgggcgcttgtccttagcctatccttgcgcctcttggctgatgggacggatcatgcgtcaacggtgcgactggctatacctttgttgcatgtacatgtagggcttaattgatatatctgggttgtggttagaaggtgaaccttcaatgatctatgcgaattatgcgtagaagtcaaccgcggacatttagtctactaaccgtacaagaattcgcgggcaacagtgatacttatggcccagtggatcttctggaacaatatgagagatgcact

SEQ ID NO: 423284 - DNA, 221 bp, Oryza sativa nipponbare
cgactcacttagggtaagctggtccagcctagcacgtactcgcatcttaatttcaggttcgacccacgcattcaaccattcctaagcgaggtacaagcgggggaggaagcccatcccaggcgcggtggaaacggcggcgccggtgaaggagacgaacacttgaaagggcggcctccttacgtaatccgcacacgttgtcgtcgcacctgctgacgtggtct

SEQ ID NO: 423285 - DNA, 120 bp, Oryza sativa nipponbare
acacgtaatttccgagaatacccacacgtgcatgacatgtcaccttggacaatctggcgaggaggttgagagcacgcaagggtcacacaaaccccaacatcgccatcatgcttgtgggga

SEQ ID NO: 423286 - DNA, 250 bp, Oryza sativa nipponbare
caatgcgtgcggtcatgctcataattgactcgaccactggaggcggggaggctctatctcgaaggaaggtcagacccgaaagcacatctcttcttgctgtcacactaggggtgacaaccaatgatcaagttcttgaaggacgatggatgccaacactcccaagaacttctatgctagctacaaagagatcgctacagaagtctcatgatacctgaagaacgtatgtttcagtcctgagaagacaacatga

SEQ ID NO: 423287 - DNA, 218 bp, Oryza sativa nipponbare
agatacctgacttgtcgggtcgaccacacacgttcaaaatcatcatatgactggttgagatgactgggaagaatgcacatggtgacggatttgataaacctagggacaggtaggagcgacgcatggcaatcaatccagtgccaggtaagagcacgctgcatgtaagaagatgcactgtgttatagtccagtacaaatggaccgggcatataccgtgga

SEQ ID NO: 423288 - DNA, 56 bp, Oryza sativa nipponbare
aacttgtgtctcacgcatgcggcggaagtttaccaacttgtatatcggggaggagg

SEQ ID NO: 423289 - DNA, 235 bp, Oryza sativa nipponbare
tccacgcatgcggaggagctcatgcacaacgatctaggagcaggcacatctgttgatgtgtacttatcgaggaacatgaacatttgtacctttgtactaggctgggctactgccatctgaatcctttttgaaatggtcgtcatactcactttttggacttttgtcttgtcattgggctcatagcctcattagggtattaacatgtctctggtctaatgcctcataagtgattaac

SEQ ID NO: 423290 - DNA, 184 bp, Oryza sativa nipponbare
tgacgagccgcgttcggccacacgtacgaccataacatgagatggctggcggcgaatttacgacgaggtttcgtaatttgagtgctcgaatttacaatgctgatacttattatggatgctaaaaattaccatgcttgggctgataagcatgggctcatttaagcactgggtggatgggagactg

SEQ ID NO: 423291 - DNA, 139 bp, Oryza sativa nipponbare
gtaccgcacccgatatccccggatcgactcaccgcgcgcacactcgtccggagggatcaactaccaaacgtgcagagtggtgcgtagctgatatctcactaacgcgcagaggggcatgtgcatgatctcctactccacc

SEQ ID NO: 423292 - DNA, 201 bp, Oryza sativa nipponbare
accggcgtgcgtccactcgacagggaaagtataaaaggtagggcatccgatcgacattggaagaagaagaaatcgatcgatcgatcgaacatataatgtagcacgtacgtaccaccacgctgatcgatcatggcgcgggagctgacctgcacgatgaccttttcgagcgtgtggtgcaagctcgccaatgacgccgacgaa

SEQ ID NO: 423293 - DNA, 294 bp, Oryza sativa nipponbare
ccacgcgaattctccgcgagtcgacaccaatcgtctcgacgtccagctaggcgctttatcaggtcgatcgaactgcgcatcaccgctactgagcggattatgtggtggatgtaaagtagatatgtcgaacataaacgcacactcttctgcgcctctgttgatatatgctatgaacttgtgccattaggaatgatttactatggatacatgccagtactatatgcacatatacattcacatcaacaagttcctatataaacatattcactcgatgctccacacatatgtagtctc

SEQ ID NO: 423294 - DNA, 293 bp, Oryza sativa nipponbare
accatcgttcgctcacgcgttcgcttgagggagaattttttgtgctgaaattgttgatggatccagaaatttttgctcgtatcaagaagaaggggagagaaatcttggtttaaatgcatggggctgaaacgattctgcgactggatatcgcctgcgagaacaaccaccccttagcttggacgctcccgtgagcagcactgccttgtccggggccggcaccctgttgccggaatcctcatgcgcgttgcgagagccgacggtgggcatcctcacgggcccgacgagctcaggcg

SEQ ID NO: 423295 - DNA, 204 bp, Oryza sativa nipponbare
acagcgtgcggacgatcgacacctacaagcactacttcaccgcacaggctgcgggcgggatatacgtgtacctgaccacctacaacggggaggttttactaattgctaatgcactatgctaatgcggctgaactaactgcacctacactgaggttatccagatttatgtgaagtacacggtccaagggttggagatatacgctt

SEQ ID NO: 423296 - DNA, 163 bp, Oryza sativa nipponbare
accgtaccggctacacaattcccgacacgacccacctacgacctactcctcatttaacaagtccaccgacaacgaatggtttgggatgtcacccgctaataccgacagaacctgctgcgatgccacttgctggtacaattacaaattccgttggtactatgtt

SEQ ID NO: 423297 - DNA, 335 bp, Oryza sativa nipponbare
aggacaccacgcgtacaccggctgctccaccagctgactgagcgacgcaaacaacctactttactgactgcctgaggcgcaccatcagggaatgctgctgcggaatggtgaagaaccactgaagcctgtgccaggtcacgcgtgaggcgtacgcaaaatgcatacgatggcgcacatgcaacttgcctacggcccaaacgataggcgccatggacatgccttgtatgagaaactttacgtgcatcaagcacacctgatataaccacatctgccacgctatatccaacttacttagatgactactgcctacaagttatgttactatgattgttact

SEQ ID NO: 423298 - DNA, 372 bp, Oryza sativa nipponbare
actcatatggaaagctgtacacctgccgtaccgttccctaataaccgacatgatccacgtgctttataactcccaaattacatactaaaaatcagaaatagagccgttgaactcattagtatcaatcaggaatggagcacataagctcatcggcacaggcggggttggaggaacacaagctcgcccatatcggatgtccgtggcctacagcaacgccgcacattcgtggcatacaggcggaggtagacgcccaagattcgactgtaccacgccaggcttgactcgcatgccctcacctatactactctcgatggtgctatgtctaacacattactactacaacactacatcttataccaacaacagtcgccg

SEQ ID NO: 423299 - DNA, 267 bp, Oryza sativa nipponbare
tttcacggaatttccgttacgacccagctgtgctggctatatcaccagcattagatacatgagcagaaggaaatcacgccttcagttgtgacatgatgggcatggaatgacagctgcagcactgcagagagccgcaaggtgtggaccatgctccgacgatcagcggctgcttagtctggggaacatcgtgaggacaacattaactactgatggtcgcgccttggacggcggcgacgacgttggaggctatgactatgtgaggaagag

SEQ ID NO: 423300 - DNA, 236 bp, Oryza sativa nipponbare
ctacacggaacgtcctaccgtccagcttatgtgctacaaagaacatactcgatggagaaatgatctgtggtccaagttccatcattatgatgaacgtgattgtatcccactaccaacattatggatgaactgatggatgttgctagcgacaaagcttcaaataactcgtattgaactgaccaggtgaagtacaatccattctataagcatatgatctcctaaacaatcggggctct

SEQ ID NO: 423301 - DNA, 278 bp, Oryza sativa nipponbare
acgcgtgcggaccgacgacacgattacgcagaaagccattgaagtcgatgcagacatgtacggaatagaaccaatatctgcagattggacggacagtaagatgaccatcatcggtgaaatggacacagtgtcgatagcaaagatgttgaagatgattgggaagattgacatggtgtctggtgggcctgcaaaagaggagaggatgggggagaggagaggggggaggatagaggggaagagggaggagaagaaggatgataagttagtggaaatgtaag

SEQ ID NO: 423302 - DNA, 151 bp, Oryza sativa nipponbare
ggcttgatagggagatgttgaggccattattattgtttgctcaaggtgagatggaggacgagaagaaggcgactaccgtggaggaggtgagaggggttttggaggataccaaaaaggacgaggctagaagttttgtcatgagcctaaagga

SEQ ID NO: 423303 - DNA, 129 bp, Oryza sativa nipponbare
acgcgtacggaccttatcccggagttgctgacttctttgtaactaacaaatgagagggtggctcatataaatctgaataaatacattcactggaacgcacatacattggcactgacagcttcaggaaaa

SEQ ID NO: 423304 - DNA, 151 bp, Oryza sativa nipponbare
  unsure (1)..(151): unsure at all n locations
ttgcacatncgcctgattaggattttggcacgcaatgcagaaacacgttcctattactagcgcaccaaaaaaaggatggctcatgagttgggaacatggatcagaaaaactatgtaatgagtggaggacattcgaggacaccttattatta

SEQ ID NO: 423305 - DNA, 255 bp, Oryza sativa nipponbare
gacgcgtgggaaaaaaaaaaaaaaaaaaaaaaaaaaaaaaaaaaaataaattaaaatattggggtaaaaattgtttagtgaaatataaatattggtttgtctatgaaaaaaaaaaaaatatataaaaaaaaaaaaaaaaaaaataaatagaaataaattttaaaagatttgtgattggaataacaaatggtgttactaaagttaaattaagttgtattataatagtggttttattaaaaaaaattaaaagtaaaa

SEQ ID NO: 423306 - DNA, 203 bp, Oryza sativa nipponbare
  unsure (1)..(203): unsure at all n locations
tttataaaatatcatcncactcaatttcccaataaatataatatctctatttcatctccccttaactttcttgctatagaaacattttatccatttcatctatctattaattactatttaatttattcccttactatatacatcttctctcttgaataaatgttctttctcatatcaatcataaactttcaactacatttttt

SEQ ID NO: 423307 - DNA, 382 bp, Oryza sativa nipponbare
gaatcccggacgcacccacgcgtgcggaggaggagcccttgcattatgagatctggatgagaaaccctagctctcagacatgataccactgctgctattaggatgcgtgcgctttaaccattgctgggctgacatgcaaatacatagttcccaaggccagccagctctatgttggtgcaccttactggaacgtgccaattataaaaatgtactacaacaatgtgagtcacatcgccatcagaactcgacatccctactcctaagaggctgcctgaaaaatgagatgtaaagttgtccgtattcggagttctgcatggggagtatcttttttttcaaaaaacaacacaatctgattcataccattcgccaaattacgtaacag

SEQ ID NO: 423308 - DNA, 197 bp, Oryza sativa nipponbare
  unsure (1)..(197): unsure at all n locations
cggctgtacatttaaactcaaccatgggcgtgacgaagaggccttcaattgtatgatgatcctcncaagagctntataatcggataatgaactcctttngcaagtaccaacatctactctcaccaaccttaataatcctcatcattattataataaactctaaccatttccattactcaaactttattaaattttat

SEQ ID NO: 423309 - DNA, 410 bp, Oryza sativa nipponbare
gcgtgctcagtgcagaacgagaggcgacgactcgcccacacgttcgtctcccccacctgcctcctccgcctagccgctgaagcagaggaccgttgccaaggctagcagcaacttcaacgcgcaccaacctcgtgaaatctgaaccaaatgagaagagaccggaaaccatctccagagatcaagggaataaaagcgaagactcgacaatctttgtgcaaggcttttaggcgcccaaacccatggaacaagacgttactgacgaagtgaagaagcagaaggctaaaaagaggaagaggaaacctaaatccccgaaaggctttgatccaccaaacccagggccaccaccagatccggagagatggctacccaagagagagcggcaagttaccgcccaaagaggaaggataaga

SEQ ID NO: 423310 - DNA, 222 bp, Oryza sativa nipponbare
agctccacggcccctgtgtgccgccgccgccgccgtcgcccccccacctttaacgtgcagagattaatctatttcgtgggattggaggatttcagatgtcgcattccaaggaagtgaggtacactgcacgttctattacgcctcctgcagatagaaatggctcttcaaagtcaaagtcacccactccagtgagacgcagtccctctaggtcacctcctccaa

SEQ ID NO: 423311 - DNA, 168 bp, Oryza sativa nipponbare
cgacgaccatggtatctgtggcgactccgccccgcagacgacgcgaagctctgggatcccgcttacgaggaggggaaaaggaagagtgaaaacacggccttagagcatcctgttctttttgcatgtgaccaggtagaggggcgggtggggatctagaatgagatgcac

SEQ ID NO: 423312 - DNA, 110 bp, Oryza sativa nipponbare
ttccgtcgaccacgcgtcgcgttgccgacgccggaactttgcacaacgggtaacttccgctcttaccgcagttcctttacggccagactttgccgggcaccccaccggcg

SEQ ID NO: 423313 - DNA, 130 bp, Oryza sativa nipponbare
gggcccacctaaaccttggggccctctctcaaagccacctccttcctgggggtccaggttatgggggacatccacagtttatgcccccaaggccgaaagacaataataatcctcccccggatgtcccctt

SEQ ID NO: 423314 - DNA, 303 bp, Oryza sativa nipponbare
aaagcttgaagattatacatattatatattaaaaaaaaaattaatacaaaaaaaaaaaaaaaaaacaaaaagggcgaactctatcataaacccgggattcctcacatcatcatttcaacttatcaccatttggtacatctttaaataaggttcaattcatttcaatcagatactaacttcttgcttgagtaaactgtttccttaactagaaaaattagatgcatctgaatctatctttaaaaaacttgaagcttttataattctttataagggaaaaagaagacattggatttcttcctcatt

SEQ ID NO: 423315 - DNA, 196 bp, Oryza sativa nipponbare
attccggtcgaccacgcgtccgcaagtgtctggatatgtttgcctattttggacgaagtttagctagctgtaacaaggctaaaacaaataccctaacttgtggcctggggggagccagctgggttatttgcaagaacctattgaagccctttttaacccaggttttttaaacttggatttcaacttatattataat

SEQ ID NO: 423316 - DNA, 309 bp, Oryza sativa nipponbare
  unsure (1)..(309): unsure at all n locations
ccgacgcgtgaccgtactcttcagcgtccaccgcctccacccccagcagctggacccctctcccttcgaccggcttactaaagtcggagcgcagaacgcacngtctccccacacgcaatccaaggttcgcctgacttcgacagctttctcaccaactactgatttgtacttcttcttccaacacaaggcttccaatccatcatccaccgcagttctaatgtaggacccattccactctacatccctatccttattttggatgatcaacctcattgactatccattgtacttacttcccttgtcctattt

SEQ ID NO: 423317 - DNA, 367 bp, Oryza sativa nipponbare
  unsure (1)..(367): unsure at all n locations
gcgtccggcacgtgttgtatacttgattctctaaagcggctcgcctcccaacacaccatccaattgatgatgcagctaaaggaatagaaggagtggattgaaagtttctcgatggatgccttatttttgctgaatatgctagacccagaacaccaccgcatcaaccagaaatgaactcacagccacaacaatcatggggccctccatccagttcctggtgtgcacagtagatgaagatacaatcttgttgccctctatctggccgaggagctcacagcggatcgacaagttattgattctatatttagtttatcgctataccatattgttccaagtgtgaacagagtntccgatccaatattcttat

SEQ ID NO: 423318 - DNA, 246 bp, Oryza sativa nipponbare
cgtcgattccgtcaccaccgtcggtgctatgtctgatggtatacatggggctgatgtatggatctactggtatattacacttgggctggctgaagttatttggcatcaaattgaattgtttacagagaaaaaaattggcagatttaagacttcccaagcagtgattttgaaacaatcgtagtttgggaggtactcaagacaaaaggaaatgcctcaaatatgggctggagatctattcatgggatg

SEQ ID NO: 423319 - DNA, 69 bp, Oryza sativa nipponbare
catctcactccaatattctttctaattttacttatttaaactatgtatctatctaacctccaacattat

SEQ ID NO: 423320 - DNA, 67 bp, Oryza sativa nipponbare
atcgctacgctgagtctgacactatggacacgtgtctcagaggcactggagcgtcgatcgctatgag

SEQ ID NO: 423321 - DNA, 185 bp, Oryza sativa nipponbare
gatcccggtcgacccacctccgcggacctgggaaaaaaaaaaaaaaaaaaaaaataaaaaaaaaaatatataacatacaataaacaattccgaggggccttctttaataggggcgccttttgaggaccaacttactaccgtcatgcacgtataattttttatagtgcacctaaataaataactgc

SEQ ID NO: 423322 - DNA, 168 bp, Oryza sativa nipponbare
ggcgattccgtcgccacgcgtcgcatctcagctgatcagagctctaatagctagctagtgatagctgcgctggatcgatcgatctcgggtcgtacaatggcgtcaagcgttcgctctgtcctggccggacctctcgtgctcgggtgcaagcgcctgcggcggagcccg

SEQ ID NO: 423323 - DNA, 134 bp, Oryza sativa nipponbare
gcgatcgtcgaccacgcgtcgccacatgctgttgtccttctctgagatctctcgatcttaagaggaggaaacctaggaccttgctctctggtggccacccatggagccgcgaggttagcttctctgcgcgcgct

SEQ ID NO: 423324 - DNA, 332 bp, Oryza sativa nipponbare
agtcccggtcggattcccgagtgttcgaccccatgctcgccgagctctacaaccccgtggcggccgacgacgaggagcagcagatcgagcagaagcctgctgcacgcgtcgtgccgttctcggagccgtcgccggagttcgcctccggctcggtggaggcggacggcctctccggcttcgacgtgccggacatggagctcgccagcttcgcggcggacatggagagcctcctcatgggagtcgacgaggggttcgacgatctgggcttcttggacgacgagaagcctcacgtgagactggacctggacatggacatggacttcggctccatc

SEQ ID NO: 423325 - DNA, 242 bp, Oryza sativa nipponbare
  unsure (1)..(242): unsure at all n locations
accggccgattccgggtcgcccacgcgtccgccacgcgtncgcctacgacgtcatccgccagcgcaggaggaggtcgccgccggcggcggcggcggcggcggtgggcgggccgacctcctcaccatcttcaccaagatgcgcgacgccgacaccggcgccggcgtctactccgacagttcctcgcgacatctgcgtaacttatcctcgcggcggacacctgcgggggctgccggtctttgct

SEQ ID NO: 423326 - DNA, 84 bp, Oryza sativa nipponbare
acgacgtgatccgccagcgcaaggatgaggtcgccgccggccgcagaggctgccgccgatggaggagagacctctttacctact

SEQ ID NO: 423327 - DNA, 170 bp, Oryza sativa nipponbare
  unsure (1)..(170): unsure at all n locations
gaccactctgcaacgctctggggtttcccgagaccngccatttcgtgggaccgggcgttggatctgcctctgtcgcaggggctatggctgcaacagctgcgctgattctgaagtcgcgacccgctgatgctacgcagctgacccgggtgccgccgtggggatcatttacc

SEQ ID NO: 423328 - DNA, 310 bp, Oryza sativa nipponbare
caaccaggatacttatatcaaacaatggccgattctcacctcgtctcctctacgtgctcgatcttctggacgcaggcggcaccatacaaaatggtaaatgcaatatatgtagctagaaatgacccattatgtttctattaatcatgaacatttactcctcattagtctgctgttattgggtgattcgattaggcacactgcttaatgtctgttttaacatgcaggatgcctttcacagtttattacacacggctgctgttgagagatctgtatggctatatacatttgcagtatctggtgagtacataat

SEQ ID NO: 423329 - DNA, 202 bp, Oryza sativa nipponbare
tcctgctggatacgtatatgactgaattattagataacggacgatggggtgtactcgagagaatcatttggttgcaagaaaaaaaggaacctgcacgctcatgttgcttctcatctgcagacgctgacccaatcaagtcttggagggagtaccgaggttatgttcatccgcaggtattgccgtacagacatttttcccggcg

SEQ ID NO: 423330 - DNA, 508 bp, Oryza sativa nipponbare
  unsure (1)..(508): unsure at all n locations
ccgggatcgacgcgcatcgcgtcaggcgacgcgtgagctcgccgagtcgaaggaggcgcgcgccaaggccgccgaggccgcgcagcggagacaggaggagtttgatagatcagccgctggaagagcagcaaaagcacagatgaaagctatgaaggaagctaagacatcatcaaaccaaggagaaccagttcttaagtggcagatgggatcgtaaattcttcgttggtgttgaccctgcatccttggcatgctgataatggtagacaagagcttgacagctcttgatttcagggaggattcagctgagtcattttctgatgtgtagttntggtgaagtgtgaattcccttgtcatgtgctgcacacacgttattcagatatatttgtccagctggtgtgtttgttggaacagatcatgtacatttctgtagtagttttatatagtaattttttctctccctttggtacaaatcgttngggatttcggagctggatttattttctccccc

SEQ ID NO: 423331 - DNA, 73 bp, Oryza sativa nipponbare
  unsure (1)..(73): unsure at all n locations
ccagatcaaacgctagatcagatctcatccccctaccttcgtcatcccatacgaggntggtatatggattctt

SEQ ID NO: 423332 - DNA, 331 bp, Oryza sativa nipponbare
  unsure (1)..(331): unsure at all n locations
ttgatagcgatcagatcactagacctgangagcaaagctatgactgacaaatgaccgatcacctagtgcagccatgatagagagaagatgtaactaccacggctgcaccaccgagctggctatccgtgaggacatgacagtgatcctctacgctcataccattatatacgactgctactcgatgatccacagcatacttgtgatgtgctactggtacacacctcactgtgagcctaagcgaagtaacaagatgaacagtggcgccaagatcttgatccaaccttatgtcatgcatgcgtgcactggtacagtatagatctggagtacacac

SEQ ID NO: 423333 - DNA, 396 bp, Oryza sativa nipponbare
aaaaaaaaaaaaaaaaaatttataaattactaaataaaaaaaaaaaaaaaaaaaaaaaaaaaaattaaaataataaaaaaaggcaacgagccctctcgaataaaaataaaataaaaaaaacatatcccttctaactccgtactgaaaagaacggactattgcttccctaaattaaaaccatatttaaaactaactgcaatctggctcctatcaaaaaacctaataaaatcaatgtaatattcatccacaattaatttaaaataaaaaacattaaaataaacctagtgttataaaattgaacaactttaatataaaattaaaaaaaaatttgatataacttaattactataattatcacatattaaaattataataaaatttaaaattactctaatt

SEQ ID NO: 423334 - DNA, 189 bp, Oryza sativa nipponbare
agaaatgatggggatttaaaaaaaaaaaaaaaacactatataaaaaaaaaaaaaaaaaaaaaaaaaatgaagaaagggatgacaataaaaaaaaaaaccaggcctgcctctctgtgcgctcctagcttccctcctctctcattctaccttttttttccttgactggcctacctattttctattttggtg

SEQ ID NO: 423335 - DNA, 542 bp, Oryza sativa nipponbare
ggctcaccggtgctcccgctgcccgccgccgcagcgatctccgaggggagggccgccaggaaggttcttgtggagcgcggcggcgcggacgaggcggatgggatggtgatgtggccgccggcgccggtcatggagctcgcgcgcctcgccgtcgactccggcggcgaccccggtgccatccaccgcgcgctcgaccccaccatgctcccggtgcctgatgttcagagggcgatgaggaacaaatgccaactcacaagaacaccatatgggaggcgtttcgctaacaaggacatcaattcatacctggcgtatttgttcgaattgattgcggcacgaggaccatcagaggggttgaatgtatcacttagtcgtttcgatctctttcacggacacctattccttgcttctgggacaggaaggctcggaattctattccatgctgaagaatatccagcatttgataaggaagttgtcccttacagttcgggactttgtcaggcaggatctaatgagtgtacaatgattctatgaattacggcaca

SEQ ID NO: 423336 - DNA, 353 bp, Oryza sativa nipponbare
tccgatcgccgagtcgcccacgcgtgcgcggacgcgtgggggcacttgatattggcccagactccatcaagacttccagtgacacggtcgatactaccaagactgtcatgtgggatgggcctatgggagtgtacgtgctcgagaaattcgctgctggcactgatgcaatggccaagaaatcgtgtgatatcaccgtcaaagtgtgtctacgacgagcactggagggggcaattctagttctgctgtcgagaacgccgaagaagcggacaagatgagccacatttcaacgggaggtgtcgcgagcttggaactggtggcaggcaagaccctaccaggagtccttgctttaatga

SEQ ID NO: 423337 - DNA, 246 bp, Oryza sativa nipponbare
  unsure (1)..(246): unsure at all n locations
cgcagctggagtatcggtgcaggtgaggatgggacnggaggtgctgagcgtcggcagcagcggctgcggtggtggtgaccgtgtctgcggtcatcagaggcatggtggcctcagacggcttgccgagggcgtgggagatggctgcatctggctagcgcgacatcatttggtggagaggtcaaagaccggcttggcgcagagaagcgcagtcgatggcagcggaggtcggctcggcgcgagaggcac

SEQ ID NO: 423338 - DNA, 537 bp, Oryza sativa nipponbare
cttgtccagaaactactcgtgcatcctcccgccgccgcttccccaccaacgccgccggctgcgcggctgcgacggcgacggcgacgctctcccccggctatctcgaggtttagtgcaagaatgggtcggaaggcgggtgcgctttacataaacccaaagaagttcggtggtgtcacgaagccttgcatgatcgagatggtttccttcctcaattgcctggccttgaacaaacagaacgatgacaagtgtgtccgacagaaggatctcttggttgcttgtgctcaggctcagaaaggaaggccaaagaatgcagcaaagaccatcaattaccatcttcagcgacttgcacgagacaagggcatttagttccggtaatatggaatctttggtgatcatgatgtttggtgccttgatgatatggagtcgtaatgcaatggcctatttgtaataatctttatatctcagactaggcatttcaacacaatatcgatattattttcctctgaactttttacactataaaacgtggtttgcggt

SEQ ID NO: 423339 - DNA, 108 bp, Oryza sativa nipponbare
cgtccgaatccgggtcgcccacgcgtcgcacacagcagctcggctaccactcagctcagagcacctagcaaataagctgacgatgcaaggcgcaagcggctgtcgcgg

SEQ ID NO: 423340 - DNA, 69 bp, Oryza sativa nipponbare
tccgattccgggtcgcccagcgtccgaaaagcatcgatcaggaccctgacccgacccgctgccgcgcgc

SEQ ID NO: 423341 - DNA, 112 bp, Oryza sativa nipponbare
ccggtcgaccacgcgtccgccatgtcatcttccctcctcgcttgccgcctcccttcgcgccctgatgctccgtgacaaacggcgcggcggggggcctgctccccagcgactg

SEQ ID NO: 423342 - DNA, 106 bp, Oryza sativa nipponbare
  unsure (1)..(106): unsure at all n locations
agcttcgggagaactctccccgcgcggccaagggtacagtgcggatggtggcgggttcnacagcgtgagggctcgcgcggtgacgggacggaaggtgagcggcaag

SEQ ID NO: 423343 - DNA, 57 bp, Oryza sativa nipponbare
  unsure (1)..(57): unsure at all n locations
tcggtcgccacgcgtcgacgcgncttgccgcgtcaggcgttcatgccaagccttttt

SEQ ID NO: 423344 - DNA, 158 bp, Oryza sativa nipponbare
  unsure (1)..(158): unsure at all n locations
ttctcttctctggtggtgtgggtgtgtacctntctcccctctccttcctcctatacttttccctcctctcttccccctctcagaagagagagagcgcagacttcccagtgaggatcaccatgaggggcaatcaaggcccgcaagccacccagttgctg

SEQ ID NO: 423345 - DNA, 214 bp, Oryza sativa nipponbare
cgccacgcgtcgtgcagactcactaatagaaacctcgcaagactgatcgaaaccgtcgaatcggagccgcgcactgtcgcatcatgagagaagactctcgcgtcgagagtccgcgtcacagaggcggcagtacgctgtgcccgagcgagctgcaagcatgcgtactgctcatctatgcgccgtgatcactgcgcgcgcgcgcgcttctgcgctg

SEQ ID NO: 423346 - DNA, 229 bp, Oryza sativa nipponbare
cacttgtacaccctcgacccacgaccttgtgagctgaatgtcactgctacactttggatggccctcatcacccgactggacatgttcagtcaccaccctgcgccgctttcaacgccgctcccgcgccgtctctgcaggcacgtctacgtcagcgacgccgagggtgccacgacttcacctgctccgcgactcgcgctgccgatgggacataactccggtgcgagcgcta

SEQ ID NO: 423347 - DNA, 307 bp, Oryza sativa nipponbare
  unsure (1)..(307): unsure at all n locations
tccgaatcccggtcgccacgctccgctatttatccacttcaagttaaagttacaagaaccagacatcaaatgtctgcgtgaagtgcactgcggtctgcgatcngcgtgctgngaaagattacctgacctgctgagagatcaccaccaccacactactgcaccactgtctaggtgttgcactgagaagggcactctgaggggntgcaggcactgaattgcgagctgccatgctgcactgtgctcagctgangtcacccctgcactgctangcangcatctatactgatgcatcacacctgctcatata

SEQ ID NO: 423348 - DNA, 230 bp, Oryza sativa nipponbare
gatccaggtcgaccacgcgtccggaataactatagaaaacagagctgaccatccaatactgcgccctgagctccgaggacctggctgacatgcccatggatgccggcgcgggcgtcgtgcatcgcctagttgccgtcgccgttactcgcgaccactttccagctctcagcgactgagacaagcagctgcagccagagccgtcgctcgcgagggcctacctcatcagccac

SEQ ID NO: 423349 - DNA, 454 bp, Oryza sativa nipponbare
ttgaaggggggctcgtaatgatgaaaaagtgtaaactgaagttgagaaatcgccctggggaactagatgttggggaacgcatgaacttctcgtaattatgggtgatggaactttatatattcattagaagtccaaaaaaaatccgtatactcacggtatggattccctctttctgttcatgttttgctagagatggatgacgtacataatctgcttgtcttgtttcagggaatctgtacatatgcacagtatacttgaaaacaagagacgaagcggtggaaggatattagagaaaaccgccttgttggtatagcatcgatcgattgtggcattgattttgtggtgacagcccatcttccttggccctggcgaggtgggttctatttaatgtgctttacttagtgggttttctttttgctcaatcaactttcgttagcttttggtcggtagagaa

SEQ ID NO: 423350 - DNA, 89 bp, Oryza sativa nipponbare
gtcgacccacgcggccggcggaccgtactaatataacccctaaaagaaactcatgcgaaaaacaggtattagtaacgcttcatcataca

SEQ ID NO: 423351 - DNA, 191 bp, Oryza sativa nipponbare
gtcagggatgcgtgcagtcgctctgcaactggaccaaggtgcttgctgtgggcggcttaccttcttacagccatcctgagcgatatctactacgtcagctactccaagtcccgggatgctgctgggggtgccccgtacggtggcttcaacattggcatgggcactgacagctaaaaggagcttgctgaaca

SEQ ID NO: 423352 - DNA, 81 bp, Oryza sativa nipponbare
tccgctcacgcgttcatttacttctaatcaaacacgaaaataaaccacaaaattaattccaaaaacaaaaaaaacatactt

SEQ ID NO: 423353 - DNA, 160 bp, Oryza sativa nipponbare
  unsure (1)..(160): unsure at all n locations
cggacgnggacgccatataaaaaaaaaaaaaatatacaactcctctcccatctacaaaatccaaacatacaaacgcatacatgcgagtacgtttttttattttatttcatcatcatcaccatttatctcaatacnttttacaattccatatacaataata

SEQ ID NO: 423354 - DNA, 260 bp, Oryza sativa nipponbare
cgaccacgcgtccgtggactcgtggtgtagtgtccaacacttcaattttctgcaactgttcctgatgaggtacctctaagtatgctacattgccatgtaatgagatcttgtatccgtgcacacagtattataaggatgccagggaacacaatcactggtgaagttattacatatagcttgaccaatggtcatactgtcacatatacaagattgaatattatctgaccatatgtgagaaaatgttgactacactgcgttat

SEQ ID NO: 423355 - DNA, 338 bp, Oryza sativa nipponbare
gtccgattcccgttcgaccacgcgtccgaccccagttccgattgatctccggttcccagatcggccaggtttgtccccacccccccccccccccccaattcgcctgctgaatccttcttcccccgcccggtttcatcctgatcggtgcccgtttcatgctgttccgtgcgcggattacggttcttgtgctaggatctttggggggtgggctggtgttgctagatgggtttgttctttcgggggggtgatccggcgggggaggaaagagggaccgattcctctccctgagaaacccttaccatttctgatctgggggatggcccatgggagaggggggg

SEQ ID NO: 423356 - DNA, 263 bp, Oryza sativa nipponbare
  unsure (1)..(263): unsure at all n locations
gccccacgcgtccgcaaaccattgcaactgcactacactgcagcacacacaccccgcacccaccaagctaagtaattaatcatcaatggcttccgccgtggtgaagatggccgtcgtctgcctgctcctcctgtccgccggtcatctgatggcctncgccgccgtcgtgcgcccggacaccgtcgacgacgcggcggcgctgctgcgcctcaaggaccgcatcgagctgcangaggaggaggccctggcccctcgcgaggagc

SEQ ID NO: 423357 - DNA, 80 bp, Oryza sativa nipponbare
gcactgctcagatatgtgtacgaacaagccattccgcaaggataaaaaaataaaagctgtcaagacaaaacgttgtggat

SEQ ID NO: 423358 - DNA, 245 bp, Oryza sativa nipponbare
ccccccgcccacgacgaccactacctttagcatcatgttttttttattgacacactccctctcctcggcgcaaggtcggttttatgagatctgacatcaacatttcaaacatcttgattactgacagccatatgttctcacactaaatgtttctcatacctctaccatcaagacccatgccatcctctgtaacgctcaatttttctgatcataaaatgaacagatcgtaatctccatacattcat

SEQ ID NO: 423359 - DNA, 128 bp, Oryza sativa nipponbare
tgtcaactcatgctgcattctgaacccaaaattctggaggcgtcatgatgctagtagatactcttctagtttttctgtctctgatggtcgaaacagttcggaggggagcagaacttcttacaagtggg

SEQ ID NO: 423360 - DNA, 118 bp, Oryza sativa nipponbare
  unsure (1)..(118): unsure at all n locations
ctgcaatctcgccccgccgcacgcactccactagctaccatcttgaattcttgattgctcggccggcacatgctatgtcgcgcgccgtagttgtggtggtggtggtggncgtgctggc

SEQ ID NO: 423361 - DNA, 292 bp, Oryza sativa nipponbare
  unsure (1)..(292): unsure at all n locations
ngatacccgcgcacacgactccagcaattggcgaaactctggcggcaaagaccagcgcatggtaggagagccggggtctgtcctttacgtatgatggacagcctatgctcgctacattggatgaatatgtcatgctctagcaggaaagggacgaagatccgataagagtgtgggcacaacagcgctacattgagcagcaactgaacaccgaccatgaagggccatattgatcacgcgtgagccctaacagaccagcctgtgctgagaaggtacctggtgcaaaatcaaatgg

SEQ ID NO: 423362 - DNA, 234 bp, Oryza sativa nipponbare
acccacgcgtgcggcggagggtgggatggacgactactctcggtagatgatggatctcaagacgctcttcactcgcaccctagagaataatcccttcgggcccgtgatcatgcttgagctgatagcatgtgtattaaaaaccattggcctgtacctaaggctgagtggctatattcatgttcggacaatagatgtgattaaattgtctcgccacatcccatagctattccaacc

SEQ ID NO: 423363 - DNA, 232 bp, Oryza sativa nipponbare
gtccgatcccggtcgccccgcgtcgcccgcgtcgaaaaaaaaaaaatataaaaaaaaaaaaaaaaaaaaaataaattttaataaaaaaaaaaaaaaaatggaaggggaatatatagggggtgtttggtggtttgttttttttgtttttgattataatttttttaggtatatatttattattggttgggtttataattagttatggtatattggtgtattaatttaatggttt

SEQ ID NO: 423364 - DNA, 332 bp, Oryza sativa nipponbare
cgcgtccggctcttgtgagcaaaaaagctcaacaaacatcgtccaaccttgctcaacatacatttgctccattcactacttctcttccctgtgaggtacagagtgaaaacttcaatgcccctcaccctctaaaatttcaccattctcaagcactctaaacaatatttgccacttctcttactgtcactactctatcatgcatcatacttcatacagttctaatcaaactcctccactattactaaataacctctcaacttcttattcatacttcaaataactttcctctctttatacaatctcaactatttcatacctttcacattattacc

SEQ ID NO: 423365 - DNA, 237 bp, Oryza sativa nipponbare
  unsure (1)..(237): unsure at all n locations
gacccacgcgtccgctcggacaggacgagctnaaagctgcgncgcccatgnncgccgggctcagcgacaagagncgncgcgcacgcgcagagagggcggcgncgacggcgccggaggagcccccgnggcagacgaagcgcgccangcggcgcgnnggcggcgcggacggcggggcgggcagcgacgcgcgagggggccacccggcgcgcgacgcgcagcgggcgcaagaccggacgg

SEQ ID NO: 423366 - DNA, 373 bp, Oryza sativa nipponbare
agaaaaaaaaaaaattaatgttttttttttgtgttttttattatttttttataatgaggataaataataatttttttttttgtataaaaattatgttttttttataaattttatttattttttttttatatattatatatatttttaatatattttataaaatttttttttttttaaaataatatttatttgttttatatattttattaaatatatttttattttttttttttttatatattttttttttgttttatatatatattatatttaatattttttttttttattataatttttattttttttttttttaattttaataatttttaatttattttattatttatttttatattttattttattttta

SEQ ID NO: 423367 - DNA, 75 bp, Oryza sativa nipponbare
caccgccccacgcgtccgaatgtgtatgtgcgagcaagaaagcaagagaaaagaagggcgcacaacaaacgcggg

SEQ ID NO: 423368 - DNA, 122 bp, Oryza sativa nipponbare
gtccccacctcgtgttggggacgatctataagttgtaggtcaacaagctatcgggtacgccacgcgtctttgcgtgattctgacgtcaggccttctttgcagcttttggacattttatgcag

SEQ ID NO: 423369 - DNA, 195 bp, Oryza sativa nipponbare
  unsure (1)..(195): unsure at all n locations
cgatccggtcaccacgcgtcggagacctgtcagtgatagcnacaggctaggaacgatctgcaaattaatacaaagtgggctgataatgtgctcggtgctgtgatggaagagatatgtggtctacttcagatggaatttgntggtcacactcctgctgatgtaaaagtgaatggatgtacaagaggagatttttgg

SEQ ID NO: 423370 - DNA, 100 bp, Oryza sativa nipponbare
gcgatcgcgcccgcgcatccaatgctgagctcgaaacaactgacatgtgaagtgcacactatgtgcacggtgctatcgaaccttttgcttgagaggccag

SEQ ID NO: 423371 - DNA, 132 bp, Oryza sativa nipponbare
ccgaatccggtcgaccacgcgtccgccacgcgtccgagctagcaaatatcaaaaagcagctccagcttcttctgatcgatcgatcgagctgagctataggcagtagctgctaattaagctaattaattgcta

SEQ ID NO: 423372 - DNA, 162 bp, Oryza sativa nipponbare
gacccacgcgttcggtcttgcaaacacacgcagcaaaatccacaccgcttcccctccccgagaagaatatagcagcttacatggctgccaatgcggagagcatgctaagctagtagaagcccgcggaggatgagcctcctgcggagaatgccgagaaggccc

SEQ ID NO: 423373 - DNA, 118 bp, Oryza sativa nipponbare
cacgcgtacgtggacgcgtgggctggatgtgaaccatgatcacatagaaaactgtaaagttgaatcaaatgatttttcgttgaatactatctgtgaaacaagatatccaacagacaat

SEQ ID NO: 423374 - DNA, 137 bp, Oryza sativa nipponbare
gtcgccccctcgtccggtctctgcgccccgccgcgctgcgtgctcttcttcaggtgatatgactatgttactcctcaggggggtcctgacgggctaaataaaagttgcatcgagggcggtggagccagcgtcagtga

SEQ ID NO: 423375 - DNA, 130 bp, Oryza sativa nipponbare
gtccgattcccggtcgacccaccgtcggttatctaattcagtataatgcttaacctgtatcttctttgctgagtcaaggattacatgttaattgcagtgtaactaatgtggatgtcaatcggatggatgg

SEQ ID NO: 423376 - DNA, 246 bp, Oryza sativa nipponbare
  unsure (1)..(246): unsure at all n locations
ccgcgacgcgccgccggcgagaagggacggccnccacgccnncccgaccccgcgcgagcanccagnnncgaggnncnnncnggannncnagganggcgacncngaggaaccngaagancaagacgncgaccngcaagaggancgncaaggagcgccgcccccacgcgaaggaggaccgaaaggaagcgggcaaggcaacagaccggaaggagaaaggcgccgacccccacaancccaagcaacaag

SEQ ID NO: 423377 - DNA, 164 bp, Oryza sativa nipponbare
gccggccggaatccggtcgcccacgcgtcgcctgttccgggctctctactggacgccactcctggctccaccgggcggcttctcctcgttctccaccggcggctcgccaccggcccttcgcctgaccggcgttcgtggggaggcccgggctgagatcgcatgac

SEQ ID NO: 423378 - DNA, 185 bp, Oryza sativa nipponbare
  unsure (1)..(185): unsure at all n locations
ggcggcggcggnaancnncnccgaacngaacagccccgagcaagaaagganccaacccaccnaggaggacnaaccngaacgngcnaangagnncaaagcnagnaacaacaccncngaaanccaaggagcagggccaacgagagcaaccncngcgcgaaccgcaagcgccggcggagcagcangac

SEQ ID NO: 423379 - DNA, 152 bp, Oryza sativa nipponbare
gttacacaatgagggcgggcaggttggtgatcctcgtggcggtggcggtggtggtggtggtcaccgtctgcagagcggcggagggcgccagctagtgcgggagggcgttcgtcgaccgggtggcgctgcggctgtcacctagctgtttctat

SEQ ID NO: 423380 - DNA, 277 bp, Oryza sativa nipponbare
gcgtccgccttgcgccgccgccaagacgagtcgcggctgccgatctccatctggcgaggagagtaggggaggggatcgggttaaaagcttccatccaggaatggcaatggcatttataagagtactgaaacatggcgtaatcccaagagatgcagctcaagtagttggcataagaggatttgcaattgcaagcaaggcaaataagggtggaaagggtgcgtccgatgctgcttaaacccctgtgctcaataaagaacttaatatttctacagtgttt

SEQ ID NO: 423381 - DNA, 113 bp, Oryza sativa nipponbare
gtccgattccgggtcgaccacgcgtcgttgtgagctgatgagtcaaatgtgggcacatgagagagagtacccagtgcttcgagccatgaagcgaatgagcgcaggtggctctg

SEQ ID NO: 423382 - DNA, 334 bp, Oryza sativa nipponbare
  unsure (1)..(334): unsure at all n locations
tcctttacattgntgctccctccgactatattgtcatccgtcgaagcgccaaccgagttaatcccccataccgccctcggcgacatggaactactcattaacaggattggtaaggataccctgaaagcagtggatcacatctatatgtggagggccgcgtgagactacccgcatcacagaaaatatgtgggcgatgataaagtgatccattctactagaggtaggggccaggatgtcggtacaggaacttttattgaccaccttcttatgagcaatggatctaatacaaacacattatgttcaatatgcaacaatgaatgtgccaccagcaata

SEQ ID NO: 423383 - DNA, 106 bp, Oryza sativa nipponbare
ccacgcgtcgcttctctcctttctccctccccgcgcgcgtggtggttcgccggagcgcagcatcagcagcagcaaaaagccgcgaggcccgcgtcggatcccgccg

SEQ ID NO: 423384 - DNA, 86 bp, Oryza sativa nipponbare
tcgacccagcgtccgccacgcgtccgctccagctgatcaagagctcttaattagctagctagtgattagctgcgcctgtgatcgat

SEQ ID NO: 423385 - DNA, 105 bp, Oryza sativa nipponbare
tcgacccagcgttcggcgaccggtggggcgatcgacggcagttcatggagggtacgtcatggcgtctgacaagacgtcacaccctggcggcgtccctctactgtg

SEQ ID NO: 423386 - DNA, 120 bp, Oryza sativa nipponbare
  unsure (1)..(120): unsure at all n locations
gtaccgtccgantcccggtcgacccaccgtcgccaccgttcgagaccgcctaggtagatccagatgttccaacccactccgatccgttgccactgtacctccggagggagtgctagctca

SEQ ID NO: 423387 - DNA, 231 bp, Oryza sativa nipponbare
tccgcacgcgttcgcggactcgtgggcggacacgtgggttgccgctgacaccaaagacgcccccatgttagctgttggggtcaacgtgataagatttcatgtctgacctttacattgtcttcaacgctagttgcacacacctactgactggctcctctcgccaaggtcatcaatgacagatatggcattttttagggtattgacgaccactgtccttgccttctctgcttc

SEQ ID NO: 423388 - DNA, 112 bp, Oryza sativa nipponbare
gcgtccgcggacgcgtgggcggacgcgtgcgctactaagcacaccgtcagcgccgccgcggctacctccgtacattgccatagaaaaaaaaagatagggacataatataggc

SEQ ID NO: 423389 - DNA, 135 bp, Oryza sativa nipponbare
gtcatccaatcattctctgttccgctctctcaccccatcgagataagcgtggcaagcgccaagctcttatctcggccctcgtaaggggtagcccattcgtcaccagggttgagcccgggctcgggctcaagggcc

SEQ ID NO: 423390 - DNA, 159 bp, Oryza sativa nipponbare
tgcagttcggtccgattccgggtcgacccatcgtccgataaatctctcccccctcatctaggttttttggagttgtaaggatccctatgtatatccattactactttccacgctctaggtggagcatcacatctggatcatcccgggaaccctaagccg

SEQ ID NO: 423391 - DNA, 103 bp, Oryza sativa nipponbare
tgcagtccggccggattccggtcgccacgcgtcgatctaatgacacatttccatctgattctaatggctcacagacatataggatcaatgggatgaggaacat

SEQ ID NO: 423392 - DNA, 253 bp, Oryza sativa nipponbare
cacaggacaaataggatcaatgggtatggggaacataatgggactgcagatactgctggctgcacagaagagtacaaagtcattaggaggtatcgcgagcaatcaggaaaagaggaatctatttgtttggaaggagatattggggggggtggggtcttcagcgccaaatatccatctggtagggaaacccaaagattgtggagatcgactccagtgttcgagcaaaacacggagccgatcattctggtgggtt

SEQ ID NO: 423393 - DNA, 216 bp, Oryza sativa nipponbare
tctcagatggtggggccccaccacatgcaccgatgcaacaggcacagtttcctcagcaaccaggcatgcctatggaccctattagtctacctgatggtggcgttcccacacagagccaacctatgacctcgcaacccctggatattacttcacaggcacatggctttcaacctgctattgctgccatgtcgcaaccaattgatcttaatgctcttg

SEQ ID NO: 423394 - DNA, 268 bp, Oryza sativa nipponbare
  unsure (1)..(268): unsure at all n locations
tccgcgattcgagccacgcgtcacgcgcttcggcgcgcagctactttgaagaaatntagagtgctcaaagcaagcgcatcagctctgcgatacatgtagcgatgcggataaccatcatagggagttccggtccttattggtgtgtggcncgttcgaggatccgtgagtcaatgattacataggcgacagggtcggggnngcattcgtatttcaatagtcanggaggtgannaattcttggatttaattgaaaganctgaacaagatta

SEQ ID NO: 423395 - DNA, 107 bp, Oryza sativa nipponbare
accacgcgtccgggtacggtagctccaccaccttctgctgcgccgacgacgacatgaagcgcaatcctctcgtgactagctcccttcccaagtgccgggaggcgcac

SEQ ID NO: 423396 - DNA, 477 bp, Oryza sativa nipponbare
  unsure (1)..(477): unsure at all n locations
gaccacgcgtgcggggggtgttcattaagtccagcttcactagtctcatcagggttatgctcagcagcaattggaacacatagtggaggttctgttaggagaccatcttctctatgtggcattattggtnttgaaaacaacctacngacggacagatatgactggggcactttgtgattgtgggaccgttgaagttgcttctcctctagcagctttagtggaggatgctttgctagtgtattctgcaatagcaggctctatgcctatggataagcttaccctgagaccatcaccgctctgtgtccctaatatggtgtctcctgacaacaacaatatactgtgatcgggaaaataggaaaatatactgagtggtttcatgatgtctccgatcgtgatatctctaatacatgtgaggatgcacttaaacttctttcagcaacttcggatgtcaagtaagatcatactatctaacatacc

SEQ ID NO: 423397 - DNA, 59 bp, Oryza sativa nipponbare
attccgggtcgcccacgcgtccgggaccgtggggacagaagaaagtaagacttatatga

SEQ ID NO: 423398 - DNA, 219 bp, Oryza sativa nipponbare
ccgaattcccgtcgccaccgccgtcatgctcgaggttgtatcgaagcattgctgatgagaaacactactgttggaattgattctagtaacagagtcatgacacattgcagactttgagcttatgctgagagcagctgtgtctattcagtgcttgtgacagttagacctagctatagtactgcatgctgatattctctgaactcgctaggttcatttatt

SEQ ID NO: 423399 - DNA, 128 bp, Oryza sativa nipponbare
ctggaagagggcactaatcgatccatcgatgatgggggaggaattcgcgttccatttaatttctacacatcgggggatttgaagcttaacaagtttagtactactatacatgaaacaactactctatg

SEQ ID NO: 423400 - DNA, 77 bp, Oryza sativa nipponbare
ccggaatgcccggacccacgcgtccgcccacgcgtccgactagtaataaattgaagtgcagtttgttgtgtcgacaa

SEQ ID NO: 423401 - DNA, 147 bp, Oryza sativa nipponbare
  unsure (1)..(147): unsure at all n locations
ttcacctcaatgtcgcctggaccagtaccagcagagctgtcgacaggtgtgcgggcgccgtcgcgagggcgagctgtngcgccgcggcgaacggactcgccaccgcgtcgccggcgagggccgtgccggactacaccgacctgctcg

SEQ ID NO: 423402 - DNA, 376 bp, Oryza sativa nipponbare
gcgtgggcaattttgctcgtgggatggtgtaacttgcatctataggtgaaatatctgtcaggagatagcatttctctaggcgtctagtgtttctagtttgtccagtgctcaaatttgtagtaaaggtggcattgggtgcgattatttttctcgtgcaggggaactcataggtattttcgatgagctgaggggttttgtcatagatcaagagacgcattgtacgctattgactgttacacattactattggctgattagcgatgtgcattaactgaaatagtgactgctccattttatgcaacttgtatggagaatgtaagttagaaaaaaaagcgcgttagacagtctcctgtcagatgttttggacaatatatgc

SEQ ID NO: 423403 - DNA, 158 bp, Oryza sativa nipponbare
  unsure (1)..(158): unsure at all n locations
agcgtcatccgggcgtgttcttcgggggggaggtgtggccttctacgcttcctcacgcccatatacaagatgaccgcggttacgagagactagactcagttgccaggccacagagcactgatctgatccgtgcctncatggtgaagggaacagctggt

SEQ ID NO: 423404 - DNA, 117 bp, Oryza sativa nipponbare
gcgaaggcgaagccggcggcgaggacgaaggcgaaggcgaaggggaaggcggcggcgccgccgccgccgcggcgcgtggtccggtcggagtacgacgacttccggcactacggggca

SEQ ID NO: 423405 - DNA, 323 bp, Oryza sativa nipponbare
cccggtcgaccccgcgtccgcggacgcgtgggcggacgcgtgggcgcggccgatctttacgcaccggaactggcagtcgttcgagccgtcccggacctgagactcggcgcggagcatcactttctgggggcgctatctatcttcgcggcgccctcggtgggcgaggcggatacaggcgccacggaagcgctgttcttatacatactaaccacacgcggagtgctcgacttaaactataggcgcttaccttatagactaataatatataatattctttataattttaattaaaggaggctaataataacactccagccaatgac

SEQ ID NO: 423406 - DNA, 229 bp, Oryza sativa nipponbare
  unsure (1)..(229): unsure at all n locations
tcgacgacgcgtccggaccaaatcccncacttctctctcaatctctctctctgctagggtttatccctccgcgccgccgcccccggaagacgagagagcgccatggccggcggtcccgcggcggtgtcgttcctgaccaacatcgccaaggcggcggcggggctcggcgccgcggcctccctcctgtcggcgtcgctctacaccgtcgacggcggcgagcgcgccgtca

SEQ ID NO: 423407 - DNA, 389 bp, Oryza sativa nipponbare
tgcgtccggccgtccgcccactcgtagaagagacggcacaatttacacttcgccccctccaaatcttctcctactcctcctcctccttctcgccgtcggcgacgggagcgggcccgctagggtttcgggcccgcggggggtacttcttcttcttcttcttttggtcctgtggtcaagcggggccccccgtccgatggtcttcggggcaaccgccgtcgccgccgggggtggagccggggccgccgggggccggaaaggacaacaagctgcttgtcttgtgccggccctaatggaaccccttggcccgttactcgatcggcttcccgtcgacctcgatcgccagaaacttcgctcatttactacacttgccgcaattacaatcacactta

SEQ ID NO: 423408 - DNA, 105 bp, Oryza sativa nipponbare
cgcttcccggtcgaccacgcgtccggtcatcacgcacgcagcgaagactgatgcacctactacttttcagggacatgctgtctcaactgcgtgaggagagggaca

SEQ ID NO: 423409 - DNA, 402 bp, Oryza sativa nipponbare
  unsure (1)..(402): unsure at all n locations
ccacgcgttcgactaggcactctatgggtggtgcaaaccgaaggctatctcttggtggagccaccatgcaacccccgaagactgatatactgcattcaaagtctgttcgtgctgccaagaaaactgaagaaatcggcactttgtcccctagtagtagaggtttggacattgccggattgcctatcaagaagttgtctttcaatgccagtactctacgtgagacggagacacctcgtaaaccttttgctcagatcacaccaggaaacagtgtctcgtcgacgcctgtgcgccctatcaccaataacactgaggatgatgagaacaggactncgaagacatttacagcactgaatcccaagactccgatgactgttacggctccaatgcagatggcaatgactc

SEQ ID NO: 423410 - DNA, 223 bp, Oryza sativa nipponbare
  unsure (1)..(223): unsure at all n locations
gcgttcggaccgagagggagattgattgaaaaaaaaaaaaaaaaaaaaaaaaaaaaaaaaaaaccacaacataaaaaaaaatacatcnatctatcgagggcgtgggtgttcatataccagctccccttctccttcctccngcgtcccacgtcattagatatccaaaccttaaatccaattactatggccccggcttcgccctcatcttctcatgcatgggtgc

SEQ ID NO: 423411 - DNA, 444 bp, Oryza sativa nipponbare
  unsure (1)..(444): unsure at all n locations
agtgatactatatagcagacgacctacctcatgatataggtgtgctcaacaaatcatccggtgtacagatttacatgtgtgaagagaatccgcccgaagtacaactatatatatgaggtgcttctnaccagcgtcaactgactgctttcaggcacgtacgcctcctgatcaaagagtaacatgcggctgatcacaacccagcataatctcgcctgtacagggctcgaatatcaaagctcagcctatgaacagatatctgacatgatcgcatgaacatgccaatcaattactccgtgcaaatcgatcgatcgatcgaatgaaatcaggcgtatccgcccttccacgcggcaccgcgataggcgccgcggatgtacctccggttgttcctgaacgcgcaatagccgagggagtcgactatgacgattaagacgaggaatacgatgc

SEQ ID NO: 423412 - DNA, 425 bp, Oryza sativa nipponbare
  unsure (1)..(425): unsure at all n locations
tcggcctacaacactgtatcattcgctcncacagatatgctggatgtcgacattcaatatcaatgagagacttctgaaggcttcaaatgacatttacggtgcatctaacttcatataaaaaactgcttacaggcacctactgctcctgatcaatgattaccagcgtctatcagaacccataatgatctcccctgttcagggctagagatatcacatctatgcctatgaacagatatctgacatgatcgcatgaacatgccaatcaattactccgtgcgaatcaatcgatcgatcgactgaaatcaggcgaatccgtccttccacgcgacaccgtgataggcgccacggactgtcctcctattattcctgaacccacagtatccgagggagtagaccatgacgattaagactaggaatacgatgca

SEQ ID NO: 423413 - DNA, 287 bp, Oryza sativa nipponbare
aaagctgacaaaacactggggcaccatgatcaacatatggcttcaccatcaaggaaaaggaactatgcatatccacccaagcgttactctaaccctgtcggaccagctggcaggcgcacaaagctctgctggacagaacaagaggaggcaactttgagggaagcaatggcaaaattcaccccaagtgacaacgggccaatttcgcggggccagagactggattacggcacggatgagcgccacaggacacagatcgcatgccacctgcaagggaaacggacgaacat

SEQ ID NO: 423414 - DNA, 341 bp, Oryza sativa nipponbare
  unsure (1)..(341): unsure at all n locations
cgcgtacgcggacagcgctgtgtggtcgacgcgcccttcacgtccgtttcatcgaaccacactaccatcacgcctgctatgttgcttttgtgaaagaaatacgagagactccaaatgtgaagtacggtgcanctgacccccatcaaacaactgcatacaggaacctactacacctgatcaaagagttacaagcggttgatcagtacccaaaataatcttaccctgtacagggctaggatatcccatctaagccaatgaacagatatttgacaagatcgcatgaacatgccaatcaaagacgccgagcaaatcaaacgatcgatcgactgaaatcaggcata

SEQ ID NO: 423415 - DNA, 54 bp, Oryza sativa nipponbare
gcgtccgcacgcgtacgtgacgcatgtgcggactcgagcatgggaataccattt

SEQ ID NO: 423416 - DNA, 112 bp, Oryza sativa nipponbare
cgaccacgcgtccgaagaaaacatactaatcacacctaaaagataaacaaaattttacattacaggggaagaaaaaaaagagaaaaataggtcacctttttttttgttcctg

SEQ ID NO: 423417 - DNA, 305 bp, Oryza sativa nipponbare
ggggttgtgtttttttttttttaaaagaaaagagaaagctttaaataaattcaacgcaaaacagtgatcaatcatttatgcaaaatgaacacagctgtaaaagattgtttaaaatacgtcgccattcaaataaacaaggatgactggaacaagcatttctgatatatgcatagcaccgtcacgtaactgggctaattattgcaacaaaaaaaacagcggttttccatatatataaatcacgatataggaaaatcaagaacattcgtccctaccgaaaaagcaaatcctttttacaaagcattttt

SEQ ID NO: 423418 - DNA, 126 bp, Oryza sativa nipponbare
tatgtgactttgtagtgatgaccaaagagaaatgactggattccagggaatggcaatgagttggacaacaggatcctatcagaaccatatgatgtctcatagtatagactgaacagtatctgtgtg

SEQ ID NO: 423419 - DNA, 107 bp, Oryza sativa nipponbare
ttggccggacccttggccaagaaggaggtttatcagcaatcaattgcggccgtgtgcaatcttgattggccgaggtccagcttgttggttcaggtattggatgattc

SEQ ID NO: 423420 - DNA, 169 bp, Oryza sativa nipponbare
ccgggcggcgtaccgcgcgcgcgccgcgccggcaagggcggggctgaggcggaactccgccgactactgctccgtcgagaccgcctcgggcgtggctcctgcggcctttgccgccgccgcctcggccccggccgtgacaccttcatgtaaaagggagaggcggcgttct

SEQ ID NO: 423421 - DNA, 291 bp, Oryza sativa nipponbare
ccgccgaattcccgtcgccacgcgtcgcgcttctaatcagcgccgtcagactaccagatgacaccccgcacgcacacctagtctactatagggcgggacattgataacggggggagggtgacacaacacctgcaatggacccagtgcacccgtagctaactcaccgggctgcatgcctctaccgccagcgtggaggacatgctaataagcgccgaccaagtgaccttctaaaaattcgacatcgacctatagcagaggagacggacagatgtgcaggggattatgcgcggt

SEQ ID NO: 423422 - DNA, 185 bp, Oryza sativa nipponbare
  unsure (1)..(185): unsure at all n locations
catccctcatatttcaccgttgtatactcnaacctaaatctaaccaacctgccattcattcacaacattcaatccatacaccacacctcacatgctaattttaattatctatacaactataccgctatttctcacctttcacttacatctatcatatcctcacctataatccttctctatcatat

SEQ ID NO: 423423 - DNA, 92 bp, Oryza sativa nipponbare
atttgggacaagatgtcggagagcatctacaaggctaaggaggcttgcgcggaggacacggcaagcggcaagtgcccggcggcttggaacaa

SEQ ID NO: 423424 - DNA, 259 bp, Oryza sativa nipponbare
  unsure (1)..(259): unsure at all n locations
cccggtcgaccacgcgtccggaggcgaggtggccgttggcagcagcggccgtggtggtggtgggaggtctctangggctgcctgcttaagtgctccagcatgcgacgcgatagcttttntatagagacacctaaattaaattcaccgaccgtcatttcacagcgcggagactgacaaaaccctgactggaccaaccttaatggcctcgaactaaatccccttttagccaattggcgttataccaaataggcccataccg

SEQ ID NO: 423425 - DNA, 270 bp, Oryza sativa nipponbare
cgaggagcggtcggagcagacaacgcggagctgactgttcgcgcagctcgtcgcagcatcgacagggctccgtatggcccaccggggttcagcgcccgggagcagcgcgggggggggggggaggctggcggggcgggcctgggataggcagtggcctttttttttgcttcgtggatctgtgatttttacgggagatggattgtcagaagcattgcaagggaattgactgagaaaatgaagaacattggaaataattcagctcattcaatt

SEQ ID NO: 423426 - DNA, 302 bp, Oryza sativa nipponbare
acgcgtccgcggacgcgtgggtcagctccgccagagcaccggtaccgcctccaactccaggctgcaccgcgtaacatcatggcatcctgaacgcgggagctggggcatcctgatcccgatgggcgccatgatcgcgcgctacctcggtgtcgaggcgcgacccggatggtctacctcacatacctgcagcttcggtacatctgggtgcggtggcctggctaagtggagagtcaagcatactacaggcacgacatggatgcattttgctgacctcaggtcgctgtgtgagccacagaaaacag

SEQ ID NO: 423427 - DNA, 121 bp, Oryza sativa nipponbare
  unsure (1)..(121): unsure at all n locations
tcgcccacgctccggcaatggctaccccatgctggactgcacacctaacattgctagttgctggctgggaccanacacgacgatccgcggactggaagacccagttctaacggagctgatg

SEQ ID NO: 423428 - DNA, 221 bp, Oryza sativa nipponbare
  unsure (1)..(221): unsure at all n locations
attacacttttgtagccgtaagtagcaatctgcggcccctatttgctcaagttgttttctatacctaccatttcactaatccaccaaaactgtagtgattaaagcaaagcatttataacagcagaaaattcatgcctctaacttcctgcaagtggtcaaaaaaatgaattatatcattacagttntgctggnaaaaaaaaaaaaactaataaaaatacaaa

SEQ ID NO: 423429 - DNA, 144 bp, Oryza sativa nipponbare
ttccggtcgactacgcgtccgggcactggtggcttccgtagtgggggtggtggctatggaggcggtggctatggcggcggcggtggcggctatggtggtggtggctatggcggtggtggctacagtggtggtggtggtggcggc

SEQ ID NO: 423430 - DNA, 252 bp, Oryza sativa nipponbare
gaccgtccgaattccggtcgccacgcgtcggcaggtacgagctctaccgactatggagacatagagccactgccttacagaagagcgtgtgcaagctaactagggggtatgactgaggcagggagctgggcggtagatgcttgagcgatcgacaagcaggactgtacactgagagaaaatcaccgatttaggtgggactgttgcgatgacgatgctctgtgtggcaaacagtgaatgcctgcctatgtgaga

SEQ ID NO: 423431 - DNA, 239 bp, Oryza sativa nipponbare
gcgtcgggcactacctacagggagtaccggggggacactcacggcgcgcgcacggagcactcgacggtgtacacaaactcgcatctggctcataaaccagccctagctcatggacctgagcagttcaccgctaatggtcgtgaacacccgatccacatactactgcgactagctcgcatggctcgccatggtacctggcagcatcggatgcgtcctgttcacacatagcgtgtatatcg

SEQ ID NO: 423432 - DNA, 111 bp, Oryza sativa nipponbare
accacgcgtccgattagttctaccaagttttctttgttaagttgagatccaatcttgatcttttttatgaatgccattatgagcccatgattagatctcagcgtaacaaag

SEQ ID NO: 423433 - DNA, 162 bp, Oryza sativa nipponbare
cgtattcctctctctcccccgtgttcgcctcgcgctcgcgtatccctccctgcctgcttccgtccagatgcgtgtgggctcgaagaagcggcgggcgatacaccgggagcgtcccgcgtggactccgccccgtctgcgaccagcatgaatcccgagtacgac

SEQ ID NO: 423434 - DNA, 53 bp, Oryza sativa nipponbare
tttgtttgttttttttttttttttttttttttatttttttttttttttgtttt

SEQ ID NO: 423435 - DNA, 225 bp, Oryza sativa nipponbare
atgagagggatcgcgctgccagagacatacgtactcctgctccgaccgacatggtgatcattccaaaaggggccggtggattaacgggcctatctacggcctgagagaggcacgtcaaactactcaggtacctgctatatgtggccaaacgtgctctaagcacgcgggacttgcagagggctcccgtatcgtcatcgatgatggccccaaggtgtgccaatctgc

SEQ ID NO: 423436 - DNA, 394 bp, Oryza sativa nipponbare
acgcgtccggcaaattccaccgatcctatttggatggttcacgtcgcaaggatcatttgattggaatggggtgccgcgaagctatacatacgtggcacactactacctcctcgtcagtctgatgacaacggccagctcgatcatctcgcgaggcacgcgtccggcgggcggcggccgtccgctttctcgagaagcccgacgatacccgtgacctgtatcggagctagaagatgaaagtgcagtttgcttaatctgacgccgacaagataatacatggtcagatcaagcaccgatcattatcattgtctaaagaaaaagaaaagatcaagcaccgatggtcgcgcaaaggaggcgtccgagcagaacgcgggtccgaggcatgaaaccaaaaaga

SEQ ID NO: 423437 - DNA, 77 bp, Oryza sativa nipponbare
cggccggattccggtcgaccacgcgtcgtattctacaccaagcacaccaagaccgcccgcgagccagctgaggaggc

SEQ ID NO: 423438 - DNA, 296 bp, Oryza sativa nipponbare
taaaaaaaagtttacataaagtatatcatgtttatcatataataaccaataaaatacttatcataaaagtttttacaaataagacagatggtaaatgttgaacacaaccaatgcaaaactgcagtcttctgggatggaagtagtataaaactatggcgtgcgggtggcaaactgatgtgattagccacttgtcttttcacgatgctggtttctcgagcttgtgttgatgttaagcgtgattaggcacagactaatgtgcaaatatggtctgtaaataaatataagaatgatggctt

SEQ ID NO: 423439 - DNA, 254 bp, Oryza sativa nipponbare
cgcgtcgcgccaccgcgggctgctgtactgtaactactgcgacaagcatcgcgtttttgattgggggagatagtgtggcagtaccaaataaggatgttggttttagacatgacattgagacatagaaacaacataactgtgaagaagtaggtgtcgtcagatcagcagggcagaaaaccggagcagatcttttcaaagaccaaagtatgatatgcatcatatgtatacttcagaactcttgaccaatgatcaat

SEQ ID NO: 423440 - DNA, 84 bp, Oryza sativa nipponbare
gaccacgcgtccgagtgccaaatgcactgcttacacgtcaaacatagacttcgctgcaaacggaaccagcacacttctggagtt

SEQ ID NO: 423441 - DNA, 57 bp, Oryza sativa nipponbare
caggattccaaaaattttcttttgagcattgacggcttgtatgccattgagacttta

SEQ ID NO: 423442 - DNA, 364 bp, Oryza sativa nipponbare
  unsure (1)..(364): unsure at all n locations
tcgatcccggtcgaccacgcgtccgcccacgcgtccgcttggggttgggttttcagaaaatactattgctgtggtgtgtgtgtgtgtgtgagtgagtgagtgaattaatgagtctctgaaaattctggaataataagaatgtaagcagatgatgtatgtgccttggtgctacttatatatgtgctctcgttttctgatattacagatacatgagacactatatattcatgctactatntgacagattcagttgtttgaaaagggaaaaaaaaacaggctagttaaacattttaaaaaaaattttaattaaatttaataaaattaaatttttaattatagatatttaaaattatatttttttata

SEQ ID NO: 423443 - DNA, 316 bp, Oryza sativa nipponbare
cgggtcgacccaagccgtcggcccgttcctcttcaactaattcctttccttttcttatccaagcggcggtgccggttctggttcaagcttgtttgaatcccgtatcttgagagatcgagggcgcgccccaatctctgtgaggaggagggagagcatgacctctctccgaatatgtgcgctcgccagatcgctctccgcgctctatgtgcgcggaaagacgtcgaacgtctcccccaattgctgaatgggaattatacgacccaacgtccgctgatggatgcacagagttatctatcacagccacagatgagaaaaa

SEQ ID NO: 423444 - DNA, 265 bp, Oryza sativa nipponbare
  unsure (1)..(265): unsure at all n locations
cgacccacgcgtgcgggcgaggtgnntatgaggatgagactgatatacacggctactagtcaggtatttggttaggcatatgttgccatcatatcagtgtgcacgggtatttgtgttctgttattggagttatactggcttgcattcgcctgatcgtaaaggcgcctaacaagtccgacgtactcctgccgcgagatggtccacttcgccatctccaagtgggccgacggcaggcaggagaagccgactgtccgcacagatgatg

SEQ ID NO: 423445 - DNA, 256 bp, Oryza sativa nipponbare
cgaccacgcgtccggcgttcacgaagaccttaacatagcttggagaggatgtacggcaataatggtgcgcatctttagtagaaccactggagctgcccatgctggcgccagggtacttcctgccttcagtggaaagctgactggaatgtgtgcccgtgttaacacagtcgctgtgtgcgatgttcatcgcgctgccacgcttaataaccgcggctccctgacctgttaacggtgcgataaatcccgaggctgacgg

SEQ ID NO: 423446 - DNA, 55 bp, Oryza sativa nipponbare
gtccgaattccgtcgacacgcgtcgatgggcggcgagccctatatccttcggatg

SEQ ID NO: 423447 - DNA, 274 bp, Oryza sativa nipponbare
gcgtgcgccagagaagctactgcataattaggtgctgcggatccactgggattgccaacatgaacagattggcaaatcttatgcaataaaaggtttttgggtgcaactccataattgatctcaggagatcttatcagaacattgtgtgcgaacagaacagccactttctgtatttttttcagccgacatgtggatatagcatagctgatgactttattgcggctttattgtgacggcacactttgatgcgttcggctaccacatctgcaagctt

SEQ ID NO: 423448 - DNA, 91 bp, Oryza sativa nipponbare
taccgtccggatcccggtcgaccacgcgtcgaaaaaaaaaacttaagagaaataaacaaactaaaaaaaaattattgaatgaagataaaat

SEQ ID NO: 423449 - DNA, 65 bp, Oryza sativa nipponbare
cgtccgcatcccggtcgacccaccgtccgggacgcttgcgtcactacaccaacattggatctact

SEQ ID NO: 423450 - DNA, 205 bp, Oryza sativa nipponbare
tcgaccacgcgtccgaaacgacacacagcaaaatgagctaaacgtatacctgtctgtcaggaatggctacaatgcctaatatcagagctggtcaagcactcaggcggtggtagcggcggacggtaggtccatcgacgggacctactacgtgttggtgctggtagggtcttcttctgtattctgttgtgctcttcttcaacttttt

SEQ ID NO: 423451 - DNA, 111 bp, Oryza sativa nipponbare
  unsure (1)..(111): unsure at all n locations
gcgtccgctttcaacataccaggtcactcagtgcgaatncagatcgattagctttaatttaattttttggaaataggaagngggaggataaaaaggaccgggtaggtttgg

SEQ ID NO: 423452 - DNA, 177 bp, Oryza sativa nipponbare
ttatgatggaagctggcatgaaggtcattcatcagataacgccagaggagcgtatgatgaaagtgataatgaagatatagatcgtgctattgcactgtctttatcagaagaacaaaataagggaaaagctgttgatatcgaatataatttggaggaagatgaacaactttgcacgag

SEQ ID NO: 423453 - DNA, 204 bp, Oryza sativa nipponbare
ctcccgtcgcgtcgcctccttcccccgccgccgaggcgcccgtcaccatgcgcacgaagcccgacgcacccgcgccggcgccggccaagaagaagaagccctccccgccatccaagaagaagaagaagagctccaaggcccccgccccggcccccgtcgccgtcgtcgagtacctcaagcactccaagaaggctaaggcccccg

SEQ ID NO: 423454 - DNA, 285 bp, Oryza sativa nipponbare
cgcgtccgcgaacacttcgttcaagctattcgctagttcctcaacatgtgactcgggagctcgagggccacgcgaaagcgcgtcttcttcaggtcgcgatgctttccgagatcgccgtgggccttaactacccaatactacatttacttcaacatcattagaattgatagtcatattatgttcatcaccattgacagtgtgtcagataactacaggcaaatctagcaaccgtactttgagtcgtcttttttttactcaacactcaaccatttcctattaatctta

SEQ ID NO: 423455 - DNA, 161 bp, Oryza sativa nipponbare
gccatgggtagtctgtgtggcaccatgattatcatcttggccatgctgccagcaatcctaactatggctgatccatactgtgactgtgattgtccccagcaatgtgaagttaagtagcactattacttgcaccagattccggctggagcataccatccata

SEQ ID NO: 423456 - DNA, 448 bp, Oryza sativa nipponbare
ccggattgacggtcgaccactcgtacgccgagagctagcggctggctggcggcggtggcgcggtggcagcaaagtgtacgctttgcagttgctgccggcgcggcgcggcagcggtgacgactaatagggaggaggagagaggctgtgtcgggtttgtgttgtgtttgtgtgtgtagtgtgagatctggtgactgtcgtgatgatggttcgcgtgtgtagcttttccggttttggctgttgccggtgtttcttttttcatttttttttttttctttttatttctcttttttgttcgttgttatttttaatttttttctttttcttttctaattttttttttttattttattttttttttttttcctgttttttatctttatctcttagtttgggtttttattattatttttttctttctcttttctttttttacttatttttttaattt

SEQ ID NO: 423457 - DNA, 149 bp, Oryza sativa nipponbare
tccgattcacggtcgaccacgcgtccggtccaggtgctgcacctgcggaacctgccgtgggagtgcgcggaggaggagctcgtccagctctgacaaccagttcaggcgtatcggaaacactaaatgcggcgtacgcgccaaccgccatc

SEQ ID NO: 423458 - DNA, 179 bp, Oryza sativa nipponbare
  unsure (1)..(179): unsure at all n locations
tgacacccgaagctgaagctcccggaggaggagccctgctcgccgccggcgacgacgtcaccgncgcgaatctgctcgccgccgccgtagccaccgagggtcctgtatttgatatgcctgacttcaagatgggtgggaagaagagtgatgatgctgcttccactgatgccggggatgaa

SEQ ID NO: 423459 - DNA, 189 bp, Oryza sativa nipponbare
tccggactcccggtcgaccacgcgtccgaggaagctcgactcgagctcgccgcgattgaatcgcgcatgggcacggcggcgggcgacgcggcggagcagccaccggcggcgccggaggcgaagagggcggcggctccacggacgctggtgttcacgtacggcacgctgaagaggggcttctccaaccac

SEQ ID NO: 423460 - DNA, 174 bp, Oryza sativa nipponbare
gtccgtaaaaaaaaaaaaaaaaaaaaaaaaaaaaaaaaaaataaaaacaataaaaaataaaacaaactaaataataaaaccatttataatacaaccggcgtgggcggtttctccttcatgtttccgtacttttacttctaattctattgttttactattcaacacctctatttt

SEQ ID NO: 423461 - DNA, 254 bp, Oryza sativa nipponbare
ccacgcgtccgaccacgcgtacgcccacgcgtccgcccacgcgtccggaccaaaagattggtggttatgtttggtgggacagaggcactggatgaatatatccaccaaaaaaatctctgtacagttgttttggtgaagacatctgagattaagctgctaagagatgctggaatcgaagaaataagtgctaagacacttctgagttttcgcaacatcaaagcaaaaccagttgtgccaaagaaactttctgagga

SEQ ID NO: 423462 - DNA, 260 bp, Oryza sativa nipponbare
  unsure (1)..(260): unsure at all n locations
ccgtccgaatcccgtcaccacgcgtcactcaggcgtccgagcccagcaacctgccggggagcccggcacggaggttcggttcgcacccgaccacagcaggcgcggcgcatgccactgctactggcaggctgagcggtgatcgtccgggaggccagtcgccaggganatgcacctgcgggcgtncacgaggtggcgaccggtgcgcgcggtgctcaagaggcctcgagctccgtcgccgcgatgacgacgccgtcccgggg

SEQ ID NO: 423463 - DNA, 114 bp, Oryza sativa nipponbare
tcttgagctactctactgcccatttgacatgaaggaggagactccaaatccttttagacagcagttttctatgacatccttggagaggacaatgacgagcatggaaaatgggtc

SEQ ID NO: 423464 - DNA, 170 bp, Oryza sativa nipponbare
ccacgcgtccgcagacgttcgctacactcaaggagctgcatcaatggccaagacgttgaatctcatcaaccaactccgatcgatcgaactctctctatgtgggacgggtgtcgcgaataatggcagctgctctgcacctgtgttcttcttgccctgcatagtatatcatg

SEQ ID NO: 423465 - DNA, 61 bp, Oryza sativa nipponbare
ccctttctgtcttttctgctcttctcgcggctccgcgcgcctgctctgagccgggtcgggg

SEQ ID NO: 423466 - DNA, 113 bp, Oryza sativa nipponbare
  unsure (1)..(113): unsure at all n locations
tctccgtgcaggacctcgtcctggctgtgcgcgcccacacgctgggcttgtcccgctgcaccaacttccgcgaccgcctctacaacgagacggncacgctcgacgacctcctc

SEQ ID NO: 423467 - DNA, 321 bp, Oryza sativa nipponbare
catggacgagagggagttccggcggatgctcgagctcttccccgtcgtccgatctcgcgactactgcgctgaatcaggggcatcaagcaaaggcagcacacagcaatcacgggctcaggaggcaacaaggggcaacaaaaatgagtcatctgatcaattcatgaaaaaattgaagatggttgctgagaaaaaggttggagcaaccaaaggcaaagttgttctgcaagacatttgaagaagcccataagaaacttgtatggacttgactcccagccatcacttcaataaccaccaccacgcaaaacttgcctgagatctcac

SEQ ID NO: 423468 - DNA, 217 bp, Oryza sativa nipponbare
  unsure (1)..(217): unsure at all n locations
ataatccaaaaggcttacaagagaagcaaccatccggaagaagatggccatggcgacgtcctccgcatccaccgtctccttctgcgcccgcccgtccgccgcgagcgcggtccggccgtgcgccgccgcggtgagggcgagggcgcgggcggcggcggnggagagcggcaagtggtgggcgccgctgcttgggtggtcgtggaaggccgactacatc

SEQ ID NO: 423469 - DNA, 349 bp, Oryza sativa nipponbare
gaaatacctgaagagtaccggccgatgatgagagctgatgtcgtcatcccagactcagaagaagctaggttggctgcatgactacattttggtgccgttgcacctcttagctgtcagagtccacatagaaccaaagggtgataatataatggttactgaccatataataagtgataatcatttgggaaaatcccaggtacctgacggtccgacagtaggaagtgcagctgtagccattgaggaggtattgtttagagctcagtcttgctcagcctgtggcactatgatgtctgtaaaacgatgtggtgcctgtgataatgtaaagagattccgccaatatcggtgtcgc

SEQ ID NO: 423470 - DNA, 100 bp, Oryza sativa nipponbare
tgtctgtggagtctgaagggaaatgtctctgtaaagtgtctgtgcaggtatgtaaagaaaaaatctcatataaacgtataggccccatgaaggtgtaact

SEQ ID NO: 423471 - DNA, 685 bp, Oryza sativa nipponbare
ccacgcgttcgcccacgcgtccgtagaaaaccaccaggttttgcctttattgactttgatgagggtagggatgcataagatgcagttcgtgatttatatggcaagaatggatggagggttgagctgttaatcatagctggtattggttgtggtgcgagtattgctttgttttttttttcttctttattttgtaatctttctctttttttttctttttttttttttttttttttttactttctctgcttttttttttctttttttctctctctatttcttttttttccttttttctttcttgttccttttttttctttttctttttctttcctttttctcttttcttttttttttttatcttcttttcctttttattttcatttttcatttcttctctgtttttttttcttctccttcttttattttcttttttcgtttttattcgacctttttttcttctctttcacctttttttttttttttttatcattattctttttttttcattttttttctttttttcccttttttcttttattttttttttctctctttttctctttttatcttcttttctacattttttttttttacctctttttttctttattcttcctactattacgttttgtccttcttctttacttttatttttctttctcttactcttatattctttttctct

SEQ ID NO: 423472 - DNA, 351 bp, Oryza sativa nipponbare
tgcgacccacgcgttctcggacgcgtgtgctgtactaaaaggtttcattgatttcgatttttatccctgtcctgggatgtgagatagcgctaaaggatcttataacttaaacgcctaatccttgcccaaaggatcgcttaacagcacatgatagtcttctgtcgtgtctcttactacattctctcctacaaaacttttttacttctctgtactctcggttttattctttttcttaatgcctattcattctcttgactcatcctctacttccttgttgaaaatgttacatttcaatttctgctcagtccttctattgatttcttgatcacttgttcttctccattattcttt

SEQ ID NO: 423473 - DNA, 164 bp, Oryza sativa nipponbare
tcttcttctctcctcttcttattctttctcttctcgttcttcttatcttcaatcccttctctttttcttttttctccatttatatattctcctccttttttccttttctccctcccttcttcttctccctcccttccttccttcctttttcctccttttccttc

SEQ ID NO: 423474 - DNA, 72 bp, Oryza sativa nipponbare
tgcgaccgacgcgtccgcccacgcgtctgctgagtcatttcgtctatccatgccacgcctaaacgcactcgt

SEQ ID NO: 423475 - DNA, 367 bp, Oryza sativa nipponbare
ccacgcgtccgcttctggtacaaggtggactacgggatgttcctgttctgcatcgcttactgggagcgggactggagggagggtgaccgaccattacaagtttatcgatcagtgcctgtctacggtggacctgaagcaccagccgtggtttagggtttcggcgctacctttttctggtctatttctccaacttggtggttcgcctaccagggctttttccatgatcccgtatggatgtagagcttccatcggtcttttgtactttctctctttccttttttctactttctttttttttttcttttattttccctttctttctttttctacttttatttcttcttttttcccaatccctttttctttt

SEQ ID NO: 423476 - DNA, 61 bp, Oryza sativa nipponbare
ccacgcatccgctcacgctacaagctgaacatcaaaatattccataatcttcatcactaac

SEQ ID NO: 423477 - DNA, 54 bp, Oryza sativa nipponbare
cgcgcgtccgatcatcaaagccatcccgttacctgcacgatgcattccttcctg

SEQ ID NO: 423478 - DNA, 680 bp, Oryza sativa nipponbare
ccacgcgttcgtccacgcgttctggatcacacgctgcttcccttctgcaacggccgctactggcgggggttgcttagccttcggtacggcgctcgcttctattggcactaacgtgagtctcgctgttcgtcttctggcatactctatggaatcagctatctccattgcgcttttctgcctccttcctctttagctctctcgtctcgttctaattcttctctccccttcattcatccctccaactgcttttttttgtcttcgtgctccttcactcctattgtctttgcttcttcactctttgttttgtctcgtgcctcgtcttgtctctctctttctttccccactttccttctttttcttccttcctcttactcttccttctttctttttactttacctcctttcccttttcttcttctttttctttcactttcctctttctgtctcctttcctttccttcccattccttgtccttctttctctcttccttacttccttaccttctcaccttcccttctttttccttttcccttttaccttttccctttctccttcttgtcctttccttccttttctccttcccttctcctttcttccttttccttcttccccccctccttttccacccttctttccttttctcttcttctcctccttttcttcttcttttccttttcct

SEQ ID NO: 423479 - DNA, 489 bp, Oryza sativa nipponbare
ccacgcgatcgtagacttgcggactcctgcttactgcataccatcctacacctcctattcagagcgagggtgttaaagagcgtggacactgtccatcatctactcatatccttacactccgcctgatatgccttgtgcatctactcctctctagcttctgattcgttcctttcctcgtttacctacttcctcattctcttatctcctctcttctcttcattgtctctcattctttctacctccttctctttgttcttatcttcttccttcctctcttctttctctcttctttctttcttcctctctatcccttctcccctccttttctctcctacctcttcctctcctttccttctttttctcttcttcttctctctcctctctctcttcttccctttcttctttctctttccttcttcctcttcctctacttcttctctctttcttcctctcctttcttcccttttctttttctctctctcttctctt

SEQ ID NO: 423480 - DNA, 78 bp, Oryza sativa nipponbare
ccacgcgtccgctcgtggtcgccggacatggagagggactaggcgtgggagcggctgctcgggatgggcaagggatcg

SEQ ID NO: 423481 - DNA, 139 bp, Oryza sativa nipponbare
cgacgcgtgcgcacaacactaccacttacacaacagttctacaacccgtggaggaagcatatgccggggcgcgtgcactgctaacgtagggactcacatgcatcatattgctctctgcctggacacacttatcatttat

SEQ ID NO: 423482 - DNA, 427 bp, Oryza sativa nipponbare
ccacgcgtccgcaactccatcgacttcgccgatccggaccccgccgaccgcatcctccccgcggggggcccgggtcctgtgcccggcccctgttcctgcttctactgcatcccctgggttattatcgtgcgcttatttgtgcgctcggtcgacacgtgtgcctttctcatctttctttttcattgcggttttatccatttccgactggattagtttctccattttcttctcttctcgccatgctccttctttctttccacctttttactttttcttttccttctttttacttctccattttctttctcctttttttttcttttctctttttttgtatcttcttcttcatttctatttcttatacctttatttatccctttctcttctttttctctcctttccattttttcttacccttctcttcttt

SEQ ID NO: 423483 - DNA, 352 bp, Oryza sativa nipponbare
cgacgcgtccgattcactcaacacaaactctaagatcaaaaaatggcaaaggaaatagtagtgatgagggtgcggctttttgtgcgggcgcgccactactaatgcctacacgcaaagcgggtatgggcatgggtgtagctccttatgcaatagttcagcgccgacacacatacacttttactttcatgacaagattaccggccccttgccattcgctgtgcatgttgatatcccaccgaacaaaacatttccaacccctttttggacggtgtatgttatggatgatccattgaccgttgggtctgatctaatgtcctagcccgtgtgttgtgcccagtgcatgtttctcttt

SEQ ID NO: 423484 - DNA, 478 bp, Oryza sativa nipponbare
acccacgcattctagatacccaacttaattttgcatatactgcaaggtcctgcatatattcataacaacggctattttcatatcgaccctaaaccctaaaattttctccttcatatctcttcttaaaattcttctctctcttcctcatttaacttcttcattctcttttcctattattttatctatatctctcttttctttcttccttctctctctccttctacatattttattctcttatctcctctcttctctctcttttttttcttctccctctcctttttccctcttttcttcctcttcttcctcttctttcctcttttctcttttctctctctctctctttcttctttctcttcttcttttccttttcctcctttccttttcttctatttctttactctcctcttttccttttcctttctttccttttttactcttttttctctcttcttctctttctttctttctttccttc

SEQ ID NO: 423485 - DNA, 442 bp, Oryza sativa nipponbare
ccacgcgtccgcgaaactcagctgcaaggagatggagaaggtaggctccagccatggcttcggggctgggctcctccataaacgcgccgtattgtcttggcccccgtacctactcttctccttcgtccatgtcatctcctctcttttctttgggtgtccattagtacgtctctacgtattttgctttaccacatctgtctaatctccaacttcattattgggtccatcactactcttctttctgtcctcgtccagtccttcttattttctcctcttccctctttttgttctcccttctttcttcttatctttttttgtctccttttccttctccattcttcttttatcttcccttcctctcatttcttctccttattcttcttttcctcttccttccttttctttctttttattcatttctttccttccttccctccttctc

SEQ ID NO: 423486 - DNA, 116 bp, Oryza sativa nipponbare
ccacgcgtccgcccacgcgtccgtttttttttttttttaatctccaacgagctatctcaccggtggaggcaagctaagggaggcgtctttcactctctgatacttgttgtacatat

SEQ ID NO: 423487 - DNA, 562 bp, Oryza sativa nipponbare
ccacgcgtccgcccacgcgtccgcagaatccaaccattataaccacccaatatcgaatccgggaccgggaaataagcagcagggggaataacataggatatagtgatagcgcacacacactatatcatagcactactctcttcttctgtaggagagagcacacattttcaagaaatgccttgagcttcttccatctatttctctgttatggcactggtggtcatagttgttgtgcagcctccttgcccttcattatgctctttgtcgctacttccgttgctccttacgttctcgttccctattatcatatatttctcctcgtgctgcttcgttctttctctctcccttccattccttccttatccttctctcaccttctccttccttttttgtccttccttctttcttcttcttcttccttttcctttttctctctttttcttccctcttttctcttttcttcttctctttccttctctccctttcttctactttcctttctttctccattcctctctctttcttctttcttcctccttctatctttttttcccccttttct

SEQ ID NO: 423488 - DNA, 631 bp, Oryza sativa nipponbare
tcattctcgcccacgctcctctccacatctgcgggcacgcgtaattaccaggagtgcgcatcaccatttttcatcctctttctccactttctccctcttcctctttcttcttcctctaatcccgctatgcttactatcattttttctacctcctctctttcttcatccttcctcttctctcatcttcttcctcctatttcccctcttcctcttttcttttcatccccctaccacttctctttcttcctcccttctcctcttcttactcctttcattccttcctacttcttccccttccctttcttcctccttcatctttccttccttttcacctcttctccattcctttcttctccctcctcttactccttctccctcccttcctcttttctccttaccccccccttcctttccttttcttcctctcctccctcctttccttcccttcttcctcccttttcctcttctcttctcctttcctttactcacctctttcacccttttctttcaccttttcttccctcccttcattcccttccctttcttctacctccttactttcccctccccccttcccttttttcccctttccactccctcctctacttcttccttcttcctcttccccttc

SEQ ID NO: 423489 - DNA, 436 bp, Oryza sativa nipponbare
cgacgcgtccgcatcgagcttgataattacttcttattgtttcattagcaattaagctatactagctgcagggcagtttaatcgatcatggcggctaattcctccaacgacaccgtcaacgtggccttcgaggtgagcagcattctttcctagcttaacgatcacttcttcggcgcctacgaggtcaaggagcctgcggggacaagcatcatcatgctggccggggtgaacaacggcgccaccatggaggtggtctgctacgtgttggacctcttcgtggtggaagtcgtcttttactttgatcttctactatgtgtatgtgagttcttttttctttcttatttcattttgttttcttcctttcttcttgctttatcttttttctctctttttccttccttttttccctttccttttatcatttccttccttcttc

SEQ ID NO: 423490 - DNA, 626 bp, Oryza sativa nipponbare
gtaccgtcctaattcccggtgcaccacgcgtccgtaaaatttgaacacctttaatatacaaattactaacaccgttcagcacctaaatcggcagtagcatcatatgcgccggctcatcattctccacttcaatacgctcactacctgtactaaccatctatctgcttctaccacgaatatgcacgttcatcccttcttttttacgtccctccttcttcactttcctctactttccctatccccatttcatctattacattcttcctcttcttttcctctctcctttatactgtttcaaattctacgtatttcttttaatatatatttttactatctttcccatacagtatttttaacttacctcatcattatttcttttccctttttctccttccataatcttttcttcattctaaaatacttttttttcatttttcttctctttcaccttctctcttttttccctctttttcctttttcactcctttttccctcttttctttcttactttctcctcccacacctcttctttttcctccctatcatcactttttctctctccaccctttttaccctttacctctcttctctctctttctcttcctcctctttctttttccctcttt

SEQ ID NO: 423491 - DNA, 401 bp, Oryza sativa nipponbare
ccacgcgtccgagccattaagccagagagtggagtcttcgatcttttgctgtaaactacacaaagtgcaggggctatgtaaatgaagatatcatcagatctaatggctgcggagcagttccctcgtacgcttctcaatcgagcgatagggggggatagctggctctatacttatcaccaccacaaagcagttggccagactatctaacaattagctgaatatgctacattcacctgccaagtcaaccttttcaaagactcggggaacgagagcatctactagaggcttatgaggagcatttcatgctacctaagggtaaaatgcttttcattactcacagaagagtactactgcttgaagggccactgatgacccatagaaagttcagtcctgcaaaggat

SEQ ID NO: 423492 - DNA, 407 bp, Oryza sativa nipponbare
ttctttttttcagcagcttcataaactatgaattggacagattcaattctttgtgtggcggcttcataaactatgaattacacatggctttgggctggggaaagcatatgttcactttgcactgggaaagaaaacaaagagagtgggacatggcttctctcgcaacacgctggtggcgcacaattataaatttagaagacaactctatcttctagaggagatgaacaacaggttgctgttgctactgaacacactatacatagtttgttggcgtcacctcctgaattaataatattaaatttgactgtttaccattatcctgttcatgttgcagattgaagatgtcagcaatcggatagacgctgctgtggagcctgtcattgaagaactcgaaaaggaaattcaaa

SEQ ID NO: 423493 - DNA, 440 bp, Oryza sativa nipponbare
  unsure (1)..(440): unsure at all n locations
ccatcgtccattaagcagtgcattgtattgggctcccatgccacctattctcctgcaacaaaaaaaagcgatggttcttatccagaagaggtcttaccatcacttattactggtgacatgtcactgcctttcacagaccattttantttgcctgggggggttccttttcttttattttatgaaaaacactactacacccaatcatgttctgattcctactgggaaacttatcactccttactttgtacttaatctaaaactgaaccattccaaagatctgctcttcataaattcatataaacatgcaaatgggtccaatgatatttttcttgttccttccaaagcttatcactttcactcttctttacgtacaataaacctcaaaaccccaacccttaaatttcaacaataactccatatttaattaaaactttttcctt

SEQ ID NO: 423494 - DNA, 387 bp, Oryza sativa nipponbare
gacgcgtccgggcattgccatgagagtgatttgggatcgagtgccagttcttctggtgcaacaaaggaaggggaggagtactttgccagaagaggtcttaggatcacttattactggtgacatgtcactgcctttcacagaccattttagtttgcctcagggtgttccttgtcgtggatgtgaggaagaacgctactgcagccaatcatgtgctgattccgactgggaaacttatcactctttgctgtgtactggatctaagactgaaccatcccagagatctgctcttcagaaattcatagaacatgcaaatgggtccaatgatatttttcttgttgctgccaaggctatcactttcactctgctgaggtacaagaaactcaaaac

SEQ ID NO: 423495 - DNA, 218 bp, Oryza sativa nipponbare
  unsure (1)..(218): unsure at all n locations
ccactcatcctggtagagacagggttcagggaggtgactgtttacctattcaatcacaacacctaaacagaagtttttatcaacagatgactcaaatatcttacactccnttctatataccaatcatcctcaatgtccacctttcccccctcatgggggggggcaccccttttttaaaaatantcccctaaaaaaaaatcaaaacaacccacaatatc

SEQ ID NO: 423496 - DNA, 433 bp, Oryza sativa nipponbare
  unsure (1)..(433): unsure at all n locations
cgacgcgtccggatggagcaaacccacaccgaaaactccaccaattcncggtgttcaaagagcgtcnagggaggagcgttggcaggccgagagctttctgatgcaagctcngtcaagatcagaaggaacaatgttacaacaagggtggcancaaaggctgcctccatgatctcggctacctcttctgatttcgtgtgcgatgagagctccccatctacatcttctgtgactccactgtcagccaacaattccctggcaacagagagaagatctgattgtggtcaggttggtggaccgagctacatgagcctgaccaaatcagccaaggcaaggctgagtggctatggctctcacaagccacctcttcaaaggcaaaggtccggtgatctcctccatcacaacaacaggatggcattctcttccatagatgttc

SEQ ID NO: 423497 - DNA, 382 bp, Oryza sativa nipponbare
cacgcgtccgtgcctcgggacgttcgagaagcccagcttccactgctgctgccaacgcctcacgtcggaagtccgcgccgtcgtgctctccgccgactaccgcctcggccccgagcaccggctccccgccgccatcgacgacggcgcggctgtcttggatggctgcatgaccaggccatgtccggaccgggcgccgattcctggctcgccgaatcggccgacttcgcccgcgtgttcgtccccggcgagtccgccggcaggaacatgagccatcactgggcggtgctgatcggctcaggccaagtcacgcgccacccggagctcgtggacgggtacatgctcactacccccttctattgccagcgggaccgcgcgccactat

SEQ ID NO: 423498 - DNA, 378 bp, Oryza sativa nipponbare
  unsure (1)..(378): unsure at all n locations
atattacatccccttctccctctccttcttcctctacctcaacatcngcgtggagagcgtctactccttgctcttcaaaaactacttcatctgaattacaaatacaatcacattctcgctctggaccgcgcacctggcgctgtacatagcctaccttacgaccaataaaccaccagcgaaaggccgctaccactactaagactactaagaagcacaacggatctcgcgactcatggatcatcagatctatataagtctgacctgtcataaattgccaataagaggtgctcgtttctctgagcctctccaagaaatacttgacgctactcagcctgcccagttccatcattacatgcttccactatttaagcatattgc

SEQ ID NO: 423499 - DNA, 453 bp, Oryza sativa nipponbare
ccacgcgtccggttcattccttctggcaaacatcctaactggtgtagtaaatctctcagttgacacactcgctgcctcttccggcaccgccttcatgattttgttagtatactcctttactctatgcatgattgctgctttagctcagttttgcgggattaggatgaaattttggtgaattcaagagttatctaatacgatgtatgtatattaattactttctcagcaagctttcttggaataaagccaattgttaaaccaattagtctttcctgtcatctattctgcctgttttctgtatcttagacctagatctagatgattgctctagttccgtcccatatgaaaccttcaacgttctgagaagctgcaatagctaagccaataggttatcgtgccgtgtactctaagaagacatatatcacagatatgttggctaaattacgatctatg

SEQ ID NO: 423500 - DNA, 146 bp, Oryza sativa nipponbare
  unsure (1)..(146): unsure at all n locations
cgacgcgtccgaactacatcacgctcaacagcgcctttactcccatcgcgttcccggccaccnacctcggcggctactattcataagcggcaatatcctcctctactgcaancttcancttcacaaagggatgaagtcctttaacc

SEQ ID NO: 423501 - DNA, 403 bp, Oryza sativa nipponbare
  unsure (1)..(403): unsure at all n locations
cgacgcgtccgcgtcagttcgcgaaaaaaaacgcccgttcgttttgccgggtgcgtgcaggatggcgttagagggcgtggtgtttccgcagggccatttcggctacgggtgcggaagggactcgccggcgtacgggatgccgtggtgcgacgtcctggctggtgccggcggcggcggcggcttcngtgagttttacggagtggacgagtgggatgaccagctgcaggtcgcctccgtggatgagtgggaggtggcatccaaggataactcggatgcttccacggagggcaaggcggcggcggcggagcgggcggagcccgttgccgcccggaggaggaaacggaggcggacgaaggtcgtcaagaacaaggaggagatcgagtgccaacggatgacccacatt

SEQ ID NO: 423502 - DNA, 416 bp, Oryza sativa nipponbare
cacgcgtcctatcactaagaaatctcccatggcgaaagaaaaaataattcttgtagagaaaaaatgcggcgggacccataataagaactacatcgtaaattagctcattatagtgcaaatcattgtctgagatgaggaaaggcatcttcatctactgcgagattgatcacacctaatgtcatgcatctgaacaaaacagtcacccttaataacgaaacagcttcttgctcaactcaaactgaatagttctcgtctagaaagttcaaccttaattatacattattgcttcagcaattgttttacactgcatcagctcctccaatcatgtagccaccatcaacagccatagcttcttcatagtttgcttgatgctcgctcccatcatatggtccattccttcgcacacaattgtgctc

SEQ ID NO: 423503 - DNA, 422 bp, Oryza sativa nipponbare
  unsure (1)..(422): unsure at all n locations
ccacgcgtccgtctgtcttttgctcttgtgtttcgggtttcacgttactgaagctgtggagaaataggagggagcggttcaatcaaggactgtgccganatcgccccggatggcatggttaatgaagctgttgagacatataatcacaattcagagagggactgcgctgagatcactgcacatgttatggacacagaaaatgtgacagaggatgatgataattcaggcaaaaatgatgccgagaatgagataattgtaaatgaaaatgaaggtgaagaaaattctgcggaaaacacttttagcctcagcagccctgacatcacccttgaggaacatgacaacaacaactgtgttgatcaagatactgcatcaacagagacaacaccaactacagagaaggtgatgcatcaagaacaagtctc

SEQ ID NO: 423504 - DNA, 425 bp, Oryza sativa nipponbare
cgacgcgtccggctgatccaagcagcggcggtggcatgcatgcgtccaagttgttttcctgacttgcttcgatggtttcctcaaggcaaattaaagggaaaatgaatcattcagtcagtgaccctgttagaaggcaaacaacaacagctttgtttaatgggctgaggtgatgtatgatcatatcatatcatatcaaacacttaatactattactctatagtctatagagctagcagatctttgatctagtgtgtgtggtgttgcttgacagattagctctcttttttcttggttcttttttcgttttataatcttctctttttctttatcttgttggtggtggtgagcactttgccatgtggtgtgctccatttctggacctgtttcacacatactttggatgggatggcaaaatcacacatcaa

SEQ ID NO: 423505 - DNA, 98 bp, Oryza sativa nipponbare
cgacgcgtacgcccacacatacaacttttttcaaaatacataaaatccaatttattatcctaacttacttggggggtttcctaataggggagtgaaaa

SEQ ID NO: 423506 - DNA, 286 bp, Oryza sativa nipponbare
cgacgcgtcctaaaaaaaaaaaaaaaaaaaaaaaatataaatacataaaaaaaaataataaaaaactttatagagttgttttataaaaaaaaaaaaaatctcccaattatataattctagatttacttataatacattgcaacttaaaacctcttttattaaggggcttaaattaattttttttacctcatattaaaaaaaaaactaattttaaaacactttttttatctaaataaaaacaattttacaaaattctctttttttcaaattggttaaaatattaaaa

SEQ ID NO: 423507 - DNA, 154 bp, Oryza sativa nipponbare
  unsure (1)..(154): unsure at all n locations
ccacccgtccacttttttttttttttttctctactctttcccaaaaaaaccaagacataaaccccacatgancggaaccaccataaaagtgggatatccccttccctctaatcaacaacctgcttcatatcctaaacgctattacattcctcct

SEQ ID NO: 423508 - DNA, 313 bp, Oryza sativa nipponbare
  unsure (1)..(313): unsure at all n locations
gcccacgcgtccgcccacgcgtccgcggcacacccgtcgtcccgccaccaccaccgacggcgccaccacgagcagcgcggcggagccatagacgcgccacactccgaccccttcgccgccgcgctcgccgagtgcaccagggagcgctccaccaccgcgggggacgacctcttccccgcgccgccggcgccaccgacaccgccatcctcctcgcgccgctggtcactctccgccgccgccggcggcgagtgcggcatnttcagctctctactccacctgtactgttgcaagagcgccatggtcggggaggagg

SEQ ID NO: 423509 - DNA, 340 bp, Oryza sativa nipponbare
ccacgcgttcggcacacacgaacaccacagagagagttcagcggcgcccggcgagaagcttctaccggtgacagcggcctcggcttcttgcagctcgctactcttccctctcttgatcgagtctcgtgccacacatactcgtttcgtcatctgggtggcggcgtcgaccaaagccttggctctcctatcaacagtgctcgtcgcactcttggctgccacagcggccgtgagagtgctcgacgaggatgaccacaatcttggccgacttactccagatcgcgcgcctgtcaactctatcagctacgcacaccattgggatgtctccgcgtaccagcttcct

SEQ ID NO: 423510 - DNA, 361 bp, Oryza sativa nipponbare
ccacgcgtccggcaaattgcaatcgaagaagaagaagaggaagacgaagaggaggatggatggcggcggggggatctggaggcccacccggcgggcctaccccgccgtcgttgaacgcatccatctcagcgcccccgccccctcccccgccgccgggggctggcgctcccagcttccctctgagggacgcaccaggatctcctactcgatactggccactctgaagaagcatctacccttatcagggcctgaggcgctgcatgaactccaaaagttagcagtgcgatttgcagagacaatctatactggagcctcctgccggtctgactacttgcggacgccgtctacaaaaatgctctct

SEQ ID NO: 423511 - DNA, 402 bp, Oryza sativa nipponbare
  unsure (1)..(402): unsure at all n locations
cccacgcgtccgctcaagatggaattttgatctcctcggtgttcttcttccctccagatttggtcactgtcgcgggggaagagagaggcggagcatcggaaagcagatcgagccggaggcgccgcggcctcctcccccccaccggcgcctcggatcgaatcgaatccaatcgaaggatggagtatggaaggaggaaacctattagcttgctggagctgtgcatccgtactaccatggataacctgaggtatgtcgataacgtggacggcggggagatggatctgctccagagaatcctgcctcactgcaagatggaggacctgacccgtatcgagacaataccgagatggatctacccagtactgatagctgtganctatctatacgcgacatcgcgggaaa

SEQ ID NO: 423512 - DNA, 201 bp, Oryza sativa nipponbare
cccacgcgtccgcttctcccccagccagaggcagaggctcccgcgacctcgtcggcgacggcgaccgcgaccgcgcgacgacgaggaagcgaaggacgaggaagcgagcgcgccaccatcttcatagctcgctctcctcctcacctcaggtggtgaaccgaggagacctgcgtggggtgggggatggaaggaggagaggcg

SEQ ID NO: 423513 - DNA, 451 bp, Oryza sativa nipponbare
cgcagcgaatccccccacctgaagaaaaacgagacgagattctctcgctctcttccggcgagattttcgtctttcccccctctcctctccgctcctcgtctcgtctctccgcttcccctcctctctcgattccccaccatggccggagccgccgcgacgccgccggcgatgatgcgcgccgtgcagtacgacgccagcggcgggggagccgccgggctcaaggtgagcaacgccctccgccacactgctctctctctctctgcgcttccttttctttttctgctctgctgctagtggtagtaccgtagtagtagtaattaatttcgttgaggcggagtgttcgaggcggtacactctggtcgggcgatgagttcatgccctacaacttatatccaatgctaaaatttgaatctcaaagcttaattttcgggttgattttcaggtttttatt

SEQ ID NO: 423514 - DNA, 378 bp, Oryza sativa nipponbare
cccacgcgtccggcagccgccgccggcggccatggaccgcgaagcgctccgcatggtgtgctcgcgggagttctggcggatggccgtcctgtggaccgtctccctcctctactcctacatcctcctcttcttcctccgccgcggcgcccccgtccctcgcctccgacctatgcccgagcccgacgacgacgccgctcgtcgccgccgccgccgcccgttttgggtaataactgggccaacgtcgggcctggccaaaccgccggcggcggccctgccccgggaggggtccaacttaatcctcaactgttaaacaaatccggaatcaacaacctgatgccaatcttgaacatttcaaatcgacttgtcattctacaagtc

SEQ ID NO: 423515 - DNA, 269 bp, Oryza sativa nipponbare
cggacgcgtgggatgaagcattgtaccgcatatgatatgtattacatgtgcaggtctcgtgcacacctgtgaagcgaatggatatataatgaatatatagtactgaacatattatacatggggcagaacactgtataatatgtgcagtactatatatgaagcattgtcccagctatgtaatgtattacatgtccatgtattgggcacacctgcagagtgaatgagctgttcttgattgtctacaatgatgaacataaaggcggggtgca

SEQ ID NO: 423516 - DNA, 456 bp, Oryza sativa nipponbare
cgcgcgctgctcaccttgttcgtcctcacctcacctcacctttcctcgctcatgccgccccccgctcccctcgcgccgctccgctcccgcgcgcacctccgcctccattgccgcctccctccctcgccctcgccctcgccatcgcctctcctctcgcgagctccctctcgcagatggcctccgcctctccgcgcctccgcctccggtcgcgggggcgcttccgccgccgccgcgccgacgagctcggcgctcgacgcgctcctctccgccgtggagctgctctgcctcgcgccgcccgccatctgctcggtggtatgcgcggcccgcctcgtcttcccgccgccgacgacgacgggcgcccccgcgtcggggctcgtgggcgggaggatgttcgtcgtgcagtacgtgcttctggtgggcgcggtggctgtcgggagcctgatccggcggaggcag

SEQ ID NO: 423517 - DNA, 455 bp, Oryza sativa nipponbare
cccaagcgtccgactgcagttgacccagttactccatcatcaatccttgttgccattgctgccagttactgtttcctattccccactgcttcgtcccttttgactccaatactttggcacatcatggtcggaaaggtatgtggtgttagaagcttgatctagtcatcatcaatcggatcttgtaggatattgcgatgggaagcttattccaggctggaagttctttttatggagattatatcctcgattttaatgccaattgtgagagatgcgtcgtttcattgagtttttataaggacaatgatgaagataagaaagaaacatatttcgctactggtataatttttgcttcgggaaagagatcatgctgctgtttaacaacaatagatgatgctagtaaaaggaaagatgaatcatgtgtggtatattttttgatggaacttcaaaaattattg

SEQ ID NO: 423518 - DNA, 459 bp, Oryza sativa nipponbare
cagaaatcaatatttttagttgctctgtttatttttcttggtatgtgctcactttgtttcctagccaaactcaaaacttttttagatttgatcaaatttacaaaaaaaaaatatacatctataacaccaaattagtttcactaaatgtaatgttgaatatattgtgatagtacattttgtgttgaaaatgtaattatgcctttctataattttggttataaactttttaaatttgtttaggaataaaatcaaaccaaattagtttcactaaatgtaatattgaatatattctgatagtacattgtgttgaaaatgtaattatgcctttctataattttggttataaactttttaaatttgtttaggaataaaatcaaagcttataatataagagagtaataattagctcaaccattaaggcaggagaaatatatgacgctgagcacctatcaaaacatt

SEQ ID NO: 423519 - DNA, 391 bp, Oryza sativa nipponbare
aaaaaaaaaataaaaaaaaaaaaaaaaaaaaaaatttataaaaaaaaaaaaaaataaaaaaaaataggaaaaaaaaaaatgttaatataaatataataaaaaaaaaaataaaaaaaaaaaaaataaataaaatggggggggccttttttggggttccaggtttcgttcccggggattgcaactgattgggttttttttgtggtgccgtaattttgttcccttgccgctactttccaagggctgggacaggggtactgagccatggctgccattgactgtgtgcttgcgtgcaagtcatttctgaaattgcgcttgcagcagacatatcgatgcacgggtatcttctgatttcgatacatcggttggtgaagtcagcttttactgttgttta

SEQ ID NO: 423520 - DNA, 458 bp, Oryza sativa nipponbare
cagtaattgacttgtagctgacgtaggacacaaatttcttgcaaccacactagagtaagttattgtttttttttaagaaaatggaagtcgtcattggtttacacgagacatggttttcactgtttttaggttagtctctaattttttattgaactggacgctagtgtatattgtataatttgatgtacatgttttgcaactgcttcaaacaactaaataaatgccctcaccttttttcatcgttttcaggtgcccttggtagctcaaactcatccttcaacaacatagatcatctgagacaatcctcaagttctggacaagctaggagctacacatcttcacccctaggagctctgagaccaaagatgttcccatctggaaaccgactcctgcacacaagtcgtcccctgtcggctcctgttgcaaaccgcccactgtcaccccatctccctttgaag

SEQ ID NO: 423521 - DNA, 297 bp, Oryza sativa nipponbare
  unsure (1)..(297): unsure at all n locations
agcaagcacttacgtatgattcaatcttgagttgttgttgaaaaaaaaaaaaaaaaaaaaaaaaataaaaaataaaaattaaatattaaaaaaaaaaaaaatataaaaaaaaaaaaaaaaaaaaaaaaaaaaaaaaaaaaataaaaaataaaagggggcgcccgttttaaagaaccaaatttaattttcccngctctgcaacttaaatttttttttatgtggccccaaaattaaaattcattgcccgtatttttaaaacgtgggaagtggaaaaacttgtgctttcccaatttaatt

SEQ ID NO: 423522 - DNA, 457 bp, Oryza sativa nipponbare
gccacgtctctcacgtctcacagctcactggatgaatagtccgatcgccacccggcggttttgttctcgccggccgaacaacccgtgctcacgctcgccgccgccggtcgccgcctgcaaatcgtcgccagagaatccgcgtcctccccagatgacgctgcgcacgggagaagcaacgccgcctccccaggcgcatgccgaggaggagccggggcgggggaagcgccggcgcgtcgtcgcccgtgagacgaggctgcagcaggaggaggaggaagagagggctccttattcgagccggagaccagaccgctggctacctccgccaccgtggtcactgtagaggagctcgccgccaccgtcgcttgggcggaagccatggctcatctggccatatacatatgatgtgttgctgttgtagaagcagagtgattgggccgagatatgggttatgagagag

SEQ ID NO: 423523 - DNA, 425 bp, Oryza sativa nipponbare
  unsure (1)..(425): unsure at all n locations
actagttctcgatcgcgagcggccgctcgcgatctagaattagcaagaaggtatttcggctcatgagagaagcaatgtctttggatactcatcgaaattccttatcattcactggaaaggaaattaagggtgaactacttgtcaatctgccggacactctactcctgaattggctttttcattgcttagcagattgctatgctgtaataccagcacttgtgaagtactagaacttgctngtgaagagtgaaggttttgcccgaggcttatacgtgggaacatgatacaatttgtgatgagggcagtctcggctatgttgatagtcagcaacgggatagttcttgattgttatggctgttctagctatacgaacagcaaggtgttggcattgatggactaacctatacacgaactggaagatagtg

SEQ ID NO: 423524 - DNA, 461 bp, Oryza sativa nipponbare
atcttgacgatacctcagtcatatggtgtgctgctgcagtgaccagctcctcaacttgaaaatgccttgaataagaatcctgtactgaaggcacctttggttgagcacgcgaaccaacctaacgtacgatcaactcttccaaggtctaccttggtagttttgggtcttgctgaagatcaacagcaacctgcacctcaagcacaaagtagccaaaatcaggctgcagaaaccagcagttcagctgcagatactacgacagaagtgacccaggaatcttgcgctgttagctaatcttcttcggcagccgtgaatgtgacgtcccaatcaactattggttacttccctttctgtattagttatatgccggaaggaggtgggcattgaagttcaagatgggtctggaatagacccttgttaggacttaggacttggataattcattgtagctgggcagttggata

SEQ ID NO: 423525 - DNA, 458 bp, Oryza sativa nipponbare
cccacgcgtttgctctcctgctccctcctccctgctccgtgcatatccagccctctcttccttgctagtccctgcagatccaacacctcctccctcagatccacaggcgggagcaccgcgggcgatcggaggagagggtggtggcgggctcggggcgcgggcggcgtgctcgggtgtgggcgatagcgctcggctgcgggcgacggacgagagtgcggcggcgagctcggggcgcgggtggtgaggtcaggcgtgggcggcggcgctcgggcacgagtgacggatgagaggacggctggaggtcaggcgtaggcgtgccaggcggcggcgctctgcgacagggaggcgcgaggcggctgatccggcgacggggaggcccgaggtggcggatccggcgatggggaggtgcgaggtggcggatcccgcgacgggacggcgcaaggcggcgaatccacagc

SEQ ID NO: 423526 - DNA, 508 bp, Oryza sativa nipponbare
gtaccgtaccggaatcgcagggtccgacccaggcgacccgccacgcgaaggccctagaccaagcaggcaacatcatccgagtagctagcacgttcggccggatctgatgagatagcccacgagccgaccgactccggtcgcgcctatctctccacaggagcgccgtccccgccgtcgcggtcggcggcggaggcggccgacagccggtcgccgaaccgctgtttccggcgcggcgccagatgggcacctgtactgcgagggggtgagggtggaggacgcgatgggggcgggggaccggacccccttctacctctacagcaaacctcaggtggcgtagagcgaaagagactaccgcgacgagccaaaggggctccggtggcattgggagggacaccatccaagccaacaccgatcggcgggggctagatctcctgcgggagctaggctgcagcgccgtcctcaaaagggggaacgagcttcggcttgcccaacaaactggaccacaggg

SEQ ID NO: 423527 - DNA, 455 bp, Oryza sativa nipponbare
  unsure (1)..(455): unsure at all n locations
ggagtgccagcgagtgcggaagcagattgagagggacgagcagctcgccacgctcatgcgcggcctccgcagccataaccttctcgactcccaattcgccgacgacaacgtccgcctccgcctcgtcgaggtttcatccatgaacaacaatgaggcgctgcctctcgtgtacagtcctgagatcatttttgcatactgggggaagcgcccgagggccgtcgccacacggatcgngcaattgtgtgtctgttgctggtggttgcatctctcattgcatatcagaccttataaacatcaagctcaaggagaatgaactancgcgtgcgattgagctgagggaaattgtgacatctttgggtcctgcttatattaagcttggccaagcactaagtattcgaccagatattctgtcccctgcagcaatgactgaattgcagaaactttgtgataaggtt

SEQ ID NO: 423528 - DNA, 453 bp, Oryza sativa nipponbare
cggacgcgtgggcggacgcgtggggtcgcactcactcactcgcatgctctcctctcaaatgctactccaccttatcatcatcaccaccactaacaacaacgccactgcctgaaccaagaacactgccctcctccacacgacagggctggcgacgaagcgcagaccagcgctaagtccgaggaggcctcgtcggcagcggatgagcatccacctgaagctgaaggtgcagctccgcgcaggggtgtgccgccggccaaccccttcgacttatcaaccatgatgaactggctcaatgatccgagcataaaggagatggcggatcatatcggcaaggacccggcggtcacggagatgcgcggacagctgcataagacgagacagaccaccccggcccgagctgcctcgccagaggctgcggcggtagcagcgccggcgctggacccgagcaagtac

SEQ ID NO: 423529 - DNA, 448 bp, Oryza sativa nipponbare
  unsure (1)..(448): unsure at all n locations
gcgacccactccccaccccttccccctcccctccccgccgctgccggcgatcgccggagatgtcatggctcgcccgctccctcgccacctccctcaacatccccgaagatgacccaggcgccgacgacgaccccgactcctacgccgccgccgccgccccgtctccctccgcgcgcaatccgcatccgccgcaatccgtgcatccccaccctccgcattcggccgcggcggagggcgtcaaggaggacctcaccgagctgtccaaaaccctaaccccgcagttnnttggggggcggaatttcctcgcgcccccgcccggggagacctcgccctcgccctccccgccatcggcggaggccagatacggaggtggaaccgcgcagacgccgcctgagatctccgggatcgcagcgattttgccgagatcgggcggaggttcaagagcggg

SEQ ID NO: 423530 - DNA, 249 bp, Oryza sativa nipponbare
gaataggttcccatcataggaataagcttatgttttatgtttaaaaaaacaattctacatgtgtaaagctttgtgatcttataagcaactagagaggtgaaagcacatggtaaacctgggctcttattgatacttttaacattatgtacttattctaactgtattgtaagtcgctcttaaaatggacacatgaatcggttactctgaattattgtgtggaagatttcaagaatttggatgcagatgctc

SEQ ID NO: 423531 - DNA, 423 bp, Oryza sativa nipponbare
cagacatctctgcctgctgcctcctcttcttggtgttctgggtcagacagagaaagctgagttgttctttaggaattgggtattattttttttgaaagcgcggaattgggtattatgggtaactgctggtttaaagggaatccatactttaacagggtttcttccaatgcaacaaaatcagaatcacctaaaatgcagagcccatctgagagaaaagaaaaggatgacagcatgctgccgtcgaacgcgaaagaggtggaggaactgagaagggagtcggctcggaaccctctgatagcattcacatttgaggagctcaagaggataacaaaaaatttcaggcaggattcattactaggggggaggtggatttggtagagtctacaaaggatacatcaccagtgatcttcgcgaaggattaac

SEQ ID NO: 423532 - DNA, 444 bp, Oryza sativa nipponbare
cccacgcgtccggctagcgcagaaagaaagagagaccattccgtccattcccctcctgcgtacttccgccgcgcggctcgccgacgcactcatcccgctgccgcgcgtcgccgcatcccgtccacggccgcccgcctcctcgactacccacagtcgtcttgctcgcacctccgccgctgcggtggccgccggtcccggaggcggcctccgatttaatggagaagtcctacgcgtcggcgagctccggcgagctcggcgtcgtggcgggtggtgggggcaggtcggtgcgggttataccactgcggcatccacaggaggcggtcgctgggtcctcgccgtcgtggtggtccgtggtgatggtgaaggcgcggggaatggggccgcgggattgggcggaggcggctctgccctgcttgtcgtggatgcggacgtacaggttgaagg

SEQ ID NO: 423533 - DNA, 342 bp, Oryza sativa nipponbare
gtcccaggaggtctggcacctacatgagcccgtgcaactacttcgtctacaccgctggccccgggcgtccatggctcgacctgcttcctgaccccaatgccatgcccttcaactcccagcaatttggcctcttcccttgccgcagcggcgtcagtgagcactatgatgtggccttcctcaattctgaatgggtggcctctgatgaggcttgccagttcgagctatgcaccttctcatccaagaccggaaggtggagcagcaaaccagtcttgctggacttgtccccgtctgagattcacaaggtagcgatcgagcatgagaccgacaagctgatcaccattg

SEQ ID NO: 423534 - DNA, 404 bp, Oryza sativa nipponbare
cttctctcttttttttgttgatgttttgtccacaaaccaggcaatacaaattccaatgttctttttgagaaacttcaccagttacggtggaagaaacaatcaacaataatacaatgtgaccatatatataggtacatggtacactaaactcagtaacagattctgcgctcccgcgcacgatacagccatacagtgcatcataaaacattacattcctccagaaggagaagaaaacaccaaccggaaaaaaaaaagaaaaaagaagaagctactattggtttatgcacatcggtacacacctcctgtgatttaaccgcccacaagtgcctcaaaacgctaattaatggaaactaggtctagaaaagctcactggggccgttaaaaatctggaggaaaaaaccatc

SEQ ID NO: 423535 - DNA, 366 bp, Oryza sativa nipponbare
cccacgcgtccgcaaatcaccgcgacctccacctccacgcctccgcgcgcgatgctccgcctccgccgcctcaccggcgccgtctccggcggcctcgcccgctacctctccacgcgcgccgcgtcgccggcgcggcccccgtgggcgctgctccagctgtcgaagatggaccggtccggggcgtcgtcgcagccgggcgcgtcgctccacgccgactacccgccgtgcgtctcctacctcaccttcgccgccagcttcgtcgacccccgcctccgccacgacgccgagtccgagatgttcggcacggtctccaacgacgtccgcgccacgagcggcgacggcctcgtccccgtccgcttctacgac

SEQ ID NO: 423536 - DNA, 442 bp, Oryza sativa nipponbare
cccacgcgtccgcccccccactaatcccacccggtaatccctctcacgatgaacggccgcggcggcgattctccggcgacgaattgctgcaggggcggttcttcttcttcgtcttcgtcttggcgccggtcgatgtgggtctggtcgttgagtttgtatgcgatttgaccgctcccacgcacctgtggcgtagttggttgcggtgcaactgttcgagctattgactgtttggctggctctctcctcggcgttattctgtggccgtttgggggattgggagtattggaatcctactcttccagttctcctaagttcttcacaggaacaagtctgcaatcaggatggtttctgaagtctttgctaactttgagcttagtgacttgatgggtaattgattctcttgggtgtgttgcatttgtgctgtaacgtggataggagtcat

SEQ ID NO: 423537 - DNA, 446 bp, Oryza sativa nipponbare
gtctacccactcttgttgcataccctgcagactgcagaagtccatcctgttacatgaggtacccaggtgagctttttgtggattctgttgttgactgggtggcaacgtcagttgttggtttacctcgtatcttgtactattccaaggagacattggggcctgagttcattgggaagagcggccatcataaggtcaaggttatctttttctcaagtaccggggaacgtgctgctccattccttcgccaagctgcccaagagtattcgacctatgcatcatttgcatttgtcttatggaaagaagatgaatctcagatttggtggaattcgttaggagtggaatcagctccatcacttgttttcttgaagggaccaggtgccaagcccattgtataccatggaacttttaccaagtcagagtttacaaagataatggaggagcataag

SEQ ID NO: 423538 - DNA, 443 bp, Oryza sativa nipponbare
catggctgtaacttaaaaaaaaagcaactcaagatctagcatacagtttgtttgctaaatgcatctctgttgattcatttccataacattcctactgctattgttgatgtggattcagagggcaaggtgatagttcttaacggaggtagtggtgttccggaaccactggcacctgctctgagtgtctaattgagggataatatcgtcgttctggaattatggccttttctcttctctgacctgaggcgctcatgatggtaaaactagatggcataaattctcccttcattgaggtgctttcactataccattgactgtccaaccaaggcgggtgagcctatcatgcaagttagtgctcacgtgctgccttttgcagactatctgtttgcgggatctagaggcgctatttatattagtgactgctctgcgttcgcgcggttcgt

SEQ ID NO: 423539 - DNA, 284 bp, Oryza sativa nipponbare
cccacgcgtccggctaatagttagaggactctttattagatgcgttgtctgctactatgagagtgttagtatgtatgtatatactggtatctgtgtgatcgatcaaggatcgatgtacacacatatgatcagtatgcacagataactagatcgagatctatagcttgatcgatttggggtttattatgagggatttgtaagtattggattacatgttgtactggtgaggatattgctataggttaatatgacttttagggtactattttctgcattaaattaat

SEQ ID NO: 423540 - DNA, 52 bp, Oryza sativa nipponbare
aaaaaaaaaaaaaaaaaaaaaaaaaaaaaaaaaaaaaaaaaaaaaaaaaagg

SEQ ID NO: 423541 - DNA, 185 bp, Oryza sativa nipponbare
  unsure (1)..(185): unsure at all n locations
cgcgcgcgcgcacagcaatggagctctcgcttgcctccgcgaagccctcgcctcgcgccgccgccgccgccgcggcggcggcggcggcatcgtcgtcgctgctgtcgctgcgggggaggaggaggagggtgggggtggngcgcgcggcggngtcgncgggggagggggtgcncggggggaggagg

SEQ ID NO: 423542 - DNA, 424 bp, Oryza sativa nipponbare
gtgacccatcaaggatcgaagtacacacaaatgatgagaatgcgcagatcacaacatcgagagatatatcttgatcgatccggcacctctccagccggggtttccacttttggataatatgtggcgacgaagaggacaatgctagagacaaattgggtgacacgacaaatctctgataacaaatgcataagtagagagcgcaacatgaggatgcatactaatatatacatatacacatggacacatatataggtacagacatcgacatccgcgacaacatgcaggcatcagaaattgtgacggagaacaatgactaaggggataggctatgacggatgatgaaccgcaccaggacagtgttaaattcgacaaaatccggattggctgacttcaaacgtacgaattcgacagcagcttgggaggc

SEQ ID NO: 423543 - DNA, 447 bp, Oryza sativa nipponbare
agggtttataccgccgccgccgccaccgccgcagcatcagcagccggcggcgtgaggaggagaggaggcgacctaggtcgaattcgaggtcgagggagatgaggctcctgacgcacaacatgctggcgtcgaacgcgcggggcgcggtgacgggctacccgctgaagctgcaggtggtgaagtggtcgaccaaggaggcggagcccaacccggagttcctccgcggcatgctccccatgatcgactggcccgcgctcgtcgccgccacccaggccctcggccttccggagctcctccccgaggcgccctccaccgacgccgagctctccgccgagggcgccgccgtcgacgagggcagtgcgcttccgcgactccaccgcgcgcttcttgagatccacatcgaggagggcgcccttgtttgcccggacaccgaccggtgtttcccca

SEQ ID NO: 423544 - DNA, 445 bp, Oryza sativa nipponbare
aaaagatgcggataatatatctaactgcagtgagagaaggaatgttatttctatacccacaaaagatgcggataatatatctaactgcagtgagagaaggaatgttgtcaaaataagggttaaacgtgcttcatcatccagtaaagcagatgatgctgatcacagagatcattcacatggtagaaatgaaaatgaagcaggtccatgtagctctatgtcagtggatgcacctatgactgaagcaccagaaccagtaaatgtaagtaatcataacatcgaggagcaaaactcatgccatgatagggaacaaaactcttgccacgatagggaatcaaggatgtcagcaagcattggcaatgtcaaactaatggacaagcatgaagtatccaaggagctacagtgcacagccgattccaggctagatgctctccccaaggatcacttc

SEQ ID NO: 423545 - DNA, 158 bp, Oryza sativa nipponbare
aagaggaggacgaggaagaggggcaaacagagataagaggaatggcactggaagacaagagttcaattgagaaactctataagcacatcatgtcaatccttcccacctcggaaatagcatccaaagaggagcaatgcgattatgacaatgcatggaac

SEQ ID NO: 423546 - DNA, 421 bp, Oryza sativa nipponbare
aggattttgataaagaataccatttaacagaaataatagcaatggcactggaagacatgagttcagctgttaaactctataagcacagcgtgtcaatccttcgtaccttggaaatagcatccaaagaggagcaatgtgattatgtcagtgcatggtacagtatgcttctgtcctgtgcccaagaattgcagcatggtgcgatgatttggcaggaatcttgtcatgcaaatgttggcgaaacagtaatttctcaaggtgctcattactttattgctcttggggagatctacagagttgcacagatcttacatatatccatgctatctttcaagccttgggttcttgcagatcctggaatgttgagtaaaatgttggtttgttggaacagctgcgttaattcatggactagtggtttaggaat

SEQ ID NO: 423547 - DNA, 437 bp, Oryza sativa nipponbare
ggcggtgacagttcaaattgggtgggagtgctcgggttgccacactacaacatggatgacatgcctggtgtatcattccatgttgcacttcaccttgcacaaataaagagggcaaaaaggttccaaatgtatgactatggaagtccagtagcaaatatggaagcatatggaacaccagaacccttggacctgggagctcattatggtctgattgacatcccagtagatttagtcgctgggcaaagagacagagttatctcaccatccatggtaaagaagcactataagctgatgcgcaaggctggtgtagaggtttcctacaatgaattcgagtacgcccacttggatttcacattctcccatagggaggagcttttgtcctatgttatgtcccgcctgctcttagtgtctgacccaggtaaaggccgcatcaagca

SEQ ID NO: 423548 - DNA, 448 bp, Oryza sativa nipponbare
cgtaaaagaaacagaaatctctcgtctcgtcgtctccgctccttgcgccaagacgagtcgcgggtgaacaggggaggggacgccggacgccgatctccatctggcgagcagagcaacggaggggaggtgcgccgatctccatctggcgagcagagcaggggaggggaggggaggggatcgggcgaaatttgtgaaatctttcagttgatgaaatcttaaaatcatgggagaaaatactggcgataatccaaacatgtcaattcttcaaagaattgccacaagtgatgttccactggtgaaagagtatggtctgcctggaattattggtgccattctacttgctgtagttattcctatcatgctttcttccatattcaacaaaaagggaaagaaaagagcagtacaagctgatgtgggtggtgaggcaggacttgccatgcgaaacagt

SEQ ID NO: 423549 - DNA, 357 bp, Oryza sativa nipponbare
cccacgcgtccgtgaatcttgggatgaaattcgcaggggactgcctcttcacaccaggttgacaaggattctttactgaggaagtaggctttgtacatcttgagaatatcactagacatatttccctcatctgagaatgatgccgctcagcaatgctccaggaggaggtccgccgctctgcctgctcaagacaaaccaaatactgcaatgacaaaaagagagaggtgggctcagaaagaggctagatcccttggcatcggagaaacgagccaatcagatgaaaactgctcaagtcgtaaagactggtcaaaagttttcctgttactctatgagatgcttcgggagtatggaacacat

SEQ ID NO: 423550 - DNA, 377 bp, Oryza sativa nipponbare
cgctgcccgggctggcgtctccgccgccgacgacgctgacgccgacgccgatgccgcccaaggcatcgcccaaggtggctcctctaccgccacccgctgaggcggtgatcccaccgatctccttggggaattccggcgctccggatgctaatcctgatcacgaagcaccggtgcggaatccgccggctaggcgtgccctggtgatgcctgtgggggatgggctggacaagcgtgcccctggctcagagccatccccagtctacacccctaatgccaggagcaatggaggcggtgatcaccaccagaatggtcgatatggttcccatccccatagccgaggtagtggctattgggggggggggaacaggaggggcaat

SEQ ID NO: 423551 - DNA, 214 bp, Oryza sativa nipponbare
  unsure (1)..(214): unsure at all n locations
cccacgcgtccgcccacgcgtccggttaccactcgccgggaacaagcaaagtggggcacgcacagcgtcaagcagcaactggtggcagcgatgtcatactaagggaatcaaagtcaagagggcagcaaggagaccctgtngtcttcgcgcctgcgctacggtaaggaggcgccgcgctgcaccccagtcggacgccgttaatgctcgcgtcggt

SEQ ID NO: 423552 - DNA, 224 bp, Oryza sativa nipponbare
gtaaacgttccaaaatcaatatagcagccgcgtgtacagctactactactcttttcttctgctctcctcttgtcttctctactactgctctcctcttctcttccctcagcggacaaccggaggcagcggggtcacgggcgagggtttcgggcggcgaggcgcggcggctgtgtccctggcggaggagctacagccgcggaccgtggcggtgctgtcagaggagc

SEQ ID NO: 423553 - DNA, 432 bp, Oryza sativa nipponbare
cgttgctgccctcttcattcgctcgctcccctcctcgccgcgccgccatctagggtttcgtcttctcctccgccgccgaccgccatggctcgccgcagctcaggtaacccccatcctctctctcccccctagccccagtagccatgcggcgtttgggattgggttctcgcgttgaacgcgcccgttgttgttcttgttcggatctgtggccttcgtttggattgggtagattttcgattcggatcgatctgcgccgcgcgattgggcgattcgtggtctcacgtttagcgtttggtgggatgtaggatcaggaagtgccctccctcttgtattggcgtatttagctgctagattggtcagatctgtcctcggtgtatacataagactctacccgtggttgggggattatcgaagggggtctttttttttttt

SEQ ID NO: 423554 - DNA, 439 bp, Oryza sativa nipponbare
attgcccaacaggacaatgcttcgactgagactacaaaatcaacagtattaaatgacctttcttctgataaagaaaaggctgatgcctgctcgaaacctgtaaatgaggcatctgcaggacaatctgtttctggggttactagttcagttcctgatttttccattttaaagggagaagtctgcttggatgatcttacaatgagagaacttcaggaagcatttagagccacatttgggcgtcaaactactgtcaaggacaagctatggctcaaaagacggattgcaatggggttgatcaattcatgtgatgttccaagttcaggttgtgttgttagggattataaagttattgccatgggtgccaaacaagaaataccagtggttgaagcaataccaaagatggaacttgaggctaatttggttagggaccaagtaatga

SEQ ID NO: 423555 - DNA, 324 bp, Oryza sativa nipponbare
tgactatcatagccacatctctataatagacaaactcataagatgaaaattctcgaatcttttggtcatagtgactgtcaagtagtgatcaacatgatagagcaccaaaaggctctcatggtggagctgcgtggcatggtcatgccattacttccgagcgacaatgaacaagccaagcttgctcttcaactcttgggagatatattgagttgctcagataaggctatctccatgctagaacttggtggagacactaaaaagctgaccaatcttgttggaggtaagagaaaaggtgacaagcatagcatggacaaccacaacttg

SEQ ID NO: 423556 - DNA, 435 bp, Oryza sativa nipponbare
tttagcttagcttaagccacttgatctcaagctcaagcttaaaattagcttaagattaagccattaattagccaagctaactaagcaagcaagatcttgttgaggagatgatggcaagcgacggcagcgcgagcccggccagctgcggcggcgcggcgtgcggggtgtgcggcggcgcggcgacggtgtactgcgcggcggacgcggcggcgctctgcgtgccgtgcgacgccgcggtgcacgcggccaacccgctggcgtcgcgccacgaccgcgtgccgctcgcggtcgccatggcggcggcgagctccggggtgtacgaccacctgttcgcgcccgacgacgacgccgcctcgtcatgggctgccgccgcggcggcgggggcggcggtgcaagggcaggggcaggggagccccaacgacagctcgtcgagct

SEQ ID NO: 423557 - DNA, 396 bp, Oryza sativa nipponbare
tcggccattatttatatgaaaaaaaagaagaagagagaacttggtatgtataccattccggtgctttgctttatttggtatacaacaaaaacaacagctatgtgatggtgggaagtgtctagcactgtagtgggtctttttatctggtttgctcaacaatgtgctgcatggttgtggcaagtccaacaagtggcatgttgtgtgggtgagatccatgggtgatggtgtgagagtggtggcaaggttgttgcaagctatgtgctacctgattccatggtggtgacctggtggggcatatgaccgacatgtccctttatgggataaggtaaacaggcggttagtctgactaagtttgaactggcaggttccctgtgggttaaatgggcttggagtatc

SEQ ID NO: 423558 - DNA, 447 bp, Oryza sativa nipponbare
ggttttattactatatttttaggtcatcaggtggagaagccatccatatgctaaataggtctcaagataggagtgagcagcaagttcggttttcattgggccatactcctcatctgaacaaacagccatcatggcccagggagtataaagttgaatagagcggttgcgatgacggcagctcagctcaacaatggcactgggcgtgcactgggaggtatgcttaaaggagagtgttgtagcatttgcatttttggcagccagtctgctccccagtttggcactccttgtggtaagggaaacgaggagaaagaaatgaccgaccaacaagttgtgaaagacaccaacgacctgcatcacgcaaataaacaggtatttattattttggttagtttgggttgttgtgcagatattaattaaggccaggggtaggggttgaagacttatgga

SEQ ID NO: 423559 - DNA, 234 bp, Oryza sativa nipponbare
cccacgcgtccgaaaaacccacgcgctgtcgcaggagaaacgaagccgaagctcccatttccattccacctgctctcccaactctccggccgccgccgccgccgccgccgccgccgcgctaacctcctccccgcgacgagcgccaccatgagcacggcctcggcgacggcgccgccgagccgccggacgcggagccgcccgccgtcggcgtcctcccgcaagtccgacgacccc

SEQ ID NO: 423560 - DNA, 239 bp, Oryza sativa nipponbare
acgcgtccgcgcaggcggtggggcccatggcgtcgtcgtcgccgccgtggctgctgctcccctccttcccctggcctcccccgccccctcccggctcctcctccggccgcggcggcggaggaggcggcggcggggaccccggcgactggaagccgaacgtcgtcgcgggttcgccggccccaatcgccgcgccctcgcgcgctcgcgcctctcgtcgcgagccgaatttgggcctgcca

SEQ ID NO: 423561 - DNA, 240 bp, Oryza sativa nipponbare
  unsure (1)..(240): unsure at all n locations
ccgccccggaccccccacgcctncccaggcgttgatacatgttgctgacccaacaagcgtggttttaccccggagcatcattttcaggggggcaatgcgcagagggacctctatctttttaccaactgctaccttttcaatgttcccagagaggggtgctatgaatgctctgagcccgtaacaaggggggggttgggaatctgggactgtgtctgtgattttgccccccgatgggagtat

SEQ ID NO: 423562 - DNA, 199 bp, Oryza sativa nipponbare
tctctcgctttcgtcgttgcagccgatactggagattggatcggaagcttctagaagcgggcgtgggcgatggcgaatcgcgcgaggtcctcctcctacgccgccgcggcggtcgtgctggcgctcgcgctggcgtccgtcgtcgctgtctgcggcgaggtcttctttcaggagatggttcgtatgatggatgggaaag

SEQ ID NO: 423563 - DNA, 186 bp, Oryza sativa nipponbare
cggagctcagaatgcgtcattaaaaatgcattatattttaaactatccatacattgagtaacatgtttgtggatgtataatcttttgatctgttatatttgaaagaatgacaacatttgataaaaattgtctagttaatatatgttggctgcatcttcaggtaatacatttttgcattgttactga

SEQ ID NO: 423564 - DNA, 457 bp, Oryza sativa nipponbare
acccacgcgtccgaaacccttccatcaattcttccaaggacgcttgatgagcttatgtatccttgttcgcgcagccgggggttttttgtgaactagtcgccggcgaccgccgccgccgttcgtttatacgggttcaatcgcatagatcagttcgtccaggttgagagtgtagatattcaggtatttttgcagttagagaggtctggttctcccccttaagaccccagtgatggagccgtgaactccaacatattcgacggccccctgactgaccctgacccagtgcgcttgtctacacacgttatgccactctacgcggtgcttctcaagctcggtttgttggtcttcgccatcctggccacctcccttgcccacctcgcgctccggtgcgggctccctggctacgcccggaaggtgttcgacgaaatgccccaccgggatgtggtctcctggacgt

SEQ ID NO: 423565 - DNA, 150 bp, Oryza sativa nipponbare
ttgacttctcctccccatcccgtttcggtttgtttcggatccctttttattttagtgaaaattcgttgtatcggggggttgttgggaaagcgtgcaagtctccaaattttgggtacccttttttggttaaaagtctttcctgggccaccg

SEQ ID NO: 423566 - DNA, 353 bp, Oryza sativa nipponbare
tcatttgctgttatgatagtctcttgctggctgtcgagcagggcataccccgcgtgggggtgcatcgctaactctatcaagaacagctccccacggtgttccacaagtattagagccgtctggcaagatgcatacttttacaggagatgctggcacatcattaggtagtgcacaatctaatcagagaaagcctgttaaaggtggtcgtgacggcgggcgcagaagaaacccataagtaaccatgaatggacggcttctctgtgttgcgacaaaccgtttacaatttgattacaggtacacaaaccatcacaaatagattcagaaggactcctatgtatgagtaggagtaggag

SEQ ID NO: 423567 - DNA, 260 bp, Oryza sativa nipponbare
cctacctctccggcgttcgctccatgtttttttcgctacggcggtcattgtattgggaaccggaacaatccatgacgcgcgtcgtactctagccagcacctttattagattgctgcaacagtgagagaattgcggatcccaatcataccgtaggatgtttatgcacatatggggcttggtggcagcaagtttgtgcctatgtctacctttgaacatattataccattgatcaccattggagctctatcaaataaattcat

SEQ ID NO: 423568 - DNA, 303 bp, Oryza sativa nipponbare
cggacgcgtgggagcggcgcctccccagccatgctcacacccgtcgtggcggcgggggcggcggcgccggcgcggtcccggtggccaagctggaggacgccgccacgctcatcgactccgtcgagacgttcatatttgactgcgacgcgtaggtgtgatttggaagggcgagaagctgatcgacggagtgctagagacgctcgacatgctagatcaaagggcatgaggctggtattcgtgacgaacaacttgaccaagtcgaggaagcagtacgggaagaagtttgagacgctaggactaaac

SEQ ID NO: 423569 - DNA, 435 bp, Oryza sativa nipponbare
  unsure (1)..(435): unsure at all n locations
cgcgctcctctcctctcctctctgctgccgatctgctgctgcgcgagccagagctcctcctcctcccgcgcgcggccggcaagaaccagcaaggtgcgggatagccacctgaagttggattgcactgattctttcctttggaacctgcagccaatccatatattttcaatgctccctctgaggtagcatgtctgaacaacaggatcatgctagcaaaagttcttgctcaagtcttagcaccagtactcangagagtgaggaggatgtgacagttggtacccttttaactgaagcaaagaacagtggacggagtcttggaaaacgcctttcccacttagattctatcccgcacactcctcgagttaatgggcaaattcctgatgttaataatgcaacaatagaccatgaaacattactggaaagattgggcactta

SEQ ID NO: 423570 - DNA, 107 bp, Oryza sativa nipponbare
gtaaaaccaatataaaatttcatttcctgcttccaaattttgggggggtttggaatggatgaggaaggattttgaggtcttcaaggcttttcattacctctttacat

SEQ ID NO: 423571 - DNA, 423 bp, Oryza sativa nipponbare
gacagccatggagactatttcattgctgcagcccactgctcttccagctctgccgacaaccacacctacaagagctacagctgaagcatcacatagggcagaggaggcatcacagtccgctcttgacggctctgaaggacaccaaggtcccaagccttaggttctgtaaatgatcctgactagggtgaccagtaaaagcgaggattgtggtttggaattatgaagagcgcatgacgatttgcaggtgattgtgagcatatcacgcgcacctagcaaagtgtgagtactgattacaaacttgattttttttttaattttacgaaccaattggattcaattttctctgctaaatcacctcatcatcatcggtgagatgtatgtgcacttccaatttgttttgctattacactttgttcaaaatag

SEQ ID NO: 423572 - DNA, 441 bp, Oryza sativa nipponbare
  unsure (1)..(441): unsure at all n locations
ggaaagttggcaacaggcaattcaaggaggtcagatagggatcactctgctgggctggtggtatgagccctacaccgacgcggtggcagatgcagctgctgcaatcaggatgaatgaattccatattggatggttagttagtacttaaattgcggtagtaactacttaaattgtagtcgaatactactgtctcaaactcaaaacgatgttcatactcagatttttcaaactcaaaacgatgttcatacgaaaatacattcagtttggctatttgtcagtctcctgaatttacaatgtacccctctgaaataatgcaggtttatgaatcctctggtgcatggagactaccctccggtaatgaggagccgcgtaggcgctcggttgccatccataacggcgttcgattcggagaaaatacggngatcgttcgacttcatcggc

SEQ ID NO: 423573 - DNA, 437 bp, Oryza sativa nipponbare
gtggtggacatgctagaggcaggatggccgggagaagcaggccttcggcggtgctgagagagaagggattcttggagagcagcagcggcggcggccagctggggatgatgatgtccggtgctgccactccgtctactagctccgccgcgcatttgcgcaaccggattggcggaggcagcggcgtgccaccggattcgttgcgggggctcgatttggtcagctcgagcagcaagggtggtgctcatcagttcgatcctccgaagctggtgcagccgttgtcggttcagttccagttcggcgctaccgcgcataggtacccgttccagcagcatcagcatcagcagaagttgcaggctgagatgttcaagaggagcaacagcgggatcagccttaagtttgatagccctagtgccaccgggacgatgtcgtcggcgttc

SEQ ID NO: 423574 - DNA, 394 bp, Oryza sativa nipponbare
caacaatcatctctgaaacacgtacaaattgaacagctagcctccaaatcctccctccatggccaacgcagccaaccaacacacctgcgatggccctcaaccgtcagcaccaacgcacttccttattgtagcctacggcatccaaagccacatcaaccctgcacaaaaccttgcccaccgtctcgctagcattgacgcctcctcagtcatgtgcactctctccatccacgcttctgctcaccgccgcatgttctcgtcgctgatcgccttccctgacgaggagaccaccgacggtattatctcctatgttcctttctctgacggctttgacgacatatgcaaactgagcatactttctggcgacgagagggcacgtagccgctgcacaagcttt

SEQ ID NO: 423575 - DNA, 334 bp, Oryza sativa nipponbare
cccacgcgtccgatttaatatttttagttcgtatttttaggataaagagagtagcaaatatgtgagggttacgtcgttaatcgacgcgactcgcgagcagaggctcttttcgctagctaaacgagcggagccacaactcagtatccaattaaccaaaggaaaaactcgttatccaatttaaccaatggaaaattgcctaaggtcaacgggagccaggaaccagcagggctgctcctcctataaagccacccacccgccctcccgagtcccatttttgctgccctgtggagcctcaaattctactcgcgttttcatgactgccctatagatcagc

SEQ ID NO: 423576 - DNA, 100 bp, Oryza sativa nipponbare
cccacgcgtccgattaagtatttttagctgatatttctaggatgctgtgagtccccaattgtaacggttacgtctctaatagagtcttatttagagatga

SEQ ID NO: 423577 - DNA, 237 bp, Oryza sativa nipponbare
gtcatacatccggagaggcgtgtttagtggataggatctgacctgctcactgatgcgacactcagtcactgactcatgaagtacatgaggctaacctacatccctgctgctgattacgctgctacacagagccacagctatggtacggaagaaaaacgccttcgacgatatgccatcggctgccagctgcaccaccggtctaacctccccgctggagaccactacccatactccgaa

SEQ ID NO: 423578 - DNA, 407 bp, Oryza sativa nipponbare
cccacgcgtccggggaagtcctacgcctggattttggttgtagggctacctgttaagccatttggcagggtttgcgacacgaccatggcccgacaaaagatggtcagtggtaattttttgaacttgccaacttctgcggcgtaatcaggggtgcagcatgttcagtatttacatcccccgatcgttccccgcggtgcaatgccatatccaattcagcatctcccttacaccagggggaatttgacgcacactgcactactacttcaacagatgccacagtacatgtgcaatccaaacccagccattatgaagattcagcagcagctcatgcccaatcagcatcagcatcagcagcagcagcagatgtggcagtttcaattccctcaataccatcatccaaggccaga

SEQ ID NO: 423579 - DNA, 357 bp, Oryza sativa nipponbare
  unsure (1)..(357): unsure at all n locations
cgaagaagaagaagaggaagacgaagaggaggatggatggcggcggcggcaactggaggcccacccagggggccgaccccgccgccgctgggggcatcgatctcagcgcccccgcccccgcccccgccggcggcgactggcgctcccagctccagtctgagggacgcaccaggatcgtcaacaagatactggagactctgaagaagcatctaccagtatcagggcctgaggggctgaatgaacttcaaaagttagcagtgcgatttgaagagaaaatctatactggagccaccagccggtctgattactngcggaaagtgtctctaaaaatgctctctttggagacaaagactcaac

SEQ ID NO: 423580 - DNA, 230 bp, Oryza sativa nipponbare
ggcaggggaggggcgccctggcactgctggatgccttgcgtgcctgagaactagggtcaactactatgtcaactgctgctcgcacctacaatggcatcaatctcatatccacggggtgacacctctggatcgcataccataatttttcatgttcagctcgcaataattcatctttaggtaatatgacagtattccaccgtgtttagaagattcgcagcaaggggggaaaa

SEQ ID NO: 423581 - DNA, 164 bp, Oryza sativa nipponbare
  unsure (1)..(164): unsure at all n locations
ggagaaaaatacaanggcncgtggcagccaatgtatctgcatgggtgctcatgaaaatagctcggagcggttcgtctttgttaggcataccaacacacgttatctgatgtgcgtggctctgcgatattgatcatcatatcgccaaaaacaataaaatggggcca

SEQ ID NO: 423582 - DNA, 223 bp, Oryza sativa nipponbare
  unsure (1)..(223): unsure at all n locations
cacgcgtccgcccacgcgtcnctttttccaggcgagaaaagagagagagagagagagagaaccaaaccaagcacgcgaccgagatgggctccttcttctcgacgatgttcacgccgccgcccgccgccgacgacggcggcgactcgcgcgtggtggccgttcactccacggccacctgggacgagcagtggggcgcccacaagagcaaccccaacaagctgat

SEQ ID NO: 423583 - DNA, 407 bp, Oryza sativa nipponbare
  unsure (1)..(407): unsure at all n locations
cccacgcgtccgcccncncgtccggccgcccctactactccgtcaccaaatcactccggcgatccctctcgccccattccttcgcaggccccggcaccgccccctcctcccaccgtcgatccgtctcctcccctcccccacgacaaccgaactccacagccgcgggcggcgccccctcccgctcccgctcccgatcaaccagcaccgtcttctccaccaccatcactgccgccttctcccccagcaccggggtccccggaatccatgctggagcgggaggcgtctgaagcggatggagaaccggtgaacatgacgcttgcccttgcgctggcggagacggagactgagaaggcgatgccgccgacgccgccgaaggccgcggaagcggcggagtccccaaccggatc

SEQ ID NO: 423584 - DNA, 424 bp, Oryza sativa nipponbare
ctctctttctgtgtccatcccgctctctctctctctcgacgagagagagaaagtgcgaagagatgctttccgtcgcccgccggcccctctccgccgccgtccccgtcggcaacctcctcggcatccacctcttccaatgccctcaccaaccatggtttggtttgtccaaatcgggggaagaagaaatttacgaatggactggagtggaggaacaagatgactgatgctccatggtggggatataataaataacaagatgaacgtgtggagacacactggacatttgggtttctatttcacccattggaactctccaaatctcctctctgtttatttaattattattcctttcatctaaattaacgtcgactacatagatcttgctgttttaaagattatattggctagctattcttatcttatt

SEQ ID NO: 423585 - DNA, 189 bp, Oryza sativa nipponbare
  unsure (1)..(189): unsure at all n locations
cggacgcgtgggcggncccgtgggcggacgcgtgggcggacgcgtgggcggaaccggaacgcgtagctagcgcgcggcgtacatggggaaggcggaggctaggtccatggagcacggctggggcagaggagaggcacgcaactcgggaagatcttggtggggactgccggcaccacggagcggattttg

SEQ ID NO: 423586 - DNA, 367 bp, Oryza sativa nipponbare
  unsure (1)..(367): unsure at all n locations
tcggacgcgtggggatnnatctcctttctgatgaacaagtttttagataatctttactccggggaaaaggtaaaaaggctggagcaactccttcaaagagttcacatggttgtcgaggaggcagatgggcgatacatcaccaaccgttgtatgctcacacatctgaagacgatagtcgcagcgatgtacagtggctaccatgtgctggataccatcaagtacatgaagaacaacaaaggtgcgaatgatctggtaaataactcatctgccttgtcttttgccactcctctcaaacgatctcgcactactactatgtggcctgaaacaaagaacaaattcagtatggagttaccaggcgcacttgaaa

SEQ ID NO: 423587 - DNA, 295 bp, Oryza sativa nipponbare
  unsure (1)..(295): unsure at all n locations
gaagaaatgctggaangaatctattccattcttgaaggacatatagaaatccatttcttttagatgcgagtgcccttgaacctcaatttcatatcagtgcaccgtctattcttatggccttttgactgaaagtacatgcattcattggagcaacattcgagtgcttgttcctttcataaacccctgattcacaagttctcaattcacattggtattgtacatacatcatgtcaaactctaccatcttatatttgtggacctcaattgctgggccttaaaagtaacgctgacttac

SEQ ID NO: 423588 - DNA, 305 bp, Oryza sativa nipponbare
  unsure (1)..(305): unsure at all n locations
nctctctctctctctnnnnnctccacgcccaaacacctttccggcgaggcgaagcgaagggaagcccgatggccgcgagctccggcgacgacgcgccgaggcccaatccgttcccgtccgcgctcgtgtccaacctgcagtccgtcctcgcggcgcgccggccgtcgccgccggtcgtggaggaggccggcgcctaggcccagaaaccgtatgcggctgagtcctccggtgcttgctccgtggccgatgaaggtcccgctaagccggccgtactcctgacctgcgccggcgggatccgtgcgccg

SEQ ID NO: 423589 - DNA, 100 bp, Oryza sativa nipponbare
  unsure (1)..(100): unsure at all n locations
cccacgcgtccgcggacgcgtgntacaaaaaaaagcaaaaataataaaataaaataaaaatataaggaggtaaaataatttagaaaggaaaataatttag

SEQ ID NO: 423590 - DNA, 401 bp, Oryza sativa nipponbare
  unsure (1)..(401): unsure at all n locations
cccacgcgtccgtgctccccgnctgctccgccgcgcccacctgctccccgctctgcccggtgacgtcgtcggtggcccatgtcgtcggcgcgccggcgctacgagggagggtggtggaggtgagcgcgctcaggtcctacgccgatccgctcgtggcgcggccggtgcccgaccgcccgctgctcgcggactcatccatcctctccccctactccgcgtcacccgacgacatcgtgcggggcctcgccgccgcggaggtgcccagcgccgacgccaccgcagcaggtgacgcgctctgctgcggcggggtcgagccggtgaccctgactgcccgtcttcgaccttgccggcaccactgtcgacgcggccgtcacctactccggggagcgcgccctgcttga

SEQ ID NO: 423591 - DNA, 170 bp, Oryza sativa nipponbare
  unsure (1)..(170): unsure at all n locations
gcggggacactcatgcanccgtgaagaattaccttgatcggattctctacgctgtggctgatgcgatctatacaaaagctcgtggattctggtggtggttttagtttgtcccaagcaatgcaagttgctcgcaatatgtctggtatcgagcgtgcgtgtcaggttttcac

SEQ ID NO: 423592 - DNA, 375 bp, Oryza sativa nipponbare
  unsure (1)..(375): unsure at all n locations
cggacgcgtgggttctcaactnntcctatgaaaactttttttcgaggctgcacgtttgcaatgtgagtaaataaaatcatttattgaagattacatttgtatctgcaaattcagttagctagagggtaaatctttttcagtgacagtatctttcctaggaaattcataccgaattgtgaatcctcatgtactgaatttgtactatcatacactaccgaattgattttgccccttattgtttaggctttccacgatttctgctaattattttcacagtaattgcttgcctttttttgcaccggactagattgctgtttttctttgatcatcctcttttggttcctatactcttctagcgttggtgctttttttttc

SEQ ID NO: 423593 - DNA, 189 bp, Oryza sativa nipponbare
gccattatgtaaataatcatgaaaattatttctatatgtgatgcaatatttttgccgtgtaaagagagtaggtgactatattaaccataagttttgtattgatagctgaaagagaacatagcaggaaagctgctgtgcttccaaattggaaacattttcgaccatttatgaacgtctatgctaatccct

SEQ ID NO: 423594 - DNA, 382 bp, Oryza sativa nipponbare
cgttcaccaagaccaccaccaccttatccctttcgcacgaccgcatctcccgcacacgcgcagtgatccggccgcttcccccgttgccgctctcttgtactaccagtacctgttgcctcgcctagctagctgctggcctggccggcgtcgcgtgccttcatggcctcgctcctacccagtccggtgttccccaccgccgccgccgccgcggcgtccacatcctcgtcctcgaggtgccggtgccggtgccgcatcacaacgtcatcttcggcgcacggttggtccaactgtcagggctggagactccatcaccgggtttgggcccgccaagctgctgatcagcaagggagggtgcagcagcagcaacaacaagaagaaaatg

SEQ ID NO: 423595 - DNA, 379 bp, Oryza sativa nipponbare
gcaaaacccatttcattgacacagcgcccacaaaaccgcagaatcctccgtcgactcttccggcgggagggcacgccgccgaccacccgccggcgtggacgcgacgcctcctctccccgagtcggccccggatcacatgcggccactaccccgatgtcatccttccagcttctcctccactccttgctcttgcttctcgtcgttggcggcgtcgcgggcggcggcggcggaggtggtcgcctgagggcgccttcgctggaattccaccaccggttctcttctccggtgcagcggtgggcggaggcgcgcgggcacgtgctccccggaggctggccggagcacggcagcgccgattacgttgcgggcctgaacgggcacg

SEQ ID NO: 423596 - DNA, 371 bp, Oryza sativa nipponbare
cccacgcgtccggctattgattcctgtgaaaccattgtataccgcacttctcgactggcccttcctgacgcatttaacccagctatatcttctgtcagtgatgcaaataacttcataccaactgagagcatgccacagaatcagactagcacttctgaaaaggaagacgataaacttgtacctgaagttctggaaacattcaccatgaggtttgatgagctgcaaaattccttctcaagagctgagagggcaaccacgtttcaagatttggcaaccgagacacgggatttggagcggtggtccattctccaccattttataaagttgcataaatactctagattgcatgaggatgatgtctcgaatattag

SEQ ID NO: 423597 - DNA, 139 bp, Oryza sativa nipponbare
cgactccttctttctcgagcaggaggaggagttcgtcatccgccatatggagtaaaggaggggatcaaaaaagacgcggaggcggctgccgtaagtggcccgaaaaccgcgggagaacgtggacttccaccgggagaag

SEQ ID NO: 423598 - DNA, 88 bp, Oryza sativa nipponbare
ccaacgcgttgacctatggcttgatggacacactgcgccacgtggtctgttactgtatttgggggagaatgcttcccacgatgtatta

SEQ ID NO: 423599 - DNA, 80 bp, Oryza sativa nipponbare
cgactccttcttcctcgagcaggaggaggagttcgtcatccgccatagggagttgcaggaggcgatcaataacgcggcgg

SEQ ID NO: 423600 - DNA, 394 bp, Oryza sativa nipponbare
  unsure (1)..(394): unsure at all n locations
cccacgcgtccgctttcttgtgagcaagggattattgaaaggagattcttccacaatccgacccttgcgacatctacgaaatgaacctgagtggaggattgcgccgacggtgctcaccctcgcagagcacctgttcgtgagcttcgccgtgcgcgtgctgcaccgggaggccaccaaggccatcgccggagtcgtctcaaaggcgaagagaccagccggaggcggcgaagacgacggcaagggcgagtcgccgtcgtcgtcgtccgtgggagtcctcgcgaggcggaacanggtgtggagccgttgggaggttcccgtctccggcatggtcgcctacgtcgacggccggctctgccgncacatacccaaccccatcgccaggagaatcgtcagc

SEQ ID NO: 423601 - DNA, 196 bp, Oryza sativa nipponbare
cgactccttcttcctcgagcaggaggaggagttcgtcatccgccatagggagttgcaggaggcgatcaagaaggcggcggaggcggcggcggaggtggccggaatccggcgggagatcgtggacttccacggcgagatggtgctgctgctgagctacagcagcatcaactacatcgggggtggggcaagatccctc

SEQ ID NO: 423602 - DNA, 232 bp, Oryza sativa nipponbare
cccacgcgtccgctccaataattctctcccctctcctcctcttcaccaccaccaccaccaccagcagcagcagagagcaccatctccatccaataatccccatgcttgcgcaccactcccggccacatcccgcgcgaggaggaggaggaggaggagggtgtgcttgatccgcgctcccgcctggttggtggtggtggggtgaggggggagggatcgctcgggctccacccgc

SEQ ID NO: 423603 - DNA, 232 bp, Oryza sativa nipponbare
cccacgcgtccgcccacgcgtccggtccacccgcggtctcgtacgcgcgacacgagtcaacgaccgacggcgatcgccggaggtggggggcggcacggcggggggtctctgctcagcgtggggggtggggccaccatggtgaggagcgggagtgtgcggcggacggccgcgtcgtcgtcgcccgccgcggcggcggtgccgacggccttcaccgcctcgcccggcgactacc

SEQ ID NO: 423604 - DNA, 354 bp, Oryza sativa nipponbare
cccacgcgtccgcccacgcgtccgttttttttttaaaaaaaaaagcaagagacgatgcatatgaaattcaattcattttttagttctgtatacaaatcgtaatcataccgacatttacagaaatagaagttaagtatctggctctgcaggagatcccctggttaattgatgttttaaaaaacattatagaatggggaatgcggcggcggcgaggtcgcaggcgcaacaggggtaacctgcatcacgattcctggagaggccgaaccagagcttgtgttctgcgaggccggagaaggaattctctgtgacttggccccaaggcgcgccgcgcgagacatcgatcggacgcgacgc

SEQ ID NO: 423605 - DNA, 137 bp, Oryza sativa nipponbare
tcgcagacacatagacgaaaggttgatcatcatcacaaagtttatcaagggatagaggaggagacgaagatcatgatggttactgctgtacaatgttattatgctgatatataaatattgcaggcttttaacattaa

SEQ ID NO: 423606 - DNA, 165 bp, Oryza sativa nipponbare
cccacgcgtccgggaaaaccccaagccgcaagtccccccgccgcgagtcgtcttctcatctctcctccgccgccgccgcctgctgctgcatctctcgtcgtcgccggtgagggaagggaggggaggggggagggcgtgatcgcagcagtgagggacgtggggtcc

SEQ ID NO: 423607 - DNA, 289 bp, Oryza sativa nipponbare
cccacgcgtccgaaacagtatgcatctggtgacatgtcctctatccttgtatgggatcttgacaaggaacaagtcaacaccatccagtcaactgctgatagcgggatttcagctctttctgcatctcaggttcgatgtggccaattcgctgctggttttcttgatgcatctgttaggatatttgacgtgcgtacacctgataggctagtatatacagcaagaccacatgccccaagatcagaaaaggttgttggtataggatttcagcctgggtttgatccctacaaga

SEQ ID NO: 423608 - DNA, 307 bp, Oryza sativa nipponbare
ctcacctccgcccgcctcgtcgtctctctgacaaccgtacagccgcccgtcttccgctccgcgccgccgcctccgccgctgccgccgcgcgggcgtacgtgtctatggcgacgatgtctcgccgcgcactcggctctgcgttcgcgggattcacgcggacaccagctatgactccgacggccaccttgccttcctcgtgcgcgtccccggcgcgtctcctgcggtggcgccggagcgcggttgtaggcgcccggcggttcgcgtccggccgcaacgcgcggattagcatgagccctccgcgccggca

SEQ ID NO: 423609 - DNA, 162 bp, Oryza sativa nipponbare
ctagcctcgccggtcgccgccatggccgcctcgctccttcgatccggccaccgtcttcgcctcctccgccacggaagtctgtactgggcctgcttttacgtcgtcgccgaggaggagctgattgacacccgcaagctccacactgactacgacgcctgcacc

SEQ ID NO: 423610 - DNA, 219 bp, Oryza sativa nipponbare
ccgactcgggaaaaggatcaaaccaccccgcttcggaaggattcaaccatggctgccctgtcagacacgcgaccggataagctaggcaagacctaaccgccactgccgagttggttcccagccctagtggctactgggattcgagtcggcgggaaattggtcgcgctatctgtcgcgccatcggttcttgtatcggacggaccgggagcggtggggaag

SEQ ID NO: 423611 - DNA, 126 bp, Oryza sativa nipponbare
cccacgcgtccgcccacgcgtccgcgagcagtagactagggtttttgctgctcgagcggagagcagatggggaaggactccaagccgaaggacaaggggaagggcaagcaggctgccggcttcgtc

SEQ ID NO: 423612 - DNA, 329 bp, Oryza sativa nipponbare
cccacgcgtccgtttttttaagcagtaagaacacgtgcaatttgaattacaaatgaagagaatattttaattgaaacgtggtatacattataatcagccttgttgtcaaaattcaaaaagaaaaaaaaaggtatctatacatgacacggtacacataacgggcatacaaacaaagtataacttagccatctaaaagaattgaaccatatggcccttctatacgtatttctgcccattcataaagaatattacatgatttttgaaactggggtataaagaggaaaaaatattatcagatttagctttttcactgtgtattatcattggta

SEQ ID NO: 423613 - DNA, 99 bp, Oryza sativa nipponbare
tcgagctaaccaggcatctgtaatacagagtgtttctcatgaaatctcagtttttattacagaaggggacaaggttactgtggttcaagtaacttatga

SEQ ID NO: 423614 - DNA, 133 bp, Oryza sativa nipponbare
cccacgcttacgctgacgcgtgggcggtcggccattattagtgatcctatacaatcattgacttgcaggtgattaagatggttgatgacttctccttcaccgttggagtttcggcgtgcactctgaccaactt

SEQ ID NO: 423615 - DNA, 206 bp, Oryza sativa nipponbare
cttccttcttctttcaccccatctcctgatcccctctcctcccctccagcggggcggcgggatggaggccggccacggcagccccggacagggcgacaggatggaggccttcacggtggcccgactcgaggcgactagatggaggcggcggcgggctgcatcgagggcggcggcgaccggctccggtcgagaggggcggtggccgg

SEQ ID NO: 423616 - DNA, 334 bp, Oryza sativa nipponbare
gggcgccgccgccaccgccaccaactcactgggtgagccgccgcggccctaaaccctagcccagcgcgcgcctctcctcctcctcctactccccccatggccgcgccgcaggcttccccgtcgccctccgcgcaagtggtgggcaacgcgttcgtgcagcagtactaccagatcctgcaccagtcgccggatctggtgtaccggttctaccaggacgccagccgcctcggccgcccgcccgccgaccgctacggcgacatggtctccgtcaccaccatggaggcgatcaacgagaagatcatggccatggacatgtcgcgggcggagatcaaga

SEQ ID NO: 423617 - DNA, 120 bp, Oryza sativa nipponbare
gcgccgtcgccgccgcagaaaccgcaaaagccatcgccgccgtcgtcgccgtcgtggtcatgggagcagcatgctcttccgtcgccttcctcgcctaccctggcagcctaggagcagggc

SEQ ID NO: 423618 - DNA, 156 bp, Oryza sativa nipponbare
acaaggtgtcactgaatggctagaacaatgggttcaacacctacctactgctcttaccaaacaaatggtgttggcgcttttaagcaattacctcatatgcaattccaacaatcgtacaactattgagttaggttcctaaagaaggatacccttttt

SEQ ID NO: 423619 - DNA, 194 bp, Oryza sativa nipponbare
gagccaccaccagaggcgtgaccgaatcggctagcgagtgagagaggaggagcagttcacagttgcagttccacgctcgcagtagtgtccagagcagagcgcgagggaagagggcgcaaagagcaagaggagaggcaagcagccatgggcgaggaggagaaagtgaaggaagaggcggcggcggaaaaagggaa

SEQ ID NO: 423620 - DNA, 90 bp, Oryza sativa nipponbare
cttaagcgtcctgactagcaacaaacctaaggtacagtaacctaaccaatcacaggatgcgacggggctggaacaagatggagtcacagc

SEQ ID NO: 423621 - DNA, 208 bp, Oryza sativa nipponbare
gccaacaactcaagtaccactccatgcattccggtttcaggcaaattaccatcctctacactctccactgactaggctggcagtgctgacaaacctgagcttctttctctgattcgctcagcctacccaaactaactgccaaaaggctggacaattgcactgcgcatgcactcgtcgtaaaacatgctctggaaccaaacaaatactg

SEQ ID NO: 423622 - DNA, 316 bp, Oryza sativa nipponbare
cccacgcgtccgcttctgttcctcttgttgtatcttccaatgcgcagacaacaaatcacatacaacaggaacctgaagtctccagtaaaattggttctgtcgcagaagatctaggtgtgctttactcaaaggcacaactctttcttgatggagatgatgatgaagaaatagttttcaagcctccagtctctgaaaagcttccgagagttacttcagaacagactagtattgagttattacaaccagtggtggtgtctgatgtcaattgggcaaatgatggtgcaccaccaccaatgacatttcagagcaatggacc

SEQ ID NO: 423623 - DNA, 69 bp, Oryza sativa nipponbare
ctcactcgagactttcttcttcatctgaagagagaaatccttaactcatagtcaggttaggtctgagct

SEQ ID NO: 423624 - DNA, 319 bp, Oryza sativa nipponbare
cccacgcgtccggtggatgatacgaaccatagcactagtgatgactcaaaacttgccatgttggagcagcttcaagattctgttgataatctatctagtggtgttatggaagagaagacaatcagagggcaaatctcagctgtttcagggaacgttgtacatgtagtgaaaagtggtcattgtgaaaaagttgcagtttctaccagtacaacagatgataagtttgagtcaccgggtgatattgtgcctgacaattcttcagcttgtttacctgatgaaaaagacccaagcattacagttaaccacgaggtgtcattca

SEQ ID NO: 423625 - DNA, 370 bp, Oryza sativa nipponbare
tggatatttcacctaaaccgagcctatcaaaatgttttagcatctcattgatatattccatatgagtgggacattcagtccaccattctgcaaatagaaaagtagtgcctctctgaattatgcactcaactcaaaagatcaactgccgagcgaaatatttatcggagaaaaggtgaaagacttcaacaaagtttataactttttaaaaactccatgaaaaaatatctagttgagtggaatttgattatgtcaaggcatttttttgaagaccataagaggctcatagtataactggtgactgaatgttcttgccgtgttgagatagacaatgtctcgtgcgacagggcatctgtcatccgggttgataggg

SEQ ID NO: 423626 - DNA, 427 bp, Oryza sativa nipponbare
cccacgcgtgcgcccacgcgtgcgcggacgcgtgggtagattttccaaaacaatcaaggcagcagcattattaaagacaagcaggcagccacaaagcaagcaaaggtgggcattagaatacacaccttgcagggacacatgcagagtcatcaggatgaaaagctagtccatggtgataagaaaagcagcttgcttgcaccagacctgatcaccccaaagcaagaacaagaagaacaccttctcaccaatcagtcagtactcagtacacgtgaagcaatctcagcaagaacagcataggtacatatatatatttagatagatagccatctcatttgatataataagcccaagtccagtgcagtgaacacaagaagctcttgttctgaagattcaaaaagagcaagaacttggtgatttcaatcaagaa

SEQ ID NO: 423627 - DNA, 451 bp, Oryza sativa nipponbare
aagaaagcttcctgctagaactactgcagagagtgaccatcagaaaacaggaaaagctagcaaactaagcgatagtagtacaaatgcagtgagtaaatcaacctcatcattggcagcgatgaagaaagagaaaaatgggagaaatgaattgtccagtgagagattgaagaaacttgctgaacctaaaagtaatgctttgaccgaccgtccttcaaattcaaagtttgctagcatggaccattcacgaaggaaaagcatgccagaagatacccaaacaaagaaaatatctgctataatgcagctcgaccagaggaaatcagcaactctaccagaactcaaagtcaaatctccacgagctccctctatatctgtgaaaaataagacaattgctagagaaataagggatggggatccctggggtaaatcacctcccactttagaagttacagat

SEQ ID NO: 423628 - DNA, 400 bp, Oryza sativa nipponbare
cccacgcgtccgtccgattcatggcggaggggcagtgaccgatgccgaccaccgcccgcgccgccgcgcagctgccgaccaccgtccaccggagttcgcccgccgtggcggcagccggaagaggcgtatccgctgagacagcaagggcctcttttgtaatgtatttatgttctagtggattccaagcaaaatggctggtcaaccaagtggtgctgacaaagaagtgatcaacgagcaaatggttgcaaacatgtatgccaacatgcgctctgaaatgaatcaactctacttctagatcacagagctgggaatggaagtcagtgagcactacctcgagatcggagcaatcgagccacttgactatttgaggcgctgatacagaatgattgagggagtgctg

SEQ ID NO: 423629 - DNA, 422 bp, Oryza sativa nipponbare
acacaatccaagtgcatttgtggagtcaaggttcttgcagatgacctgattcccaaccaaacacttcggagcacaatcagcaatatgctggcaacaagggctagcagcatcactagtggtacagggaagcacaggagctcttcaggcagcaacgtggatcctaattcagcaagccaaactccttcagctgccttggaaaagcaatctaaggatcaccacatatcatcagctgctcctgatgctggcctccaagttgctacagaacatgttagccatcttgagcataaattgacaacaggtgttgatctcgaagtgaaagatgaaggcaattctgcagggatattggtagagaagattgtaccaactgctgatgccagattaaaagatgtaactgactccacttcaaagcccgccactatttc

SEQ ID NO: 423630 - DNA, 437 bp, Oryza sativa nipponbare
cccacgcgtgcgtccacgcgtccggacaactaataaccaacgaaaccacgagcagcggctgatcggtaagcggtagtggtagtagtagtttcgtttgtacgttgacccaagcagcatatgccaattgcagcagccgcggtcacctcgccaccggccgacgcgcaggtgcacggtgtcgtgccaaggcatgcctcgccgacgccacagcagcgggcggcgccgaagaagagcagtcgccgcttaacctgagctatcaaaacattcggtgtggctgaaataaccgtcaaatctctgatcttgtctttgatgaagattgtgaaaatcatactgatcagctagatcctggaagtactaagcgaccaaaggttcataggacagatgatcacgcatcatggctgccacctaagcgtgaccatgacaggattagcctggagaga

SEQ ID NO: 423631 - DNA, 354 bp, Oryza sativa nipponbare
gcacaacgaacgaaggaaggaaagcaattctcagcagcgatggttctgcctgcagtttggcagaacggaacagcggcaaattaatcctattgcatataatttggtctctgtatgtaaagttaaatttttatacgctccatcgatcagctctatgctaaggagtaaggagtataattttgtgaaggtactgcagcttttacttaattaatcttgaacctcgatgtatacaacagtgaacagttaaattaatcatcattccctgaaagaaaaggaacgaaaggtttaactataaaacattacttatataaactttggactaccatgtacattacttaatagacttttctaacatag

SEQ ID NO: 423632 - DNA, 434 bp, Oryza sativa nipponbare
cccacgcgtacgacagatttgagcccccgccttctccgtcccccccggattcctcgctttctgcccagaaatttgctggcgttgggggggctcggagatgtccggcggcgtgcaggagcagtttgagatcaagttccggctgccggacggcaccgacatcgggcccaagaggtacccggcggcctccaccgtcgccacgctcaaggaatccatcgctgctcaatggcctaaaggttttctctcttctactcgataaagctttttttttttttggtttcttggcaatggcgccgggtgagtggtagtggccacagcgttcgtgtgatcggcgtcgatggagcggtcgctttcggccccctcccgggttctttctgcgaccaatttagcttggaatcttgagatgtacagcactgcagggtcgccatcaggggggc

SEQ ID NO: 423633 - DNA, 325 bp, Oryza sativa nipponbare
cccacgcgtacgcccacgcgttcggaaactactatgcagaaacaagcaaagtgggaccgggcagctaacgcatcaactggtggcagttatgtcatactaagggaatcaaagtcatgatggcagcaaggagactatgaggaattggcagctaaataaatgtagcaatatttagagttgaaacacagattggtggttcatacttcactgcattggtggcattggtatggacttgcactataatacctactatactgagattgcttgaagctgagaagcagtgctgattgcatctgtcctgaatagccgcatgcttgggaccagcgag

SEQ ID NO: 423634 - DNA, 406 bp, Oryza sativa nipponbare
caaatacatcctcctacttcgactgggggtatttgtcgaagaaactaagcttttgggttgatattatagccgacggaggccgcgtcagatgcagcatctgctgcgccgcacctgctggactgcggtggcttgcgacagctgcctggtctatcggagtttctgccgggccatcttcgccgacgaccataccgacgatacctcgtcttcggcactataacccaagaacgggcgtctatggaaagcacctgaggcccgatcgtgcacgacacgccctatcacattctatgcaaagctgaatatggtagcaacggagacgtaccagtggacttttaccatcattacaaggaggatccgatcttcgtgacctacatgaacatggacgccttacaataatccattgtttgga

SEQ ID NO: 423635 - DNA, 361 bp, Oryza sativa nipponbare
ggaaaaaaaaaagaaaagagaagaagaaatcctccgaaatggcggcgtccggcgagggggcgtcgctgacttatgccgcccaaggacatgaccactgctggcgaggaatgagctacttatacgagccgtcaatagaggactactactacgcccaccggcaccgcaggaagccccaacatatgcagaatctgcacgtcctccggctccacttcgtccggcaccggctacacggctcctgccccaagtgcgtgtgctcgcctgccacccacgccgtctccttcaagtgccagttccaccgcatcatcttctacggccacccgaacttctttctcatcgacgccgtcgcgctaaaggattttca

SEQ ID NO: 423636 - DNA, 430 bp, Oryza sativa nipponbare
cttccaagttccaagcctctctcttctcttctcttctcttctcgtgcgaccgcttccttcaccggacgccgccgccgccaccaaccgccgccgccgcgggagccggcgcagaggatcacagcacagggtttcctcggcggaagctgcgccactgttcgttctcctccgccgattttgctctggcggatttgggagaagttgattttgctctgagcgccgccggtggctcggaggtctctgtgtattccagctcctgccatccgccgccgccgcatgaggaggtccccgtcaagtgcacagctcccgtcgccgagctgccaggtctccgcggagcaccaccgccagcgagccaactaggtcagagtggctccatttggtgcactagctctgcaaaaagcttcatcgtttggatgagagatccccgttatat

SEQ ID NO: 423637 - DNA, 314 bp, Oryza sativa nipponbare
gccaaaaaaaattggcatagctcgcgacttctggtcgccgaccggccggtgacttgccggcggggaccgcaccgtacctggacctcgcgttgcccgtaccgtcttgccgcacgtgatggtatgaccggcgcccatcggcgtataagcgcatcgctttgcgagctgtctgcgcgctagacgtccggtgacctctggggggtgacttgtcgcctgtgagagccctgctccacgcccgtggtgctgtgacaccgattacagatgaccggcagccggtggttcatggtggcttcgcacataagcgcttctattaccca

SEQ ID NO: 423638 - DNA, 426 bp, Oryza sativa nipponbare
cccacgcgtgcggcggaaaacctgctctcctcctgctcatcctgctcccaattgggccggcaccaataaagtacacaatgcggagcgcccccgccgaccccgacgccgaggaaccctaaccctagctctccccgccgacgcgatggagggcggcggcgccagcgcacacgccgggatcaaccgggtgctgtggacggaggccgagatcgccgaccggatgtcggaggtggtcgacgagctcgccgccgacctccgcgccctgcgcgagcccgacgacgtcgtcggcgtcgccacgggggcgctgctcttcctcgccgacctgcaacgacgtgtcgacgcgccgctcgccgcggacctcgagcgcgccgagacgtacggcgactgcaccgagtgcagaggccggccagggatcaccttcaacctcaa

SEQ ID NO: 423639 - DNA, 166 bp, Oryza sativa nipponbare
  unsure (1)..(166): unsure at all n locations
acccacacattcattgtacatnttagtctatatttgctgttcacctgcgatccatgcgggtgcgataggaggagggcgccgaactccatctttttgagagcatggtatagaacgacaggagtgaattgaactagaaagagccgacgtcgttgccgctctttaacgt

SEQ ID NO: 423640 - DNA, 309 bp, Oryza sativa nipponbare
cccacgcgtccgcccacgcgtccgaacccccccacctcgagctctagggtttcgcggatcgaggggcgccgcggctagggtttgggtggggggtgcctgcgcgatggccgctccggcggcggagtcggcggtggtgggggtgggggtggattcatcgacgagcgccgtcgttagggatggcttcacggagcttgagcggtagcaatagcttggttgcgatctggacgcgcatgcaccaggtactcatggagcacttaaggctcgctggagcgcctttatccctagcgcattgtagacgctctgtaacaa

SEQ ID NO: 423641 - DNA, 438 bp, Oryza sativa nipponbare
cccacgcgtccgcttaaccagttgattaattactactacgccgcatgaaaagctccagcaggtggcggcttgtcctccgggcgccatcgagatcaacatggcatgtgaacaccaacggcgagtccacggtggtgactaccaataacttatgtacggacacgcctaacgccggacatgagtccacgacgtcagtcgtagacagatgtggtcacgaagactgggaccgacacggtgatggtgagcacggctaacctggcgcagctgctgccgacggggacggtgctggcttaccaggcgctgtcgccgtccttcaccaaccacggggagtgcaacggcgtcaacacgtggctcaccgtcgtgctggtcggagtgctggccggcctctggctcttcttatccttcacggacagtggttgcggccaagacggcaagctctac

SEQ ID NO: 423642 - DNA, 330 bp, Oryza sativa nipponbare
cccaccccaacgctttctactacggtctatcttaccatggactattaccgtacgaccgggcaacatccgccggagagatgggctgcccaaacgaggacccgaccacggagcccgagctggggaacgatctgtacactctgctctcccaccccaggaacctcgccacgcccacttcaaccccaggcccaaactgtagcactcgtatgagaaccaggtcacggtacttgtggggggcacagacaccctgagatgcgagctcctacaggacatgaggctcacccaattccataacaagcacattatacacgtggacaccatatacgtttgcaa

SEQ ID NO: 423643 - DNA, 316 bp, Oryza sativa nipponbare
cccacgcgtccggggtgcgatataggttgtcgtcgacgcacatcaccaccccgtggctggcgtcgcagcggcggcgtcgccgtcgtaaacgcaatgctgtcctcggcggcggcgtactaacgccgctgccatctttgggccaatagagctggcttcgccgcagcagccggggattcaaggtggcatggtagccaagcagcaccagaaggcaaccgaggcgcgtgctcccgatgtagacttgatcataggagatgtctcaaaggaataattcacttggtcccatatactttaaagggattaaaaaggtggttaatgc

SEQ ID NO: 423644 - DNA, 373 bp, Oryza sativa nipponbare
gttataacttttttctctattcctaaagaaaagtttctattagtacactcaaatcatttatttatgataaagataatattatgtgttcggatattatcttaatgataagcagtttctcgggggttaagtagccgctatcctaggtacatatttgaacttatatttggtgatacttatcatttggcatcattacatcaagtagtttcttagtgctgactaatggagactaactttcttttctagttgcacatggaagcgtgtatatctgattctatgctaggcattctaccttcgtgaaacgctatctaattctctgtcgtgtttaatgtcatctgcatactggatgaggttctgtgatttgctgatgaacaca

SEQ ID NO: 423645 - DNA, 341 bp, Oryza sativa nipponbare
atccaagctatatctgcctatgtcacctatgtatccaatatgcactggcgtgtcggaaatggtatccctggacgtcttgatggccggcaataacatacataataatccatggccatgggccggaccgactaccacatcctgttgatacctattcgggggatgctgatcgccgatacgtggcaggtataatccctacccatactaatgcaagtgctcagaatgctcggcctggggcatggtgtcgtagcgtatgcgaccatgtgactcatgctttgcggatgatgacatgactgaccgagaacagcttgacaatggcccatatgaataaaagtctgctaggc

SEQ ID NO: 423646 - DNA, 340 bp, Oryza sativa nipponbare
tcgtgacgacctctccgccgggcacgcccgccgtacgcgacctcctcttcctccgccggaaggcaccggacctcctcggcgacggattgcacccggcaatgacgatggtggaggccgaggccggcaaggaggcgatccggcgagccctgcggtctctgcggcggaggcatctcgtcgaggagggcgcccaccgcccggccatcgaggcgctcgcccggccctttgccgcccaagcggtggagtggaaagagaaggctgagaagcatgaattggagctgcagtaatgctacaaggctcagtcacgtttgtccgagcagttcgttaccgagatagaataggg

SEQ ID NO: 423647 - DNA, 360 bp, Oryza sativa nipponbare
ccgactcgtgggttaatacgtttcctgtgtctagacgagcctggctttaactacatataggcggtagcattaacatctagctagcagatcactcaaggagaagggctcaggtcttgctagaagcacagggatataggctagtggcaatattataatagcacgagacacgtgagatcgctcgagataaacacacatacaaccatgtacttggtgagactgattgccctatctataccaaaaaatggacagggatcctatgacgatgggcgttccgaggcaggaacaaacattcagacaacaggatcatgagctgtacagactgtaccatgttcagatacaggatgatgacaatgccggtgc

SEQ ID NO: 423648 - DNA, 427 bp, Oryza sativa nipponbare
cccacgcgtccgacgagccatttttttgctgtccatctcatcaatcaaacaggtcggaatcaagatagcttgagagaatcacattatggtgagcaaaaataaactaaaaaagaaataacgagaaagatgtaagaagcatcgcatttaagtcgacatggatggaacagggatacaagggagccctcctcactgattgcatgtttgaaactcaggacactccagcccagcaggcttacctgtcaggagcccactacccatatatatatcaaacatatgcatatttccaaattattcccccataccatacagtaatccaaatccaccaagaagatcaagtcaaattgcccacacatatgttataacgacagagggaagaaattaaaagggaaaggacatgatcagcattcaacatataggaaactaggat

SEQ ID NO: 423649 - DNA, 242 bp, Oryza sativa nipponbare
cccacgcgtacgtccacgcgttcgcagaattatcataagaatcgattaaaggggtgtattacactaacgccgcctatgtgcattactcatttagaaaaacagagttaccgcttcttgtagagggaaattggattcttggacctcttaaacaagaaccacctggaaatgcgagggagtgagcccctccactaaagacggctttgggaaaacttttcctcggaacagacaatatacttgggatg

SEQ ID NO: 423650 - DNA, 434 bp, Oryza sativa nipponbare
ttctcctctcccccctccaattccgttcgaatccacacgccgtccttcttctacttctgcggctcgccaccacctagcccgtctccacgcggctcgccatggtggcctcgccttctcctcctcatcctactccgccggagcaggtcggcgactgcgtggaggcccgaagctgcgcctcgccgacgcccttcctccgcaggaagggctcccccaaccgcagcggcggaagcgcccgcaagagttcaagctcaagagaatttggaagttcaattttgaattctgtaaataaatcagcatcccaattcaagaagtcaattaatcgttaatgtggttcccctatagattggttccctcggtagaagactgaaccatacttggagagaaagatatagcgtctttaggagagcaatggcatgactgcatcttttgatgag

SEQ ID NO: 423651 - DNA, 355 bp, Oryza sativa nipponbare
cttatttgaagaactgcaatcgttgcatttgagtgttgccacaaagacaaaaactttgcacgatgcttgcgaccaacttttgttggagaaacaaaggctgattgagtttgcagaagcacttcgaagtaggttgaactactttgatgaattggaaaatgtctctactagcttttattctcaaactatgaacatcggaaatgaacaatgtcttccacttttgaaacggctcgatgattgtatttcgtatgttgaaaataatgcacaatatgctgaatctgcggcgtacttggttaagcttcgtcaactgcagtctagtgcattaggtatgattcagccacatgtgctggtaatactt

SEQ ID NO: 423652 - DNA, 219 bp, Oryza sativa nipponbare
tcgctcacgcgtactcattcctatgccaagagaacccagggagagagctctagctggggggctggccttcgatctcaccgccggccgtgattaagacgaatcttcgccaatcctatatcttacacgtttcatactcttctcaccatgccgaatattattccttttgaattcatcctctcttcgagcagccaatctacgggaacgctgtctggcccaccg

SEQ ID NO: 423653 - DNA, 242 bp, Oryza sativa nipponbare
ttcttcttcttcccaacgagcgactcgcctccacctcctcgacctccacctcgcgaggcggcggtgcggggggccccaaaccctaaccctaattccgctgcgcccgcgcccgcgcccgcgcgcgccgacaggctgttgttgttgttgccatggggcagtgctacggcaagggcgcgtcggggaggacggcggacgatgagggcggggtggtgacggagcaccagtcgccgccgccggcgaac

SEQ ID NO: 423654 - DNA, 434 bp, Oryza sativa nipponbare
cccacgcgtccgccaacgttgggttcccatttctctctcccgaaaaggaaaaacacaaggtgaacttttctttctgtcgttcttgttctcctgagaattatctctagattctatatggttatctgcagaagaatgacgatttcctgtaagaatttcatgtggcgccatttgttccccactgtgtatattgtttaatacaattgaaattgtctccaaatctgaagttagggattagtgcttgtaacttcttttaattacatttcacaggtagaacgattctcccaggaacatcaagatgctgtagaatgtcataagcaacagagaaagaaagtttcacaattgaagaaaacaatcaggagtactaagggtttcaaagaatttcaaaagatcatcgacatgagaaactttacaaaaagaaaagatcgagcgtttgg

SEQ ID NO: 423655 - DNA, 334 bp, Oryza sativa nipponbare
gcaggcgcacttccgccgccgccgcagtcacgttggccggcggcctactgcgggtgctggaggcgcgattgatgagccctgcagccgaccccgcatgcagcgaggcacaggctcgtaccccgcgccgccgcctccttcctgggggccccggcggtgctcaccacccaggcgggcccgatattcgccgggcgttcgggcccaccaaaccctagccgactccggctgcgtctgtcctcgtggcggctgctgcgctcgaggagggggctctcctgctccgcctatgcagggaacaggcgctgggatgatgatgccgaggaggatggctagcagagcg

SEQ ID NO: 423656 - DNA, 397 bp, Oryza sativa nipponbare
aaaaaaaaaaaaaaaaaaaaaatataaaaaaaaaaaaaaaaaaaaaaaaaaaaaaaaaaaaaaaaaaaaaaaaaaaaaaaaaggggaaagagaataaaaaaaaaagggagggggaaataaaaaaaaaaaaaaaaaaaaaatggggggggcctttttaaaaaaacaaattttacgtccccttttttgcaaattaaaaattttttttttgggcacccaaaattaaattaacggcccgggttttaaaaacttggggattggaaaaacctttgttttaccaaattaaaacgctttaaaaaaaatcccctttttccaatttgggttaaaagaaaaaaggccccaaccatatttctttccaaaaattttcccaccttaatttggaatttggcccccccttttt

SEQ ID NO: 423657 - DNA, 420 bp, Oryza sativa nipponbare
gtcgcctgtttcctccgtaatctcttcccgttttgatctcgttttcgtctgattgctctcgaatttggtttgatttctattgtattttcgtttcgctggtagacaaatagatgttggagcggtgatgagcaattttttgtggactagagtttctgatactacttttgtagtatttgaagaccaaacccttggctgtctgagctcctcattctatccatcgctacgaccattctgaattagatttagattgttttatatttctgtttgcggcagctgatttgagatcttggtagcggtgatgagcaatttttatttggactagagtttctgatactgctactttgtggtagttgaagaccaaacccttggctgtctgagcttccagatctcacaaaacatactgttgcttttagattatta

SEQ ID NO: 423658 - DNA, 80 bp, Oryza sativa nipponbare
acgcgtccgctctactaagctcctgcaaacaatagagttgttgtaccatgagaactatatatcctgttctcatgcgtcct

SEQ ID NO: 423659 - DNA, 289 bp, Oryza sativa nipponbare
  unsure (1)..(289): unsure at all n locations
cggacgcgtgggcgctgcccaccccaatccggcagcacagcagcagcagaagcagctcggatccctcctgcaatggcgaccgcgtgcccgccgctctcgctgcagccggcctacctctcggngaggtccgcgcgcgcgcgccgnccgccgnccgccgtccgctgcagcgccgtcggagaggttatggggagaggcggggtcggacgcggagagccgtgtgtgacgcacaaggagaagtcaagacgcgctgctagagagccgaggctagacatatgttgagcatctatcg

SEQ ID NO: 423660 - DNA, 421 bp, Oryza sativa nipponbare
tgaatggacaaaataaacaaggagaaaatagcgaacgagagattatctacctgcttggctgtgacagttagatcctatgcattgtcagtctgtcacttttcttcctagtagtaccatgatacacttattattatcgtcctgctcacaaaaaattgcagagttcatcatcagggatagataattagaggctttggatatatagcattgcaatgtcaatgttgcatatgcagcagtgtgcaaaccaactttttttatgtggaggaatcttgtctctgagcctgtttggtcagttatattgttgagctagacatgtgtgagaaacagtatatgttgagcctgtttggtcaaatatttattttaagtgacattataatctatttccaagtttgaactatttggctctattgtgcagtttagtcgt

SEQ ID NO: 423661 - DNA, 323 bp, Oryza sativa nipponbare
  unsure (1)..(323): unsure at all n locations
aagaagctctaaaattgtttgatttgttcaggagggggctctccaacttctacgccggcaagtccaagtcgttcaccagcctcgccgaggcgacggcgtcgccggcggcggcggccaacgagctggccaagccggagaaccccttcaacaagcgccgccgcatcctcgccacctggtcgcggcgagcctcctgcagctccctcgccaccgccacctacctnccacctctcctcgcgcccgaccacgccgtcgccgagggcgacgagggtgaggaggaagacgacgattcagacgacgatgagcggcagcaccgtggcaagaac

SEQ ID NO: 423662 - DNA, 338 bp, Oryza sativa nipponbare
ccggaatttggtcactggcacctttccgtattaaattaactttagaagacaaacaaataagaatataataggtctgctgtgcaatattaattgtaatattttgcgcacttcattacaaatgcaacatagatgtggtggctgcagactcacaaccagtaccatttctttctgaagtatatacagataaatgaactattttacccttgattggtggctggtggttcttcataggttggtttggactggacaggagtttgacattctgaagactatctttcgagcatctgtgctaagggtgcacaaattcaaatttgcacaggttatcatgttttatgcct

SEQ ID NO: 423663 - DNA, 380 bp, Oryza sativa nipponbare
agaaaattgtagaggataaagaactagctgaggagacgacagaaggtgaaactacagctgaagtacaggttgcggagactacttcaactgagaaaattgtagaggataaagaactagctgaggagacaacagaaggtgaagctacagctgaagtacacattgaagaaacttcaacaactgaaagaactgtagaggataaagtggtacctgaggagacaacggaaggtgaagctactgctgaagtactcgaggaatgtacagccattgagaaaattgtagaggataataccatagctgaggagattacagaaggtgaaactgtagctgaagtacatgttgaggtagctacagcaattgaataagctgtagaagaaaacaca

SEQ ID NO: 423664 - DNA, 303 bp, Oryza sativa nipponbare
gtgacccgccccgcccataacggcacactctccgtactctcctccaccctccaacccccacctttcctcactccccttcctttccgtgcgtgcgtcacactgtcgtcgaagagctcgcaatccttacttctttctatcggtgaggatagtcctacttatcttgtgactctgacttttatgtcaatcatcttctattaagatctttaggatgacttcactttcctcgtatagatcatccctcaattttccattcttttcgtctaccattctcatactgttaaagtcattatgaaaatattctct

SEQ ID NO: 423665 - DNA, 348 bp, Oryza sativa nipponbare
ctcgaccttctcacgagatggactacggcgacggggaggtgccgctggcgaggaggacaggggaagaagacgctagctccgactgcggctccgtctccggcggcggagaggggctagagggacatgttggacgagctccggcgggactaccgctatgtgctcaaggattatgagatgaatacgaggaagctcgagagcataaacaagcgagaggctcgcctgcttcctgaaataaagttcttacaaaaaaagttaaattctttcgagaaaaatgattcgcaccaagcactgctgaagaagaaagctccgcgagtgccatcatatgtgggaatcaatgatgcttcatct

SEQ ID NO: 423666 - DNA, 350 bp, Oryza sativa nipponbare
ctacgacgtcacgcgtgcgtaagaactttactagctaaaaagattgatgaacaaaaggagatatctggtagatacaacacacaagtcaccgagatcaaaggcctgaaagcattgattgagacactggaccaggaaaagcaagagttacaatttatagtgggtatgctcggtaaagaatgttctgagtccagggcaatttcatagattgaagaatcaaaaaacccagcttgcaagcaagcctaatatttgagaaaatggttaaaagagcattatcttggaccttgagtaaaagcaacaaatgaaacgggaactgcatgccaacaaaggcttttaattgctgaaacagaact

SEQ ID NO: 423667 - DNA, 156 bp, Oryza sativa nipponbare
  unsure (1)..(156): unsure at all n locations
ccggcggcggcgatgctgcggcggaagggaggaggggggaagggggaggacgtgcctcncttttataattttacactttatttggatgggttaattactaaactaatcgtttcaataatactaatcttaatctatttactacaactatattttatc

SEQ ID NO: 423668 - DNA, 230 bp, Oryza sativa nipponbare
acgggcttggctgctttggagagttgggaggagcagcgagagagtgggggttgatggcggctatggcggcggccgtggcctcgtcacgctgggggtcccccgactacacaccgttgctccgcggccaccacccgcccccttcgtgctcggcgccgtcgctgctcctgctgaccaggtcgtcgcgttgctactgtgccgccgaaccacggttagagcccctgtctgtttgg

SEQ ID NO: 423669 - DNA, 379 bp, Oryza sativa nipponbare
gtttggaggtgcggctgatttgagcaataaattctctaggggggagggaggtatcgttcatggctgccagtgctgcaaggaggggctcataacttatctctcgctagcactgctagacaatcccgccttcgacatctcgactgctgtcacctgtgcgctccacacagcagatgggacacaaggattgatgccatgaatccttcagaggatcagcactgctgctgtaacacaggagccaatatcacacccagtccaatggaacatacactcagctactaatatacagaaaatgcggctaatcatcactcaaacaaactattcctactctggaccctcataccagggacctaatcgaacatatgaatgctcgcgatccgga

SEQ ID NO: 423670 - DNA, 314 bp, Oryza sativa nipponbare
ctaagcccgatccgccctagcacgatcccctcccccctccccgtctccgatccccctcctccacctcagatctccggcgagccgagcgaatcggccgccgccccgaggaaatggctgccctgcaaccctcattctcttcagcaatggctatgaaaagtctgaagttacccaaaactgcagttttacctggatatggtggtattgcacgtcctcaagatgtgcaggacaggagcgctaacttcacttggtcaaggcctagagcagcttcagtgactgaccagtcaacagcagaagcagccaaacccaggctaaac

SEQ ID NO: 423671 - DNA, 367 bp, Oryza sativa nipponbare
gcgcccacgcgtccgcccacgcgtccggcacagcactgcagtgaaatcgatcactagtcgtggtggtatcaactatcaagtgtgcaggagaaaatggcgggagcagtggcaactgtcagtgtggggctcgcgtggttgggtctcatggccgcagcggcgagcgcgacgcagttcagagtcggaggaggcagaggctggagcgcccccgacgccaacgccgagccgtacaactcgtgggccggcaggatgaggttccagatcggcgaccagctgctgttcgtgtacccgaaggagatggacgcggtggtggtgggggatcagggggcgtacgactcgtgcaacacgttgccgccggctgtgccttctt

SEQ ID NO: 423672 - DNA, 360 bp, Oryza sativa nipponbare
gcgctcaggtgtcacatctcactgcataaatggctgtgtctatcattgtgttgttctctccgttgatggcgtgcgcggggccgtggggctgcgaggggctgttcggctaggcggggatgagcatgtgcaaaacaggagttatgctcaatccgtctgagtccctcccaatccgagaagcaggatcggagggctgctgtccagcaatgatgtcgatggcctacaccaccgacagccctttttgcccttcacccatgcccagaggacgcagatgcacagttcgagttcaagctggagctgtcggagcggatgcatctgataagtcggtcgagattatgcgcaaattctctgagcagtacgccc

SEQ ID NO: 423673 - DNA, 557 bp, Oryza sativa nipponbare
  unsure (1)..(557): unsure at all n locations
gaagggaagggcctcttcgtcggcggcgaccgcgagcttccgcttccgacatagcatcgccgctcgccggatcggagagcgaggggagcacgccgtgcgcgaggagggcagcgggggcgcgcgggggatacggttggaggcgcttcagctacggccggccgaggacctgcggcgagttggttcctcttcagctatgcatcaagtaattagaatgcaagaagaacatggaaatgaaggaatcttgaatatcatcatttcgcctctgcaaagtttcagagatattaatgattaaattggtgttagctgaaagtaagaggaacgagcacctaagaactataggaatgggaggcatcaggaaaatcatcagaccaaatctccaataccagagctacaagaaacagaagcttgaacattttcttcagagtactagagtatatatagacctatgcagtgcanggctgtgaaggataaatgaattgaatctggtagatggtgcacaataggacactgaagtgaatgatcacatatattggccaaaaaacatgttacaagtcact

SEQ ID NO: 423674 - DNA, 552 bp, Oryza sativa nipponbare
ccggaatctgcatggtccgacccagcaccgcacgcgtgcggccacgcgtccgagacaggtcatgggcatctatttccataggcatggaagtaaaaatgttacttgtgaagacttttgtgcgcacgtgtgtggtgcaggttgaactttagtcaggaaaggtcttggattccatcgcagctcatgagcatgttgaagtggctgttattccacctgcaggtcaatcaccaaggtccctgcagtttttggtggtattgttttgcataatctggtcactagatgcctaccaactgcttgagatagtgcctggcaagaaaatcactgttctttggctaaatctttacatggcatctctgttctgccattctcaccgacatccaggtttcttggagcttggcatcccctccttgggcaactcgttgcaagaacaagtctctgctggcgttctctgcagttcatctatattcttttgttgatgctctttacttacataatgcgctcctctatctgtagctcaaataaacttccctagtgtatgttgctgttggattgttc

SEQ ID NO: 423675 - DNA, 141 bp, Oryza sativa nipponbare
tttaataataaattactcgattgtatactcccttttattccttcacatttctcactacaacatacaaaccatttaggggtgtgggttttattaaaatagttgggactcttttatcattcctaataataattcttattataa

SEQ ID NO: 423676 - DNA, 292 bp, Oryza sativa nipponbare
  unsure (1)..(292): unsure at all n locations
acacactattaggggagaggtcacattgcaggttgggctgtaatcatgaaagctcttttatatcactaccatgtcataatcctctgagagcctctggattccacctgcaggtcaatcaccaaggtccctgcagtttttggtggcattgntttgcataatctggtcactagatgcctaccaacttcttgagaaaatgcctggcaagaaaatcactgttctttggctaaatctttacatggcatcttttatttccatttttaacgacatacaatttttttgatcttggattccc

SEQ ID NO: 423677 - DNA, 141 bp, Oryza sativa nipponbare
cgaagaggaagctagaatgctataccaagatcttgactccattccacaagaaactgctgctgctgatcattcagcagtgtgcaggacgatctttgataaggttgtagcgatagcaatttcatctgttgatggatatgacac

SEQ ID NO: 423678 - DNA, 247 bp, Oryza sativa nipponbare
aaaaaaaaaaaaaaaaaaataaaaataaaaaaaataaaataaataaataaaaaaatattatatataaaaaaataataatgggggagggggtattatatagggggggggggtaaattttatatattattataaattaaaattttattggggtgtgatttttattttttaaaatctaaattacgtttattgattagtcgatgtttttttttataggtaaaaaaaatttaattttttacgagttttttta

SEQ ID NO: 423679 - DNA, 498 bp, Oryza sativa nipponbare
  unsure (1)..(498): unsure at all n locations
cccacgcgtccgcaggcgatggctagcccgcagtgctgcgcgaacccaccgacgctgaacccggccggcggggaggggaaggtggtggagagcttctttgggatcaaggcgtacgtcnccttctcctctgatttcaagttctccgttattctcatttccgatgtcttctggttttaagctctgtaccttatgaagattgcctactaagttgtcttttttgtatactttgttgtggttccatattttttacatgttgatcctttaataccttgatttatcttattatatcgtttcaattgttgttttaataacattgtccttacaaatcttttttttgatgctacatccatttttttctcgttctttattatataagatttgttattcattgctattattatctcttttttttacttctaaattttatttttttaattttattttttgttttcttattcttaacctttttttttttttttatccctccttttttctctc

SEQ ID NO: 423680 - DNA, 514 bp, Oryza sativa nipponbare
cctgacccattcggcttctccggcagctgccccatcaagctggcctgcaacgagagcggctcgacggcggcgctgatcctcccagacaacgccgctgcggatacggcggcggagtcgtacaccgtcgtggcctcctcgttcaaccggaccgcctccaccttcgtcgtctccctcccgccggcatgcaaccgcaccgtcgccggggcgaggcggcggctctccggcgccaactacggcgtgtcgtcgcgcaccggcatgttcctccgcggcggctgccgcaacgcgacgggcgccaccgcctgcagcgtccccgccgaggtcatgtccaagatgctccgcacggcgcagtgcgccggcggggacgaggccgcgtcggcgtcgtccctgacgtgcatcgcctcgatcccgcccaacttcacggccgaggcgctcggcgtcggcatgttcgcccggtgggacacggtcgaggagccccggtgcgacaacctgctgacgtccgtcttttaccgggaga

SEQ ID NO: 423681 - DNA, 355 bp, Oryza sativa nipponbare
gaggaacgagtcgtcttctccaaggcgtccgaaaaatctctccgttctctcgcaagccacagtacttcctactcctcctattgatgcccccggccccgaattggatacgctggttatttcagaacaaaagtcagtttagattcgactggaggcctaactggtggtaatttgaagcattttggttcgctttggggggccagtagaggcaaaaggtctgattttctttatcgaattggtcgcccttttgattggagaatcgtcaagctcggcgtgagagtttctttggcctgtgctcgcctgagagtagaaggctgtggttcttgctcggcaaaatttgtgcttatccttaaatcgg

SEQ ID NO: 423682 - DNA, 437 bp, Oryza sativa nipponbare
caagaatctggacaaaaaactcacaagtcttctggtggagaaggaagaatagttttatggacaggtgacaaaggtaaggaacaattatctggctgggaatgacaaagaattaggagaaaaggttttgtctaagcatgaaaatcagaattgtgaagggagctctgatggaaaggtggtaccccctaaatgtaatttagaaacaaacacatatattgaagaaattgatcggaagagactacaaaataaagaaggagcaccaaattccatggagaatcagccagataacaaacaaatggtaccttatggtattgtgcccaatgatgtttatgacgaaacaagtgtagtttttggagccttgcagaggctcccgttgtctcgcttcgatataataagatggatgaagtcaccagttatgcacaccaccttagatggctttt

SEQ ID NO: 423683 - DNA, 347 bp, Oryza sativa nipponbare
cgctgtggatgatagggaggctcgacgatgggagggaagaaggccaagacggttgagaggaatgaccaccgcctgctctgcagtgacgtgctcacggaggtcttccacaggctgccggcgcgcaccctcgcgtcgtgcaggcttgtctgcaagtcatggatgtcggagctcaccgatccccatttcgtccacgagcacctcaagaggagccagcagaagctcctgctctttgcgaacgacaaggcgaacgataggtccctcgcgatggtgctcgccgacgacacgggggctacctaccagctggccaggcccatggcttcgaggagcctctttgtgcacaattcttg

SEQ ID NO: 423684 - DNA, 107 bp, Oryza sativa nipponbare
gcgggagggcgtaagcccacagatacaggactcgaaggcgacgatggcgtggagggggctagcgagggatgcagcatctagcgtatgggggatggtgcgtgcccttt

SEQ ID NO: 423685 - DNA, 389 bp, Oryza sativa nipponbare
ccgacccattcactctctctcctctctctctctcctctcgcccgcatcggccgccatgcgcgaggaggtgcggagctcgtcggcggcgccgcccgacccgccggcgcgctcggcctcgccgcccgccacccccgtcgccagttcggctggtgcatcatcaccacctgcacaaacaaatgcagctagcatagattggttaggtggtgagccaatatccaaagtggaatcatcatcccagattgctccacatgctcctcggccttctcttagtactaatgctgctggagctgccgtggatttctctcaaccatcttggagaccatgggaacgaggagacttgcttcggcgactggccacattcaagtcttcaacatgggcttctaagccaa

SEQ ID NO: 423686 - DNA, 169 bp, Oryza sativa nipponbare
cgacttgttatccgatttcgggctcctccgcctgcctcgccgctgctcctgtgcactcgcaacctgcacgcgtgggcggcacctccgccttggcgccaccgatcagcagcagcagcaaggcaaacaagacggtgatgaggctgtggacagcaacgtgctccagtactgc

SEQ ID NO: 423687 - DNA, 275 bp, Oryza sativa nipponbare
cccacgcgtctcgtaaaaaaaaaaaaaaaataaaaaaaaaaaaaaataataaaaataagatatataaaaaaaaaatataaaaaaggagggaggggttaaattttaaatggtgtgtatttataaaaatttaatttattttatttttggtttgttttttttggggggttctttttttaaaatttaaaatttttttttcccgtttttgtaattataaatttttttttttttatccctaaattaaataaaaaggttgggtttaaaaaaacttggatatt

SEQ ID NO: 423688 - DNA, 379 bp, Oryza sativa nipponbare
cccacgcgtccgtgcatctcactctctgcatatttcagcttctaatctatgaagatttttttgtttgtttgtttggtgtgttcttgttgttctctagaggagagagctatgttcttttgtgtacaaaacgatgtgtttgtttttcatgttttcgtatcaaaaggacaaatcttagcaaaacatcgtgccatgttgcaaaaattcgagaagattcgattttttttaaaccatgttcccctcaaatctgctcgaactctccttttatcttcagaaaacactctagctcgagttaatctgagcaaagattcaaaaattattagtcaaaatctcacaaattctgcgagaaaacctgtagatctaccacataatctgtcgaata

SEQ ID NO: 423689 - DNA, 182 bp, Oryza sativa nipponbare
  unsure (1)..(182): unsure at all n locations
cgcanaacggncaccaccacaccacagagagcccgaggagccctactccccttctttcctcttcttcctttcccgcaagcaaagcgcacgccgcctttgcctaaaatctcttggattccgccgccgccgccggggcttcccacggtccttccttggccatggagggtaacagtcccaacctc

SEQ ID NO: 423690 - DNA, 298 bp, Oryza sativa nipponbare
  unsure (1)..(298): unsure at all n locations
cccacgcgtccgggattactgaagatggaagagatagtcggttctgctatcgttcaagagacggtaaacaggatcatatctgggttgattgaccggtgtgagcgaaaatcaagtgcacgggatcacctggagaggctggagatggcacanatcaagttggagttcgcacttgagacatccaataaatggcagatcactagtggcccgttgttacgttggcagaagaagctgaagcgtgctactgaagagtgtgatgacacactacggaagtgcaggcaacatatncaggaagaagatg

SEQ ID NO: 423691 - DNA, 302 bp, Oryza sativa nipponbare
  unsure (1)..(302): unsure at all n locations
tatgtgccatacatactgatcacgctcgggcaaatgtcatatggggtcacttctggcgattctgatgttcgcgaattctgaaaggacatgggactactctgacgattgcccgggaagtcgaggtaggattgcacaaagacatatgactgaaaactgacagtgcaatacaggatcgcttattctaacttgngagcatataataaccaacaagcaaacaaattacttgtcgctatagaatgtaaatgaactaaacttatagcagtgtctgtccgtcggattatcatcagagcatttacatttga

SEQ ID NO: 423692 - DNA, 447 bp, Oryza sativa nipponbare
  unsure (1)..(447): unsure at all n locations
cttggtggtccgcgtcgcgctcgtctctcgcgtgcgctgcgtctcccctcctacccctgattcgcacggaattcctcgaatcgcccgtgagagccgcttgattcgatctccgattcaggccccggggtctagggttttcgccgccgttcgagcggagcagagcggngcgtgggagatggcggggaagggagccaaggcgacggcggccaagtcggcggagaaggaaaaggggaagaaggcccccgtatcccgctcatcccgcgccgggtcccaggagaagccagctccaaacaaggatgtttaccaactatttgctgagaaggttagggataacaagcagctggaatcaagatgggcaattatgcaagaaactcgtgttgagtatttccgtggaaaagatttactaccttcatgaggaatcatcccgaagttagggaaattttaggg

SEQ ID NO: 423693 - DNA, 565 bp, Oryza sativa nipponbare
gcgctcatcctcctccctctttactgcaccacgctctcaccctcatgacatcaacaacaaccccctataaaattcgagttccggggtggcatcttgcagttgtagagcaagaatagaagcagcagcagcaacagcaatcgcagtaagagcagtatatgtatattactatatatataagttatagcagacagcagcagtagaaactagaaaacttggaagagagtagacgatcgaagagatcagaattgcttacaggatcggccggtcgatggaggtgcagccggagctctccctggggccgacgttgctgggcttcggcgtcggtgccggcgccggcaagagctcgtcgtcgtcggagtcggacggcagcagcgacgacggcagcaggaagaggaggaagcacttcgcctgggaggaggccgtgtcccacgcgagcctggaccttcacctcaacgacccccttcccatggactgggagcagtgccttgacctacactctgggaggagtactacctgaacaggaagaccatgaggatgagctgggtgaggtccatggaggagcacg

SEQ ID NO: 423694 - DNA, 165 bp, Oryza sativa nipponbare
  unsure (1)..(165): unsure at all n locations
cacattncacatataggcgcacgcaaactgcccatcgcgaggaagcaggattgcttattgtctactgttgcgtgaccgctggggtcttggggctctagccattcagacgacaggtgccgcaaccaatgactagatgtaggactcgcccacattcttgctggacga

SEQ ID NO: 423695 - DNA, 442 bp, Oryza sativa nipponbare
gcgcggacgcgtggggagctctcgatctctcgccatggccgccgccaagaacggcgtgcgacgtggaggaggtgcggctgcggctcgacggcggcggcgggcgtggggcgagagggggcacgcggcggcccggcgcgctcgccgtgcacttccccatcgggagcaagctcctcgcgcggctgtcggtgcgggggctccacctcacggcgtccgccaacgcgatggtcgccacgctcgaggtgatccatttacactccgtctccctcaccgacgccgcgctgcggcgggggtctccgcctgcccgcgcctccgcgagctcgagctccggtactgccgacacctccgccgtatcgatttcaccgtcggggcctccaatctcaagagcctcaccgtcgtcgactgctcccgcgccacggagcttcgcgtgccatcggcgcccctc

SEQ ID NO: 423696 - DNA, 378 bp, Oryza sativa nipponbare
cccacgcgtccgggttggtttcgttttggtattcccatacactttgtttctcttccccgtctcgtggtcgagagaaaccgagaggagagagagggagaggagcgctgccgattttccggagggggagatctttttcttctccctgaaggttcgagatcgatctgcgacgaggaggagcggggaatcgtaactttatttccgaggaaatttcaacaaattgatgcctatgggccagggggcaaaaatctactatcgtctcctgagcaactcctggtcgatgggctcactgcgcgatagagtcgttgtgtactcctgcaggacttgatgcctgctcctacctaatagactcttgattgttggtttacttttgtgtgtcag

SEQ ID NO: 423697 - DNA, 411 bp, Oryza sativa nipponbare
  unsure (1)..(411): unsure at all n locations
gtgagatcgagctgaaaaaaaaagagaggccacgaagagagctcagctgctgcctctagcttacttggtgataaggaggaggaggaggaggagggcaccgacatggccgcagccacggcgtacaccgtggcgctcctcggcgccaccggcgcgcgcgtccccgccgctccacgctccgccgcgcttctgccgcgccgcggcggcgtgctccaaccgctgcgcctccaggacgcgccgcgactgtccctgctccgcgtcagggccgcctccgacgacacctncacctcggccaggcgcgacgagctcgtcgccgacctcaaggcaaaggtgagttcgtgcatatgtttgcatccatccatggtcccatggaacatctcgtcttaatttgacatatggttggatgcagtggga

SEQ ID NO: 423698 - DNA, 512 bp, Oryza sativa nipponbare
  unsure (1)..(512): unsure at all n locations
gtcataacaatataaacaatgatgcatttgactaggtttatacttaattaagacattaaggtcctaattcaggagcacagcgtactgcttcacatctgagttgcttggtgcataaatttgttgtaacaccactatcatgttcgtgtcactatgaagcttgcattcatggaacttgcagcatctttactctgttatggaggtgcagtgtaacacatgattgtatcaacatacttttacagggcttggtatttatttttcataacacccttactgattgtactctcttggtcataaatagttgatgtttaggacaagattccgtcaaacttctaaagttccgacgggagtgaataacattattctcgtattgatttcttgctcatgtggcttctattntgtcttgaacatacacatcacatatngcatttatggaatgcggttaacacatgacactgataataaccatttacacttatatagggcactcttactgactatagcgttatttctct

SEQ ID NO: 423699 - DNA, 508 bp, Oryza sativa nipponbare
  unsure (1)..(508): unsure at all n locations
gcaaggtgcaggcgacgtcatcggcaaccaaggcgcgggcggcggcggcggcggaagcgggaggcggaggagtgggagaggcggaagagggggaggaggaggaggcggcagagacgagaggaccccgtggatgtgctcggggaggaggtgatggggcgggtgatggagctcctggacgcacgcagcacctggcgctgggtcgccgccgacgaccgcctctgggcacccaaggcttatttgatgagagctggggctgtcattcatagccatgggatggaaacttgcattgcaaccatgcttaatactggtgcaaaagagtttagggtgaacctacttgtctcttttccccatgaatcttagctaatgctccagttctgctttatatttctcatgaagttagctgtaatgtttacagaaatgtggtagtactaagaaaatgcactatntctcatgtagtgtaccacattatggacaatttctgtctgatctaatgtttcaaattgaaaaa

SEQ ID NO: 423700 - DNA, 311 bp, Oryza sativa nipponbare
cggtgatcacctctcctcaaattattaatccttcctgcacatggcattccaatctcctccgccattgctgagctgctgatggtgacgcgcggcgcagacggtgccggggtacgacgtggccggcgtggtggtgaaggccgggaggaaggtgaaggggctgaaggaaggggacgaggtgtacggaacatcacagaagggctggaggcccagcagcggtgtggcggacaccgcggaggaactgtgcctaacccaacctggttccagcgcgctgcgtgataacgcacagctacggcgtttcgcgagcattatct

SEQ ID NO: 423701 - DNA, 501 bp, Oryza sativa nipponbare
  unsure (1)..(501): unsure at all n locations
gcggtttcaccaggatgaaactctntccttctctctcatccccatttcatgcaaataatcattttttattcagtcttacccctattaaatgtgcatgacacaccagtgaaacccccattgtgactggccttattgagcagtttcgggagaatcgacaactggtaaactgattattttttttactagaaaaggatgcaccataagcatatctctaatgacttctgtacaaactcaactacgtaatataaacttttgctaatatgcgccctttctactgtcattttttttggaagtttaaggatattttattaatttcagcatctttgctatttattttctgtaacaatcatgatttttttaagaaactttaagaataattctaaccaaacctgtactggtagatatggctggggaataaaaagctgacaagaaatccaaccaccataattaaaatgctatttgtatgaattgtaaattatccatggcaagcactgactcatg

SEQ ID NO: 423702 - DNA, 171 bp, Oryza sativa nipponbare
  unsure (1)..(171): unsure at all n locations
gcgggtcccacttccnccaccaaactccgctcggatcacccaccggcggcgaggctgcggagatggccggcggcgaggacgatagggnagtaggagcgcatcgagtgagcgcactgattcactacacgggcaccccgtctccgcgtatctcgatcgcccgtacatcctcta

SEQ ID NO: 423703 - DNA, 493 bp, Oryza sativa nipponbare
  unsure (1)..(493): unsure at all n locations
gcgcggacgcgtgggctcagagtacagagaaaggcagcgctggactttcatccataagccagcagaagcacgaggtgtcgaatgattcggagtgcagttaattcaacatctatgatgcttagctctcctcaagatacatttgctgggggtgagagactattgccatcatctagccatgatgtgctggaaaggcagatgccaggtggtttgcctatgtatggtggccagtggcaccaggagcaatctaagcagcaactgcagtccccaaaccagcagagaccagttgttcaaggcagtgtatatgctccattaaatcctgggcctggctgatgataaattaatctgggttggtcacttttacagagcaaccctnttttgaaatctaaagttattgtacaggacatcaagttgctcgtattcatcatttcttgaagtagaggtgtagtgactccgtacatggaagctgcggatgattagtgtgtaattcaacttg

SEQ ID NO: 423704 - DNA, 295 bp, Oryza sativa nipponbare
  unsure (1)..(295): unsure at all n locations
gcgacgctggcgaccctggcgaccgtggcgacgctggccacatcagtatcgcctctactgacggttnggtcagtgacttcaaggagccaggatataatgcaggctgacaacatccaagcggtgctggagcttcgtggatgctacacatcttttgggcattggtgtcggcggtattgactggcctagccaactacacgtctgtgcacagcatgtcttagagcatagacgaaaagtggcagcaggctctcactgttcacatttctgagtgctcgagttgtgtgactatgaaggagtg

SEQ ID NO: 423705 - DNA, 244 bp, Oryza sativa nipponbare
  unsure (1)..(244): unsure at all n locations
acctatcaccgatcgccgtcgtgtccgatgaggaagagcgcgggcttgcgcgccgcgcgcgccctccggggctggactccggctacctctcccttcgccggaggccgggtcgcgcgcaagggtctggacgacagctcacctcaaaggcaggcgtgtcctgagcggcntctgggtcccgtcngggccggagtcgctgccgccggcgccgtcgtcgtcgatcgcgccgctccaaatggaagtcgcc

SEQ ID NO: 423706 - DNA, 473 bp, Oryza sativa nipponbare
cggacgcgtgggtttttttttttttttttttttacccctaaattttaaatcttaatatgcacaacaaaaaagacaggagaagcctacagcaatttacatggatgaagctggctctatgcacagcgcacagcctagagtggagtttcagtgatcaactgttcaaaattacatgatgttctctctgtttctcatggaaaattggcatgacgtggattagcggcaaaacagggtgttcatcaggaaatcctcaagagagaccaaccttgtagttctcagatccagcagatgattttaatcctcagaagatcagattttctgtccaccagatcggattctggcatggtggcaataggagcctgatgtgtatcctcaattcaccatatctagcgatccggaccaaattcagatgtttgagatgtgatagcccccatcatggaaacctgatgtaataagaactaatgtttggccggaac

SEQ ID NO: 423707 - DNA, 133 bp, Oryza sativa nipponbare
cccacgcgtccgctcccccactcttctcccagcaaactgaaattggagtgagcggttgcctttagcttattataggagacctacaccacgcaaggagaggggggccccgcgccagttcagatgttcagctgga

SEQ ID NO: 423708 - DNA, 121 bp, Oryza sativa nipponbare
  unsure (1)..(121): unsure at all n locations
cccacgcgtncggctggctgtgctgcttccctagctcctcggttggatcaaagagaagagaagagaagagttaatgctgatggcctccgaggcgtggcttgccgccgctttccggcttttt

SEQ ID NO: 423709 - DNA, 84 bp, Oryza sativa nipponbare
gtacggtccgattccgggtcgcccacgcgtccgcgggtctgccgctgctgtaacacaccacgcgaactgtcgcgcatcgatcac

SEQ ID NO: 423710 - DNA, 175 bp, Oryza sativa nipponbare
gcgtgcacaggcagccagacataaattgtccagtgccaacaaattgctaaatcctttacttaaatttgccattctttaaaataagtagaggggagctctatttatttgctggaggggggcttttgcttcctgggattcctcatttacatcttattcttgccaattgtttttttta

SEQ ID NO: 423711 - DNA, 410 bp, Oryza sativa nipponbare
  unsure (1)..(410): unsure at all n locations
cggacgcgtgggcggacgcgtgggttcaataatcaatatactcttctcctcgatctcttctcttgtccatctccaataatgctgcatgtacgccgccatgtacccggagaccttcggcttctctgcttacccncagcagcagcagccgtcgtccgacgccgtcttctgcatctacaccaccgncttgccgctcatcgccgacccgcctgacatcctcgtgagctgcctnctnctcctncttccttgcacactagctaatccgcatgcatgtatccatggaatnggatttcctctaatcgctctatctcttacccatggttcatgcatctgctctctctctctctctctttctctcatcacatcacacgtatgaagatatgaaatgaatgaagaaaaacaagcgctttctc

SEQ ID NO: 423712 - DNA, 174 bp, Oryza sativa nipponbare
atcatgatttgcaccggtcagcttttggtgatgagaactcgacaatgtgctaagaaaacattgtaggttggtgtcggcaaagtgtgctgtattatgaattgaagatcttaacatgttgacataacatatgaactgatattagctttattagtgtcttgtacctggatatagtaa

SEQ ID NO: 423713 - DNA, 350 bp, Oryza sativa nipponbare
cccacgcgtccgctgccgctcacatcaaaatccttctctctctcgcggcgctcggctgaagcccagccatgtccgtccccggcgtcgcctcccgcgccgccgaccgcttctactgcccgccgccgcgccgccacctgctccaccaccaccacaaccaggcgtctaaggcggcggcggcggctgtagagaggcagccgaggagcgccgcggcggcggcgaaggaggaggaggaggagaccaatctcgagtgcttcatcgcgtccacggccgtccgcgttcccgcgcatcggctcccccgacgagctcgagctcgcggaaaagggagggccggggcgccgcgtactacgagc

SEQ ID NO: 423714 - DNA, 133 bp, Oryza sativa nipponbare
ggcgtcaccacggtgcttcagattcttacacatcaatttcatcataatctagcgttcttattacaaggcactcacacatccatgagtatgttaacataacaaaggcagggcatgcttttttttattatttcgg

SEQ ID NO: 423715 - DNA, 355 bp, Oryza sativa nipponbare
  unsure (1)..(355): unsure at all n locations
atcaccactattgacacgggagaaagaaaggaagcacacagatgagcaccgcanatcgtatcctaaagattcacattccaaagagcagtctagaagatccccttcaaggcaccatagcagtcaagatcatgccaggcatcactcaaggtctagagatactggtgctgaagctaatggttcgcgggcaagtacaagggaagattctgaccgtgacagcaacggcagaaatagtaagcatggtaggcatgcaaccagtagtcgagataatgagacaggaaggagcagcatctatgctgttcgtgatgaggcgtatgatgagcgggaaagatataagcatgaaagaagcatataagca

SEQ ID NO: 423716 - DNA, 252 bp, Oryza sativa nipponbare
gcggcttgcgtgctcgggcagcgcacccgcgcacgcaagcaagcaagcaacccagcaagaagaccttcgcttcgcccccccccccttaccggccgaggccaagccaagcgatgctttaccttcttcccctcttcgtcttctggcgggtccccgggttggcggccgggccgggcttggggggctttcttgaaccccgccgccggccgggaggttgggattggttaagccgcctcaaggtggtcccgaagccgg

SEQ ID NO: 423717 - DNA, 240 bp, Oryza sativa nipponbare
  unsure (1)..(240): unsure at all n locations
aagggttaactgcaagattgatatttattcatcattatcggttctgtgatgtctgaatcaccaatataagtttacactgtgcccttctagcactcgatcaaatgtatacaacagcatgacaagcaagttcttaattgcttacttgctntcaataagntctttttagcaatattgcttcgagaattccaaaagggaggctgatgagtgatgactggaaaagtttgaaatgattcttacaga

SEQ ID NO: 423718 - DNA, 496 bp, Oryza sativa nipponbare
  unsure (1)..(496): unsure at all n locations
cggacgcgtggggaaaatcacaggatgaaagattttaacgcacatcaattaatggttaatgatgaatcaataacaattgaccaaattgcatctgaagtagcagaaatttatcctgacgagccacaggaggatgacacgctacctgtgcagaagtctaaaatgaggtgggtacgtgggcgactagttgaagtggaagaataaacagttaccagaattatattggttgactaaactgttcaagatatcattatcttgcattccgcttctgctttgattactgttggtatggaccaaaatgggaaatgattgctgatcttggcacgtattcatggtgcattcaaccatgggaattagtcgggaatacgccatgacagagcctattatattctgaggtgagatgctngtaattagtagttgccaactttagatatttcctcttcttgatgtagtcaggtagccaaactgaaacctaaaatcacgggtggggatgcattat

SEQ ID NO: 423719 - DNA, 238 bp, Oryza sativa nipponbare
  unsure (1)..(238): unsure at all n locations
cctacgcccgatccgccgccgcctctcccgattcgccgccgccgttgacccgccacctatggcctcagggccgccgtcgtcgccctccagcaaggcgttctcccgcaaatcccacgcncacgcctncggcctcaacttctncaaggcggcggcggcgggcggtggcggcggcggtgtcgcggcggccttcgatgctcacaacgggacgcacgtncgcaccgtcaccttctcgctgtcg

SEQ ID NO: 423720 - DNA, 159 bp, Oryza sativa nipponbare
  unsure (1)..(159): unsure at all n locations
gcgcccacgcgtncgggcctgtgtaaggagagggtagtagcaccttgcttttctttggcttcaaaggaacccggagccatggcctttggtgcttttcttaaggtattttttctttccaaggagtcttaattgggtggcaacccgcaaggttgccgcccc

SEQ ID NO: 423721 - DNA, 196 bp, Oryza sativa nipponbare
  unsure (1)..(196): unsure at all n locations
nncgccacgccgtccgttgagaagtggtaggataggtggaggccttcggccccaggggaataccaattcctttaaccgtattttacttaattccgggggtcgaaaccggggccggccccctcttttggcttttaaggcccaggtccttgggcccgtcccggccggaaaccatggcaaggggggaggtttgcttggg

SEQ ID NO: 423722 - DNA, 218 bp, Oryza sativa nipponbare
  unsure (1)..(218): unsure at all n locations
ttgaaccttctnctcgccttcttctttcttctncttccttcgctccgcttctctctgaccaataatctgggcaaacccctctctcgggccttcgtccttccaactgtataaatgcccctccattccaatcccaccggctcaaggcgggccaccagcagcagcacacaaggcgcgccagctttaacgagagggaaagagggggatttttggccggggag

SEQ ID NO: 423723 - DNA, 388 bp, Oryza sativa nipponbare
  unsure (1)..(388): unsure at all n locations
cttgtattttttgatactacatgagtttttcaacccgtaaattgaattagcaaggcacagtcttctgcttctaaagtggatgactgcttgtactatcttgttactaaccctntgtgttcaagctgttgatgcccacaagaagacttcgtaaaggactgcatttttaccattccttgaatntgaaatttggtagtttcttaataagtttaggtacaatttggtcaagttttttccttccttttcagttggagaaataggttcaaccattaaagttttgcacgttaaagagttctcactcaatgacattcacaagtagtcctagaaaagcagaaaactcttagcctaatgaaacaatagtattaatgcagtaccttttgctttatttctt

SEQ ID NO: 423724 - DNA, 214 bp, Oryza sativa nipponbare
  unsure (1)..(214): unsure at all n locations
gcggcacctngctctnctttgccttcagagaaacccgaagccatggccgttggtactcttcttaaggtattttttctttccaaaaaatctggatggggggccaaccggcagggtggcggccccaaacccgtgacctgcttcattggtggcccggcctgtgccttccaacaataacctggcaagaaccggaaaaccaatggattaacaagaaagg

SEQ ID NO: 423725 - DNA, 68 bp, Oryza sativa nipponbare
gccacccaaacccgtcccctcgtcttcgtcaaggccctggagggcgacatggccaccgacaacagcag

SEQ ID NO: 423726 - DNA, 198 bp, Oryza sativa nipponbare
tttttgaccttgagatgcgagtgccgaaagagcttctatcggaatgtgaagctcttagaagcttcaaatagaaatcttcttgcaacataactgatgctcgaccgggacagaccggcaacgtttaaagctttgtttcgaggcatgcctagggacttggacacttggtcatgacaaaaggggggaagctccggcgttggg

SEQ ID NO: 423727 - DNA, 104 bp, Oryza sativa nipponbare
ggtgataattaagaccagctttattatattcaggtcacgaatttattttttatacacccccccttttcggtcggagggatcgcacaaagaaaaaagggcttatt

SEQ ID NO: 423728 - DNA, 444 bp, Oryza sativa nipponbare
  unsure (1)..(444): unsure at all n locations
cccacgcgtccgcgaacaagcaaagcggttggtatagcagcggcggcggcggcggcggcggcgggcgtcgccggcgagcagagcggaggagggaggaagcgcgcgagcgaacgatggaggcggcggcggcggttacgaggttgtccttcgtccccctcgcggcggctgcgaggccactcctcgccggcttcatgcgcccccgagtcttcgcgtccatctcctcctcctcctcctcctctcccttctccggtggaggcggaggccacttcttcggaggcggaggcggacgccgtaaggggcgcgcggaggcggaggcggagaagaatacggtgcaggtgctgctgcagcggcctccgccgccgccgccgtggttctcggcgagaccgaaacggcggacgccgacgtcatcctgctccccgttnggggggatgtcggcggtggatg

SEQ ID NO: 423729 - DNA, 374 bp, Oryza sativa nipponbare
cccacgcgtccgcccacgcgtccggagtttgccagtacagacattaacctttactagtagtagttgataaggaaaaaaaggaaagaaattctagaattcacaaaaaaaacaataaaaattggcacttaatcccaatgtgttatgtgccctagttagagaggtcaaaataggtcagagaaaatatttatgtattatacaagaccttctcacataaaaacaaaacatcatgccttaatctcggtcctcctaatacaaaggtctggatctgttggttaggttaaagatatactcctattattttattattttcatgctaaattcaatgaaagactttagagttgataagaaaagcaataaattcataaaaagcaaaa

SEQ ID NO: 423730 - DNA, 204 bp, Oryza sativa nipponbare
  unsure (1)..(204): unsure at all n locations
cccacgcgtccggngtttttcccttgctcgtctgcgccgccacctcctccaccttctcttcccctcccaaccatgacggcggccgagatcgggaagcaggaggaggagctccgcgcccagatcgaggagcagaagctcaacgaggtgagagatcttggtcggctgctcggaagtctattctatgcctggcgggcgtgggcggga

SEQ ID NO: 423731 - DNA, 405 bp, Oryza sativa nipponbare
aagtcttaaaataacagagttacatataagataagtcttaaaatatcacaatgttaatttttatggctttatacaaaaaaaatgaacatatttaaatattgtagcagtttatttgttagctagccttgcccaggcagtttattcagttgaactggtccccaacaaaataaattggctgtctttttaataaaaacccaatagattagtgggcttctgctataccttgtttgcaccaatgtagtataggctcgtctgttagccctttgtactggatgagtgcatgtttattttagtaggggatagaacttcatttaccaactgaatggccattttcttggtaaaatattatattattcggacacaacttgaacaagatttgcatgttcatgtgttctatacccgggg

SEQ ID NO: 423732 - DNA, 223 bp, Oryza sativa nipponbare
cccacgcgtccggtggagacgagcgacctgagagagagagagagagaaggcaagggaaggaggagaagaagggggacgaagcggacgaggcgcgcgcgcgccatctttgctttgcttcctctctcttccctctcctctcctctcctccggtcgtcggcctccccggccggccggcgcctgcccgtgcttgaggcgcggcggcggatacccggggtgacgacat

SEQ ID NO: 423733 - DNA, 276 bp, Oryza sativa nipponbare
  unsure (1)..(276): unsure at all n locations
ccaatcctgaatccgccccccccccccccccccgaagcagcagcggcggcggctggcgggaggaggaaggcaaggatccggcggggagaggccgcctctctttcccttccttcgcgtccgncgtcctgcttgctgcggcctgcagctgagcttggcggacaataatacatatgcttgtccttgcaaacctatagtacagcgatcctttctgtggaacattgcatcagtctagaaatagattggaaaggggtttagcttgcgtatactatctgagac

SEQ ID NO: 423734 - DNA, 316 bp, Oryza sativa nipponbare
ctcccctccccatgtcctcgccttcctccccgcgctcttgctcccgcagcttcacgcttcccccgcactagtacagactcctgatggtggtggaggtaaacctcggcggctaacccatcgtccaccgcgcgcggcggctctgtttttggtttgggcggcattttggtctccttgggggtgtggatttgggttgggggggaggagagctgggtgaagatttgtggcggaaactgttgggggggaattgatggtgggattcatggagtgcgtgccctgatggttgatgggggacgcccttctggaatgccgagggatt

SEQ ID NO: 423735 - DNA, 388 bp, Oryza sativa nipponbare
gcggctgagatctctgccagccgtccactccatgttccaccacctccgccgccgcctcctctgcaccgcggcggcgccgccgatccgcgtggcgctgacggagtcctccggccgaggggtcttcgccacccgccccatctccgccggcgaggtcctccactccgcgcagcccctcgtctcccacccttcccctcccctcatccacgaggtgtgctacagctgcctcaggaggaagtccgggagcggcggcggctcgagcgggagctgctacttctgcagcgacgcgtgcagggagcacgccaagggattccatggcgttgaaaagaaagcggattggtctttggttgatgaccactgcagttcacgcggtctaaagtacccgtacatg

SEQ ID NO: 423736 - DNA, 358 bp, Oryza sativa nipponbare
cccacgcgtccgctcatgcggacaatgctactacacacagggcacggattgagatctgtttggaaaagcaccctagattggtttcagatgattacactgcaagctcttcatcatcaaagagcaatattcatcatgatagagccaacaattcagtagattttgccctaacttttgtacttgatcaggcccttgtaccccacatgagcatatctggtggagctgcttggttgccatattgtgtttctgtgagagtaaggtacacctttggagaagatagtcacattgcattccttgcaatggatgggagccatagcggcagggcttgttggttacaacatgaggattgggagaggtgtaa

SEQ ID NO: 423737 - DNA, 102 bp, Oryza sativa nipponbare
agaaaacctcccgtctctcgtctcctccgccgccaagacgagtcgcggctgaacaggggaggggcgccgcaatctccatctggcgagcagagcaggggaggg

SEQ ID NO: 423738 - DNA, 415 bp, Oryza sativa nipponbare
gtcttttgatgtcgatgatgctcacaaatcaagctgcaaatttgcaggtgatggggtgcttcaattccaaaccaaacaatgccggtgcgatcagaagaagacatgggagggtagaagtggatgtttgcgcctggattatgagttcctgaggctcagaggagctgcgtcgaggacttggataattttcatggctactcgctactcatgagcactactcctgactaggcccaggaggcgcacgatcactcttcatggttcattcatggcacatctgctaaattgattatcaagaagaataatggcagaggtgatgaactaactgtctgaaatcagtgttttttttttcgccgggaaggctgaaggagaccattctggttattaagaaggagttaaagtacaagaaaaacaccacaac

SEQ ID NO: 423739 - DNA, 425 bp, Oryza sativa nipponbare
actaattgtgtaatgatacaaaataagaggaaaatggaagacctgcacactgcaagaaaccaatctcatcatacacgaagaccatctgatcacagacaacttgatgctggtgaaggggctactcaatgtgatctaccaatagcaagagtgcccaagggtgtgtccgaagggaaacttacacggttaaagcttcagaaggcaagggttccgaatcaatccgtggagcatgaatcttccacaggagaagtagcaaatatggagcataagcccaaggaaaagaaacagaaaactaaacctgtcaaacagatctctacacctcttcgagcgtcacctcgtttagctgcgctgaagattaaccaagaaggcaataatgagcccaaagatgaagctctcagcacaaacacagacactgctaatcagtcaca

SEQ ID NO: 423740 - DNA, 355 bp, Oryza sativa nipponbare
tctagctctagctctagctcgtcgccgccatgaacgttccaagcaaatgcatggctcctgcaaagtaaaaaaagaagaagaagcagcagctgcagcttctcttcagtatcgatctttaactgtatcgagctagcttagcttagcttagctctctgccattaacttggcttactgacttgactactgttttgctggtactgtacttagtctgcgcgcgcgcgcgcgcgccgcgggggggatgaaatatcataagcgtgcccccgtgggagataatgttgccggtagtcacccgcagctgggcacctccaggtgctctcgccgaccataacttagtactgctcgcacgcggcagctt

SEQ ID NO: 423741 - DNA, 111 bp, Oryza sativa nipponbare
gcggcggcggccgggcgggcggagggcggcggtgggtgtgtggccgagggtcggctcgcggtcaggccgacggactaggtgcggcggcggactaccggacgagggcgcaga

SEQ ID NO: 423742 - DNA, 465 bp, Oryza sativa nipponbare
gttgagcagttccaaaaggaattaggtgcattagtggaggaaaaagaggtagctgctaagacatttgatgatgacaaagaaaaaatgaagatggaatcagagtatcttaaaaggaggttggaggaaatccatgacaacaaagatttcatgaagactgaaaataataagcttcagtccgaggctttgattgtagagaagaaacaaatcatgtttgaagcagagattaagagactgaagatggaattgggggcagtgacagaggcaaaggaggtggctgcaaaggcattcaatgctcaaaatgaagaaatcaccaagaaactagaggatcttaagagaaagttggaagaaatccaaacaaataaagacttagtggaaggtgaaactaatgagcttcagccagaggtttttgcaacagaggagaaaaatagcctgtctgaagcaagagataagtgccttaagcaaata

SEQ ID NO: 423743 - DNA, 252 bp, Oryza sativa nipponbare
cccacgcgtccgcccacactgctggcactctactcgagcgactttagagcgaatggttctttaccagatgatgatgaaatgtcaatatgactgatatctatgatgactaaactctcatgatgcatattatgatcaagctcttgatctcaatggagatatcgggaaataaagacggtgcctgggatatcgtatatcatgactggctcgatgaggcatccatgctgatgactgattgactggatcatgctcgat

SEQ ID NO: 423744 - DNA, 327 bp, Oryza sativa nipponbare
cccacgcgtccgcccacgcgtccgcgcgagggccgcccttttttttttttttttttttttttttttttttttttttttttttttggttttgtttttttatttttgggggtatttttttttttttttttatttttgggacgaaaaattaaaaaattggttaaaaaaaaaatatttggagacaacaaacacgaaggtataattcagaggaaaaaaattggtccagacgggtcatttgcaccaaatgtaaaggagtgggaagaactaattcaaccggtaccacctttgaaaaaaccagtaaaaaaaggggaaggggtgacaggataaaaa

SEQ ID NO: 423745 - DNA, 396 bp, Oryza sativa nipponbare
  unsure (1)..(396): unsure at all n locations
cccaaaccttgggccacccaagcagtggcctgnggcctggaagtgaagacccatataagctcatctgatttcaccatgtaaaaggatctgagctaaagttggagcggcccagggcctgtctaaagtatgggtccgctcccaaccatataaattcttgttgaagaattcgaaatattcagcaagaaagaaaaatggaagtacaagacgatgaacataaaaattgcgtagttctaagcacgcatccaaaaactgtttctgaaagtggaaaccatgtgtttttttaaaaaaaaataatttaaattgatagtgttgacactaggaaactggtggaaagcctgccgccggctagtaacctaatggactttggacgatcacttatgaattgttttcttcttg

SEQ ID NO: 423746 - DNA, 430 bp, Oryza sativa nipponbare
cccacgcgtccgcagctccaccccgtcctcctctcctcattgcggcggcgacggcctcctcctccatcccctcttccggtgttgggcgcaggagtaggcggcagttggagcgggcgctgcggcgatggacgcgacggcgacgagcacggtcgcgggtggcggcttcacaggtacaaccatttcagccagaagagcacacatggatgggatctgtctagtaaacaaaaaaaggagactgacgctcaggccatgtgttgaagtagatcacagcagcaagcgggtaagatcgcgatgtgctaagtttgagtctctcccagaggacatagtgtcaaggattatttcacaactaacattgaaggaagctgttgtaatgagctcgacatcgaccaagttgagaagagcctgggattaccatcctaatctttacttg

SEQ ID NO: 423747 - DNA, 359 bp, Oryza sativa nipponbare
  unsure (1)..(359): unsure at all n locations
cccacgcgtccgggaaacaaaccgtcaaaagactcatggaggacgagctgggtaaggtaaaacaggtgaaaaagattcccaaggaagaggttcaaagaatattagctgacctgggacatgatgtctgtctgaaaaaagttcaatgcagagcaccaaacaaaacagagccaaaagtcacagcacaagcacagccatggcttctccgtctggtttgctggatccaagtggttccaaatccatgaaacaggcagaagaagatgatcttgaactttctttagcagattttgtgggagaactctatgggtaccatgatgatngcaaaaaatagagtgaactgtgttcagaaattgagtcacata

SEQ ID NO: 423748 - DNA, 389 bp, Oryza sativa nipponbare
tgaaccatgaaatcctattgattgaattgcacagttgcttgatttgctttgtatatgtactggttatgcattttgttctcatataagtaatgttgagtgccaaccccagtttgtagaaatacaaatataaaatgtatcccagtgatatttccactttgaatcgtttataatttggaccacatgattgttctatacaactttttagttgttatttgttgcatgcttacaatatctaatactggaaagaaaaaaatattaaaattgctaaggacaaaagaaattacatacaagttacattcttttcttgtttcttaaattgtagtaccatatcacttatcttaagtaaaaccatgttcttgtgccacttattaacattttttttcaaaaag

SEQ ID NO: 423749 - DNA, 326 bp, Oryza sativa nipponbare
cccacgcgtccgcacgatccccaacccttcctcctccgattcgccgccggtagctgccagcgtctgctccccggctcgccgcgcgccggccggcgagtgcaccgcgcgcgggcgcttggtcgacgctatctccggagtactccgcgtggatttgggtgaatagtggctcgtttcgacagggtgacttgtgctgtgctcgatcgcggtcgtcgcttgctgttgatcgaccggtccagatccgcgtcgtttacacggtgcgtggctgttcctcaatctacggatcggacctcggactcatggagaaccgcgtcggtgagtcgtcggcg

SEQ ID NO: 423750 - DNA, 421 bp, Oryza sativa nipponbare
gactcgacccacgcgttcgagggcgcgtgggcactcactggcacactacacacagcacatacatgctatggcggcggccatggcgctgcacgtggtggccggcggcggctgctgttgccagcggcccgttcttggagctggtcggcggcggttggcggcggcgcgtgcggtggcgtcagacgcggcggcggcgaaggtgagcgaggaggaggggaaggtgaggctgggtgggtcggaagtggcggtgagcaagctcggcatcggcgcctggtcgtggggggacaccacctactggaacgactacgagtgggacgacaggagactgcaggaggctaaagcagcatctgacacaagcatagataatgggatgaccttatttgatacagcagaagtttatggtacagcgctgatgggagcactt

SEQ ID NO: 423751 - DNA, 224 bp, Oryza sativa nipponbare
ctttggttagctatgggctccctacccgccgccgacaagccgttgccggcgctccggtaccctccggcttcgccgcgacgacgacattgtcaacaactaccatggagttaccgtgccggacccttacagatggatggaggagctggagtcggaggaggtgaaggggttctggaacgcccaggcggcctgggccgatgcggtgctctccacctgcgacgaccacc

SEQ ID NO: 423752 - DNA, 356 bp, Oryza sativa nipponbare
  unsure (1)..(356): unsure at all n locations
gtttcttgctccatccatctatccatccaaggagtgtggaacgccacacgtattttttttttatctatgctaatctgatcattagcggaggagagttttagcagtaggattggattaaattggagtagtttcatagtttgtgtgtagtgatcttaattagctttgattagacagacagtacagtagagtagaggatgttggctgntgttcagcgctcggtggtgaggtgccatcggagctgtggccaccggaagacgactccgtgaacaacangcggccacatattgggactggtttcaagccaacgactgccggcggtgtcttgatgatggcaccagggctaaatcacttacttg

SEQ ID NO: 423753 - DNA, 382 bp, Oryza sativa nipponbare
  unsure (1)..(382): unsure at all n locations
tggacgagcagttttcttctctttctcaacatcttcttattcatttagatgaacaaaggcttcttaatttcttgagagctttggggaagttgggcaagctgaattcacagtgcaaggaaatggtgttcccatgctgttggcttgaggttcttttgtcagcacacagtgatcacatatctcttgatgaacttgtgctattgaactgtgtcatttctaagggcagacaactttggcgcctcatgaatgatgaagaacaagaggaagaacaaggacagatgcaagagcttctgaagagcactaatcaattgactgatgctgatcattttgctctcatgaaaggattngtggatacagaacttccggacgcacttaagtggatagg

SEQ ID NO: 423754 - DNA, 147 bp, Oryza sativa nipponbare
cccacgcgtgcggccacgcgtgcgatctataccatgtatggcggaaccccagacccagcaggatctagacagggatgacggctcatggaggactgggagatcttcagctgtgggactggattaaactgaactacattgataggtcgt

SEQ ID NO: 423755 - DNA, 341 bp, Oryza sativa nipponbare
  unsure (1)..(341): unsure at all n locations
cccacgcgtccgcttctcccccagccagaggcagaggctcccgcgacctcgtcggcgacggcgaccgcgaccgcgcgacgacgaggaagcgagaggacgaggaagcgagcgcgccaccatcttcatagctcgctctcctcctcacctcaggtggtgaaccgaggagacctgcgtggggtgggggatggagaagaggaggcggntgtgagggagcgccgcggcgtgctcaaggtggtggtggccagcgggaccaacctctccgtccgggacttcaccttcagcgacccctacgtcgtctgccgcctcgcctgcatgaataagaagacaaaagtcttcaacag

SEQ ID NO: 423756 - DNA, 259 bp, Oryza sativa nipponbare
gcggacaccacatgcctccggcgcatccgcctccgtgcggggtcgcgcccgccgcggcggcgacctgccccctcttcctccgggcccgggggagcctgagccggagcctccacctccgcctccgccgcctctccctccccgccccgcgcgccccttccagcccacgacccgtctcttcgcggccgcgacgcggcgaccgtccggggctacctcccgaccacttggtgctatgcgcccactggccgcacccagctggtgg

SEQ ID NO: 423757 - DNA, 222 bp, Oryza sativa nipponbare
ccctactcctccctcctcttcctctccttctccctaccctatgattgctctcctcctccccgagctctccccctagccgcccaggcagccggagtccgggagccagcaagcccagccccgtggtccggcgcgggggggagatggcggcggccgattcttgtcgcggagcggggggcggcggggtgggccggcgacacacatcgggagcggggcgcggggggg

SEQ ID NO: 423758 - DNA, 404 bp, Oryza sativa nipponbare
  unsure (1)..(404): unsure at all n locations
ctcgatcccgtctcctagcatggcggcagccgccttttcatggcgactacctcttcttctccctaccacggagttagcggaacgggagtggcgcggctattcctctcctcggcaccacgctgtagcagtgcctcttcctctccctggcgccacggtggtgacctcttcctttcctctgtgcggcggccaccggatccggctaccacgagctcgggggtgaccagatccagccaccatgagcctcttcctctttcccgcgcggcggcgacagcctctttctttcccctaccagacgcggcagccacaagatccagccaacacgacagtgagcgtaggttactccaacgcggagagtggggcacttctaaattgagtgccaaaaattngggagtggatttttaatg

SEQ ID NO: 423759 - DNA, 454 bp, Oryza sativa nipponbare
tccgtcaccacgcgtggagagttccttatgcattttattgagcaacattcattattttaattacaaactcttaattgatgtaaacataggggacaagttattctatctacaagagagtataaaggcatagtcatgtactattttaagaaaaccaaagtgttaactatatttagttgtcggtaaattattcgagccattcctcttcaagttctcccatccattcattcacttcatgcattcatttcatactctattattagttacctctaatggtatgctgttttgcttttgagaatttttccattttttatgtgttttgttaggaacgagagagaaagagggagagaagtaacttaatcaaactctcaatgtgaaatctctctgttgtaaatccaagttcagtttttcttactatttgtcacacttgttcctacctgaaaagggggggacccat

SEQ ID NO: 423760 - DNA, 325 bp, Oryza sativa nipponbare
tctctctcctctctttctcgcccgtttccccaccaccaccaccaccaccacctcccctctcccattcgaccaaatcggcgaggggaatagcccggccgcgcgccgcgcctcctctcgtcgccggcgatggccgacggcgaggcctcctccggcgcgtacagggagttcaaggcgctgacggaggcggcggaccgcaagttcgcgcgcgcgcgcgacgtgccgctctacggcggcggggtggaccaccacagccggaaggcgttcaaggcgtacacgcggctgtggcgcctgcagcaggagcggcggcgggagctcgtcgcgggcg

SEQ ID NO: 423761 - DNA, 361 bp, Oryza sativa nipponbare
tgaaaaagcattacgaaaatagagatgcagttcaacctgcaatgccatctgatacatctcactctgagacaagtagtggagatggagcttcacccaagctaagtagtggagatggagcttcgccaacatcagacattgacaatgcttctgtccccacaaatccagctgagaatatgataaatgcatcatctgcaatagcaattgaagttgggaggagaggtgatgagaaaatattgaagtgggaaagatctcaaacatttgataaatggatctggacttctttctattcttgcctaactgctgttaagtgtggcaagaaatcattcaaggaatcactagttcgcttgtgaaagtgtcatga

SEQ ID NO: 423762 - DNA, 319 bp, Oryza sativa nipponbare
gcgagacaaagacatactcatagagtattatacgcaatcgtatatccactgcactcatattgctcttatttatcatacgctcactggggggatccgtgcatcacagagcagagaaaggtaaccttatttctgactaccacaaaaacacttccaaagaatatgaaaccgctgactatgctacattgaaatgatacctaactggaaacagatctcatgaccatgactactgcgggaactagattcataactcacgtaaggtcatcatgcttacaaggctgccacaccagatgctcagaccatagttactctagaagcacac

SEQ ID NO: 423763 - DNA, 527 bp, Oryza sativa nipponbare
cccacgcgtccgcccacgcgtccgaaattaacacacctacaaacactcatacaaaaaaaaaaacactttaaacacataatggaccatgtctcgcaacgggagcagtgttatgatcagtcctgtggtgcaaggcaagttccagcagggcatcatgaacggcatgcagaaccgtgacattggcaacagtacaagtgtccctgtgtctggctccagcttcaatggcacttccttcctcagtggtaactccgtaaatgcaccaccagctccagaggttccaagttactctattacaggcatcggaggagatgcgaccttttaagtgctggcatacaacgccaggagggctacaccaaaataaaaccgcttaacagcgtgttgtaataatcctatatccatgagattgaataaatcatgggcctagctggtagtaagcttaaatggcctgctaatcttccaaataataaaaattatttatatattaataactttatttatatttaattattattaatgatgtgtttaatatt

SEQ ID NO: 423764 - DNA, 263 bp, Oryza sativa nipponbare
  unsure (1)..(263): unsure at all n locations
caacacgcgtgcccagcagccgcagatctctctccaaattccccaatccaaatccgccctcgcctcgccccgatcgatcgcgtcgatgcgattcgatcccgcccgatgcgagtggaggcggcggcggcggcggcggaggccgtggcggcgtgcgcgcgagcttagggtttctagggtttgcgctagggtttgggggcgcgcccgcgatgggccggtctcgcgggtgcccaattccggnacgatgaaacaaccacaggtcgagc

SEQ ID NO: 423765 - DNA, 125 bp, Oryza sativa nipponbare
ctggatactgatgaattagacataaataaagaggctgagggggcaatctaacatgcgaattgtggaggaacacatgatcagaatgggtgccttgtatgccagggacgaatgaagccactctctag

SEQ ID NO: 423766 - DNA, 401 bp, Oryza sativa nipponbare
gcgcttctctctctcaagattagacaaattgtctgaggatttaactgagtacttgtattcccccacatcttcgtacttggatgactcagtgtgagcagagaagcatgttaagaacatcattctggaagggcattcgcgagtgtctagtggaggatgtatctgaagagtctagtggtttctcatgtattaagaagtgcattcaaagcttgtcacctctactgagtctccataaagatggtcagcctgaattcatagaggagtggtctgctgctatcaaatgccttacagttgcacagaaaggtttgctgggtgatatgctgcacgtcgaaatttcgtcatccttcaatgagctaaaacatattgatgtggccaaaaagattattcataaggcaagaatgtgt

SEQ ID NO: 423767 - DNA, 202 bp, Oryza sativa nipponbare
  unsure (1)..(202): unsure at all n locations
gacctggccacccgggcatccctgtaaataggagcatacatctctctctcttcctanatagagaaagccatagctagctggagagagatagcttaagagagtagagagcttctacagagagtgagagggagggcaagatagaggggagggtgcgcacgaagctgatgaggctcctgtcgttcgtgccctgcggctgccgtgc

SEQ ID NO: 423768 - DNA, 167 bp, Oryza sativa nipponbare
  unsure (1)..(167): unsure at all n locations
ccgctagctcaacacggcggcagcgttgtacgcgtgcgcccctccccagctggcggcagcggcactgcagcaggggcgtcccgtcgtctactgtgcgggtctcgagcgtcctntcccctcctttcccctctcttccggcggtgcagaggcgcggtgggacagcgccc

SEQ ID NO: 423769 - DNA, 192 bp, Oryza sativa nipponbare
gcgccaaccccccatctcctccatctccactccacctcacacgcctcatcgacctcccaagaaccaccaccgccttctcccatggccgccggcaccgtcttcgtccgcttgcacccggccgcatccgccgcgcgctgcggcggcggctcgcgccggagcaggcgcctgtccggggtcatcaggcgcagtcgc

SEQ ID NO: 423770 - DNA, 107 bp, Oryza sativa nipponbare
gcgccttcctcccagccaagatctttcttcctcctcctcgtcttcaggactcaattcgtcttctgatagcttagcttgattggggtgggggacaatgttaggaggca

SEQ ID NO: 423771 - DNA, 57 bp, Oryza sativa nipponbare
  unsure (1)..(57): unsure at all n locations
naaaaaaaaaaaaaataaaaataaaaaaaaaaaaaaaaaaaaaaaaaatgataaaaa

SEQ ID NO: 423772 - DNA, 273 bp, Oryza sativa nipponbare
ctactaactatgacgctatactgcactcaatacagaacactccataacttgatctcttctaactatagctccagaaattacctctgctcgactttagatgattggttacaaaactaggtgaaacgatcaaatgaagtcgtcatcaactacataagtctcatccattctgctcgcaggctcaaatatgacgttgagaaagttaccaccaaaaaggaaactatcttaaagtcgaatgtccgacatgcaaaaacaatattattggccaatgcttca

SEQ ID NO: 423773 - DNA, 442 bp, Oryza sativa nipponbare
cggacgcgtgcgctccagaagcgaaacggagagcatgactcgggactgaccgtacatgtgatagtaattgcccatccgtagcacaccgtttcggtgtatccactaacattgggcacgaactgactattgaaagtgtggtcacatggcatgctgacaacaacctggtcatgtaaagggcacatactggctccggaggggtgtgggcttcgcatatcgacagtataatcatggctgttttggaatcaccaagagagattgagctgaagcctcagtgagagggtgggggatacatcttagatgggggcagtgtgcgtgaatcactgcaaatgtctggagacggatgtgtgcactggacttgcagcctacatcgtaatgctgaggatctttgcaccagcatgactctgctatgtattacgagatggcacatgcatccgggaaaatg

SEQ ID NO: 423774 - DNA, 54 bp, Oryza sativa nipponbare
ctcaatcaaactagttccctgtacttctatatctccatggggtatatcaccttc

SEQ ID NO: 423775 - DNA, 484 bp, Oryza sativa nipponbare
cgctgaaagcatgtcataactcacatcatagaacaaaccgttctacagagggaggaagaatcagacaaagcctttactctgtaagaatccagagtttgtcatgccatccttgtactctttcgttcttgatgagaaaattgcttggctgaagtgaagaatcttgtgcctagatcaagaacggtgtcacagccatcaattctcgagttaaccagtgacttgtaatcatctttccttggccttgtacttctttgacgcatgtttgtgcaattgtcagtcatgccgcggcttgaccagcaagggttttatatgctcagcctgcatctttggctctttgcctgtttgccatgatgccatctgccgttggaatgtttaacgtcagctgtcaaggctcaaggctgcacgcacagcttcagctagagagtacaacagtgttttattatgataaaagggcttgttcggagagcttaagattccgagaaataac

SEQ ID NO: 423776 - DNA, 359 bp, Oryza sativa nipponbare
cccgcgtccgcgccgcgtacagcacgcttggacagtgaagctcatgacatcagtgctcctcacacaaaggaaaaagattggagagggtgaagcatatcaggcactggaacccgactggactgaaccaccttcagatgaacttgatcgttacaaaaatgacccaaacatcttaaagatgctaggaacacagaatttggccacctgtatgtcaagttctacatactgataaaaaaatagctggccagggaaagatggaatcatgtaactgctcatacccgggatccttatgctgcagacagcatcacacagatgcagccagagatcagctaaagtgtgaactcggtaaagcttgtacagaa

SEQ ID NO: 423777 - DNA, 305 bp, Oryza sativa nipponbare
  unsure (1)..(305): unsure at all n locations
cccacgcgtccgcccacgcgtccggctcgactctgccggtgagagcggtagcgcgtggcggccgtaggcgagcgcagcgtgcggcagcatcgcccttcgcggcgaggcggcgggggcgcaaccggtgaggggacctacgttgctgccgcaatccgccgtttgccttcgccgccgcccgcgctgaatccgagccggagcgcgcgtctgttgccgtcacattgaccccaccggcccggcgcggtgccagcactttgcgtccctccgccgttcgngcgcacaggtgagatgaagcatttatatgagct

SEQ ID NO: 423778 - DNA, 363 bp, Oryza sativa nipponbare
tcgacaggcaaagccatgggcggcttgtcaccttggtaaacctggacctcatatcaagtcacatgaagagctagctagctagctaaaatacgatctataccatctctaccacaatcccactagtcttgttacactgtgttatagacctcagcaacacgagactgtcgctgctagcactctaaagtcctaatttcttgaacagatgttccaatggggtaccacccgtgcatgccacggtttccagctaacgttcaccttatccgtcgttttactctccttctgcttacacgatgatctagttagatcgccaaaactatcactttgccacttggaggaatcctggcgattgaacaataatacgct

SEQ ID NO: 423779 - DNA, 119 bp, Oryza sativa nipponbare
gcgtctcgtcgtgagccaaagccatggccgccgtcgctccacctcaagtcctgtccgtattgccatgaacagatatagctgggtcactaacttaaacatacttctgcagctacctttca

SEQ ID NO: 423780 - DNA, 467 bp, Oryza sativa nipponbare
cccacgcgtccggaaaccccatcattccatccatccatctcactgaaagatcaagattcaagcagcagatggaggctagatgagtgcattccttgcaactcccaaccacaaccaagaaagcagtttggaaaggagtgagggcaaagcaaacccaaccaaacccaaccaaggtcaaggggtctcaagtctcaactccaaaagccaatggaatctaggaggaagagacatggaggagagatggccaccactacactctccattgtcccactcaaactcaagtgcacccctcttcttctttcttggtggtggtgagtgtactgcctttatctgctgtctgattgctgcatttcctactcccctttttatccccttccacaaaaccaaaaatccaaagaaaaagagaaatcttccatacccttcttaaatgcaagatccatgccgttgcttgaaaagatgtgtttatgtat

SEQ ID NO: 423781 - DNA, 334 bp, Oryza sativa nipponbare
  unsure (1)..(334): unsure at all n locations
cccacgcgtccggagaattcgaagcctggacctagctcggagaggcactatgggctgtttaatgctgatggaaggattgcatatgatattggttatgagggtctattaccttcatctgcaccctcgtacttcttgtctcttaggaaaattcaagctgggggttggattgtacactattcggctacagttattttatctgttttcattttcttagccttagtgactngattacagaatagcacatctgtattgaacatacaaccgaggttaagtgttagaacaatgtgattgggaattttacaatgaaagatgaaataatagctcccttcgcacc

SEQ ID NO: 423782 - DNA, 81 bp, Oryza sativa nipponbare
tcttgcccgccttacattgttgagcctgttttttgagtggaattacctctggtattgaagacttgtctgatttgaacctgg

SEQ ID NO: 423783 - DNA, 389 bp, Oryza sativa nipponbare
cccacgcgtccgtagttctagatcgcgagcggccccttttttttttttttttcctgtgctgctttattatgcagtaatgcacataatgtttttgttatggcacgttttagaacacacttcaaccattctcattatatactcatattgttcattttgtcatatgatgactgtttatcttccatggtggtgctctagcaaattgttataactctattattgtattttgagaaatctatggtccagtcttcatttggcatgaaaatcaaaatgttgctgttactctaaggatgtagttgtatgattgatagtagtagttctaattgtgtttcgtttgaagtatgattgattgctagtggtagttcaaattgtggattggtgcatgtgttggt

SEQ ID NO: 423784 - DNA, 257 bp, Oryza sativa nipponbare
cgtccgtattcccgttcgaccacgcgtccgtccactcgttcgcccacgcgtccgatttgttcccgccaattcttttcttgattcttataatcataaaaagtgtcatacattaattaggatatattttcagggcccctacccatgtgatatgattgaaggtacacttaataaaattatatattcaaacgagacataaattatgttgattgtctataatgtttatacatcagtattcatttaaagaactttattattgg

SEQ ID NO: 423785 - DNA, 276 bp, Oryza sativa nipponbare
tcgaccacgcgtccgcttcgcagcaggagcttccgatccgggggcgtgaatctatggggcaacgcgcacaagatcgacgccaactggtcttttgagatgggccagaaaattactggtgcttgttgtaaagcagttgtgagttagaatgacatgggcgatttttacagactacagtatgcgaacggagttgaattggtcagtggcagaagatacagtctccagtcatagggcgtgtgcatgtgcttgcatacatcgctttaccgcaagaaggtagac

SEQ ID NO: 423786 - DNA, 479 bp, Oryza sativa nipponbare
cccacgcgtccgtcaaaacattagatctatagttctcgctattatttcttcactttcttccctctattattgaggatttcatttttcatgtgatgtttgtttcggtttatttttgttggtttgttgagaaccgaggatgctgtttcatgatttcactgcttttttgtttgtttgtttgtgtttgcttagaaccgaggagagatagaagattggtgtaatgatggcttgctttgactcctcttttctctgtctctctggcaggcgctggaaagtttcatcattaccttttgattgggggaatcttccttgacattctctctccccctcttctatttcattatcttctctctttatttcttccattctgtttagtttcttcaatttcacaggtgttcttttccctgcttccttttctcttaatgaaagatatacatatgttactttaacaagttagcataaaatttgatgtatatctggat

SEQ ID NO: 423787 - DNA, 448 bp, Oryza sativa nipponbare
  unsure (1)..(448): unsure at all n locations
gtgtgatggttgaaagaaacttactcctttctccatctaacttattgatatgaagtacagtcctaacaaacacgtctacagtaacctagctaaattatatgtgatttcatatgaactattctagcaagaaggagagcatggagttggttgatatgaagtaatgctttagtgttgtgcgttgacaagtgagtttaatcaatctttggaaatgtgagaattgccagttagctntaagttttctttgaattccatgacaaatgcatgtttgtaaatatagcgcgggtatcgctacatagttgccaacataataacaaatcaactgacataagaacttggtgcacgaattagattatctcatccttttattttggttattgtcaggctttccctataaattaattgacaggaggaagaaatcacaagtggtttaccaatttcaatgacattt

SEQ ID NO: 423788 - DNA, 297 bp, Oryza sativa nipponbare
atccatcataccagccgccaccgtccccttcggagagataatatcaccgtgtgccgcggctgccgctcgcctccgcctgcgccgctggagcgtggctggggtgctgcgtcagcggcggcggcagggccgggtcggcggcgtggtgccacgcgacggcggtcggcagcatgtcaacgtcgttggagctggaggctatccattgatggaccagcaagctgcaaggtgcatactagctgcacataatcattattgtgatgcgcccatgtagcgcggaagcaagatgctgtccaggcacct

SEQ ID NO: 423789 - DNA, 204 bp, Oryza sativa nipponbare
atcaattctacatctccacatactatcatgtccactactcataatccatatttagagcggaatcaaccctctcggagagggtgtggatcctcatggccagcctgttccttcacagctattatctcaatctccttaccaacaactaccccttcattaccatccactacatgacctacatgcataaactacgataccatactctta

SEQ ID NO: 423790 - DNA, 481 bp, Oryza sativa nipponbare
  unsure (1)..(481): unsure at all n locations
cccacgcgtccgatttggaactgctgtcagaattaccaagtcaataacccatgcttgattattacaagaagtgataccagtgaaagatcaagtacacaaatgcagcaggtaaatcagtggtcataggatcatatcgagccaggaataagaacatttcaagaaaggcatgcattcatatttcttaatttttttttggttcctggctatcataacttttgacatagcttgctccattgaatggtaatctcgtgttagaaagtactccctccttccataagtggaaggagggtgtatagaagcactgtaactatagtttgtcattgctgatgagacaagtatattgcactagaaaagagtactgacctatacatgttccagaaaccattacttccgcgttgcctgctaatcancaccagagctgcgctaagatgtatataaagaacggagagaacaagcaaaagaatctcagtgttagtacatc

SEQ ID NO: 423791 - DNA, 138 bp, Oryza sativa nipponbare
ctcctctccggcggcggcggcgtcttgtgcgcgtgagaaagagaggagaagaagatggcgacgatcgtgaacacgacggaggaggagccgatgctggccgtggtgcgcttcaccgccgagctggcctgggcggacgcc

SEQ ID NO: 423792 - DNA, 195 bp, Oryza sativa nipponbare
cggacgcgtgcgctgacgcttgggtctttttgttcactatccacacgctgctgaatctatcagcacttcctgaaaagatcaactaccgactgccgtgtgctcataacacacactgtatctgcacactctacatcaccatacatacatctgaccattatagaaacttatccttttcacaaattcctataacaccta

SEQ ID NO: 423793 - DNA, 62 bp, Oryza sativa nipponbare
gcactctccctgtttcccgatcattatgaacggcgtgtgtgctggttcctttcagcttttcc

SEQ ID NO: 423794 - DNA, 373 bp, Oryza sativa nipponbare
ctcacaggcacagctcgatcgatcgatcgatcaccatggccgcctccgccactcgcagtagtaagctcctcgcgttgtggctgtgctgcgcgctgccgctcatcatgtcctccaccgccgccggcaccaccactgccacgacgccggcggtccagcagcagcctcagcctacggcggcggcaggcgccggcgaaggtgtcgtgccagctccgacgacctcgacggcggcgtcgaacgtggcagctgccgatacgacttccaagaagataccagtggaaggagcagggccgcacgaggagtacgtgccggcggcggaggtggcgtcggcgctgccggtgcccatccccgactggaaccccgtggagggcgcctt

SEQ ID NO: 423795 - DNA, 501 bp, Oryza sativa nipponbare
cccctctttaccttttccttctcggttccgtttccgtggttcgtctagggtttagttgtttgatatttctttttctgtgtctgtttttctttttttttctttctttttttctctttttctcttttttgttcttttttttttttttttcttttttttttttttttttttttttttttttttttttttttttttttttttttttattttttcttttttttcttttttttttcttttttctttttttttctatttttttttatttttatttttttatttatttatctttattcttttttctttttttttcttttttttttatttttttttttttctttttctgctttttattttttctttctttttatttttcttttttttctcttttctttttttttttttatattttttttttttttttatttttttttttctattttttattttttttttttttttttttttttttttctttttttttttattttttttttttttcttttt

SEQ ID NO: 423796 - DNA, 345 bp, Oryza sativa nipponbare
  unsure (1)..(345): unsure at all n locations
gtcgaccacgcgtccgcctcgatctctcttcctncctagaaactctctcggatctcgccgagagctagcggctggctggcggcggtggcgcggtggcagcaaagtgtacgctttgcagttgctgccggcgcggcgcggcagcggtgacgacgaagagggaggaggagagaggctgtgtcgggtttgtgttgtgtttgtgtgtgaagtgtgagaacttttgatggtattatgatataatatttatttgtttttaattaattttatatttatttttatattttttttcaaattacttataattttttacatttttatttaatttttcatttttttttacaataatat

SEQ ID NO: 423797 - DNA, 298 bp, Oryza sativa nipponbare
gccagccgtcgcgaggagtcgtgccgcgagctgccagcgtaggctgttggagagaagaagattgggagcactgggtaggctgttggagaagggaatttttgagtgtccgacctttttactgtgcatcactcaatccatgatgagtctctagaatgggtctccgctgttggagacagtcttagaagttctcttctatccttggaagacaatacatacatggtacaacctcgccaatggagtgtagaaaagaatgtatgcccgtagcgactgttaaaactgttccatgctagctacgaac

SEQ ID NO: 423798 - DNA, 396 bp, Oryza sativa nipponbare
ccacgcgtccggcttagctcagctcgacagccagtgaagtgaggagacgagaagagcggtcgccatgggcgaggcggtgctggtgtccaatcatgggtgcagcggaggcggaggaagagttggagtcggagtcaggggagcgggaggaggaggacccggcgaggggaaggcggaggggcagcaggggcaggtgctcgccctgctactcgccgcgctacgcaggtcggtggtgctcccgtgccagatggccgacgctgacgacccggcagcagtcgcgtgggggatggagatcggctggcccaccgacatacggcacgtcgctcacgtcaccttggtccgactcaacggctttctaggccctcccgccgagttcacagctctagattccgggccacg

SEQ ID NO: 423799 - DNA, 445 bp, Oryza sativa nipponbare
  unsure (1)..(445): unsure at all n locations
ataagaaaattcatataacttcttttttatttataaggaaccagattccattaatgaactagaaaatattatcctaatccatgatgataaatacatatatgttgcagttagtctgttgcgtaatatgtgcttgcacgcataaatttagctcactgaattagacctaaagtaactatcttatcntatttttatcttatttaaatatttatatatatttatttatttttataataaattattattttattttttatataaatatttataatattatttaaaaaattaatttaataacttattctattatatttatttaatatttatattatttttaatatattataaataatatattatatattttatattaaatatttttattaatattattatatttttattctatattttattataataattattaaaaaataatttataatat

SEQ ID NO: 423800 - DNA, 309 bp, Oryza sativa nipponbare
ggggagagagagagagagaggggatggaaatggcggatgagctggggcacttgctggtgttcgggttcctcttcaacctgggcgtttacatggtggcacctgcgatgaccgacgtgaccattgacgccctatgtcctggtcaggactagcgctccctcgacatctacctcacaggactccagcaatgcattacagggttggtacgctatggtgctatttctagcgcgggcgacctagtcaacaaatatttaccggaaggcgttgctgatgttccctacaactgcacccatgcccgcgatgggtattaca

SEQ ID NO: 423801 - DNA, 374 bp, Oryza sativa nipponbare
cacacgcgcacagcgcatcaccaacgccggaaggagacagcgcccctcgcccccgccaccccaaccctacgagagggagggagccggcgcgccagccattcaggcatggccacctccacttccactggccacctgtccgtcaaccttgttctcccctcctacccctagattatcgttgaggctatctcattactatctgttttattctgatctatcctctccttcttatttctatattttataaagtttgtaattttcaatttatttttccgttattctttttatcattttcattattttttaatattttttatctttcttcttatattttctttttacatttatatccattttatatttctttttatataatt

SEQ ID NO: 423802 - DNA, 468 bp, Oryza sativa nipponbare
aagaagtgagaatcagagtcttccaattgatgaaaaatggcatttgataggtatttctttgtggactcgattgtcatctttcatgaaacagtttttgactgagttcgttgaaaaagagagaattgaacttgaaactagtgcaagtgatgtggaattcaaggacctcatatcttcagttgttgcaaagtttttgatgggctccctccattttgtgtcatctttgttagtaaaattgcatgcttcatttttcagagagaaagtactgaagaagtcaaattcaagtgtgcttttctggttatctcagccaaggtccaacaacaatagccatgagcagttctcaagtatttttcagcttgctaacagtgagaacatcgaagtcttttttgatactttgtgggaaatatctgctcatcctgtggatatctgcactgcttttgtggatgaagaaatgattgctttctttaaaca

SEQ ID NO: 423803 - DNA, 334 bp, Oryza sativa nipponbare
cccacgcgtccgcccacgcgtccgcccacgcgtccgcccacgcgtccgcccacgcgtccgcccacgcgtccgcggacgcgtgggctttccccatctcctcctcccagaactagaatttcgccaccccgaatcccttccatggtaggacttccgtttgattccgggtcgaatccgtcgcctccgatgccggaacggtgaggttttccctccctttatatggacaacacgcgtttgttttttctgttgcgcaggtttcagatcttggatggacttgctcatccttcggcggccatggatctatcggcggaagctgctgctgctgctcgtcctcgcg

SEQ ID NO: 423804 - DNA, 432 bp, Oryza sativa nipponbare
cgcacacaactaataaccaacgaaaccacgagcagcggctgatcggtaagcggtagtggtagtagtagtttcgtttgtacgttgacccaagcagcagatgccaattgcagcagccgcggtcacctcgccaccggccgccgcgcaggtgcacggtgtcgtgccaaggcatgcctcgccgacgccacagcagcgggcggcgccgggcggagcagtcgcgtgaacccactcgatcgaccggcggctttcggactactgaagttctggacgagctcttgtccatgatcttatgtttttatattttttatgatgtaattttttttatatatttttatattatttttattttttttatatttaattttatttttttattttttatatttttttttaaattttatttttttatttttttcatttatattttaatttttt

SEQ ID NO: 423805 - DNA, 192 bp, Oryza sativa nipponbare
ctcctcgtcgacctctccgcctcctcccacctcgaagcccacggccaccaccagcacgcggaggagggaggtcgccgtctgcgtcgacagcgacccaccaaccctacgccccaatccccaccaccaagaagtcccccgtcttcgagctctccggcgagatgagccccaagaagcgcgcgcactcagacgaca

SEQ ID NO: 423806 - DNA, 227 bp, Oryza sativa nipponbare
gcgtccgcgtagcgtagatcggcggcggtggcggctgcggcgagagcgtatagagacaggagggggcaaccgcggctgcagctgcgggggagcgcgtagatgacgctgaacgctattcctctacaccacactgcttacgagatcacgagctacatcgacactccgaccactaccaagagctccagaacggcctcctataaggactcgatggcgcatgacacggtcaa

SEQ ID NO: 423807 - DNA, 162 bp, Oryza sativa nipponbare
attatgagtagttgagtagaagctgaacagattggcagaagcagaagcagaagcaaaagatgatgaattcatctgagccggtgaagctgatcggcgctttcggcagcccgttcgtccaccgtgtcgaggtcgccctgcgcctgaaaggagtgccctacgagc

SEQ ID NO: 423808 - DNA, 126 bp, Oryza sativa nipponbare
  unsure (1)..(126): unsure at all n locations
nccacgcgtccgcaatacacatatggcaggggatggatgaccgggtggtgccaccgtcagttactgaatacgtcaggcgggaggctccaggagcgacagttcacaaacttatccatgtcggccact

SEQ ID NO: 423809 - DNA, 300 bp, Oryza sativa nipponbare
cccacgcgtccggtcatcctgctgcttccgccgcgtccatcctccctgcttaggttagcccttcgcacatactccgccggcgacgacgacgatcctcatcaatcccgcgagcgagcggcgccccgacggtcgtcctactgccgcttccgtcgcatccatcctggaggatcgatggcggcgaagttatcgttttcttaggacagctcgccaatttccataatatctgctgctaaggttgccggtgccttcctgtccatagatcctagacttagctgccggctcagcacaccgtgctatgct

SEQ ID NO: 423810 - DNA, 243 bp, Oryza sativa nipponbare
cactcacctagcttgttagctcacaatggcaggcactaaactcgtagctcttggtttcattgttctcttgagcattggattagccaatgcttcaagagtggcaagatactcaagtgcccaaggatcaggcagtggtagtggagaggggtcaggatctgtgaatggtgggggatccgggggcggaagtggtacgggatctggtcagagtggttataatggtgcacacgcaagtggtggaggcag

SEQ ID NO: 423811 - DNA, 271 bp, Oryza sativa nipponbare
cccacgcgtccggtcacctgtagtatcaaatcctgcctatggtgaaagaatgggtggcgattcattatctacggatgtgctgatctttgctttctactatcatcatgtgaatgtgcacacttttattgcaatcggtttcatctgccttgcctgcctttagaaacttccaatgaggtataaactgattgctatttctccgggcattttctgttgttctcatagaacacacacccccaattttttagagccgccgaactctagaagcgctttt

SEQ ID NO: 423812 - DNA, 220 bp, Oryza sativa nipponbare
cccactctactctctgatttaacaatcagttatatataatctactatcttatataataatctcaatggaggggctttatcttcattactgctacttcccactattcttaccaaaccctaatctcataccatctcttattatcccaaccttctacaacactttctctttttcgacatacactcacctctcctttacaacaaattaacttttctcaacccaa

SEQ ID NO: 423813 - DNA, 217 bp, Oryza sativa nipponbare
gtgagtatgccgacccattgacatcgcatgactgaagagcatgcggcgtgtagctagtggtctagatagaaccgaggtgaactgtggcaccactaactctgtaagactcatactgatgatcaatattagaagacatgtggaagatggcaggaagcgacggtgagaacattgatactgctagcacgacgaatggtgggagcgaccccgacctctggac

SEQ ID NO: 423814 - DNA, 272 bp, Oryza sativa nipponbare
ctctctctcggggtattgcaagatagtagctaattaaccagcctttggccttcagtttccccacagcggcatatcagagcacgcgttcaatttcctaatcaatctcccataaaatcccctttagctggtgtgcctaacataagcactttgtgtggtggggggttcttgtcctcttttagctacaacatatctatggttgtgaccacctgtacctgcctgtggtaattaaatagagggcttaaatctttgagagagcgaggagatttgggggg

SEQ ID NO: 423815 - DNA, 402 bp, Oryza sativa nipponbare
gcgagaattgatatgagtgagcttgatgaggattctgatggtttccttcaacctcatgaaatggaagcatacataagagggcttatccccaatttggcacaactgcgtgatatgccatcagcatttgttcaaatgtactgccgcatagctgcacgcaagttctttttcttctgcgatccacacagacgagggaaagcatgcataaagaaagtattgctgagcaattgtcttcaggaacttatggaactacatcaggagagtgaggaagaggttactgatactgagcaggctgaaaattggtttttcctgacgtcagctcaacgcatttgtgatatgtttcttgcacttgacaaagatacaaatggaacattgagcaaacaggagcttaaggaatatgcagat

SEQ ID NO: 423816 - DNA, 272 bp, Oryza sativa nipponbare
acaccatggatgctactgtcatcggtaactgccccctgggctgggagggctctggcgccgacaccaaagccaatcctatcaaatgcaaagcgccagtgatacacggtcccgtcgagacgctatcacttgaggaggccgccagaaatgtcactacaaggagcttcaaagccttactgcagtttctcgatggcaggatcaaaaggttcctcaatgccggtaagtacttcaagcgcttcgacaccggttcccctttctacctcgacgtcatttta

SEQ ID NO: 423817 - DNA, 81 bp, Oryza sativa nipponbare
cccacgcgtccgcataatctcatctcctctcctccgcttcccactcgccttcgctcagtgatactagtagtagctcaattt

SEQ ID NO: 423818 - DNA, 388 bp, Oryza sativa nipponbare
  unsure (1)..(388): unsure at all n locations
cttcttctcgcagctcaacgacgacgtcttcgttttcttggcttgcttgcttgtgagctcgtggccttgccgttgctggtttcttgacatgggcaactacttgtcgtgcacgatggcgaaggtgccaggagggaagggggcgagggtgatactgccggacgacggcgggttgaggcaggtggcgctgccggcgacggcggcggagctgatgatggacgcgccgggccacttcctggcggacgcgcgcgcggcgcgggtgggcgcccgcctcgccgcgctgtcggccgacgaggagctggagctcggcgcggngtacgccacgttcccgatgaagcgccttggcacgccgctggcgcccgcagacatggcgcgtcttgccgacttggtc

SEQ ID NO: 423819 - DNA, 440 bp, Oryza sativa nipponbare
  unsure (1)..(440): unsure at all n locations
cccacgcgtccgcaaaatctcatctcctctcctccgcttcccactcgccttcgcgtagtgatactagtagtagccaagtttcttcgagcgttggatcgcgtggggggctagggtttcgcggccatggagcagaggaacctgttcgtgtcggcgctcagcgtcggggtcggcgtggggctcgggctcgcgtcggcgaggtgggcagctccggggagcggcgagggcggcggcggcgcggggatcggcgtggccgagctggaggcggagctgaggcggcttgtggtggacggccgcgagggcacgtcanccttgacgaattccgctactacctcagcgagcggaccaaaggggtgctcatcnagcgcggcgttcgttcacctgaagcaagcgnatttgtccaagcacatccgcaacctctgcgccgcaagccgcgcgatact

SEQ ID NO: 423820 - DNA, 442 bp, Oryza sativa nipponbare
cccacgcgtccgcccacgcgtccgttcatgaataacatggaagctctgtctgaaaaagaaccacttgattcagactgggtcgtgtgtggaggcaaggtaatgcacaacatcagaaagcaactcgggaaatcattcctcttattacaagcacagcaatatgatggcacaatcctagaatgtgatgaggcttgcaatcacaagaaaaccaaccaggatgagaagcgccttcaggtacacatccgcctgctgttgttgcccaggcggtccatggcggggagcagcagcagcatgggcatgtccgccgtggaacgcgtgcccatgaccgtgaccgtggccgtgtccatatccgtagggaaaaccagcaggctgcccataggcggttgcatctgggaacccatggacttggaagcttagagtgcaacacatgctttgagcttccgca

SEQ ID NO: 423821 - DNA, 384 bp, Oryza sativa nipponbare
  unsure (1)..(384): unsure at all n locations
atttaggaaacatgtcttattcacaaatatcaccttcatcatattcctcatcttcttttgatgaaaatccagcaagtagtctgaaagaaaaagcaaagccacaaaagtacacaattacaatgtttttatttacttttattagaagttgacaccacttatatatatgtagtctgatctctgatgacgttgatacatagcagagctttcaccagtatgactataatgacngggacgtcttgtacatacaaatgacgaggctaccttcaccaccgtgcagcagcccatgtgacggcgagcccgggccgctcctgcccagcagctcctcgatcatctgcaagcgcgatcctcttcctgtcgtccattgcccggaggtggtggcgacgg

SEQ ID NO: 423822 - DNA, 63 bp, Oryza sativa nipponbare
cccacgcgtccgcggacgcgtgggctagttctagatcgcgagcggccgcccgcgatctagaac

SEQ ID NO: 423823 - DNA, 79 bp, Oryza sativa nipponbare
cgctttgtagaaatgagatgcttttgagggatcaagcattaagggactttatattacacctaataacctcattggtttt

SEQ ID NO: 423824 - DNA, 375 bp, Oryza sativa nipponbare
  unsure (1)..(375): unsure at all n locations
caccatttcctttgcattgccttttggtgcccgttcgctgttcttcttgtcgtctgttctagcccattctccgctgttgtgctttcttcgtttgatcatggaccctggggggtgaacgcgtgtgctggtgcttattgtcgcggtcaggtccgtgcgatacgttcgttactgttgtgctgctgttccctttaccatcagctcctgttcaggttgcggaccacatcttctgtgcccgtacatgtcggctaagatggctnntcgattgctgtgtgacatatccncagcaagcagaggctggaagatccgtgcaaagatagcaagaatgtgggactacactggtacagctgacgatctgcctnctatacatgtngatct

SEQ ID NO: 423825 - DNA, 117 bp, Oryza sativa nipponbare
ggactctccctgtatcttcacatttatcgctgcggttgtggtgattactctcagctttgccacttcactttccatcgtctttacgcactttcttttcgctttcttacattcttttct

SEQ ID NO: 423826 - DNA, 89 bp, Oryza sativa nipponbare
tctctctctctctctctctctctctctctctctatttctccccatctccccgatccacccgtctctctccaaagcctagccgagctaga

SEQ ID NO: 423827 - DNA, 437 bp, Oryza sativa nipponbare
aatggacgccgtccgatgaggccactgacgcaaaaaccctagctctcgccctctccctccaacatcgactacggctgccgcgcagagggtgtccgcattcggagatatcaacactctctgcattactctctcatgcgtcggtataaatatcatctttatggcagaaatgctgcatggtgacagagatcggctgaacactctgaaacgtaatactggtagccttgtggctgatccatctaccgttctaatcacggtggcttgtgtctatgacgcattttaactctacatggctgttacaccactgaaatcacgaagccatgaagctgaattgcagcacgaatggtctgtgccttctcagaaagagctcttgaatactactcaagacagagtaaaaacttgtgccggcaatgtttcctatgaggaagatcccagatctg

SEQ ID NO: 423828 - DNA, 352 bp, Oryza sativa nipponbare
cgcatctgccgcagcttcgcagcagcagcagcatcatgggccacgccgccgcagccgccgcggcggcgcacgtgccgctgggcgcgatcaccgtcgacgacctcctcgccgcgggggtggcgggtggtgcggcggcggagctgcacgaggcggtccggcgcgcgggggcgccgccgttctctggctcgtttcttgtgtggttgttggcgttgtttccttgtgtttcgtccttcgttttttttttttttttgtgttgtttttgttttttttttttttttcttttttctctttttttttctttttgggggggggggggggggggtttttctttttttttttttttgcttttttt

SEQ ID NO: 423829 - DNA, 501 bp, Oryza sativa nipponbare
gtccggaatcgcaggttcgagccacacctacgctgagtttggtgttctgaataatcacaactcatcaagtgttccatcaatgcaaagccaagggctatctctgagcttgaacacacaaatcatggcgccttccttaccgtactggtctataaagccagacatgttaacgccgcagtcttaccatgacaaccttagaggggaagacatgcggatgaagaatttgcagtccgaagcttcacgcgcaatccggaactcaaggtatctcaaggcagcacaagaactgcttgatgaggtcgtgagtgtttggaagagcataaaacaaaaggctcagaaagagaaggttgaatcaggaaaagcagatggcaaagagactgatggagggccaaaaagtggaggtgtatcttctaatccacaagaatctggcgctaatgcaagcacctgagctttccactgctgagaagcaagagcttcagaacaaaatggcaaaactgatggcaatgt

SEQ ID NO: 423830 - DNA, 88 bp, Oryza sativa nipponbare
tcgaccacgcgtacgctggacgtcgaagcttacagagcctgaaggtgggccagcactattaatcatgcatgctgtacaactcgtacta

SEQ ID NO: 423831 - DNA, 501 bp, Oryza sativa nipponbare
cgcgtccgcgagggcgctgccttcgatagaccactatgcgatgaggcggaactgagtcatggggcgcaagaggcttccggacagagaacatagcagatgaacgacggacgctcgccgaactggacctgctgtgctagcactgtgaccggaaggagcgcgccatgactatcaggacggcgcttgacgtcatgaaccaattcagggacctctagctcaacattcaccacataagagaatgagcatggtagccattgctgatgtaacagcgtgatcgtgcatgggcaatgcaactactgtttctacacaaccacaagagattgtgaatccaggtgcttcatccaaccctcaattgaatcaatctcagccaagcaccagcaccagcattgcttctggtcctgcactccctcagcatctcacgcttcacccttatgctcaagcaactctttctcttgggtatgcaagcatgattggctacccatctctagccccaagttatacata

SEQ ID NO: 423832 - DNA, 459 bp, Oryza sativa nipponbare
caaagctgtctaaagaacattcagaaaaagctttcttcaatagagctgtcgatgattgaatacactaaaatactgtaaagagcaataaatttgagcattatgtatctgccaattctaagttatgaacatatggaattttcttttcataattagctccaaatccaatactatgtgcagcattgcaatagcagatagacatcactaaaacactaaccagcatagggtacaaaagtttaggagtaccttactccacagcccaccatggtgagcaccaccgtctgccactcccacggcacatcccatcggcgaaggattggccattcgtctgaattctgctcacatccaaattatgtcacaaaatcttcagcaagagaaaccatcgcaaaagagaggaatacttacatccaactaaactagacatgttttccatcataataagatactcctatcaaatgcaca

SEQ ID NO: 423833 - DNA, 521 bp, Oryza sativa nipponbare
gttggatagccatgtagtcatgtaaatgtgttaatcaactgtactttttgaaccgcatgggggttcttctggatgtaatctggaatgggaaggtctggcctccccactcatttgtccaatatcttcttcccccaagtacattgacattcagcagtctgtagcttgcagaacatgattatttctaaaattgaagtacttttccattatgttttcattggaccacttttcatgtttaattgtgttcatacagtacaactaattgtataactatcgtgcagaaaatttcatgactggtcttcgtgttgtggtcgatcgagaaaggaataatctttggttggaagaaaattaattggttcctcccttcagcacctgagaattactccctcgaggaaacaaagggtgggaacccaacaagcgttacacagttgagaccccttattaattcctacccaataatgtgggtatgattgtttaatcactcaggtttctcttgtcaatttggccgctctgatccttttcta

SEQ ID NO: 423834 - DNA, 185 bp, Oryza sativa nipponbare
ggaaatggacatttatgatcaagggaagacccagtgatttgttcaatcatggattcgattacttagaaagtaatgcggtacgaccattacaagttttgcgacgtaggtggcaggcatcgacacaaaccggcggttgatcagatacccgaggtatcgaatacaagacgctgaaatggtggttggga

SEQ ID NO: 423835 - DNA, 423 bp, Oryza sativa nipponbare
cggacgcgtgggttttttttttttatgaaaagataatttcattactaagttttagcccgatatacattaatacatatacatataaactcgtagttaacaagggtgatcgaaggaactatcttcaggcaaggcaaccccataaactaagaagaaaataattttaatggactcaagacatgaacaatacccactgctatcccaaggagatttatgatctgtagaatttgtttgagtaattcacttaaaacaggctggagcgagaaggttatgcaccaatcgtgtacatccatacctcatcaatactatcattgtcctcttcatcattatccatgtgctttcgcttgcgtggataatcaccttgaagctccccgactagcgtggactccgatcaatcgaggtcgcgaaaagggacggtaaccccat

SEQ ID NO: 423836 - DNA, 331 bp, Oryza sativa nipponbare
  unsure (1)..(331): unsure at all n locations
cccacgcgtncggcctcgcctcgccggctgctcagtgctcaatcaagaagaagaagaagaagctctctttcgatgatctccctgagttagttaacgcttactctgctctctatatatctgtgtgatccagccagccaccttcatctttgcttggttggttgagatttgagatgttgaggtccatgtttgagattgaattgaggacaggtttctgaaccggcagggaggctgaggagctaattaatttccgtctgtctgtcggtgcagccagttcccataccacctgctgcattaactccggactccataaacataatatatttgcttcttc

SEQ ID NO: 423837 - DNA, 162 bp, Oryza sativa nipponbare
  unsure (1)..(162): unsure at all n locations
ggacgcgtgggcggacgcgtgggtgaggatgttgatcaggtnacaggaatctagacaagacagcgacgacgattaggggcggggcgtccaccgccacttaccatattttcatatacatctgttcgttagccatcacgatcagatactacttcacggacctaa

SEQ ID NO: 423838 - DNA, 111 bp, Oryza sativa nipponbare
tccacacgttcgcccactcgttcagaagaattaagcatgttcacgccgatagctggttgcaagctctggccaagaacgctgcgctagaggggctgattgatctgatcccag

SEQ ID NO: 423839 - DNA, 395 bp, Oryza sativa nipponbare
caaatttgctgaatacacagcggcaaggtctcctcttgggctttattcttgcctgccattccaagtatgatcacagaaatataaaatttgaagtcaataccaataatatctggacaagtggaattaggtttgttcgacaatattggaatttggaagatctttcttcgtgataatctcagtatgatgtcaaaaattggatattccatccattattcacttctcatgactgacacgttacaaggtgctggatttattttttaagtggtgcatcatacacgtgatatgtgatcatatattggtctccctcatgcattagtctcattggatctgctcttttatgcccccctggggttatgttggtgcctctgctacttactgataattgaataatcata

SEQ ID NO: 423840 - DNA, 379 bp, Oryza sativa nipponbare
agcagcggacgttcgaggtcctgtacgacgtcggcagcagcacgctcggcttccggtccggcgcgtgttgaccggggcgggcggcgcgacgccggcgcctggcgggccgggcaacacgacacacgtagaggccaagagggtagcagtaggttgctctcatgtggtcgtctacttgtttgtggttgcgaggtaagagtcgtgacgtgtgatgatgacaagatataatgatatatattgcaattgtaatccaacaaccaaaatattatattagtccctagctctaaaaaaatattatattaggagtgaacttttcatgattttttatgaataataaagactttatactgattaaaaaaaaaaaaaaaagggcgggtcgttt

SEQ ID NO: 423841 - DNA, 191 bp, Oryza sativa nipponbare
  unsure (1)..(191): unsure at all n locations
ccccaagctcggcgcaacctctctcgacgnngctaaggcggcggcggcggcggactncgcggcgagcaagcgggccanggcccacgcgcncngcaagcaccncagccncganccgaanacaaanccagacaagnanngagagagggaanngccacccgnnccacaanggaaacgaggaagagagacgaagg

SEQ ID NO: 423842 - DNA, 426 bp, Oryza sativa nipponbare
tggacacctgttcctgtgactaacacagtgagaagtacacatagcaacagtatttcatctacatctgttcccagttcatcaagtcctgataacaaccccagtatgcaaacttctcagcaagagaagcctagcatagacatcaagcatgggaatgatgtgcctggcagcggttctattctgactgaactagatactgtgaactccaatatgaagaatctgaggataagtttggatagccatgataccatacatgttaagcagcagtggccggacaatgtcttgcagcaatttggcccctcacctttagtccagggtgatcctattcaaatgattcctcaaggaacacatcttccccatggtccttttggtgagaacttggcgcatactccattaaaattaccaactggggacatgcagcaattttta

SEQ ID NO: 423843 - DNA, 229 bp, Oryza sativa nipponbare
gccgtaaatccccggagaggcatttcctcgaacacctgccgcgcgcgccgtccgcccccaaaaaccctcgccccaaaccccgcgccggccgaagcggcggctccgtgcggatgccctcccgtcccgtcccggcgcgccccggccggcggtagtaggaagtgtgggggcgcctagcgtatgatgcggcgcttctccccggcctccgtggtgctgtttcttcgactctcgt

SEQ ID NO: 423844 - DNA, 243 bp, Oryza sativa nipponbare
gcgacggcaaaggagcagctcaacgggagctactggagcacaacgggctgctgggtggcgaggagggcgaccggagcgggtcgcgggcaggcaaccggtggccacggcaggagacgctggcgctgctcaagatccggtcggagatggacgttgcctttcgggaagccattctttaagggccccctttaggaggaagtctccaggaagcttgcggagatgggggttcaagatgagcaccaatgt

SEQ ID NO: 423845 - DNA, 87 bp, Oryza sativa nipponbare
gtctgctgcttccgaattccgatcggagagcagctggactccggtgagggatcatggaggcggtgaaaagccctctcaagcccaagc

SEQ ID NO: 423846 - DNA, 480 bp, Oryza sativa nipponbare
cccacgcgtccgcccacgcgttcgtccacgcgttcgggaagcgtcaacctcccgaatccatcgtcgccgccgccgacgccggcgatgtgtccgccggtcgacaccgtcgcgctcggctgcacgttcggcgccccgctcgggcatctcgttgtcggtcagctcaacttcggcatctcgcaagccaacctccgcattagggtggggctgatctggttcggatgcacgggacgggcgttactccgatcggtttacgcatcgagatccgcttctgactcgactacgaatactgggacttactgtacaatgcactgtcagctaaggtggcgttgtatgtggtgttcggaccggacgactaggggtttcagccgctatttgatctcgatgagaccgggagtggggagaagagcggcttggataataggattgtcgggacaccttagacctcctgttttaattaaagatgctctgtgaattttgtat

SEQ ID NO: 423847 - DNA, 117 bp, Oryza sativa nipponbare
cccacgcgtccggatagatcatatcatgacaagtgaatctagcttgctagaaacacaggtagttcgtaattatcgcatacggccatagcgaagtacagtgtgggtctcgtggtttta

SEQ ID NO: 423848 - DNA, 262 bp, Oryza sativa nipponbare
cccgcaaaccccaatccgccgccgcggcgatcgccatggccgcctccgccgctgcttcccgcgcgcaacgcctatctcgcatcttctcctcttcttctccatccgtgcgaccacccaagcccgggcaggtcaaggaagcaccaaagcccgcgccgaccaagaaagctcctgctcccggcgccgaggcgaaccccaacttgcgccggaatgccatcgacgacatcatcaagggcctcttgcgggagcgcgacccggacaagct

SEQ ID NO: 423849 - DNA, 339 bp, Oryza sativa nipponbare
  unsure (1)..(339): unsure at all n locations
atgcagtcgaatntcagcgacgatcgggttgctgcatgcagtttgctgatatctaccgctctgcaaaacgtcacttgtccgaacttcgtttgatggacaaagtcaaagcttcatcagtcaaggaggcaccctcagcaccacctttagagatccaaattacagaggaccaagttcgtgatactgtcaagtctctaatgaatatggcaacaaataagtgtgttgagatgaaggcccaaggcatgctagcttttgctgaactaacaagttctgattccaatgtacagaaaatgatggcctgagagggcgtttcatatgccatgattgacgagctctattctg

SEQ ID NO: 423850 - DNA, 123 bp, Oryza sativa nipponbare
gtcgccccgcgccgggacttggcccgaggccacccctcactccgcctccggccccgcccccgccccagcgccggcctcctcgcttccctcccgcgcggcgtcctcggcttgctttcaccgcgc

SEQ ID NO: 423851 - DNA, 92 bp, Oryza sativa nipponbare
atcttcttcttcttcttctccatgccgatcgcctccaagctcgtctacttccagcgccgccgcccatcgtcggcgccgccggagccggagcc

SEQ ID NO: 423852 - DNA, 414 bp, Oryza sativa nipponbare
  unsure (1)..(414): unsure at all n locations
gaacattttcatgtgagcatccttgtaaaaccattgtgcttgannnnnataccaactgaaacgtgagttttatatgtaacttgctttccttgtgcttcaacatgttttggtttgtggcttggtatctcctgaattaatctatataacttactttccttgcagattcaacctgattggaggcaggctttgtctctcaggaaggctatagaagataaaattgccaaaggtgggacattgagaaatttgttccagttatatcctatattattggttttgtattgagctacgtgatggattgtctcacaaatcgaacatttatttatttttcctcattttcactgggacaacaacttattttatgataattctgtctaaacatctgcatgcgttatctgcagatggtctgatcggaat

SEQ ID NO: 423853 - DNA, 524 bp, Oryza sativa nipponbare
  unsure (1)..(524): unsure at all n locations
gatgagttgcttgaggcattagaggcaatgtctaatgatggtcagactattgcacctagagcaatgatcttaaacagaaaatatcgcacgttggtgagcacctggatagaaccattacaagaagaagctgatgttggttttgaaattgattatgttgccagatatattgaagaaggaggtcttactggtgagcgcaaacgctgggtgcctcgaagaggcaaaactcccttagatccagatgagtttgggtttgcctattcaaatccaatagagacatcatttaaacagcgctgctttgaggaattgaagttatatcatcgcaaacttctaataacattgagaaatgaaggccctggtattttaggtgatgtatctgaagatgatgtacgaagagttattgaaagactaaaaaagntagttgtagggccaaagaaaaatgttgttaagcccaaggcagctagcaaaatggtagtatctgagttgaagactgagctagaggcacaagggttgcctacagatggaac

SEQ ID NO: 423854 - DNA, 466 bp, Oryza sativa nipponbare
  unsure (1)..(466): unsure at all n locations
ggccacctttgacacatcgacgagcgaaggtttcctgcacaacgacggcaagggtttctcattcacagaattcatcaagggtgtcttcagcccgttccgttctagcaactatcaatgggtattctggacacgatttctcttcactgcgggtttcaacatcgtgctctcgtttctggagtacttccttgcagacgtggtgaaaccctacaacctgttcggtttagtagagctggaatcgccacanaaggcatcagcagtatttgtctgtcttgtgctcgccggctcgttggcatcagcacttgttagtggcatcttatcagacaagtacgggaggaaggtgctcgtgtatgcttcgggtggcgtgatggccgcggtgcatttctcgttcctattctactacccctactcgttattatgcctcggcggatttgtctttggcctagcgtatggtgcatacataagcgtc

SEQ ID NO: 423855 - DNA, 506 bp, Oryza sativa nipponbare
gtgatgccaaatttatgtctaaattgtgataggctgacgacaaaatatttgctactgaaattccaaattgacagacaatgttgcttccacatttgctttgaggggctcgaaattcttagattggtcaaatgaataaaaaggttgatgtcaagttgttttatggtcccaaattataacgtgtggggtctccctaggagcctagaaattcttgcattaagcacaaaaagacggaagatctatgttgcttcttttggtggacgttggcccttgattgtaaaggctcaaattaatctcaaataggttgaattagatttacagatatattacagttggttgcttgtgtactgtcatattaggaacataaaaaaatgcctcactttctttagaactcaactcctatagtcacattgcttcattcatgggatttttcagttgcacgctactccaaaggttgtaattttaagaagaaatggcaactgctgtgagtatagcgatcatcattagtt

SEQ ID NO: 423856 - DNA, 405 bp, Oryza sativa nipponbare
  unsure (1)..(405): unsure at all n locations
cccacgcgtccgttcaagcggaggaagagagagagagagagagaatcaaggcagtagtcgttttcctctcctctcgccggcgcatccgaccggagaaagatcccttctttccctcctccaagcccgcctcgagatggagacctcggcggcggcggcgcccaatggcggcgcggaggcggcggagcagcagcagcggcgttggctgccggacttgcagcagacggtgaggctcatgtacgtgaagctggtgtaccactacctcatgtaccacgtgatgtacctgctgctgtcgccgctgatggcgctggtggccgtgcagctctccaccgagttcncgggcgacatcgacgacctgtggtagcagctccgcttcaacctcctctgcgtcgtcgtctggttcaccct

SEQ ID NO: 423857 - DNA, 445 bp, Oryza sativa nipponbare
ctactctacatcatgtgctaatctctctttgttagtaattggtagcatcttcttatatctaattaagctctagctaattacttgattagtagctagtattatctgttcaagatgagcactatcacgtatgaggtggagccgtcgcacctcgcgccgtcggcggcggcgcagctccggctaagcagcgccgcctcggcttcggcttcgtcggcgccagcaagggcaagccgcttgggtttggggccggggatgtcgtcgtccggggtaacacgctcgctcagctcttcaccgaccacgtcgtcccccacctccgccgccgcggcgccggcgacggcgccgggatgcagatcttcgtcaggacggtgacggccggaccgctcgccgtcgaggtgaacccgtgggacaccgtcggggaggtgaaggccaagatccaggctaagggggg

SEQ ID NO: 423858 - DNA, 72 bp, Oryza sativa nipponbare
cccacgcgtccgcaggagccggagttggagccggctcctgtaaggttcgaggagaacggggatgtggtgggc

SEQ ID NO: 423859 - DNA, 478 bp, Oryza sativa nipponbare
  unsure (1)..(478): unsure at all n locations
cgcacattaccaaatcgccaaccaaaaagcaaacccccgcgtcttctccgatcagctccgctcgctcgccgccgacgagctcgccccgccgccgacggcgacggcgcatgctagctgcgtatagcccgcggcggagatgaggtcatccagcgattgcaaggttgtggcggcggcggcgaggaagaaggagaaggaggcggcggcgtggccgtggtcgctgtgggggttcctcctgaccggctgcctcggcggcggcggcggcggagggaagaagaagagcggngggaagaaggtgcgtccccgcggcggcggcggcggcggcctgcggcggctgtcgttcacggacctgacggnggcggcggaccaggacctgtcggtgtcgctggtggggtccaacctccacgtcttcaccgtcgccgagctccgcgacgccacccgcgggttcgtctccggcaacttcctcggcgagggcggcttc

SEQ ID NO: 423860 - DNA, 239 bp, Oryza sativa nipponbare
  unsure (1)..(239): unsure at all n locations
gcgtccgcccacgcgtccggtgcgactccccctcgtgctcgtcgtgttcgtcgttgtcgttggcgttggccatgggagagaggatgaggagggcggcgcacgcgatgctgttcccgttcccgtgctcggggcacatcaacccgacgctgaagctggccgagctgctgcactcgcgcggngtgcggggggcgtgcgtcaacacggagcacaaccacgagcgcctgctgcggaggctcggc

SEQ ID NO: 423861 - DNA, 264 bp, Oryza sativa nipponbare
gttggccttatgaagaacagtaaatccttggcgattcactgtgcagcgaatcctgaaaaaccagaggaatttatcgatgatccagtaccatcactggttcttcttgcccttgctctgaaaaaatgtgttttaccttttgtacataagaaaaatcatgtgcaaagctgactcttggccaatattcagaaaaggtgtaccctctttgcatttgttacccttgtgtatatggtaatgaatgtgtggtgaatctttaaagtgaagctt

SEQ ID NO: 423862 - DNA, 348 bp, Oryza sativa nipponbare
gtcatactggtagcatggtgcatgatgctgctgcaggagagaagagcatcgcaggcatgggaacgcgctagagggcactagaagctcctaggctgcggactgctccaagcactactaccagatacagtgagagaggcccaggggcgaagcgcgctcaagaagcgcatatacgacgagagcagtcgcgtcgtcgcgcgactatgaatacagggacgcgatgaccctctgtgcatataacaggacaactacatggacataggtcacaaagatgtaaccaaggctgttgtacagacgacactactctgcactgctgcagaaaaaaggctgcgagaacaaaggcacttaaag

SEQ ID NO: 423863 - DNA, 467 bp, Oryza sativa nipponbare
cccacgcgtccgcccacgcgtccgcgcctcgccatcgccgcacggcgcaaaaaggcaagcaaaggcgaacgcgccgcccgtgcgcctcccctcccatccacacgtttcgctctcctcctcttccgatccgtagcggcggcagcggcagcggcagcagcagcagccgccgacacgcggggggcggagcagagctcgcggaaccctacctcttgaggcttcttatctgcttcagccgagagggggggcgaggcggcgatggcggcggccgtgcgggacggagcggcggtggcggggtacatggcggaggatgaccctgacggggcggcttcggaagacggcgatatggacgtggaggtgggcggcgaggagtcccaggcgcgcgacggcgacaggagggacggcggcgacggcgacgacgagtacgcgctgctcactaggataactgatacatcagcagcttaagcaag

SEQ ID NO: 423864 - DNA, 296 bp, Oryza sativa nipponbare
  unsure (1)..(296): unsure at all n locations
ctctcctctcctctctttctcactgacgacggcgagggtgggagcggcgctgcgcgctcgggaggggccggtcgatgcgggagcggccacggctgcgggagggagtggcgcggcagcggcgggctcgacggccggcgccctccccctcctagatccagcggcggcgcgcttgggagagggcgggaacggccacgacgacgggcaggcgcggcgcggcagcggngggaacgacggccgcgcccncncccnncnacgacccagcggcggacgcccgggaggggccggcaccggccacc

SEQ ID NO: 423865 - DNA, 350 bp, Oryza sativa nipponbare
  unsure (1)..(350): unsure at all n locations
cgctgactccatctaccactgcaccagctnctgtnnatgctgtatgcgttccatgcccgatcatgtcccgggcagacatttggttggcccccaggcctgtcctagttgacacacgcccttccatcgtgatggtattgaagtttattgggtggttggtagttcagtccnaggaaatcggggggggttgtggtcagcaattcatgttgcttatttggggtaacactgatcacttcagtgtgggagtcanacctactgtcgccatcatgggattcaggtaaccgcatcaacagcaattgcagctggtcaaagcaggagctattcaatcctaggaacgttttangatcatttgt

SEQ ID NO: 423866 - DNA, 496 bp, Oryza sativa nipponbare
  unsure (1)..(496): unsure at all n locations
cccacgcgtccgcccacgcgtccgcgcgacgcgtgcgcggacgcgtgggcggccaaggagctctgccgcctccgcatcgtctgccggccctggcggtcgctgacatctgatccccttttcatgaagacacacgtggctcaccaccgagagacgttcttcttggccagctttaaggaggaggagacgcacatccatatcatggattttgcaggcaatgtgattaagcagataggcataccagctggccacaaggtgttatgcacacgcctcgatctggtttgtgtagccacaaataagaacagctgccatgttcttaatcctgtcactggagatgtctacaacttgccaaagagtccagcagaggagcacacgtaccatgtcaatctgcgcaagcctttcacctcatttgcatttgggcatgttgcctcaacaggagagtacaaggngctccggatgttcaaccgtcctggatttacggaccttgggataccacagc

SEQ ID NO: 423867 - DNA, 101 bp, Oryza sativa nipponbare
cccacgcgtccgcccacgcgtccgcccacgcgtccgcccacgcgtccgcccacgcgtccgcccacgcgtccgcccacgcgtccggactagttctagatcgc

SEQ ID NO: 423868 - DNA, 414 bp, Oryza sativa nipponbare
tgcatctgttgatttagaggagtgagtgagagtgtaagcgacgacggcactctggtgctcgcaccagcgttgcggcgtcgccccctccttcttccatccttttccctcccctccccttccctccctctagctatgtgatttcaccggtcctcccctgcgcgaccaaccggagcccttcgggctgggtggggtatttttgatccgacgcctcgccggtgagggggatacagctccttgccggtggcgccggtgagggggtagatgtgctcatccagcgaatcaagcttatggtggatcactgttcaatgggacaagctggcggtgggagtcgatatggtgaagcagcagcaagcgagcaactgaatccgcagcgccgctcgcgtggtctctgtccacaggcgtttcgagttcctg

SEQ ID NO: 423869 - DNA, 158 bp, Oryza sativa nipponbare
  unsure (1)..(158): unsure at all n locations
cgcaaatcctcctcctccgctcgcgtggccgcccaccaaacccgatcccaccgcgccgcgatgccggccggccagccgcacgcgcacgagcccgacggcggcggcgcgagccaccgccggccccagncgccgccgncgctccccgcgggggggggccc

SEQ ID NO: 423870 - DNA, 264 bp, Oryza sativa nipponbare
  unsure (1)..(264): unsure at all n locations
cccacgcgtccggtccacttctccagcagcaccgcttcgctcgctgactcgctctcgcgctcgcacacatcgctctcgctcgctctgctgctgccgcgccccgccgctcgcgctccgagcggggagcattgcgtggcgtggcttggatccggcggtctcgatctgatcgaggcggaggcgcgcgctgcgcggcggatggtgtgatcgggggaggcggcgatcgatgcggggaggtacggtgcggcgtggaggtggnngttgggt

SEQ ID NO: 423871 - DNA, 182 bp, Oryza sativa nipponbare
  unsure (1)..(182): unsure at all n locations
cggacgcgtgggtgcgaatttcggaggaaattcggtgggaattttcgggaggtggaggaagagagggaacgcggcgatctttgcggcgacgacgatgctgctgcggtggctggcgcggccggcggagaggtgcctggggcgaggcggcggcggcggcggagggggaggaggngatgggttgc

SEQ ID NO: 423872 - DNA, 416 bp, Oryza sativa nipponbare
  unsure (1)..(416): unsure at all n locations
cccacgcgtccgcccacgcgtccggaagccgcgaagggcaaagaagatgatgactaataccaagctcttccctctcgtcgctgccatctgcatttccttcctgtccgtagcgtgcgcgtccaactccacctcgtcgcaccccagctccagttctagcctcctcaccaaaccgccgcaatggcgggaacacctcctccttgccgactcgtcctcacacgtcggcctcggcctgaacaccgtcgccgcatggctactctccttcctggccgcgtccgtgtcgagcgccggcggcgtggggggcggatcgctgttcctccccatcctgaacctcgtggcggngctcagcctcaagcgggccaccgcctactcgtncttcatggtcaccggcggggccgnctncaacgtgctctacaacc

SEQ ID NO: 423873 - DNA, 275 bp, Oryza sativa nipponbare
  unsure (1)..(275): unsure at all n locations
ccttcgctgaggcggatcccactgtgtctnagatcgtgtatgccctgacgaggctcttcgtgtacgagcgcgtccaaaagccgctcgagctcggtgagcatatgatccttctgctgataattatcacatggttcatggatctgtcagtctataacattgctgtattcactactgggggggggggattacttacttattataatcattgcctattaatattactggacggagcttgattatgatacctagaagtgcatattacatattgacttaag

SEQ ID NO: 423874 - DNA, 425 bp, Oryza sativa nipponbare
  unsure (1)..(425): unsure at all n locations
cccacgcgtccgcccacgcgtccgcccacggcgtccgcccacgcgtccgcccacgcgtccgcccacgcgtccggctttctccacccgcaaaaccattggtcaagcagggctctgaagagaggtccttggtctcatcaggcagatgagatgaaatgagatgagatgctggtctgtatgatcgcatccctcaattctgtacagtttcttgattgttcttgatgtgtacaggttgtgccttatggttgagtgcaggctaatattttttattgtgaagcctgcccgttcatctgcatgtagcgtagcagcaagcagtagtatcagcaagtgttgtagccttgtaggcatgtagcaatgccagggatttgtatgggtagctgtatgaattcatctatattttgcctaanaaaaaaaaaannnnnnnnnnn

SEQ ID NO: 423875 - DNA, 506 bp, Oryza sativa nipponbare
  unsure (1)..(506): unsure at all n locations
gatttattgaaggccaaccatggcgtgtcttagagccaccacactccttgtgttgatgcaaattattatggtgttttacaccgtcatcttaagctgctcgttttctgatgcccgaactttcccaggcggagaaggtgggttagacccaaatcatccagtatgcgttggcggcgcgtgtccaacaccaggtctaccatacactaatccacgtgatccttgcatataccgtaacaggtgcaatccaccaggacggatgggtgatccataagtaattttcatcatcaatatttatcgttgtgatccagtatacgtccacatcgtccacatgacaatagtgtgtgtttgtgtatgttatactagtattcactagctgctcacactgcatgagagctagttaattaagagaatgtctatgtatgacaaataatgtactgtggtactatatatgtatccncctgtctcggcaatatatggattaataagacatgtgtactctggatctgatt

SEQ ID NO: 423876 - DNA, 158 bp, Oryza sativa nipponbare
  unsure (1)..(158): unsure at all n locations
cgcgccgccacccccagcctccgcccggatccagaccgcctccgccgccgagcaccatgggcttcgacgtcggcgtcgtcgccttcaacccggagggctggggccctcccgacaccgcgccggcgccggcatcccttggcggnggcgccgccgcggcc

SEQ ID NO: 423877 - DNA, 487 bp, Oryza sativa nipponbare
  unsure (1)..(487): unsure at all n locations
cccacgcgtccgctcctcctctctctccgctctctctcctgccaagcgacggccgccgccgctgcttgccgtccccctcatcctcttcttcccgcagttggcgacctcccccgcgcactccctactgcgagccgctgctgtcgccgtgccgtcgtcctgccatcgccatcctttcgctcccgccgccgcatccgccaacgaggaggccgggactgtcggatccggtgactccggcctcctcgccggcagatccggccgccctgaagcgggggaagcctggagccgccctctactcttctccctctacgcccggcacagcccctccctctccctctccatcttcatttccggatcgatggatgcctgtgattaggtggcctagggctcatggttgacggcgttggttgatccggcggcgcagcacacgatctggtgggggtgcgacgcanagggatcgacacaggtcaagccagcaaggcagatatct

SEQ ID NO: 423878 - DNA, 154 bp, Oryza sativa nipponbare
cggcggcggcggcggcggcgccgagggggggcggcggtggcggaggccgctgctgcggtacgggtgcgcggcgcagtcgaagaagggggaagacttcttcctcctcaggaccgactgcgcccggccctccacctcgtcgtcgtcctcctcctcc

SEQ ID NO: 423879 - DNA, 484 bp, Oryza sativa nipponbare
  unsure (1)..(484): unsure at all n locations
ggaagcaagagaggaagaagaatatatccatagttctatacacaaagcgtacctgttctttcggtgtctttgttccagaagccagaaaaactgcgagcatgggcaaattcggtggagctgcggtccttccagtataccgtgaagaagaagatgaagacttgttcgagacatcatcgtccatctcaggcgactccgatgatgaggctcaattttcagacagcgaggaagctgaagctcaagaagaccagtttgcgcagcagccagcgagaaggatgaattcagatagcctctacgatctgtcatctatgaaggcacaactccctgtcaagtaagttcctggggaagaagagttgcatattagtatcaatagatgtactagcaaaaggaaaattttctcacagggcaagtgctntgttgttctttgcaggaaaggaatatccaaatactacgacngaaagtctcaatcttttgcatgtatgtctga

SEQ ID NO: 423880 - DNA, 359 bp, Oryza sativa nipponbare
  unsure (1)..(359): unsure at all n locations
ggatgatgttgctatgcaacagaaagatcctgaaaaccggacggatcaaaagaaggcccctcactcagtaacaaaggagcaaatggcaaaccatcataatgtgtctgatgatccagcctcagatggcaactgcgatgaccagggtaacatcgattccaaaatgattgatcttaatatgagacccgtccgtactcatggacaaggttcaaactcacagactcagggcgtggatgttagcgtcaacaatcatgattctccaggagtggtgccaacatgtaatttcgaacgagaagccaacanataaataccgtaacaccaggatgtacatttcttcggttgctgctatatagcagtagctc

SEQ ID NO: 423881 - DNA, 126 bp, Oryza sativa nipponbare
cccagcgtccgcggacgcgtgggtgaatatattagtagcatggtgatttcttattcttatacgtgtatttttgtctgaaacatggtactccagtaacatttaatgaaattaacgacgtttccttgg

SEQ ID NO: 423882 - DNA, 457 bp, Oryza sativa nipponbare
  unsure (1)..(457): unsure at all n locations
ctccccggtccaattgctcgcttacaataaatcccctgaaagatacagaattggttctgtatggaggagagttctacaatggcagcaagacctttgtttatggtgatctttatcgctacgatgtagagaaaaatgagtggaagttggtatctagtcctaacagtcctcctccacgaagtgctcaccaaacagttgcctggaagaataatatatacatgtttggtgggggaattcacttcgccaaaccaagaacgttttcatcattacaaggacttttggtcattggatctaaaaacaaatcaatgggagcaaattcttgcgaagggttgtccaagtgcacgttcagggcacaggatggtcctctataagcacaagatcgtgctatttggntgggtttttatgacactncttagggaagtgagatactacaatgacttacatgttttttgatttagat

SEQ ID NO: 423883 - DNA, 214 bp, Oryza sativa nipponbare
cggacgcgtgggtcctcctcctcccatgcatgggaggccgtcgaggccattagcttcctcctcgtcgtcgtcgtcgtcccgcgtcttctccttcttcttggcgccgcgggttttcttgttcttggtggtggtggtggtcgtcgtcttcttgccgggtcggtcgtcttgctggtgggtggagggcacggaggagttggaggaggagatggggttt

SEQ ID NO: 423884 - DNA, 348 bp, Oryza sativa nipponbare
  unsure (1)..(348): unsure at all n locations
gtgggggggggaaaaaaaaaaaaaaaatctatttgggggggggggnggcccccccccccccccctcaaataaaaaaaaaaaaaaaccccccccccggggggggggggggggggcttcccgctctccctcccccaacacaaccttttttttttttttttttgcgggggcccccccccccaaccacacggggggggggggggggggggggggggnccccccccacacacaaaaaggggggcgcgccccccccccccccccccacaaataaaaaaaaaaaatatatttttttgggggggggggggggggggataataaaaaaaaaaaaaaaaaaaaggggggggggggggg

SEQ ID NO: 423885 - DNA, 598 bp, Oryza sativa nipponbare
cccacgcgtccgcattttcaaaaaaaccttgttctttaatgggtctatctgtaaatgcagagagcacataccttattcaaataatcaagatagatcagattattttccttttgataaaatttatcgagttaaattcaagccagatagacccacgggaagtttatatatgatgtgtgtagtatgcatgaaacttaggatgtaggttttcttagtaaagttacatcctacaaaataatgttcggatacactacactttccacattcgcatacaattactaattaaaaaaagatgttatcaccacaacagcccactgtattgtttgcaaacaaacacttcatagccacaattactacaggtggaaaaaaaaaactacctcatcttttaacccccaccttcttgcacatactctgcatccactacttatcaaaactacaacttttagatttgttaactatgtctataaaatactatatccgtctaggaatgcgccttggattctatgtattatcaatgcaatatttaaaacttataattacatttttacaactattcatatacgagttctatacactcagtgcttggtcctaacagaatgct

SEQ ID NO: 423886 - DNA, 337 bp, Oryza sativa nipponbare
cttggatccctccaccctcatcttggagcctgggcgacccgtcgcgccatccgcccaaaccctagccctcctcctactactcgccatggccaccgactactccatcccgtccccggcgttcctggccggcaacccgaacgccactctctcctgcgcaaacatatctacggttcccgacaaggggtgtacgccagctcatcaccaaggaccgacgtatctgcagcaacatcggcgtagagcaaatcgtacacgtaatcagactcaacccctatcacaagagatactacatttccgtacaaactgggtcaacatgtgctttcactggaatgcactgaac

SEQ ID NO: 423887 - DNA, 268 bp, Oryza sativa nipponbare
  unsure (1)..(268): unsure at all n locations
ctccgtctccccctccggccgccgcaaggaggggcagcagcagcgatgcaggccgccgccgggcgcgcgcgccgcctcctcacgtcgccggcggcctccggtatcctctccgcgccgcgccccgggtgcgcggcgctcgccgggagcggcgcccttcttccccgtctcgatggtgtggggggctcgccgtcgccgtcaccggcccctccgctcctggctaggagcttctgcgccacgtcctcntctcgcctaccccgtnncttgctat

SEQ ID NO: 423888 - DNA, 302 bp, Oryza sativa nipponbare
cccacgcgtccgcggacgcgtgggagcgagcatgcccagctcgttccaggagctttccctcccattctcttctcctctatatcaccccgcaaccatgcctctcctccattgtttcctccaccgatggctccttccacgagtctcctctcctggtcctcctccgacgacgacgacggcgccggcgccggcggcgagctgtcccgccctcgcaggcggtggcgggcgcttgtcctggggctcggggtgaggaggaagaggagcatggagggggtgttcgggttcagggagatgatgggggagga

SEQ ID NO: 423889 - DNA, 328 bp, Oryza sativa nipponbare
  unsure (1)..(328): unsure at all n locations
gccgtacgtggtcncgaggtggggtgcgtngggcacgtggtggagtgcgagcggctcgtcgacggccggttcttcctcacctgcgtcggcggcgacatggtgcgccacctcgtggagcgagtggaggagcagctcaagaacgtggcggcgctgtcggacaagctcgggtggagccgggcggcgctgccgttccgcgcgacttgctccccgtcgtcgctgtcgttcgccgtggcgagggaggtcgtggaggaccgggaggagcancannccctgctccggctggacgacgcggnggcgcggctggcgcgagaggggaggtacctggagc

SEQ ID NO: 423890 - DNA, 127 bp, Oryza sativa nipponbare
ggattgtgtgtgtggatcttgtatccttgtgactttgcaagctttaattttgtgaggaacaatagtattttagattggtgtgtaaaatatagaaataaataatagtagcaactaaattttggttttc

SEQ ID NO: 423891 - DNA, 298 bp, Oryza sativa nipponbare
cgggggtgcgaaccctacctccgcgcggcgtgccgcgttcccctccccctacctcgccgccggagctctccaccggcaaagccagctggcgagctaggatggcggcggcggggccttcttcgcggtggcgtcccttctcaggcgcgggagaggagacgttcgccggcgtcggggagaggcggcggcgaggcctccggactaggcggcggtagatctggtgccgctgtcgccggatctggccagcccctccggttttcggccggagtgctggcggcggtgccgcgggggcagtgcgtgc

SEQ ID NO: 423892 - DNA, 517 bp, Oryza sativa nipponbare
  unsure (1)..(517): unsure at all n locations
agagagcgcgcagtgtccagacgcaggcgatgantctcgcttctcgcctcgtctcgtctccttcctccgacgcgcggaaccttctagaagcttctccctccggtcgggggatgccgcgctgaccccctaccgtggttatgctggcgtcaaagctctggtcgaggctcgcgtcgccgggggggcccgcctcgccgcgcgccctttcttcttcttcatcggcggcggcggcggcgaggtacctactgccgagctctgggatgccggcccaagaaaggtcgccgggtcaccccagtggcggcgacgcgcggcccggtgcggggctcgggctcgccgagactgggtgtggcgcggccggtgcgccgcgaccgctgccgctgccgtgctcttcttcgtcggacaatcccgcattatacatgaccttccaagaagtgtgaaaattgtggaagttgggccacgagatgggctacagaatgagaagacctagttccaacacatgtaaagattgaactcatacaga

SEQ ID NO: 423893 - DNA, 371 bp, Oryza sativa nipponbare
gtcgacgtggcaggccacctgctgggtgagcggggtggccggagccgtcgccgccgattcctactggggaaggtaccgcaccatggtcgtcagctgctgcatcggcgtcgctgttagtcccctccatttcattcgatccgggttgtgtttagttccaaatttttttttttcaaactggggggggtccatcacattaaatttttcatacacacaatttttttcagtcacgtcgtcttcaatttcaaccaaaatctaaactttataccaatctaaacacagccttaattagaattagtcactgtgtccttcctgccgtgaatttatggctgatggcaagtaatcagtcactgtgtgggatgtggatttttatc

SEQ ID NO: 423894 - DNA, 428 bp, Oryza sativa nipponbare
  unsure (1)..(428): unsure at all n locations
aaaaaaaaaaaaccccccttttttttgggggttttttttttttttttttttccccccccccccccttntccccccccgccgggggggggggatatttggggggtttttttttttttttttcccccncccccccnngttttttgggccccccccccccccccgcgggagaagaccctccccgctctttttttttttgtgggggcgggtttttttttttttttntttnnccccctttttttttttttnnnnccgnngggggggggggccccccccccccccccccgcaaaagaagggggttttttttttttttttttttttctttttcggggggggggagaaaaaaaaaaaaaaaaaaaaaagagccgcccccccgggggggnnnnttttttttttttttgcggcccccccctttttttttttttttttt

SEQ ID NO: 423895 - DNA, 448 bp, Oryza sativa nipponbare
  unsure (1)..(448): unsure at all n locations
ctcctctccttctccttcccatcgccggcatctgtctccggccgtccgccatcgctgctgaccgcagcatccgcagccacagcttctccgacgccggcgacggccgtttcccccccggagaatacgaatacggaagagtgtgaatcatgagcggaggcgtcgagccggagaccccggcgggtggcagcagcggcggaagccgccggtgggctgcaagccnnctcgccaccacctcacgtgcatccgccactgcgccagcagcgctcgcatcgccgccgcaaccgcagaattcgacctgggtgcggggacgctgagcttgatctcgcccacggacattcgccctggcttcctgccggtgttccgttccgggagctgcgccgatatcggtaccaaatcgtacatggaggaccagcatgggtgcgtcgataacctcatcgagcacctggga

SEQ ID NO: 423896 - DNA, 506 bp, Oryza sativa nipponbare
  unsure (1)..(506): unsure at all n locations
cacaaactgatttataattttttttgtcttcatagctgctctattgattctcattattttaaatgtgtacagttaaaataatcttctaactattgatgcaaaaatctccattataccctaatagtactcttggatcaatgttctgatttgttagctacatattgtgtgtgcttggtgctgcctattcaactctgaactatattcttatattgattctctcaattaatgtatatatttcccatctccaactatatttttatattgattctctcaacataatactgtccataccttggtatgtggcacacacatctacactggagaccaggtttgttatggcataaattttcatattcgggatcctgcttgatagaagattaatttttaactaatagtttggatatcntgtttgtgatctaacctcatatacctggtctcgtatactttttaagttgggctggtcccttatctctttttgggataggtttggatacatttgtttactc

SEQ ID NO: 423897 - DNA, 235 bp, Oryza sativa nipponbare
  unsure (1)..(235): unsure at all n locations
cccacgcgtccgaaaaaaagttgcaggtggaggaggcgctagcaggcacatgcctgatccgcgagcgtgcgctatagctacggctggcaatgcaccgtcgaaggaaaagcataaccaaatccggaagatgtagaaagaaattaaggaattgaagttacaagcgtaatttatctaattatagccttgaggggggggttnagnttgntgaaaataaccatcaacatgtttcaaagca

SEQ ID NO: 423898 - DNA, 100 bp, Oryza sativa nipponbare
cccacgcgtccgcgccaaccgtgaagcctacgtggagcacaatggtggtgacgccgccggcacgtccgtcgccatcgtcccgccctacctcgacgccgcc

SEQ ID NO: 423899 - DNA, 443 bp, Oryza sativa nipponbare
cccacgcgtccgggatatttgctggttcctttctgaaggtctcttttctatttgcgctgaacaaaaagacatcaaagagtcagctggacatgaggtgctttctgacttcaatttgtgtgaagaaatcagagatatctcaattttgagtagactttgtttgctgagagggattttgactgctattccaaggacagtactcaacatgcgtcagcttcattccaatggatccttatggactatgttgtacaatgggattttacctgagctttgcaagcactgtgagaacccaattgatagccatttcaatttccatgctcttacagtgactcaaatatgtttgcagcagataaaaacttcagttttagctgatttcactgacttctctggagactatgaacctttctcaagagatgtgatcaaccgtatattgagaatcatatgga

SEQ ID NO: 423900 - DNA, 327 bp, Oryza sativa nipponbare
  unsure (1)..(327): unsure at all n locations
caaaattttgtagacatgttgttactggattgtgtatcatttgtcgaatactcatgacaaagctaaatggccatacggtgacttctgagcgaacaaacttagccccctagcctgacaactatgtgaagatattgtacaaaaattgccaggaatgcagttctttttttaaccctttcatttgaactgaaggcaagtatacaaggcttgctaatcgctatcattgacgtggcactttgttcccctttgtagnggtccggaatgtaacttgatgtacctgaggttgtcttgtatagtccattgtgtgactctctcaaatgatagccctcc

SEQ ID NO: 423901 - DNA, 417 bp, Oryza sativa nipponbare
cccacgcgtccgcactaacgtgcgtgcaggtagttcgcacaacgatctggtggtgcttcgcgagatctaccgttaatgacgcacaattacaaactgcgctagactagtgtatgtagtagctgcacctgctgcggcggcattcaagcaggcgcacggagctatgatgcttgcactgaggatggacacgccacctaagcgttctgcgactgttaccagaccatcgaacgcgctagtggatcatgtgactttgcacgcgttattactatggtcggccatcagccactactaggaggctgtgtgcttcgaccatacattgctgtggcaggacatactgcaattgtagatcaatcgactgttaacttaccggcatcagatggactgggaggatggattaagatcattgatctgttgtgagag

SEQ ID NO: 423902 - DNA, 592 bp, Oryza sativa nipponbare
  unsure (1)..(592): unsure at all n locations
ccccaatctcctcctccgccgatccgccccctccaagtaccattgccgcatccagtcgccggagcaatttccgatgcgccgccgtcgccgctgctcaatcgccggagtggagcagctccggctacagactcattgcttagcgatgaatgacgagtccctttgacagaaggtagctaggggcctcttgagttagcatttcaagcgattttgtttgatgaaatttgggatctttagatgggagcgtttggaatttctgtaaaattttttttacctagttggaattgtgggcttccaatagctgggacatttttgttgtcactcactgtgaaagtgatctgctagtattagtctagttgggctttgtgaggtttgagttggaagctgttagaaattagagctaaacatgcttcaggtttctggttgatactcctacttgatagttgaaattgagttagagatttgagagttttgaagttcagataaaaccgagtgaagggctttttagggagcgagttgaaaattcatataaaattngagtaaaaaaatatttctttcattaaaaggtccttatctttggctgggactgaaaaag

SEQ ID NO: 423903 - DNA, 382 bp, Oryza sativa nipponbare
cccacgcgtccgagtatatcctctcttcttcttcttcctcctcacaactcacaatatttcagagtagtatacctttcttgctagctagctagcttgttcatcgatcttgttttgaggtgttgagatagctaggaggtggcggcggcaacaggtttaacaagaggtactagctgttgctggagcactctcatttttgacctataggttgagccaaggcacagggaatcgccaaaattttgactgcgccatgtatcggttttttgtttatttgttagtgtttgtgtgttcgagattatgatgatcaattttgccatcgcaatagtgtacaatattgatctgatacttgctacatagtaactgttaagaatgaagctatatactt

SEQ ID NO: 423904 - DNA, 502 bp, Oryza sativa nipponbare
aagccttctcttttcaccattaaaggagttggttcagtttataaaacctttaacacacaagtcatcataatcataagtttctgtgacatgaaggatcagtgcccagaacctatcagttttgtcttctttgcaaaattaattagccattgagaacagatgaagtgtactgcagtctgatccatgacttacaaaaattgaatcctcgtgtattgtcaatatatgattcttgcaccttgagtaacgaatgtgcatcatcattaagaaaatactcctggcttgtagaattgtgcttttcatgactggccattcatcttactggtgaaatcgtgcttttcattcagggggttgctgagaacatgttgggtgataagaaagttacagttgtatttgttctaggtaaaccgtcttcgttcctcagttatgtctgactattgatcatccttaaacatcacaaatacttagggtaaataaactttttgtgtctgaccaagaatttgcacat

SEQ ID NO: 423905 - DNA, 482 bp, Oryza sativa nipponbare
  unsure (1)..(482): unsure at all n locations
cccacgcgtccgcccacgcgtccgcccacgcgtgcgcccacgcgtccgcccacgcgtccgcccacgcgtccgggcgccagatccatcccacgattgaaatcagttctacgaatgcactgaagttttcaatttcacaacatggtcgatgcacttcattatatctgaaatgagttaggaacttgctatcaaccccttgtttatggctgtaaatttgcaaaagataataattttggctggtaagtacaagtatttggtgatgtatatccttgctcattttcttaatctgcaaatgaaccaagtagatttgtttgatgtatatacttaataactttcttaagctgcaaaaggagccaaactagcagtgtcgttttatggcttgtaaatgccatttttggttttgcttncatgatgagcaggtctagtcagtagaatttggtctgtgtatatctctaaccactttagnntggttgggaatctatcta

SEQ ID NO: 423906 - DNA, 175 bp, Oryza sativa nipponbare
  unsure (1)..(175): unsure at all n locations
ggccccagatgtcagtgacaaaggcacgtacctttgaaggtagaggagcctcctgatcccccctcccacccgcacgccctcgccgccatgtcgtccgccaccgccgccgccaccgccaccatcgccgccgccgccgcgaagctcgccgccacccccgcccccgccccctnccggc

SEQ ID NO: 423907 - DNA, 302 bp, Oryza sativa nipponbare
  unsure (1)..(302): unsure at all n locations
cccatgcgtccgctagttctagatcggcgagggccgccctttttttttttttttttttttttttttttttttttttttttttttttttttttttttttttnnnnnnacnnnncantctttcttttttttattnnnggttncngtcncttggttcttcctttcttttttncccttccttgggggggggccccccnccctcnctgnccttcctttcnttttttttcctgcctggcttttttttccggcccctcttttcntttttttttttcttgcgcggggcgggcccnggcccgccccggcgg

SEQ ID NO: 423908 - DNA, 457 bp, Oryza sativa nipponbare
  unsure (1)..(457): unsure at all n locations
ggggattttctcatggtggagaatgtatcctgtgcatgtcgcttccagaatgcattatgtgaacttgtgaatataccaatgggccttccgtgcatccttaacttttttgtcgcggttccgtctttagtgatcagaagttagatagaagacttagattttgcaaaagtcaaacaatgatttctgcagagttgctaaaatttgttccaccttgttcaaactattaatttcaatttatatacttagctgttaagttgttccttgctgatgagaaaccattttattccttctgtcaactccgtattaataaccatatatatgtgttattaccatattgctttcatgctttgtttgtttatgcatctagcaaacaaatcaaaagtggcttaaataaataaagactggtgagtataagacaaataagttggtttgtaatattccttgngatttgggcatacta

SEQ ID NO: 423909 - DNA, 576 bp, Oryza sativa nipponbare
cggacgcgtgggcggacgcgtgggcggacgccggggtggcagggacgtatgcgttttgcaggctgagcacatgaagaatcccagttaatgtctctttaacttccatccataaggagactcgtgcactttcctgacaccctagcacaagttattacgctgtgcagacttttggctatacatggggcaagatgcagcaagtattttggattgatgatctgtaagatttgagttcagctcatgctcgttgatagcacatgacacatcggttgaataactgtgttcatttaactctggacctacatatacataatttcctcttactttgattccttggctcaaaaggctcacagaagcctatattttgcaattaagcaacaagaagcagggcttgatttgcattccgattcaggtaaggtaacagctgacttcgagttttttttttaattggtgcattatccatgaaacccttttccaggttccagtattcttttggtaaattttctgataacttaataggaaagacattaattaactatgcatcacctgctctatatataatataaccataggacattg

SEQ ID NO: 423910 - DNA, 436 bp, Oryza sativa nipponbare
  unsure (1)..(436): unsure at all n locations
cccacgcgtccgcacggatctgctgcagaagttgtctttggattcgcagcccaaggcggtggatgcggccaccgagcccgccggcgctaagaagcaggggcctgcagccagccagcctcttagcgtggcgattcctcctgagcggtccatcacgccagtgcttcaggattttatggatcccaacatgttctacctgccagcatnactactatggaggttacgacggatctgtgagcgagtgggatgattatcctagatatgtaaatccagnatggagtggagattaccccagcagtatatggagatatttatggaatatgggtatgctccttatggtgcatactcccctgctagttccccagttccaacggttgatggccaaatgtttggccagcactatcagtatccaacttcgtattatcagcctcctacacca

SEQ ID NO: 423911 - DNA, 478 bp, Oryza sativa nipponbare
  unsure (1)..(478): unsure at all n locations
cccacgcgtccgattgctcatagtaacatggggctccaagaaaagcattccgttattcggaaagaaggcaatattccagaaacagcaccaacaccacggaaatcctattctctccgacttttctcgtgtcgtggagatctaaccaggaacgtcatcaaccatcctaagataccaaagaaggaagccgtgtctgtcgagaaagacctagaatgcagtgagctaacaatgaatctagaacgagcagtttccatggtatctagttcagacagtcttacgcagtgcgaatatgctgttcaagaagttgccagagcatgttcaaatttgcgagaagatccaaaccttggaacttggctgtcatgtccatcctttattcaagggcttcttcgaagtcacattcacttccaaggatgatctagtgctggagtgtgcaattntgattatcggagaggtgattttaagcaatgaggtgaatagacag

SEQ ID NO: 423912 - DNA, 509 bp, Oryza sativa nipponbare
  unsure (1)..(509): unsure at all n locations
cccacgcgtccgcttgtgttcattggctaatcctgcttatataacttgattggctatagggagagcctagctaactaaacgggcctgatctcagtacttgttgtttctgcagagtgtgatacaagtatagcaacaagctaagatggtactgttgaattcagaagaagtctcttgcaatgatcatcatcaggtagatgttgttgcagcagccgggctgcagtgcagtggtgacatgctgggagacaagcagcttgtaagccaagtgatattggaaggtttggagattgaagagcctcctgcagatgagatggaggctgcagagaagaaggcagggatatctaggttaatggctggctatgtgcagcacctccaacataggtctgcctaccatctcggntatccactcaactttgactaccactttagccccctcgcaccttttctgaacttttccctcaataatgcctgtgatccatntgctaaggtcaaacacagtgttcactcaagac

SEQ ID NO: 423913 - DNA, 174 bp, Oryza sativa nipponbare
cccacgcgtccggataaaatgaggttatattagaactatttagaatttgcaagaacggggttcaagttctgtgcctgtgaatgatatgcaactaaaatgatctttgtgttatcttctgccttctctagttttctgcttcagtgcaaatggaagagctcagtgcttatatcccgc

SEQ ID NO: 423914 - DNA, 231 bp, Oryza sativa nipponbare
  unsure (1)..(231): unsure at all n locations
cccacgcgtccgcccacgcgtccgaccaaccccaaccccgcgcgcgctctcccctctcccctcccaccaaccccaccccatcctcccgacctccacgccgccggcaatggcggcgaccatggcgtccaacgccgcggctgcggcggcggtgtccctggaccaggccgtggcggcgtcggcggcgttctcgtcgcggaagcagctgcggctgcccgccgnggngcgcggggg

SEQ ID NO: 423915 - DNA, 300 bp, Oryza sativa nipponbare
cccacgcgtccgcccacgcgtccgcccacgcgtccgcccacgcgtccgcccacgcgtccgaacgtggtggaggtgaagaaggcggactacgacagctgcaccaactcgtcgccgatcgccacgcacacctccggcgacgacaagatcgccatcaaggccgccggccaccgcttcttcatctgcggcgtccccggccactgcgccgccggccagaaggtcaacatccgcgtcctcaagccacagcgctcctcctcctctgacgccccttccccggcgcccgccgcctccaagcgcggcgcc

SEQ ID NO: 423916 - DNA, 178 bp, Oryza sativa nipponbare
cccacgcgtccgagtcggcatgcctccgttccacgattacagagatggtggtgttcttgtgatggagccggcggcgtcggcggctctgttcggcggcgtcaggtcgcggaagcgggcgcgggtcaccgccgtgccgccctgcggcttcgtctccgccgccgcggaggcggtggaggtg

SEQ ID NO: 423917 - DNA, 62 bp, Oryza sativa nipponbare
ctctcgacccctcttcctcctcgattccggcggcctcgtcgccggcggcgggagggagaggg

SEQ ID NO: 423918 - DNA, 466 bp, Oryza sativa nipponbare
ctcgtgatcggcttctaggttcattttctgtaagttgccatgattcatgataaccttcttatttgaaccattctactgttctcagattgtgtgtgtttgttctttttcatttttcccttttctgttatacctctgcagtactcttatgaactgaatattgaatagcgtatgcacatggcgtgagctgtgaaattcttcaaaataatataatcatatcaataattgatactctggatctatgggtcttatctggagcagtccttttctgaaacactacatattattttaaacatacttgtatgttcatgccaataaaacaaatgcactttatggtatacttgtgaatagttctctgcaactgcatagcagattgtaaccactgaaatttttgttatgcatcaggtcaagcctgtgctgaacagagtgaaatttaccttggtggggctggcagtgtccctgattcttt

SEQ ID NO: 423919 - DNA, 388 bp, Oryza sativa nipponbare
  unsure (1)..(388): unsure at all n locations
cccacgcgtccgcggacgcgtgggctgctgctcacgcccgatcgtttttgcttccttcagatccaaaccaaaccaccacctgcggcgcgcgccgcccgcggcgagagcccggcgccgatgaagcaccatcatgtggcgcgggggcgcgccgagccgcggcggatgggcaacgccgccatggtcatcaccatgctcctctccctctgcgtcctcacctacatcaaggctcgctactgctccacccccttccccaaggcggcggaggagatggaggtggntggagatcgacgaggattacgacagcacgaggtacaagatgacggngccgataggggaggaggacttcgacccgaccaggccgacgtgctacgtcacgagcaagcgggcg

SEQ ID NO: 423920 - DNA, 401 bp, Oryza sativa nipponbare
  unsure (1)..(401): unsure at all n locations
cccacgcgtccgcccacgcgtccggtcaactggagctatgcgcaaccaaccgagctcccaaaccccaattctggtatcgatggcgttaagctcaaggatgggagggtggtgctggtatacaacagcacctcaagaggggtgctcaaggttgctgtttctcaggatgacggcgacaaatgggaggatgtgctgacactggaggagacccatggtgtggagttctcataccctgctgtaattcagacttctgatgggctggttcatgtgacatacacatacaaaaggactcaaatcaagcatgtcgttctacaaccaagcgaggtttgatgcagtcagtaatcagacatgtggatttgtgtgaggagtgaagtttgaactgtaggaanggaatgtggaatggg

SEQ ID NO: 423921 - DNA, 249 bp, Oryza sativa nipponbare
aataaaaatacgtacgtacatacacggctgatcatggagaggacgagttacactgtgcgctcctgtaaggctatgtatatgcgcgtgtgtgctagtcgtgtctttggtattttccttctttgttcttttcttttctataaagtgtgtgtcgtcatcagtgtgtggcttgtgctgcagtaataatatatatatatatatatatatatatagtactatgaaataaagagcagtgctgctatgtcatatagt

SEQ ID NO: 423922 - DNA, 420 bp, Oryza sativa nipponbare
cgatcgagaatacatggagtctgccgtggcgagcgcattgctgaagagcgtcatggggaggctcttcacggtgctagagaaggagtacagcaagcacagggagctggctcaagaaaccaactccctccagcaggacctccgcatcgttgcggcggccatggacgaccagctcctttccatcaggaggagcgacgcccgcacggccgtcgcgcggctgcacagcaaggagatgctcgatcttgcgcatgacatcgaggactacgtcgaccgcttcatccaccatctcacttgcaggcagcagtgtgctagtgccggccggaactcccttctggaccgggtcgcccacgagctcaagagggttcagagccgctcgagcttctccttttagatccaaaagctcaagaggcccttcaggcaagt

SEQ ID NO: 423923 - DNA, 353 bp, Oryza sativa nipponbare
  unsure (1)..(353): unsure at all n locations
cccacgcgtccgctcccccaagattccagggatattttctctccccctgctcccgtcgccatcgcaaaggagaaaaaaaaaaggtgagcaatcgcttctctgctcgctcggctcagatctgcgtgtgtacgctggtagatctgtggaaagaggttcaattttttgagcccagttcgcgatctgcggttccgcgagagtgaacggatcttccggatcgtggaaattcatcgtttgcttttcttttttttttttgtttcttctttggatgtgtctccgatctgaatccgcttgatctggacagaggaggaaggaaggaaggatgagcgccacggcggngtcgncgctgaacccgg

SEQ ID NO: 423924 - DNA, 408 bp, Oryza sativa nipponbare
gtgcttcgcaagttcagatggattggacaccagtggtcagagagatttagtgttgcaggcttcaagtaatcagaagttgaatgctggtgaaatagtcgaggaaaaggtgggggctgatatggggaataatctccagagtacagagtcttataactctggtagagatatttcaaatacagggtggaacactagctttggttgtacatcagatgtaaacactagtacttgttgtaatgaagatgtcaaatcaccgaaagaaatcaggagcagacgactttttgagctacttgagatggaattgctcgaagatataatagaaatgtttccaaattatcaccagagggaatgaacggggggggcatatttaatatgcaggcaggaactacagaaagaagctctagggatata

SEQ ID NO: 423925 - DNA, 234 bp, Oryza sativa nipponbare
cccacgcgtccggcggcggcggcggcggccggcggccatggacatggacagcgtggagtgcctctccctcccggactcgtccatggacgtggacgacgtcgacggcggcggctcggtgcaccaccaccaccaccaccaccacgccctcccgcctcacctccccgcgggggtcgccgtcggggtcggccccggggggcgcgcgttccccaaggcgaatgtcgctggggttggtgg

SEQ ID NO: 423926 - DNA, 423 bp, Oryza sativa nipponbare
cccacgcgtccgcccacgcgtccgcccacgcgtccgcccacgcgtccgcccacgcgtccgcccacgcgtccggtccagtcattcatctatgcacgtacattaactccttcaggtaatcatattgttgttattcgtggatggggtgggctctttctcactgttatattgtctaatatcatctttctcttttttcattttttgtccattgtgaattcagacaaaaaaaattcaaacaaggccttaatttttatgataaattttcattagattaattaggactttcaaaaggatataaatcaacctatagtattggaattgcgtaaggctttctttacagtcgtgtgatttgtcacgtttgttgcttgctgtggtcatacaaagatatccgtcttgtgttctgatagatgtattgacatcaatatt

SEQ ID NO: 423927 - DNA, 178 bp, Oryza sativa nipponbare
atcatcattcatcaatcgtcgcctgatcgcctccagcgaaattcttcctccatttctctctccatcgaatctcatcccagcagcagcagcagcagcagcagccgccatggattccaaggcggacgcggagtcagccacggccagggccgccacggcggcggcggcggcggagcacgcg

SEQ ID NO: 423928 - DNA, 397 bp, Oryza sativa nipponbare
  unsure (1)..(397): unsure at all n locations
cccacgcgtccgaattatttggcttagttgaattaggcccatatatggaaacacattttggcagtaaccaaacaagaatctagctattttttaccaaaataattggtagtaactactaattcttgccattgctaaaattttggtaaggataagattagcaaagtatcaacatgccctatgatccaagcaggaacatttagtcatctactcttgtaagaagcaaatttgattctttcacccaacctctttttttttttaactatcctggatttccgtttgttaaatcaatcagattgttttattttcatttttttttctattctgaatttgtgttgcttagctaaatgggattaattggtttcttnctgatttcatttattaatgctatgctcaaact

SEQ ID NO: 423929 - DNA, 356 bp, Oryza sativa nipponbare
  unsure (1)..(356): unsure at all n locations
cggaacgcgtgggaaaaaaaaaaaaaaggaaaaaagaaaaaaaaaaaaaaaaaaaaaaaaaaaaaaaaaaaaaaaaaaaaaaaaaaaaaaaaaaaaaaaaaaaaaaaaaaaaaaaaaaaaaaaaaaaaaaaaaaaaaaaaaaaaaaaaaaaaaaaaaaaaaaaaaaaaaaaaaaggggggggngggggggggggaaaaaaannaannagggggggaggggaaggaaaaaaggggaaaaagggggaaaaaaaaaaaaaaaaagggggggggggaaaaaaaggggggaagggaaaaaaanggggggaaaaaaaaaaaaaagggggggaaaaaaaaggaggngggggaggggggggaaa

SEQ ID NO: 423930 - DNA, 441 bp, Oryza sativa nipponbare
  unsure (1)..(441): unsure at all n locations
cccacgcgtccgcccacgcgtccgcaaaacccatgtatatttttactaccctacccctaatctctccctcccgcacaaaatctctcttttttcgccgccgcccctccacttctctttttcttcgcctctctctctctccctctcgccgccgccgtcaatcgcctctctgtcgcctgtggccacgaggaggacgagtagggccacctccctctctctctcatcgccgcccatcgcatccctctctcccgtcgccggatctaggccccccgcggccagatcggngaggagacgttggcggacacggcgctggcggaggaggccggggagggaggttggcngcggtggcttggtgcattcggacactagtatagtagtgtcataaaggagtagtgtatagcaagcgcttctaactgcatcaagattaactaaaatcctgtgatc

SEQ ID NO: 423931 - DNA, 324 bp, Oryza sativa nipponbare
  unsure (1)..(324): unsure at all n locations
ccgacgccgccgccgccgccgccgggatggcctgcgacctgcgcccgccggagcaccaggnggcggaccaccaagaccnccaccgaccacaccangggacgaacaaaaggcngcggggcncccaccccgcgaaccacaggcncgcngnggncaaagaaaccangcaanngcnacggggggggggggacccaaaggangcncnnnggncnccacgaggcaccaccaacaggggccccagaagcacnngangcagcagnacagcnngnngaaccccnaaaagcagcggaagaagaccaaacnggcangcggcnngcaaagaacagg

SEQ ID NO: 423932 - DNA, 185 bp, Oryza sativa nipponbare
cccacgcgtccgttcgaagatagccgggagtcgaggcattggacagcgaaacatactctagagagcttttcgaagagtgcgttgtccacttgaaagaaaggttaaaagagaaagagcgcttgagggaggaagaaaaggcaagaaaagagaaggaacgtgaagagaaagaacggaggagggagggg

SEQ ID NO: 423933 - DNA, 389 bp, Oryza sativa nipponbare
gtacatgttacaagttcaatcttccacaagcaattgagaaaggttgcaggtgagaggcaagcagaagcatgacaggaatattgatttacttacatgataaccgttgtgccattagccttggacaatcggaggtcattgagattaaactctgcttgcttcgcatcctccagtaagttatgttcagcatggatggtgactttggtccattgcttgagcttatcaagttacacagaatgtatgggcttttgttggtcatggacgttccttggacagttggagatcattgtgatgttggtgtaattgggcttactaagtgctctggtactcatgggcttcttccctgttttgacacctttttgttagtatcaattcagagagagacaatttgc

SEQ ID NO: 423934 - DNA, 469 bp, Oryza sativa nipponbare
  unsure (1)..(469): unsure at all n locations
agcgtccgggacacatccacacacaagcacacatgggagacaagtncaattaatcattgcagagagctagcagctaggttagttaggtgagcagtggctgcaaggggcaagccatggcatctgtggagacgtgggtagggttcgggtcggccctggccggcgtcggcttgctttggtcgaggatgcgcggagcgcgtccatgacgaggctaggtacatcatcagtagcctggtccccatggcgatatcctacttcaacccctacgagcagatcaccgtgtccgagtacggcgaggagcggttccgacgcaacaagatgtttgacgccgtctccacctacctgagccgcgtgtgcgccggtggcgcctgcaagctcaaggccgagctctgcaacaacggcagggacgacccaattgtcactctggacgagaatcaggaggtcgtcgacagcttcgacggcgcacgcatgt

SEQ ID NO: 423935 - DNA, 392 bp, Oryza sativa nipponbare
gtgttgaggtatccaatctatggtgggatgcaagactggaactattacatggaggttgctttgagttaaccctggaaattagtgacgtaaaatggccaaaggcagctgaggtatttttctttttttttgcatctagttatctgcctatcaatttccagataacttgataatcactttgttgtgttatttcttccaaattcttctatagcttcctgtcatatgggaacagaataggatgagtatgcttaatcttgctgcaagccttgtgaaggtaagacatttccacaggattcatttttttcactggaaaggttaattactgtacttctcgaaatgaaatggtgccagttggttttcggattgagggctcgagggtctcgtaggagggtact

SEQ ID NO: 423936 - DNA, 541 bp, Oryza sativa nipponbare
cccacgcgtccgcccacgcgtccgctcacgctcaacgcaaaggaggagttcgaatggttaaagaaggagtacacggttcacgagcaggtggtgttcggcaagatcaaagagggtgccatcatggccatcgagcatccgggaattgctgcaggctccacagcaattgctggaattgtgctcttcaaaaggccaaggagctacctgatccaacgggtgcgacgcatatttgtaagcaaggagaccctactttctggcatccaagctggcgtgaatcacatgagacaaactgtcaatcttgtgtccaatgaaagccaaaagttgctggatagagcagcaactgctgaaaaaagatttcagaaaggatggaacacactcagggaagaagggcgtgccattcaaagtgagctgaaccaaataagtgatattgagaagcaagcagtaggtctcaagagcattctcaatcagcttcccagagcacatgcaatctgagtttcaatcagagatatctggcctagcctctcaggtgaagaaggagaagaga

SEQ ID NO: 423937 - DNA, 352 bp, Oryza sativa nipponbare
  unsure (1)..(352): unsure at all n locations
cgggaaaataggtccggtcacaagacaaatgcagagtgcatacaaagtcataactgcaggttctggagtaacaatacccagaaatgccgatgaataacaggtgtatatgccttcctggtctacctgccggaaccagtataaagcaaacttgattgttagagaaataaatgtgaaaagaggcgtcactaaattgtcgtgccaattggaaaatgtgtatgaagcatgtactctgtttttcttagactcagtaggggttttcgccaaaattgcagatttcatttgtggacgattatgaattcaataaacatgtccaatgctagtaaaaaaaaaaaaaaaaaaaaaaaaaaanaaa

SEQ ID NO: 423938 - DNA, 360 bp, Oryza sativa nipponbare
cgccttcctctacccacgtcaccaccgccgaaaccctagaccctcgtcgcatccgtcctcggcggctagatcggcgcacgcattcatctccggcccggctgacgcttcttccttggctcgattcgcgacccaggtgggccgattaggatcagcagcggcccggccctcttcttagcccaattccaacagacccccactcgccgccagcctcgtgggacgacagcggcggagctcatctcactccggatactctaacgagctttcttggtgaatacaatcttgctactagtcatggcgaagcaggcctacgcgacgagcagcctagtgataggatatgcactctgctcgagcttgctcgcg

SEQ ID NO: 423939 - DNA, 216 bp, Oryza sativa nipponbare
  unsure (1)..(216): unsure at all n locations
cccatgcgtccgcccgcgcctccatgggttcncgccgcccccccacctcgccgccgccggagcttgccggcggcaaagccggcagcgagcagggaaggcggcggcgaggccttctttgtggcgttctccctcctcggcgcgacgtggacgagatgatgacgaagctccccaccggcgggggggggggcggcaacggcggggatgtgtggggaggcg

SEQ ID NO: 423940 - DNA, 251 bp, Oryza sativa nipponbare
  unsure (1)..(251): unsure at all n locations
cttggcttacttatctagatcaatcacaatggctaagcttgtggctcttaccttcgttgtcttggtgagcattggactagccaatgctggaagggtggctagatatgctagtgcaggcggtggcggcggtggagggggaggtggcggngggtcaaacggnggatctggatggggagggggggctggctctgggtatggccaggcaagtggcggtggagcatatgctagtggaggcggaggaggaggaggtg

SEQ ID NO: 423941 - DNA, 121 bp, Oryza sativa nipponbare
ttcctccttcgacgagagcaagcaagaagccatggcggactacaaccgctacggctacggcggctacggctccaccccgtcagcgccacccgcctcctcctacggctacaccaccacgccc

SEQ ID NO: 423942 - DNA, 370 bp, Oryza sativa nipponbare
ctcctcccccaccggcgacgccgcttcccctacccttcagccagcgcgccctccctctccccccaccgacgacgtcgcttcccctaccactcacccagggcgcccttcccttcccttggcagccggcgtctcagcgcggtgccctcccctggctctcggggcgtctcacctttctcgcacaacacacgacgttcacagctcggcgcgacctctcgagagcgggctcgctcctgacaggcggctattagttttgtggcagctggcggctgtgctgtctctcgtctggctcctgtggtgagtgtattggccgctgtgtgttggtgctgctgactatcatcggctgttgatgctgtcacaacaagtcctccag

SEQ ID NO: 423943 - DNA, 112 bp, Oryza sativa nipponbare
  unsure (1)..(112): unsure at all n locations
gccacgcgtncgtcaccttgattacccttaccctcctcccactaatcacgctaatttgctagctcgactcctagctaccttcatcagcaatggaggcgcctttcttcttctt

SEQ ID NO: 423944 - DNA, 85 bp, Oryza sativa nipponbare
cctgtttcttggttccccttcctctctcatcagcacacactgtcaccacaacagccaccaactcctttcaacttcttgatccggc

SEQ ID NO: 423945 - DNA, 81 bp, Oryza sativa nipponbare
  unsure (1)..(81): unsure at all n locations
tccacgcgtacgaccacgcgtncgaaatacagttgacggatggtgcagcaggctttgctcacattgatgggtctctcgatg

SEQ ID NO: 423946 - DNA, 151 bp, Oryza sativa nipponbare
  unsure (1)..(151): unsure at all n locations
cccacgcgtccgcggacgcgtgggcgcgaggcgcgcgactcacctgccgagccacgcgtcgcgcacgctgcggagatcgccttctnctggccgccgccgccggggggaatggggagcacggggcgcgacccggaggttaccctctgngact

SEQ ID NO: 423947 - DNA, 91 bp, Oryza sativa nipponbare
gccgccgcgcgttgccgccgatgcccgtgctgaacctcagctccgacagcagcggtgacgccgccgggcgccgcgccggcgagcctaccca

SEQ ID NO: 423948 - DNA, 144 bp, Oryza sativa nipponbare
gtttgtttccccacagaaaagggcgccagttcatcattcctcgccatcacatccacccgaaaaaaaacatgtcttttttactctctttcttcttcttcccccgatcccaaatccctccctgttcttgctgctgctctcgagttg

SEQ ID NO: 423949 - DNA, 91 bp, Oryza sativa nipponbare
cggccgaatccggtcgccacgcgtccgcttaaataatttgtcttaaaccctaagtttcagtttccacatcatgttcagagaaggctatata

SEQ ID NO: 423950 - DNA, 333 bp, Oryza sativa nipponbare
cccacgcgtccggagcatttgtaactgtttggaattgacagttgttaatctgagccattcaagtacatttcctttgttttcaaccatgttttactcaaaacagtccttagtttcttacggttgtaaccacacaggcatttggaactggtggctgtgatgatttgactgccccttggagatcatttggcatctccttggttccttggtaatatgttcaatcggctgtcatactaggaggccttgctccccagcaagttaccggttgcagctatttcttgttagtacatgttaaatgattctactcatttgttcatgtactgagggacggaggta

SEQ ID NO: 423951 - DNA, 204 bp, Oryza sativa nipponbare
cccacgcgtccgcccacgcgtccgcatgatctgagctgaatcatccatggcgttcttcaacctaacaatctctagggaagctaggtttttcgcgagttcgtgcaattgattagcggaaaatgctcttcttgggctagtcttgtaattttgtttcaccttttcattgtgattttattgtggagaaaatatgggaaatggtgtgtg

SEQ ID NO: 423952 - DNA, 252 bp, Oryza sativa nipponbare
  unsure (1)..(252): unsure at all n locations
aaagtggtgtatgctgtcaatattgaatgaaaaaatggcgtctgtggtactttgctttggatgtttttgttagtttctatgttatacagcttattaatgtgattgatgagttaatgatgactactgatgtgcatttcgtctttcatagttctcattttgggttagaagtagctatacacttatgtttgatcatttgatatgaatgttcatgtaaactatccttattnngctctctctttctctctctctctc

SEQ ID NO: 423953 - DNA, 188 bp, Oryza sativa nipponbare
cacgcatttttgcccccacgccgccgccgaggatggagtccaacgccgagaagcttcgtggtctcaccatcacctcgctggatgaggagagacgacgagcccgaactgccggaccgatccccacccgccagcggcggcggctgaggcggcggctcgggctacgaggacgacgatgaggaggaggagga

SEQ ID NO: 423954 - DNA, 91 bp, Oryza sativa nipponbare
cccacgcgtccgcccacgcgtccgcatagctccagcaatcggcggcggcggcgacgcgggagaggcggtccggcgacgatggtccacgtca

SEQ ID NO: 423955 - DNA, 184 bp, Oryza sativa nipponbare
ccgcgacctttctctttgtgtctccgccgccgccgcctccgccgttcgccgaatccgtcggaggcgagatggccatcaagggttggccgaacctttgggcggacaaggcgcccaaggcaataaaggagcaaaagttcgagagctacttcggccggcgcattgccgtacacgccagcatgagcat

SEQ ID NO: 423956 - DNA, 177 bp, Oryza sativa nipponbare
  unsure (1)..(177): unsure at all n locations
gagcaagatgcccttctgggacgcaaatccacaaggcagcagcttgttcatattgctcaaagaaagggcctctcgacaaagactcaggtttggaaaccatggngctgngccagcttgcttagtgatgtaatagcccagtaaaggaccaagaggaaattggaagtactttaattgagg

SEQ ID NO: 423957 - DNA, 376 bp, Oryza sativa nipponbare
cctcaatcgcgatctccctcgctcaatgcaaagcatcggacttcagcgatcaacgcttgattgccaaatggtctgatccggccgctccgctgccaaggccaccaccccgagatcgcgtggatctggctgctccgccgccgaggccttcaaccctgagcccttctgccatgagtccgcagcaggctccattgttgtgttcaccgcccgggcccctcaccgccagatcgcagtccactccaccgtgtagtcgctgcactgtgccccttcgcagctttgctgccgaggccaacgcccaggttgctagaccaccaccttcttcaacaccatattgtggcccttggactttgcctgattgccgtcacaatagaccgtcatc

SEQ ID NO: 423958 - DNA, 157 bp, Oryza sativa nipponbare
gcgcgtcgtgccactcgcgcctcaatgaccatgcctgcaagaggtccccacaggattgatgtgatgtgcctaccgtgttagctgctaagggactgagtggacgggctgacactagaaaggtttgatgcaaaattgtgtgcagtggctgaggaacgga

SEQ ID NO: 423959 - DNA, 156 bp, Oryza sativa nipponbare
  unsure (1)..(156): unsure at all n locations
cccacgcgtccgcgacaagagcaaggatctgcgggcgttcgcgctgatcttcccgtcgctgctgcgcggcgaatcgggccnagctcgagcgcgcgttcgagctcagcctgcacggcagcacccgcgactggtgggcgctaacctacacgccgagag

SEQ ID NO: 423960 - DNA, 68 bp, Oryza sativa nipponbare
tcgctcgctcgctggctgactgcgcccgcgcccgctttgctgcgcttccccggcacgcgacgaccaaa

SEQ ID NO: 423961 - DNA, 257 bp, Oryza sativa nipponbare
gtgtgggatatgcatgctcttcattactgtatatggcatgctcttcatcaaggttaaaccgtggatctattttccttttattattggtggctataaaatagattgatgctaattaatggcaagtttgcgaaaatactgaactctcatatctccaggattggctataaaatcggcaggtctgggtcatggaacaagaaaccctaatttctatttgggtttggttatggcccatctggatagatttattgtgaaacatt

SEQ ID NO: 423962 - DNA, 121 bp, Oryza sativa nipponbare
cccacgcgtccgcccacgcgtccgctccgctgctgctgctgcgttcggtagctaagcttagcttagcttgcgagctgcgtcgcctagctccgattggatctcgctctcgagctcgagctcg

SEQ ID NO: 423963 - DNA, 113 bp, Oryza sativa nipponbare
cccacgcgtccgctctctcgaaccctccctcgcctgctacagtaaaattcccctttctcgacccctcttcctcctcgattccggcggcctcgtcgccggtgacgggagggaga

SEQ ID NO: 423964 - DNA, 194 bp, Oryza sativa nipponbare
gcgttgtgctgcgcgagcccccggaggcgaggcgactccgcgtcgccttcccccccgagcgcgcggccggcgagaagggcgggaggcgcgggcggcgaggtgctcctcttctctctctgtgtctctcgtcggcgacctcgcgcggtagcctcctctccggtggtggtcgcgcgcgcgcggacggtctactaggg

SEQ ID NO: 423965 - DNA, 258 bp, Oryza sativa nipponbare
  unsure (1)..(258): unsure at all n locations
cccacgcgtccgtcttcttcttcttcctcctcacaactcacaatatttcagagtagtatacctttcttgctagctagctagcttgttcatcgatcttgttttgaggtgttgagatagctaggatggtggtgaagaaggcggcgacgatggcggaggcggaagcggaggaggagatgatgatgaggatgatgtggggntcaagaggcaacgagatgatgaagacgaagatgaagaagaagaatagagaaggggaagaag

SEQ ID NO: 423966 - DNA, 110 bp, Oryza sativa nipponbare
acgcccacgcgtgcggccacgcgtacgtccactcgttcgcccacgcgtgcgcccacgcgtgcgctagatctcgtattctctctctcacacgactcgatcgctatggcggc

SEQ ID NO: 423967 - DNA, 244 bp, Oryza sativa nipponbare
gcagacaattgaaagaagagaaaaaaaaacatcatgcaaatctttacttgctgctctctgacaagtggacctggcacactcaggatgaaattcaggaagcttgcatttttgtcggcaactgttggtaaagattttctagaaaatcttttcctgcctgcacatcctatctggtttggggtgatcaagattctgatcagctcaatgaaatttacttggagcttagctgggggaccaatgggcttga

SEQ ID NO: 423968 - DNA, 69 bp, Oryza sativa nipponbare
gccgatccgtcgccacgcgcgggcgctcctgcgcgctctctcttcgcgtgccaggcacacccacgcgcg

SEQ ID NO: 423969 - DNA, 259 bp, Oryza sativa nipponbare
gataattatctgattcatcagcggcatccacacttgacaatgcttattgggacccttattttagtgatgagtcactattgcatgaagacaattcactgtcagctgatttaagcagcagtcttcacctcggggattcagctaatccaacaagtggatccgccagaacagcaaatgtccaaagccacattttcatgggctcgaaccctttaccaggaggcgaaagttacagagcagaccattttttttcacgcatcttctc

SEQ ID NO: 423970 - DNA, 126 bp, Oryza sativa nipponbare
  unsure (1)..(126): unsure at all n locations
cccacgcgtccgnccacgcgtccgcttgaaagccttgccatcaatggcaagtaatgcaacaaggaatactgatcctgaccaacagggtgttcgattcaattccatggaccagccttcatgttttgc

SEQ ID NO: 423971 - DNA, 185 bp, Oryza sativa nipponbare
  unsure (1)..(185): unsure at all n locations
cccacgcgtccggtggccgcgccgtaccacctgctcgacacgctgcggcattacctgccgtcgaacgaggcggcggcggcggaggatgaggaggaggccgncgcgtctgcttcttcgcccacacccccgaccagctccgcgtcctcccgccctcgcagcaacagggctcgaacagcccgaggggt

SEQ ID NO: 423972 - DNA, 157 bp, Oryza sativa nipponbare
  unsure (1)..(157): unsure at all n locations
tcgcccacgcgtncgcccacgcgtccgggtgagttgagttggggattgattgattgattcggattgggaagaagaagaagcaggggagcatgggcagcaagtcgtacccgacggtgagcgatgagtacctggcggccgggggcaaggcgaaacgcaa

SEQ ID NO: 423973 - DNA, 394 bp, Oryza sativa nipponbare
gtcgaattcccgaacctcctctacactagccgcctcgtgacaacttaccattaccatcgccagcacaatgcgccgccaccgtccctacctcgacggcgtcgccgccgccgccgcaaccttcctcctcgccgtcctcctccacgcgccgctcgccgccggagaggacgagcctccgccatgggtcctgtgcgggccgtaccctcccagcggcaactactcgaagaacggcacgtaccaggtcaacctcgacctcctctccaccaccctccccaagaacacctcctcgtctccggccatgtacgccacgggcaccgtcggcgacgtccccgacaaggtgtacggcctcgcgctgtgccgcggcgacgccaacgcctccgcctgcgagcgctgcgtc

SEQ ID NO: 423974 - DNA, 67 bp, Oryza sativa nipponbare
cccacgcgtccggccaacgaagaaatcgttgccaaccaaatccacccgctcgtattcgtcttccccc

SEQ ID NO: 423975 - DNA, 123 bp, Oryza sativa nipponbare
cggacgcgtgggcggacgcgtgggcgccggcgcaaccaaccaggcagccagccatgcagtccgacttcgtcttccaccgcatcgaccgcgtgggcgtccacctcagcccgtcgtcgcgccccc

SEQ ID NO: 423976 - DNA, 303 bp, Oryza sativa nipponbare
  unsure (1)..(303): unsure at all n locations
gcaaccattgtcatcagcaacaaaaaaagtagctccacctggtacaaaaggcaaaaagactaagccaggccagaagataccaggtggctctgcaatcaagaccatgtcttctgctggccctagtggtaggggaccaattatgaataagaacctatcaggtggtcttcctactgaaccaatatcagtaaatccattaatcggacagaaggtcatgactcggtggcctgatgataatagcttntatgaggctgttataactgactatgatccacagctggatcggtatgcaactggttatggcat

SEQ ID NO: 423977 - DNA, 59 bp, Oryza sativa nipponbare
ctctcgcctcgccgcgcttaaaccctcgccgccttcccgctccgaacgcccctcccttc

SEQ ID NO: 423978 - DNA, 161 bp, Oryza sativa nipponbare
gcgcggatgcgttctaatgctaaactataacccagcacagcttcgcgcagcatgacgctcactcgtgtcacaaaccaggtcatatcttgacagatagtggctcagaagcaagatgtctctcacctgttcgagaagatcggcggccttcaccccgccatttg

SEQ ID NO: 423979 - DNA, 365 bp, Oryza sativa nipponbare
cccacgcgtccggcctcgtcgtcgtcccccccaaaaaaacgcgaagagagagagaaagcgagatagagagagagagagagaatcctgcggtgaggaaaagtcccgtgcccttctcgcctcgcagcctgccggtagcaatggcacaagaaagctggaaaaatgagtctgaggagactgtccacacaccggaggccccaatattgtgtgtaaacaactgtggcttcttcggcagtagcatgacgaacaatatgtgttcgaagtgctacagggactttgtgaaggtcacgacaatggctgccccagtagtggagaagaaggcatttacgccagcatcgtcttcgaagacaccattggagccagcaaag

SEQ ID NO: 423980 - DNA, 276 bp, Oryza sativa nipponbare
  unsure (1)..(276): unsure at all n locations
cccacgcgtccgatcgcaaatcttgatctgtgggtggatttggtgggttgaaaactccatcttttatggggcaaggctatgcgaaatccttgatgctcccatggagttctcctcccatggggcaagaggtgaagaggcagtatatagaggaggagcaagaggtggaagcgaagagaagtaggtgagaataggaaggacgaaggataaggagaggtggctnccncaccacttagtattaatgatcaaaataaaggtggactggcttgcacactgaat

SEQ ID NO: 423981 - DNA, 261 bp, Oryza sativa nipponbare
acgcacgcgtacgtcccctccgactccgactccgatcgatctccaccccgaatgcgtcctccttactcgacgagcacatgtagaagtcgcgcacgatgatcttcgacttctgatcctgtgaaatcaaacatcacgtacgtacgcacgcactaacgcgcacatgcatggaaaggaggcggcgtggtccttaacaaaggctatgatcggtaggatgcatcaacgattttttgattccacacgttagttcctgcaaatttttcc

SEQ ID NO: 423982 - DNA, 196 bp, Oryza sativa nipponbare
gcggccacgcgtgcgttcgcctccccctgaatcgtgtgcgtatcgtatcgtggcgtcatcagttcgcgaaaaaaaactcccggtcgtggtgccttgtgcgtgcaggatggcgttagatgccgtagtttttccgcatggccattttggctacgggtgcggaagggactcgacggcgtaccggatgccgtggtgcgac

SEQ ID NO: 423983 - DNA, 91 bp, Oryza sativa nipponbare
gcggttatctaatcttctctggtggtgtgcgtgatcaggctttagcagacacaagagcacgagaagcgcatatcggggcattgcgcatact

SEQ ID NO: 423984 - DNA, 242 bp, Oryza sativa nipponbare
gttctacttattcaggaaagccccaatctttatcatagcaaggaggtcatgtctgaatctgccctcgacacacatatagtggtggagagtcccgaccatgttctgccagatgctttcataagacatagtgctggtaaaggtacagctgatggagcaaccctagataacatggacccctaccgcccttttatagttatcaagatgtctgatatcgataaggctcgtgagcgggttaaaataaa

SEQ ID NO: 423985 - DNA, 156 bp, Oryza sativa nipponbare
cccacgcgtccgcttcgcgaaccttctagaaccccccaaaaccctatccatggcggccaccctcctctaccgggccgctggcgccgccgacgtcttcctgcgaggggcccggttgcaccacatactggtcttcttcctgcccaaggaaacccttct

SEQ ID NO: 423986 - DNA, 262 bp, Oryza sativa nipponbare
cccacgcgtccgcccacgcgtccgggaggagaagaaaaatccttggaaagaagcatgacgacgctggggaagaggcacaggaacaacagctcgatgcggcggacgacgagcatgtcggggttctcggtggacgaagacgaggagaccgatctggaggcgaggcttggcgctgaacggcgagctcttccagggtacttttatcggtgtgtacattgacaacgatggttttgtcatggtcatcatttgtaagctcatgttcgtg

SEQ ID NO: 423987 - DNA, 332 bp, Oryza sativa nipponbare
  unsure (1)..(332): unsure at all n locations
gtaatccaagagagaggtactaggcaggtagcttcatggaggacatcgtcgcttaccatttcttggtttcaattgggtgatgctgtgttgcaggaagatgcctcgtttagttatattccccttcttccgactagatttggggaatttggctaaagaaaggtagacgcatcatggggctcttaggtatggtgggcgactcattcggntgctcagctactggtgagcggcttgtctctgctgcaagggatggagacatccaggaggctatggccctgttggagcttaaccaccgacttgggcggtattcaacgtttgggatccggaactcaccc

SEQ ID NO: 423988 - DNA, 150 bp, Oryza sativa nipponbare
cccacgcgtccgcccacgcgtccgccgattccaacgaggcggcggagcagagcagaggcgcgggatggcggcggcgcaggggagcggagtgccggcggcgctggcgctgagcagcggccacacgatgccgtcggtggggttgggcgtgtg

SEQ ID NO: 423989 - DNA, 229 bp, Oryza sativa nipponbare
  unsure (1)..(229): unsure at all n locations
cccacgcgtccgcccacgcgtccggaagaaagaaaagctaagagaagagagatttcagagaggagaagctcgccatgatggccggtgtggtagcttggatggttaaagggaggacaccactcgtctggtaaagctcaaaggaagctgctttgtgctcttttacttccattgctttccccttgctgnctcttttcttttgcttgccttagtctctctctctttatatttt

SEQ ID NO: 423990 - DNA, 244 bp, Oryza sativa nipponbare
gcggccaccgcgactagaggccccaatggcgccaacggtggagatcagccacctctccttcacctacccgggcatcgacgggcgcccgcggaccggcgcgccggcggtgatcgaggacgtttgcttctccctacacgccggccaccgatgcctcctcctcggatccaacggcaccggcaagacgactatactgaagatactgggcgggaagtacatggtggagccccgcatggtgcgctagctg

SEQ ID NO: 423991 - DNA, 93 bp, Oryza sativa nipponbare
attgcatgatactgtgttgcaggaagatccctcggttagttatattccccttcttccgactagatttggggaatttggctaaagaaaggtaga

SEQ ID NO: 423992 - DNA, 207 bp, Oryza sativa nipponbare
  unsure (1)..(207): unsure at all n locations
cccacgcgtccgcccacgcgtccggtaaaaaatcgtctcctgcatgttcttaattagtaagtattaatctcaatgagttggtcgtttgctgcttctctatagtgaaagatgtttttggttcgataaactagtccatgagtagaattctctgtaatttacaactacagaagagaagggaactatatatgcaagcttatggttgatngg

SEQ ID NO: 423993 - DNA, 447 bp, Oryza sativa nipponbare
ggcggcggcgcgagatctcaccggcccctccacttctggccagtgacgagggcgcggagggctgcggcggcgcgagggctcaccgggcccctccacccccggcagtgtctcgacgacggatctggcgtcgggcgagcggcatcctcggggcctagcgaacaaacggcggcggcgcgtcctcgccccgccctcctcaccagcggcggcgccctccttagcctccaccggagctcgacggcgccgcccgaaccttgccaggcgtggatctggcctagagcttgacggcgccgctcggacctcgcccggcgcggggtggcgccgccggacatggagctctggcggcggcggaagaatccgagctcggcatggcatcctcctcccccggctttgtttcaactttttcagaatccgagctctgcacatgtgtttgttcagctttttgaagcg

SEQ ID NO: 423994 - DNA, 152 bp, Oryza sativa nipponbare
cccacgcgatacgaccacgcgtccgggcggtggtgtgcgattgccagtagggtgcgtgccgacgtccacggatgcttcccagtggattactgacctctcatggtgacgctagatcgcaaagctcattgggtcagtacggcagatttgagaca

SEQ ID NO: 423995 - DNA, 229 bp, Oryza sativa nipponbare
cggacgcgtgggggttcttgatcatttttatctaagttcttaatttcgatcgcgaagggccatggcgaaggtggcgttggcatgggcatgctacgctggctgcgggaagatcaaccctgacctggctcagaagatcaccactactatcactactgtatcaactgttcctagtgttgcacctgatatgtgttattatttttttatgcaaggcagttgaatctgctaggct

SEQ ID NO: 423996 - DNA, 77 bp, Oryza sativa nipponbare
cctgaaccaaatgagataactgatgacttgatacaattggcatcatcctatgaggcctcaagtggcaggcggttggc

SEQ ID NO: 423997 - DNA, 264 bp, Oryza sativa nipponbare
cccacgcgtccgcccacgcgtccgatccataacaccttcttcttctttcttcttactccatctccatccaaacctctcttcttcttcttcttttgctgtgcttgtctcgccgccgccgtccaacccaagagagaagccaagagcgacaagcaaacctgcaagtctaacaagccaagaaatccgagagaaatcgatccaaggaggagggcggtgagccatggtgcggagcaaggaggtgcacaagaagcccaaggacccgctgat

SEQ ID NO: 423998 - DNA, 420 bp, Oryza sativa nipponbare
catccctctagtgacttggccagcagtgccgacattcgttagacccaaagaatggtaggatcgtaggagatagggagaaagaagaaacagtttagatttgtgggatgaggtgaaatgtatcaagtccacagcatctccttttgcctgtggcagcagcacaggtgttgattgatgatgatgatgacatgtctaaattagtttttggttcttttttcccacccccagaaaattttgacctcacctggcggctgccgcagtgtgtgccggagaatgctgccatctttccctgctttgtaaagcttttctagcttctatcctagtgggggtggtacctagagaatgtcttttttcctgccctttttgggtgtaggaggttctcttgtttaaattagttcccttattgttgttgatttttttggt

SEQ ID NO: 423999 - DNA, 121 bp, Oryza sativa nipponbare
tttgcaaacccggccacctcctcttgtcttctcctcccccatcgctttccccattccgtcggcgaggccaaggcaggcaggaagccatgggcgacaacagcgccgccgtggcggccgtggc

SEQ ID NO: 424000 - DNA, 359 bp, Oryza sativa nipponbare
aaatagtctggttataatagtcccataaagagatagtccatgatttatcattagtattcccttcaagtttatatgctgctgtcaaattatcccataaatatattgctaatgctttcaaaagcatcattcgttcaaggtccattttctcttttccctgtgacataccaacatccaatatatgttattgcagctaggtgtattccttctcgtaagtgtgatcttagctggagcctggttgggtactggggtgccgtaagctggctacagaaaaggactgtgatctgtgtggtatttgtgagggcttctgatattctgagtatatctgaagtcttgacattcttgattcagatatatttgac

SEQ ID NO: 424001 - DNA, 364 bp, Oryza sativa nipponbare
  unsure (1)..(364): unsure at all n locations
cggacgcgtgggcaagtgcaaaggttcttcgccgccgccgggcgccatgctcccaccctgcacctgctaagcccctgttttttcttataagcagcaagcgctcgccggaaattccaagcagagagacgcacggatcagatcgccgacatgtctaggcgtttcttgtttcagaaattctcagtgctgtccggatcgatgcctaatcgtgctacctncgctcaaggaggagacgtttatgctatccacgatgctctccgacgtattagcacggtgctatccaattaccatggccttcctgtctctcaagcaaagtgcctgaattctattcaaagtcctcacgcagccaccaagataaaccacccaa

SEQ ID NO: 424002 - DNA, 210 bp, Oryza sativa nipponbare
cccacgcgtccgattcaatcccccatacccataggccataggataggagtatgggaggcggcgatggcgatgaggtgctgctgctgccggagccgcgccctcgcaggggcctatcctactagacgctcgatctgctgtagctcgccgacgtccgcctcagacacgacaccgacaagacgatctactgggtctgtgtacactaacattcaa

SEQ ID NO: 424003 - DNA, 113 bp, Oryza sativa nipponbare
aggatcgggagagcataggcacttaggcagcaggtaactacccaccgggcaaggatggccggagcgcgcaaaaaaaggctatctataatggcttcacatactacatgtaaaac

SEQ ID NO: 424004 - DNA, 396 bp, Oryza sativa nipponbare
cacgagcaatgtacggatgatagtgcctgataacaggctgtccctgtctgtattgactattgatattactagatggtgggacgcgccaatggcgcgccgcctgtagacagctagggcacaacaataggggaagaatagaaaaccaaatatcaagcacacaagagagaactaacaaggcggatagtgatagataggttcattacatatagataaatttacaggcagcagtctgtaaaggagcagatatatagatgttgtctcatatgtacaaacaaacgcagcatggacgacaagcagtttagtaaaatccatttgtcttgtttcgctgcaagcagttcagtaaaagcttctgtttgtgcaacccatggacgacaagcagtttaattaaatccattt

SEQ ID NO: 424005 - DNA, 209 bp, Oryza sativa nipponbare
  unsure (1)..(209): unsure at all n locations
cccacgcgttcgcccacgcgtncgnccacgcgttcggccacgcgttcgttttttttaatttgcagaagtgctcctgctttggatggtgcaaatagagatggattttgaggctgttatcaatgtacttggaaattgcaaaggatgggatttttgtttcccagtgcgattatagcttcgaactgattggcatagatattattggaggggga

SEQ ID NO: 424006 - DNA, 316 bp, Oryza sativa nipponbare
acggtgctgctgatcgtgttcctccaccttgctgctgtctaccgttctctgctgctctaccgccacggaggccactgaattgctgctgcacattacgtgatggcagatggagtacttgcgtccctggctgacgttctgagacaagagatatttcatttgtgctggaagagattgctagctaaagtcgatgatgattgatggtacgaatgatggcggcagtagtttctctccccctgtgtattctatttcgctatgctatgccttggttggtgatattcacatgggggatttaatgagaccgattgctttttcttta

SEQ ID NO: 424007 - DNA, 144 bp, Oryza sativa nipponbare
caaaagcctctcaagaaaacagcacaaagaaccagctgatcagctctcctacccgagaggagatcgatcgatcgatcgaagcatccatgcatttccatccaagaacaagcagaggcaatgaggccaggagcagggttcaacgcg

SEQ ID NO: 424008 - DNA, 216 bp, Oryza sativa nipponbare
  unsure (1)..(216): unsure at all n locations
cggacgcgtgggcggacgcgtggngcttcttcttctgccattccatgcatccaccgncgnctncgctctctcttcttcttcttcctaccctttgcctagttgcattcggagaggagaggactgattgattgattgatcgatcgatggccatcgaccacgagtcgccgttcaaggagctccccctcaagaacaggatgatcattggaggaggagggc

SEQ ID NO: 424009 - DNA, 89 bp, Oryza sativa nipponbare
  unsure (1)..(89): unsure at all n locations
cccacgcgtncgcaaaccattgcaactgcactacactgcagcacacacaccccgcacccaccaagctaagtaattaatcatcaatggct

SEQ ID NO: 424010 - DNA, 302 bp, Oryza sativa nipponbare
acgcccacgcgtgcgtccactcgtccgaccacgcgtacgttcacgcgtgcgattacacacatgaagagctggactggctctatatatctacttgatgatgccctgtgcctacgtgcactcggcgaggagaggaccgactgattgattgatcgatccattgccattgaccacgagtcttcgttcaaggagctcctgctctagaacatgatgatcatgggaagaggacggcctgagcccaaggaggaggagtccgtttcactcatattgctactactctcttctgctttattcctattattttt

SEQ ID NO: 424011 - DNA, 366 bp, Oryza sativa nipponbare
ctctctctctctctctctctctctccagtgttcctagctacaacgagtggtttactttctcatcctatgtagcttgtctgcattgtttgcccaagaggagaggttctagaagcttctacataatggcagtcgatcccgtgtctcttttgtgttcgtgctagagagtgagtgatgatgtgtgggattctatgggtatatatattggacttttcttgagtgtgtcctctaggaaattcggctttatgtgcaagataaaaggcaaagagactagattggtggctggggatgaggaagcttatctcttgagaaaagggatcgttgacatgaacatgacgcttaatcttattgcgtacgaagcacggcaca

SEQ ID NO: 424012 - DNA, 302 bp, Oryza sativa nipponbare
ggtcggattcccggtcgaccacgcgtgcgcccacgcgtacgattctcttctctctttccccgcagggacccagcggcgcccggcaaaccactcctctcccgctaagggagccgccgctcgggctcaggaggacgctcagggtttgcctctaatgctcactacccccctgcctatcaagatagttcaactgttaagcatcccattgctttcaacaattctatatgtgactaaataagaaatataggtatgataccattcttatgctattcaaatttcaatcgctttatcaagacattgtgttc

SEQ ID NO: 424013 - DNA, 312 bp, Oryza sativa nipponbare
  unsure (1)..(312): unsure at all n locations
cccacgcgtccgcccacgcgtccgcgagcggccgctcgcgatctataactagtcggacgcgtgggcnntcnctttatcttacttatttgtttttttgtggaaaaacattttttataatttaacatagtgtatggaaggtaatattttttttttcttgtttaaaaaacgcttttttcatttttcctttccttgggggggcaaggtttttttcttttggtacaaaattttggcccccaaaaaaaaaaaaaagggggggccctttttataggtccaaattttttatggggccgatccaaatattatatttttttt

SEQ ID NO: 424014 - DNA, 295 bp, Oryza sativa nipponbare
  unsure (1)..(295): unsure at all n locations
cggacgcgtgggcggacgcgtgggcggacgcgtgggcggacgcgtgggccgcggcgggcttccccaccccatcggaaggaagaagacgaccagctcgcgcgctcggatctcagccatggagaaggcgatcgatcgccagcgcgttcttctcgcccacctncttcccttctnctnctncgaccaatcgctcctctccgcgtcggcgtgcgccgccggggacagcgccgcctaccaagaggacttcgcctacggggacgacgtcgtcgtcgtcgctggctacaggacacccatatgc

SEQ ID NO: 424015 - DNA, 262 bp, Oryza sativa nipponbare
  unsure (1)..(262): unsure at all n locations
tacaatccactggtgcatgtgccattttgcttcatactgagtaaacccggagaaacgttcgtgtaagctcatgtatttttttttcctcgcaaaaacaaatctcatcaatttaacatcagtgtagggaaaggtaaaaattatataacgacagtatatgaaaagtgtaagctcatgtattttttttctcgcaaaaacaaaatctcatcaatttaacatccanggaaatacacaaatgtatgtactatagtcgaagtgaaataac

SEQ ID NO: 424016 - DNA, 295 bp, Oryza sativa nipponbare
cgccaccgtcgcacccccatctctcattcactcacctacacgcctcatcacctcccaagaccaccaccgccttccccatggccgccgcaccgtctccgtccgcttcacccggccgcatccgtcgcgcgctgcggcggctgctcgcgccggagcaggcgcctgtccggggtcatcagggcgcagtcagcgccggcttctgcggcggcggcggcgctgacgcatgacgacctgaagaggctggcggcggtgcccgcggttgaacaagtggagagcgggatggtgcttgggctgggga

SEQ ID NO: 424017 - DNA, 417 bp, Oryza sativa nipponbare
caaacccaaaaacagagagagcaagaatagaatagccagcatgagcagagcacctcctcgatctcaatcataggccggctcgaggcgccgcccaattcgttcctccacgatttcttttatccatcttcttcttctttctttctttacttactcttcttgggagttgtagaggatgtatctagttgttgctatgtttagttagtttttctccagctggctctcttatgttagcttgttccattgtcgtctattttgtcattctgattattgcttttcgtgtttttttcttttactatatattatttggtgtattttagtctactctttttgctttgtttcattcttctgttttttttttgtttcttctttttattgttctatttcgtttttttttctttctctaattttttttttttt

SEQ ID NO: 424018 - DNA, 52 bp, Oryza sativa nipponbare
tcggcaagaactcataatctttggttcttccatatccttaattactctcttt

SEQ ID NO: 424019 - DNA, 91 bp, Oryza sativa nipponbare
tcgctccaccctcgcgagccaagctaccattctccccgccgccgcagtacgccaagcacttcgcggcggggccgtccaacgcaaggcggtt

SEQ ID NO: 424020 - DNA, 85 bp, Oryza sativa nipponbare
  unsure (1)..(85): unsure at all n locations
acacacctttgatcgtgcatgtgacttatacagacggctnttagcatcgagattaggtgcagcattgatacatttaccactgaca

SEQ ID NO: 424021 - DNA, 101 bp, Oryza sativa nipponbare
gcagggccactaactgaagagattgcataagttatacaatctagcgctctcgcctgatttgctcacaaagacatacaatgcagcggccaagggggactctg

SEQ ID NO: 424022 - DNA, 73 bp, Oryza sativa nipponbare
  unsure (1)..(73): unsure at all n locations
ccaaaaccctagctcgagcgctcccttcttncctctacctttgcggcggtggcgggcggcgagatggctaatt

SEQ ID NO: 424023 - DNA, 277 bp, Oryza sativa nipponbare
tccggaatgacccacgcgtccggaatgtcacattatagtaagtactaatactgattgctcaatacttagttatcctgcttgcatttgaaggagtataagctcttgatttatgaaatgctctgtgtggcagtcgcctgttgtctgctggtaaaactaggatgagtataagctgggttacgtagatgttctcacctgactgcaaacatgttttactcttcagcttcaagtctctccttgagttgttaattttccatgtgaatgaattactgtctaccgt

SEQ ID NO: 424024 - DNA, 187 bp, Oryza sativa nipponbare
cccacgcgtccgcccacgcgtccgccacaggtcaaatcctccccttccttgcttgcaatcctagcaagctccaagatcgcggcaagctagcctcgagggaggcccgtctgcccgggcctcgggctccgggggcccggttcttgaggtttcttggtcgtggggtcgaggaggtggtgggtggaggttg

SEQ ID NO: 424025 - DNA, 244 bp, Oryza sativa nipponbare
gcgatcggtcgcgccgcgtcgttccggagcgtgttcgtgctcgcgctctccgtgggagtcctcgtctcggcgctgctgctgctcgtgcccacccgcgggcacgggttcctctccgacgaccccgtcgtgctcggagctgaaatacaggttggttttaccttggaaaagccagtttcattccttgctgctcacatggataaactagggggtgacatatttgaagaaattggtatttctaatagca

SEQ ID NO: 424026 - DNA, 130 bp, Oryza sativa nipponbare
accacgcgtccgtgagtatcttgctgctgcatgctcacacctcctggtgtcttgcttaccataaaattggcatgccattaatcgggagaggtataattcaagtgtggtgtctcctaacaccatctgaaga

SEQ ID NO: 424027 - DNA, 324 bp, Oryza sativa nipponbare
ccaagctgcagctgcgcatcgcaacctccgctctctcctaaaccccctctctccaatggccggctacaccgcaaatgccggctccggctacccctacggcggcgccggcggctacggcgccccggcaccgtcgtacggatgctcccacggccccttcggcccggcgtacggcgcgaagcctaccaaggaagggaagacctcctgctctgccgccccttactacggcggcggaggcggctacggtgccccgacatccacccagccctacagcagcggaggcggatacagcgcgccggcctgcaccagacgtactgcgcgccgtac

SEQ ID NO: 424028 - DNA, 199 bp, Oryza sativa nipponbare
cgaccgctcgtcgacttcccactgctctcgtcatatccagccggacgccctcgagcacgccacatgtacctcacctgcggtaccgtcgggcgctcgcgcgacggtgtggttcctccacggcggccagccactgggagggggcgctccggtggtcgcgagcgtcgtagtcatgcacccggtgggcacgggtcgtggacgt

SEQ ID NO: 424029 - DNA, 139 bp, Oryza sativa nipponbare
acacatttttaaaaaaaccaagaaaagattttcctcttctgttacattccttcttccttctccggccaccggagccgtagccgaattgtgcctcttctcctgctaggggagagggagagagagggtgttaatttttttt

SEQ ID NO: 424030 - DNA, 272 bp, Oryza sativa nipponbare
  unsure (1)..(272): unsure at all n locations
gatagttgtgttgcgtttcaccgggcaacaaggatgtttgcccgtgcagtttgaaagctttttgtttcgaattttctactggccgaattgcgtgtcttaatgatggtacctctagtcttgttttctctcttgaagataacttatctttgggtgctgtggtaagagttatnagcatttgggaatcttgaaagtaggttacatgtagagttattctaatttatatctcttacttggctagctcgcattaaaattaatttggctacttcaaatgc

SEQ ID NO: 424031 - DNA, 156 bp, Oryza sativa nipponbare
attatttcgccttttctgatcgtgtgttcgtggtggagttcatctcgccttcccctcttacggtactaccaccgatccttgtcaccacagaccggcgacggcttcttctcttctatctgagccggaggaggtataccacacctttgggatttgggg

SEQ ID NO: 424032 - DNA, 310 bp, Oryza sativa nipponbare
cccacgcgtccgcccacgcgttcgcccacgcgtgcggctactgacagtgctctttgtagtggttccagacgttaccattgtatatatgtatctatgtacatgtctaacttgatgcttatagagattatatttgttgattatgtattttatttgagagttattcccatatcaaactaatttagttgcgactctggagctgctggtatagtagagaattgaatggctctgctttttgtgagtgcaagcaattgtgttctctgggtttatactaattctcgaacttgatgatgttgggccggtcgttcatgac

SEQ ID NO: 424033 - DNA, 79 bp, Oryza sativa nipponbare
  unsure (1)..(79): unsure at all n locations
tcggttctagatcgcgacggccgccctttntttntttttttctcatccaagaaacaaaatccaatcacagatagtgtaa

SEQ ID NO: 424034 - DNA, 184 bp, Oryza sativa nipponbare
gctcagtactctagattacgcgattcgactggtcaggcaccctgcgcgaacgtgcgcggcatctcggccataaacctctcaggtctcgatcgtcaatctgagcatacaagctgtacacgcgtacccggcctgcgtcgggacataccggtccggactgttcctgctcatgcgctatacgcgccac

SEQ ID NO: 424035 - DNA, 123 bp, Oryza sativa nipponbare
  unsure (1)..(123): unsure at all n locations
caaatgttcccagagtcgcatgaaggatggtgcttctggtgaggttaacacaatttccatggagcgcgaggaaagacgcctaactgagcttggtcggaagatacttgaaacatntgggctttc

SEQ ID NO: 424036 - DNA, 68 bp, Oryza sativa nipponbare
aaagacgacctctctgaacttttcagtaaatcttctgaactgaacaagccgaggacgcacgcgcgccc

SEQ ID NO: 424037 - DNA, 292 bp, Oryza sativa nipponbare
  unsure (1)..(292): unsure at all n locations
cttgaaaaaannnnnnnnnnnnnnnnnnnnnnaaaaagacaagtggaatggatttaaaacaaataaaatggcacattatcaaggatgtgcgtggtccacgatttaaagggacataagtttgggggcccttctttgaaaaccatgtttctttctttggggatcccaaagtgaaattgttttgacggtggttttaaaattcatttgattggaaaacccttgacatttccaaactttataaattcgtggcatttccccttttaaccacttggcttaaaatcaaataggccccaac

SEQ ID NO: 424038 - DNA, 144 bp, Oryza sativa nipponbare
tttggttcttcaaataagaggaccattaacatactgcaagatgttagtggcatcatcaagccatccaggatgacacttcttcttgggcctccatcctcggaaagagcacactaatgcgagcacttacgggagctgataaaacct

SEQ ID NO: 424039 - DNA, 360 bp, Oryza sativa nipponbare
gacgaaacgagggcccccgccccgtccccgcgcccgctcgtcctcgtcctctcgctgcgccgcacctgtcctctactgtcatctactccctcgtcggctcgtcgccgtcccccctgccaacctgccagtgccaggggatctcagcaccctcacttcctccccaccgcaaaaaacccccacgaaaccctcgtgctcccttccgtgccccaccacccctgcactgacgcgcctcgtcgccacccgatcgatcgatcgcctcgtgaagcgccccgcgcgcggcccctctctcgactgaaatcggaaatccccaccctttctccaatcttcacctctcccgtacgacatggaagccgccgcgct

SEQ ID NO: 424040 - DNA, 62 bp, Oryza sativa nipponbare
ctaactcatctttatgaagaattagttcgatgacagtgcctcatgatccaaacaaaagaggc

SEQ ID NO: 424041 - DNA, 370 bp, Oryza sativa nipponbare
gtttaagttaacccgaggaaacccagtttggactcccatgtcaatgtgactcatcttcccaattaaaataggaaaaaaaaacgaatgattccaagcgctttattgtcggattcccccctcttcccctccgccgccagagcagcggttgttgctgtgcttctcctccgcgctccacatcacatcgcatcaccaccgccgcgacgagcagcgtgagatctcggtgccaccgatcgagtcgacgcagaggagagagagatcggggtttggttttttggaggggagagcggagtgttagaggaggaagaagccggttgtccgttttgcttctgaggtttgggagacggggttctacgacgtgctgggagtgtgc

SEQ ID NO: 424042 - DNA, 59 bp, Oryza sativa nipponbare
ccaacgcgtccgagatactgctggccttcaaggcgcagggcgcgcggttcctcgaggcg

SEQ ID NO: 424043 - DNA, 160 bp, Oryza sativa nipponbare
ccccttccaacaaccggcggcggcggcggggccccggccccggccgggaacaacaacaaggtggtacaatcgcttaacaaccttgaaggactcgaaaaaggaaagcaagtccggttccttccgcaaggtttttggacctgtggcctgggttgatggaatg

SEQ ID NO: 424044 - DNA, 173 bp, Oryza sativa nipponbare
  unsure (1)..(173): unsure at all n locations
cccacgcgtccgcccacgcgtccggaggaaaaccccaagccgcaagcccccccgccgcgagtcgtcttctcatctctcctccgccgccgccgcctgctgctgcatctctcgtcgtcgccggtgagggaagggaggggaggggggagggcgtgntggcggcggtgagggaggtg

SEQ ID NO: 424045 - DNA, 281 bp, Oryza sativa nipponbare
gcgacgcgtgccgatcatgcccaaatcaagagatcacatgctgcaggcgatggggaagccgcaagtgacaacaagaccaaggtcatttacgaggatgtctccatggagagaggggcttttctggtccagcaagcgatgaggtcctttttcgcacagaacattgaaagttcttagccaaggcttattttgtgtgcacaagacattatggaagtatttgttatgtatacaatgacatccatattttgtgtttttatttatagatctttttaaggaattgcttt

SEQ ID NO: 424046 - DNA, 397 bp, Oryza sativa nipponbare
gtgcgtgggccggagggcgagagtgaagcttgagccgtctcgccgcgggcgctgctgctgctgctgctgctcgcgtccgattccgacgagaggctgggaacttcaaagctgaaaaggactaatggagggtggaggcgcaaaagatggttctgcagcggcagcgcaaacaagggggagtggggatgatggttcccacaagccgctgccgccttgctgtctcaaggcgaaggctgcggcagcagattctgaggcaaaatgccatgccacagtggtgttagggtggttaacggaaccccgttcgcactctttgtaaacaagcatagagcaaaacttcaacaatccaatgtggcctggtgtaccttattcttttaaagttaatatatttctgttctatggg

SEQ ID NO: 424047 - DNA, 241 bp, Oryza sativa nipponbare
atagaattcgtattctaggcgttactactagtagctcgtacggctccggcgagccgccgcgaacgaatgccggtgatgctctagcggcgtccctcgccgacgcgcgcggggcggcggaagcaggacggacatgaggaagcagccgcagccgcaggggaaccgccggctgaggtggctccgggcgctgctgctggcgctcccgctcctatcggggcccggcctttacgccgcgctcgggggg

SEQ ID NO: 424048 - DNA, 187 bp, Oryza sativa nipponbare
tcacgcttcgtgtgcgtgttctcataggcgagagtgaattctttccctctttcacaataggggttcacatattgctggtgctcccgcccgattcccacgagaggattcaaacttgaacgctgaaaagtactaatggagggaagaagcgctaaagattgttctacagcggcagccaaacatggggagt

SEQ ID NO: 424049 - DNA, 53 bp, Oryza sativa nipponbare
ccagtacccccacgccttcggcacattctcctcgcgcgagaggggggaggaga

SEQ ID NO: 424050 - DNA, 224 bp, Oryza sativa nipponbare
gggagaggttatggaagaagagttagagtactactacttggaaagcgaggagttgggagcaaacacgatagaggctgatccctgtacgagacggcgaaatcggccccgccactattaatcgagtttgattgccatatataggtgtaggaacgggaccgggaaagagttcgatcgttataggatcattgatcgatcaattcatagttttgcgaagggtgaagcaa

SEQ ID NO: 424051 - DNA, 120 bp, Oryza sativa nipponbare
cccacgcgtccggccgaccacactgttcgcgtccccccgggccgttcttttcggagattccgttcgcgcgcgccgccgccgccgaagccgcccgccggggagcccgggccgaggatggag

SEQ ID NO: 424052 - DNA, 282 bp, Oryza sativa nipponbare
ttttcttatcattctcttttatgtaatgttcatgtttataataatataatttaattttttttatatcttatcttcttatacctttttttatatttttataactgaacatatgttgtgataatcgaacaggagagtattgaatcattttcactttttcagcctaatctaaaactctcatttcatacatctccttgaacagccaatcaaaacatagagagacaccatattatccatccatttggatcatatccatcatttctatcttgacaaatatttacacat

SEQ ID NO: 424053 - DNA, 342 bp, Oryza sativa nipponbare
catgggcggacgcgtgggcgagcagacgccgcctgaagcatccgcaggcgattgggtgattggcgagagctccgagcggtggcgaaagattcagcgggggggagggggagtcaagaacggctgcgcggtgcgcgcgtacgtgtgcttttcctgatccactaattctcaggccatagctgcagacaggcagacatcctctgatcctctccatccagagaggcaaaacggggcctcttatcattatggagcctccatgagacgagcgcaatgaggaagctgcgaaaaacagctcggcgacatgcaggaagaatgaagaacatcaaggccaagggaggtatctag

SEQ ID NO: 424054 - DNA, 517 bp, Oryza sativa nipponbare
  unsure (1)..(517): unsure at all n locations
cccacgcgtccgcccacgcgtccgccgtcttcctctggtgcgaggaccaggtcacggagcacagggccaagtacaaggacggcgacgagatccctccattagtggtatgcacatgaaacatttttctctttatcatagaagaagctgatgaaatctgacatgtagctttgtccactagtgcctgatagcatccattccaaacctctcatggcatgttccatcaggtggacatagcagaacatattcctctgcattatgagtacatcgcacaaaatatttcatcatgaagcatctattgctttaatcagcatgacacgcactcatggatcgttttatcacgaagggatatattaattataccgaaatgggaactgtgaatatcaagtcacaagaacggacaagtctttatctgattctaattcacatnttgtaaatgaatcgtctttgtgtgatgtagattggggtcagcgctccccaaggcagtggaaagacaactnctgtttcgcacttgattatc

SEQ ID NO: 424055 - DNA, 167 bp, Oryza sativa nipponbare
cccggcgccgttcttgtggtcgaccaacttggggcggtccttccgtaaggcggcctcgttcggcggcggcggcaagaagcagtacagggccgacgacaacggcgccgtcgccgtgaaggcggcggccccgccgcggcgggcgctgagcagcaaggagaacaccgtgc

SEQ ID NO: 424056 - DNA, 145 bp, Oryza sativa nipponbare
  unsure (1)..(145): unsure at all n locations
cgaatcgtaaaagctcaaaaaaaaaaaagagaaaaaaagaaaaaaaagggagacgcggccatggcggggacggggagcttcaaggtgacgaggatctcggagggggcggtgaagccggcngcngctactcctgaggagacgctgt

SEQ ID NO: 424057 - DNA, 226 bp, Oryza sativa nipponbare
  unsure (1)..(226): unsure at all n locations
aaaaaaaagggaaaggaaaggaaaggaaangggggggatggtgtggtggtggaaggacccttaccggcggcaaccggttccgatggccggtccaccgccgtttccgtcccaatttccggcaagcggcccccattacgcgcaccagttcctgaacacggggctctcccagcgcgggccctccgccctgccctacgcggaggacgtgaagtggcttgatccgcaacca

SEQ ID NO: 424058 - DNA, 147 bp, Oryza sativa nipponbare
cccacgcgtccgagaaagctctcatcttcctcttctcaaactccatctctctctcttcttcttcttcctctcctcctcctcctcgcttggaccccggattttttgcaagggggtaaggaggcgggaggagatggggagggaggagag

SEQ ID NO: 424059 - DNA, 356 bp, Oryza sativa nipponbare
  unsure (1)..(356): unsure at all n locations
gaggatactgagttgcagtcaagtcactcacctcatcagatctgcacagaagtcagttaccatgatgctatgcgccttcatacatggcctgctggagatgatcaacctctgcaccggcatgccgagaaacatggcgaaggatggatatcacaaaacggatttgggactgaaggtgatgcgtaatttgatgtctggaacagatggaagaactggacctcctagcaatgatcaccagtgcccacttggaacctaccctaactgccaaggagtntctcagagcaatcaacgaacagagcaagatgttggaggaaattgatcaaatttactacacaggtgatgcatgaacatatgtatga

SEQ ID NO: 424060 - DNA, 220 bp, Oryza sativa nipponbare
ccccacttggtttggcgtgctcggatccgaatccaaaccctcctccaagccctaatccaatccacccaacggtctcctcctcctcccctttccgtttcccccccgaaaccctaaaccccaacctcctcccccaacccgcggtttcccgcccgatccccaccgccgcgcgctcaatccgggttcgaattcgaatcccagctcgaggcgcccgctcgattcg

SEQ ID NO: 424061 - DNA, 317 bp, Oryza sativa nipponbare
caggcctgcattaactagtgccagggcagcaataatggatttgtgcgacgacactcatttcccatgggaggggtcccatactattgttggcagcaagcggaaagctaaggatttaatggcaaaaatctgaacttgtttaatggaacttataagatggtggaaaccacagttgatgttatgataagaaaaggaacaaacatgagactcgaaagctacgagtttttgagtgatttcagcatgcaacgctgtggactcctgactcacagagtccgaacaagggagttcatcgcaccaagtgatggcattactgctggttg

SEQ ID NO: 424062 - DNA, 358 bp, Oryza sativa nipponbare
cggacgcgtgggcggccggggcgcgtggcgtgggcgtgtggtggtgccgtgcgccgcgcgcgcgccctcttcgcccttgcctgccgcgcgcgtcgtccaatggcgccagcggccaccggcggtggcggcggcgaggacgacgcggcggtgccgctgctgctgcccgtgctgccgccggcggcggggtggtgcagctgggagtgggaggacgtggcgatctccgcggggctggtggcggtgcagctcgcgggcgcggcgtacatggtggtgctcgcgccggtgctggcgctcggcctcgacccgctcttcctcgtcaccttcggcagcctcgccaccggcctcttcacccttccctttc

SEQ ID NO: 424063 - DNA, 452 bp, Oryza sativa nipponbare
aacacgatatctcgtcttaagcgtatggaggcagaggataggggtacacttcttcttaggaaccgccaaaagaaattcagcattgctcaatgcctctcgtctgcctggtgtagatgccacttcctccatggaatggagacggtgtgcaactcctcttacaaactctccctcagacatctcaagtccacaaaagaaacgatcaaatttctggtgtaaatctccggaaatgcaatttgaagtacgttccagataatttaagtaaccaaaactggttataaactctctgttaatcaattgtggtgagatactaaatccatatgcttttaactgctcatgcagttgcttgctcagtggaaaatggcgttcatttgataggttgcccttctctcgaggcacaaattcattcagggcataatttagtccccaaatcaactcaggaacaatacgcccat

SEQ ID NO: 424064 - DNA, 436 bp, Oryza sativa nipponbare
cccacgcgtccgtaccacttcaaccctaatcccctctctctctcttccgcagaggtagagtgagagagatggtcagatagctagattgatatccctctctctctctcacacacatctctttttgcaagatctcttcttgttcatcatcttcttctttttttctcccccttttgcttcaccaatccatcttttgtcacgagatgtggccgagctgaagctagtagtagtggagcagcgaaagcaagtacgccaagaaaaaaaaaaggaagaagaaagaagaaagaaagaaagaaaaaaacgccagcttgagggcagagggcaaaagcggcgacgaggagcagtggccaaagctcagattcttcccgtgggctatttttaccacccgcatcccctctctttgagccccttggccgattcattcaccgacgcaaagatc

SEQ ID NO: 424065 - DNA, 458 bp, Oryza sativa nipponbare
ccaccaccaccacatcacccaccgcattcagcatcatcagcagccggaaaggaaggggaagcaagcgaggaagcagcaagaatccgacgccataatggagggagaggattagagcaaggagcagcgtcctgaggcgtgaaggacccacctttgctgctgttcttggagcttccctgccgaaatggcccataaaggagttcctaaatttggaagctgggaggatgaagaccgtggtgaacacctctacacacagtatttcgaaaatgcccgcaagggtaaatctccagggaggtctgttaatccaaacaatcatcatggagatactgaagcactctctaaagcctctcccctgcacgctggatctgatccagccatgagaaagcccaaggatgacagacgctcaaaccgaaaaagtgatcttcgtcagcacgaaaccactgttcgaaaaccatatgctg

SEQ ID NO: 424066 - DNA, 435 bp, Oryza sativa nipponbare
gttattacaagatcctgtgggtcatccatcttctcacttctcggcgctaatatagtacagggagatatatggagcaacaaatgtgtacatacggttttgctctagtacagggaaacactgcgaaaagcggtgctagaggcctattctctcagcattgtaaagataccatggttttttatgaggttctaatgcttggtgttagcattttgtaacgttcagatccttgcgatcgatggagctacctgtgcagccattacaggccatttccaactgctacgtagtaactaaaagcacattttgcagttacagaatcccaagtacttaatccttgggaaggggtggatcatcagcagaagctaccctttttccattataacgctgcttcccgaaggagaatggaacatatctgattttatcatatgaagaatctgtcgc

SEQ ID NO: 424067 - DNA, 410 bp, Oryza sativa nipponbare
ccgcctcgcccgcccgattccccgccgccgccgccgccgccgccgcggagctcgccggagaagcggcactcgcagaggagtggcccgccatggggccgccgcagcaggccaggggcggcggcatcgacatcgaggcgtgcgcgcgcccgatcgccgtcgaccaccgcatcaagctcccctactacttccgcatcgccgggaacctcctccgccaggctaagatatatcgagacgagaataatctcgtcgacctgtatgtcatcctcctgcgttactcgagcttggtttgcgagacgattccaaagcaccgtgactaccatacattcaagttgagagaagtggatttcttcaggcttgctccacataatcaatctaaactaattgaagtgctcagtgagcctgagtcactg

SEQ ID NO: 424068 - DNA, 123 bp, Oryza sativa nipponbare
ctccgtctctcctcgtcaccacaccactcctctcgccatggccgcgcactccgtggccgccgagcacgccaccattgccgtgcgcgcggttgcagacgtgccagcgcccagcgccgacggagc

SEQ ID NO: 424069 - DNA, 389 bp, Oryza sativa nipponbare
atgagaatcacctgaagttagagaatagacaaccataaaatttgaattaattggaaattcttaagagtgaattcaaggacctaggagcatagataattagcagtgttgcagacttttcagaatcaaattcttacttctgttcttactttttgacattcttacatgcttgcttctattgctgctaccgttcactttactagttggaaatcaagtaatcaacactatcatgagtaaagaagccctttttttttaatatctgttgaatacataagctacatctttatctcattagaataatactagaagattaatggacggctaacaagttatgacacatctactttcttatgtcctgacctagccaaagtaaagggggacactgcacatgc

SEQ ID NO: 424070 - DNA, 446 bp, Oryza sativa nipponbare
ctcctccctcacggtcacgccggctctctcccctcctctctccgccggcgctggctcccctcctctcctccgccggcgccggctctcctctcctccagcgaaggacggcgacgaactcgacgaagcgggttagagcgcggggcgggagacggcgacgcgggggcacaggagtgggagatggtgacgagttcggcggcggcggcgcgagatctcaccggcccctccacttctggccggcgatgagggcgcggagggctgcggcgacgcgagggctcaccgggcccctccacccccggcagtgtctcgacgacggatccggcgtcgggcgagcggcatcctcggggcttggcgtagaagcaacggtgggaagacggcggcgacagcgctccttcgaggggtggcggcggcgtgatctgaacggtgcgggagcttagcctcccggagct

SEQ ID NO: 424071 - DNA, 243 bp, Oryza sativa nipponbare
gaagttcatcggcaacacccccatcgtgaagcacctgatgcggcgcggccagagccagcatcacagcggccagctcgcgtcgccctccggcggcgcgccgcccaaggccgagaagccgtcgggcggcaagaagaagggaggctggctcaagaacatcaagtccgtcgccatcggcttcatcgacagtggcggcaacagcaagtcgaccacattcccgaccaccttcttcgccggcgccaacgc

SEQ ID NO: 424072 - DNA, 323 bp, Oryza sativa nipponbare
acttgtcatccgaccgaccgtgcgagagaggggaagtctcgtggcgactgtaccggtaccctagcttgcgcgcgtggtacatggggatggcggaggctaggtccagggagcacggcgggggcggtggaggaggcagtggcagcgcggggaagatcttcgtcagtggactgccccgtgacaccacggaagcggattttgtagaagcatttctggccagattggagaaatagttgattcagctataatgatgtataagcacacatttcacccgaggagctctggctttattacatattctgacgctgccgttgtggatagagtga

SEQ ID NO: 424073 - DNA, 389 bp, Oryza sativa nipponbare
cccacgcgtccgcccacgcgtccgcgcacgcaggcgtcgccgtcggcgagcggcggcggcggacggtggacggcgcgtgcgtagcgagcagggtgcgtgaggacggagctaagctagctgctgactagaaggtgatgcaaccactcgagcacagagaatattgagtggattcctccctcctcgccctctgctcgacgggcggtgcgtttctctgtcgctcccatccccagccttcacctccgccttgcttctcctgaaatccggccgtccagatctctgccgtcgcagcaccgctccactccgagctccggcgaacagccggcaaatcctataccctatacagcgaggggttggagcggcgcccgtcgtggtggaccggactggcggag

SEQ ID NO: 424074 - DNA, 393 bp, Oryza sativa nipponbare
acgcgcgagccgcgggtggagaacgaccacgccaggcaagctacggctgacatagagcatacatcaatcgtagacaacatatcagatcacgatattcacatggtcatggtggacgcggtcgccatagcggaggacatcttgtgctggggcacgacggagcacctatactacatcatgccgatggcgccggcaaggcttcgggcccagctgagacgacgatggatcggtgggccaaccctgtactatccttacggtaacctcatcgacgtgaggagccacacaggcgtccacccagcagttaggctacgaaagaacgaccacgtgattgcgacatttttcgcgactaccagttagccgtctcacgcttgtactagtattggaaaaaacaatacg

SEQ ID NO: 424075 - DNA, 392 bp, Oryza sativa nipponbare
  unsure (1)..(392): unsure at all n locations
gtttcattccatctccaccagctaaaagcaagccagccagccaagctctgtcttccatcttgcatacatcaacgtcagaaaaatcatcagatcgagatatcgacatggtggtggtggtggcggcggccatggcggcggcgagcttgtgctgcggcgtggcggcgtacctctactacgtcctgtggctggcgccggagaggctccgcgcccacctgagaagacaagggatcggcggcccaaccccgtccttcccttacggcaacctcgccgacatgaggagccacgccgccgccgccgncggcggcaaggctaccggagaaagacgacaagaaagcgacatcgtgcacgactaccgggaggccgtctttcccttctaccagaattggagaaaa

SEQ ID NO: 424076 - DNA, 348 bp, Oryza sativa nipponbare
cccacgcgtccggcgcgatgtcgtcgctgtacccgtctctcctctcggtgagcgagagccctgccgagtaccggcaggtcggcggtggccgctacgcgggggaggacgtcgtcgacgacgacgacgacatggctgccgtcgccgacgctgagtacagctacctctccttcgacatggacgacgtcgagtattacacgccggaggtgggcttccactcaaagcagcacaacccgccgccagttgctgcggcgccactggaagccggaggaggcagggagcaaagccggcgggaagccgccgtcaatcttggcaagatggacaggggaccggcgccggtgagcggcggcg

SEQ ID NO: 424077 - DNA, 383 bp, Oryza sativa nipponbare
ataaaattggggctaaagtgctgcactgtcagtgtctattgctattccatatggcatcctgcaggtattgaacaaattgggcaatttctcaaacttgggaagcacacataagagagcagattaatatgctttttagtgcatgtacaattcatacatcagaagttaaacaccactatatttatcaatgtattcttgagaagttaaataccatttcttttgtatggaatcccaacttcgcctaagcatttgcagctagaaagtgctcatctcattccttttcttatgtggtctttttcaaaaaaaaaaggaggaagaaaacctcaccagagatggttgcagtagcgattaactctatgaactcatgtcatatcttaccagcaagc

SEQ ID NO: 424078 - DNA, 291 bp, Oryza sativa nipponbare
acctccgccgcctgcgcgcagctcggcccctaccgccgcggctgctccgccaacgcgcagtgccagttcggcatcaactacggcgacgggtcgacggcgaccgggacgtacagcttcgacgacctcacgctgggcccctacgacgtcatcaggggcttccgcttcggctgtgcgcatgccgatagggggagtgcgttcgactacgacgtcgccgggtcactggcgctcggcggcggctcgcagtcgctggtgcagcagacggcgacgcggtacggcagggtcttcttctac

SEQ ID NO: 424079 - DNA, 167 bp, Oryza sativa nipponbare
gagacaaaatacgctacaagatgaatcctgtaaaagaggatatgctacaaccgatgtacagatgatgagctctctccaacaaatgacagacacaattttgtaaattacatataatgaacacttcctatacttcacataaaacgagtggcggcaaaacgcttaaaaat

SEQ ID NO: 424080 - DNA, 428 bp, Oryza sativa nipponbare
ctccattctatcccgctggctggacatagagagagcgccccactttgcgagttcgggctcggtgccctgcggccgccctacatcccggcgcgcggtactgctgctcccgacggattctgaagctgccggcctctgcgacatgcagcgcatgacacccgttagggagtgtacaggctgcccgctgcaagctgctacagggctgcatccgccgagctcgagagcctgaatgctgtcccattggacttcaaggggaagcacctcgaggaccattttcatggtgctgagcagacgcttacgaaaaatgggtgggaaccgtgacagaagaaacggagctccgtatgacagcacgacatcaggcccaatgcttgagccaccagaggcttctgtggctgcaacagagccgacagctcttgcaagactgcacccga

SEQ ID NO: 424081 - DNA, 228 bp, Oryza sativa nipponbare
ctctctctccaaccccaccctttctccccaccatggtggcgatctccgagctcgggtgagcggaagagaaagaatgcggccgatttgaggagggggatggggttttcgggtggatttgtgaggggatagattaagagtttgtgcttctctggtttggtcggaggaggaggagatgagctcgtcgtcggcggccagcatcgggccggcgaagccggccgccgccccccg

SEQ ID NO: 424082 - DNA, 446 bp, Oryza sativa nipponbare
catatatatcgtatcgatcaacgacgacgacaatggcggccgtcgacaatgccccgccgtcgccagtggtcaccgtcacctccacccgcaccgtcgccccagccgccgccaagtgcgtcctcgccacattcgacctcccctacatcaccttctactacaaccagaagctgctcctctaccgcctccccaacggcgcctccgacttccccgacgccgtcgcccgcatgtccgcctccctctccgacgccctcgcctacttctacccgctcgccggccgcatccgccaggacgaccacgacggctccctctccatccacggccaacacggcgccgaggtcatcgaggcctccgccgaccatgtctccgtcgaccaactcgccggagaggagtgctcggaggaggcggagaaggtgatgcagctcctcgtcccctacaccggcgtcatg

SEQ ID NO: 424083 - DNA, 371 bp, Oryza sativa nipponbare
gttgtctcgtctcgtcagttgagttgagtagtgttgacttgagattcatcacatctgagtgagtaagagtttggaaaatgggcggcggaggagacggcgaactgtccccggcggaggccaggctggcgatgatggagctcgccaacatgatctccgtccccatggcgctcaccgccgtcatccgcctcggcgtccccgccaagctctgggcgggaggcgccaacgccccgctcgccgccgccgacctcctccccgcgggccacccggacccctccgtcctcgagcgcctcctccgcctcctcgcctcccgcggcgtcttctccgagcacaccggatcatcctccccctccccgcgccgcttctcgctcacc

SEQ ID NO: 424084 - DNA, 304 bp, Oryza sativa nipponbare
cccacgcgtccgctgacgcttgggcggtcgcgtggtcatctcctgccactccagctctgtcccggaggcaagaactgagcagcggatagctcgtcgtctctttgtcagcttgtcctcagtgctcaccaagctgttcttgcagagaatacatagccaaagagctaatgtcagctcccaccatgaagtacttgctggtgacaggaggggtggtgagcggccttggtacgggcgatacctccagcagcatttgcttagagctcaaggtctgttggcttagactcaccactatcaagattgacccata

SEQ ID NO: 424085 - DNA, 470 bp, Oryza sativa nipponbare
ctccccaaccggaacacccactccgacgagaacgacatggacgccggcggcgaggaggagaagcaggagcgccaccgggttgatggtgcttcgccttccatggtcgccctccgctccgacgtcctccacgccaattgctgacgctgaagagaatttgggtgaggttgaagtgcgtgaggcccatatagccaaatccttgtacttcataagggttggggagaaggtccttggagggaagtctcataatcaggacacttctgaattggtcacactgtcatgcaagaatatgataaaagatcacatggtattgacttcctcaatcgggactttgttgtccgaggtaaattgatatacatgctcggtgtctgtatgaagtgcatggcaatgcatccggaagcatcagctgttgccccaggtcttcttgatatgatcagatctagagctgtttgacaacatcctgaagcatatgt

SEQ ID NO: 424086 - DNA, 420 bp, Oryza sativa nipponbare
cgctggtctacgagttcttggagaacggctcgctggagaagtacctctacggcggcggcggcgaggacagggggaagaagctggagtggcggacgctgcacgacatcgccgtcggcacggcgaaggggatcaggtacctccacgaggagtgccagcagcggatcgtgcactacgacatcaagccggcgaatatcctcctcaccgccgacttcaccccgaaggttgccgacttcgggctggcgaggctgggcgagcgggagaacacgcacatgtcgctgacgggcgggcgcggcacgcccgggtacgcggcgccggagctgtggatggcgctaccggcgacggagaagtgcgacgtgtacagcttcgggatggtgctgttcgaggtgctggggcggcggcggaactacgacctcgccgcgc

SEQ ID NO: 424087 - DNA, 175 bp, Oryza sativa nipponbare
cggacgcgtgggcgatggtgttcaaatactgggtacctactttgatcgtgtgaccctcctgtgggaggtgtatttctccatcgtgtgaatgtttctcatatctcctatttgcgtgcaaaacatccgtgtaacattcacaaatcaccgtgttaataccactggtcagactgataat

SEQ ID NO: 424088 - DNA, 380 bp, Oryza sativa nipponbare
caatttttacagagcaaaaccagagaatagaaaccagctcgtctttccgccgcaccgggccaggtgtacccaaactaccgtagccaacgaagacgcaaccaccgccccaaagcctccaacccttcgagaatccatctctcgtcgcctcccctctcctctcctctcctctccgccgccgtcccgtttcctcctcccgcacagattccgcagtcgagtcgcactccatcttccccaactcgccttcccccgctctataaatccgtaaccaaaaaccccaccgtgcaagccaagtaccgagatccccaacccaacccaagccgcgatgatcctccgcatccgcagccgcgacggtacggaccgtatcaccgtgccggacccgg

SEQ ID NO: 424089 - DNA, 148 bp, Oryza sativa nipponbare
gcttgctgctccggtgctggccctttcttctttcttctccgaccttgcgcctaccttaggctgaagattgattacatttttggacatgacgcgcaattgactgtgcttgttatgaagatatatttaggatgtcttcgttgacgattga

SEQ ID NO: 424090 - DNA, 336 bp, Oryza sativa nipponbare
cggacgcgtgggcggacgcgtgggcgcgccgccgccggagcgagccagtgagcgatggccgggacgggcggaagaaccggcgagccggaagccaccggagtggaggcagtctccgccccagagcgctccgaatccagccgatgcatgccgttcgaggactgcgtcgccggcatcaagtcgtctctcaaaagtacgagcgcgccgccgtatgtgtgtatgcttgccgtcgatgtcttccaatttttgatcttcttctttttgtcctgacaagagttcctcatacgagctcggaacgaatccaaatccgacggggcggttcctggtggagcggatgga

SEQ ID NO: 424091 - DNA, 135 bp, Oryza sativa nipponbare
tcgccgccgccgccgttgtcgccgtcgccggagaagaagaatgggttcgttgccggagcagttcgtcttccgctcgaggctcccggacatcgccatcctggaccacctcccgctgcacgactacgtgttcgagcg

SEQ ID NO: 424092 - DNA, 141 bp, Oryza sativa nipponbare
ggtatcttgtctaacaggttgattattagttgtgccgtggttgttgtactgtctgttttctaattctttttccttgtatgtattcataaaatgatgatgtactataatgtgcctactgaactgaatttgtctttgcgagtg

SEQ ID NO: 424093 - DNA, 250 bp, Oryza sativa nipponbare
acccacgcgtccggtgaaatcttctgataaatggatggacagcacgagtatggtggagatacccatcacatctaatcatcatttgtcaaatagcataagcagcaagatggctcatattccaaatgttccactgaaaattacgttggacaatgccgatgaaacccagattttgcatcatcttgctactgcatgccatgctgtagctgattgtgtaaatgactgcaatgatctcaaaagtaggattcacgag

SEQ ID NO: 424094 - DNA, 331 bp, Oryza sativa nipponbare
  unsure (1)..(331): unsure at all n locations
gccgcaggaccggnccggnttccnnntcactcacgcgtccgcacctgcccccccccccctcccccgcgccccgcccgcccgcccgcgcgccccacaccgagaggcgcctcgccaccatcaccacccaccccgctcctcgcgccgccgacgcgccacccgccggcgacggcgaggaccgcgccgccggtgtcatcgtgccgtgccgatccctcccccggcggatccacgggctgagccgatcccgtccgtggagaggagaggaggaggggagggggaaggggagagggggggagatggagaagtacgaggcggngagggacatagggtcggg

SEQ ID NO: 424095 - DNA, 396 bp, Oryza sativa nipponbare
gattaaatggcagcttgctcataacattctaaaagattctcggtcaaaccaacagattcatttcgagagtgatatctaacagaacaaaaggcataacacagccatgtctagaacaacctcagctacaatttcataaacaaaaattctcattgttcccacaattcaaagaccaacagtgaagacgacccccgcgcattgcatctcataagccattgggcaaaacaatatgctccgtcccgatcaagctttactccatggaagatgcgccaccaccgaatgcgccaccaccgccacgaccaaagccaggtctgctacccctaaaagatggctggaactcagctggagcaccacccttctcgccaccaaaatcacctggagcaacacgtgggccacccc

SEQ ID NO: 424096 - DNA, 574 bp, Oryza sativa nipponbare
  unsure (1)..(574): unsure at all n locations
agtgtcttccttccaaaacatattattgtttcttgtacttacggacttaccctcccttgataatcatctcaatgtctagtttggtccgatgaataagcatttagctagaagcctcttctcatgtttcacaagtgtgcatccccatcttacatgtcttcctgtttgagcaatgtaattgtgcaaatttgcacttctaatgtgatgatcttcagaaatcatgaccttaagggacttcaaagagtttttgtgtgttatttcatactagtatacttgaactcatctttcaggatattgtgtgtctcaggcagaagcagacatcagctgaccttctgttcaaggatgatattaatattgaatagcacgtttgcaggtttaaagttgtgtcacgagataggtcttgaaacatataacacctatggaaatggtatactgatctagtatggnttgcctgggggatggggactngcatgctgtgtatactccatgcgacatagcattagcctctgtgaaaatccagaattattatgtacttgatataaaaaacatgggccaaaactaaataagtttctgagta

SEQ ID NO: 424097 - DNA, 445 bp, Oryza sativa nipponbare
  unsure (1)..(445): unsure at all n locations
cccacgcgtccgcccacgcgtccgggttgacatggctggccttgagaaatcaaatgaaatgctacaagaggaagtacataaaatgcagagtgaaatggaagttcttacaagcaaggagaactctgcaattgacatcaaatcttgtgatgaagacatcaaaagattgctggctaacatgcaaatggccatcgtgaatgcggctctattcaaggagaaggtccttgagctcataataacatgtgaaagttttgagataagcagtatggtacagaaggaggtgctcaaggaagagatcacccgtaggaactcatatgtagatgagctgaaggacaagctgaatgctgttgagattgagaacagaaggctgaaagttgattgaatggagattttacagtgttggngtattgcagaatgaagtagtgccctagagaaacaaccttatcct

SEQ ID NO: 424098 - DNA, 299 bp, Oryza sativa nipponbare
ggcgccttggaacttgttttttttttctcttgtggcgatctgtgcgaagaaatcgaagaaccctactacctctgttcccccagattcagcgtcgattccccaaattggctcccgcggccaggctgagatggtacggcttccttccctgtgagtttgctcggtcttgttctcagtcatttatatctatttgtcagataatccggggctcgccttcgtatcgtagtgcgtttatactttagtcgatggtgctggagagggtccggttttgtgagctctttaggcctattaactgtgcatca

SEQ ID NO: 424099 - DNA, 102 bp, Oryza sativa nipponbare
  unsure (1)..(102): unsure at all n locations
tngccggcgtccgcagaggtgtgtgctcggacaggcacagagatcgcaatactctaacatgatatagcatatgtcgtgctgctctacccaacgatcgataat

SEQ ID NO: 424100 - DNA, 262 bp, Oryza sativa nipponbare
cttttatgcaagagcgcaaccatgggccagaatctcaccccttgccggaaggaactccagagctacagcggttaattgcaagaatgggagcacttcaagttgctattcgaaatgccaaagatcttcatgatcaggagtcaaccaagtctgctgctacgttggcagcagcacacagagatattcaagagcttaaagcaagaggcgggtcgcagatggaggcaagggaaatatactccgacaatgagaagctgaacaacgtcga

SEQ ID NO: 424101 - DNA, 241 bp, Oryza sativa nipponbare
  unsure (1)..(241): unsure at all n locations
tcgtcccgccgggagcgaggcggcggcggcgcaggaggcggagatggacccggacctctcgggcggtggcggtgggggccccagcttcgagttcgccttcaactcggtcaacttctccgaccgggtgctccggatcgaggtcgtcncgggggacgacgacgacgacgacgaccacgcgcccggctccagccgggacggcggngccggctcgctctcggattgtgcgcgccaccgtaagctc

SEQ ID NO: 424102 - DNA, 311 bp, Oryza sativa nipponbare
ccgtccgtgttgattgaaaaagccggtgataatgttggtaccttttggtattagttgctattaaagaaaggttgcaggtttcttgctattatgccggcttaatactcacttcacaggcagatactactgaggtttttttatgctaagtaacattgacaggtgataaccaggatcccacctcttagaaattgttagagacttaaaatgcacttaaatgcctcattcagtttttatttaatagatatgtttctggggaatggaccaaattaaatttgtgcctttcttggtgctaattttttattacatattat

SEQ ID NO: 424103 - DNA, 325 bp, Oryza sativa nipponbare
  unsure (1)..(325): unsure at all n locations
cccacgcgtccgtgatgatgctgctcttcaaattctgccctgctcaactgcattttgaggtgggcctgtcgtatatgtgatatgagctcaggacgtttaaggccatgtgacttcaagtatagtaaactattagcttctcttcaaactttcagatgcacatataattttgagataagactgccagttgttcaagctgagccttttaagaaggttatttcgaaggcaatcagtcatctcacgaagcaagtgcagaatgccaaagctttgattgatggagtcctgtttttggatggcatggacaacactntggagggaccacataacg

SEQ ID NO: 424104 - DNA, 359 bp, Oryza sativa nipponbare
tccgttcttcttcttctttttgtttccttgccaaatcccatctccattttcctctctttctcgttgcgatttgagaattcaccttcttcttcctgctctcgcctcctacctcttgctgcagcgcacggcgccgcgccgtcatctcgtgcttgtatccttgttcttcatcttctctcaccttcccttgagaagatttgttattactagtttaatatttctaggaaagaggagaagaggagaggagaggagagggtggtaacgcagcgttaggtgggggcgtgctagggagtcaagaacagaaggaagggaggcccaactgctccatcctccctttccccaaatccactccttcctttcga

SEQ ID NO: 424105 - DNA, 204 bp, Oryza sativa nipponbare
  unsure (1)..(204): unsure at all n locations
cccggattcccgnntcacccacgtccgctcacgcgtccgcggacgcgtgggcggagactcacgcgtggccggtgctggacgaccacccggtggtggacagctgccgctgcttctgcgaggacgcggtgcctatctttgacgtcagggcactctacccctccgtcatctttttcttgtatccttattctttatcttcttttacct

SEQ ID NO: 424106 - DNA, 283 bp, Oryza sativa nipponbare
  unsure (1)..(283): unsure at all n locations
cgtccgaccacgcgtacgggcctcctcgctcgtctcgcgcacccacctcactccgcgccccgccgacgccgcctcgacggcctctccttgcagcgcccgcttcgcggtccggcagcgccgtggcctcgtcggcggtgtgcggtgccaggcgcaggcgagcgacatggacggccactacatgcggcggtgcgtggagctggcgcgcaaggcggccggacacaccagccctaaccccatggacggctgtgtcggatgccgcgacggccgcgtcgtcngcgaggga

SEQ ID NO: 424107 - DNA, 80 bp, Oryza sativa nipponbare
cccacgcgtccgcatctctcgacctcacctcacgctccctaactaacaatggctcactaccaggaggtggactactgctc

SEQ ID NO: 424108 - DNA, 142 bp, Oryza sativa nipponbare
gcgtccgcccacgcgtccgcccacgcgtccgcacatcgcgagatgtggagcgcagatgccgttgctggttttactccagtgtgtattgaggctttgtactagctcccttttttttgcctggtgattcgcaggacatttgctg

SEQ ID NO: 424109 - DNA, 249 bp, Oryza sativa nipponbare
ggtccgcccacgcgtccggggaggatggaggagatccacaagcaccttctggacgcctactcccaaggcaccaccaacatggacaactccagttcttccaggaatggaggggctccaatcgaaatgatcatggaagaccctgcgcaggatgcacaggattctaaccaagaactctgtgacgccgtgaaggaagtgactgggtcgattcaggaacatgccgacgagatgtgacaactctgctagtatata

SEQ ID NO: 424110 - DNA, 214 bp, Oryza sativa nipponbare
ctccgcggaggaggagctctatttatgccctcgcggcggcgcctcctctccccgcacccccttttctcgccgctcgccaccgcgccccagaggctgggaacttcgaggaggagcaggatccatggagggtggaggcgcaagaaatggctcgacgaccggggcggcgcggacaggggggaagtggggggatgctgctgctggtggtgggggtggc

SEQ ID NO: 424111 - DNA, 247 bp, Oryza sativa nipponbare
cgattaccagaagctgcgcctagcagaagcagaagcttcacaggcggaataaagggaagctgatgctgtaaggttttatgcctatcatggatgcttagaagatgatacaatgtttctgttgctacatggactgcatgattgcacaagctggggcagtggtgctcgttaaacaccgtgctgggttcagatgggcgctctaaatggctaagtaactgtctgctgcttaacgtgcttgagaactactacg

SEQ ID NO: 424112 - DNA, 285 bp, Oryza sativa nipponbare
  unsure (1)..(285): unsure at all n locations
cccacgcgtccgggcgcgtgggcgcggcgagagcgagacgacacagggatctgagatctcgcgcgcgcggtcgtttcgggcgcggctatggcgactccaggtctccgatctgtcggctctcgctggctgatgcgcacaagcgcatgcaggtgacgccaggnatgatatgtgtacgccccgcacgctgccccgctgcctgtgtatgcagcggcgcgtcacgtgttgtgggcgctcgccgcccccgctgcttatcttcttctctgtgatctatggatctctgtgcgc

SEQ ID NO: 424113 - DNA, 293 bp, Oryza sativa nipponbare
  unsure (1)..(293): unsure at all n locations
ctctcctctcttctctccttcgcttcgccaccgcgttcgccatggccttcgtctccgccgccgccgccgccgccgccaccaccgccgccgccttcctccccggcgtctcgtccgcgtcccgcgcaggaacacccttgctctcgctgcaacggcagccgctcgcgggttccctgcgcgcggcggcgcangggtcgagcgcctcttcgngcaggtggtgatggagagcaaggtcaaggcgaagaagaagaagggtccggcgccgggaacctncccggagccatcgacgcggagat

SEQ ID NO: 424114 - DNA, 218 bp, Oryza sativa nipponbare
  unsure (1)..(218): unsure at all n locations
tccgcccacgcgtccgccctcctaccccgcgctctccctatccccatcacgccgccgccgccgccgtcgcgtcgccgtccccgacgcctncgcctacctgtgccgccgttcgccgcctnctttgccgaccggcaccgacccgcgccgnctttcccgcctccgactncgcgcatcgcaacgcaacctcaggcgcagaggcggcgacttgactncccccc

SEQ ID NO: 424115 - DNA, 162 bp, Oryza sativa nipponbare
cactactcgcgcatcgcggacacggccgctgcacaacgcgcttcctagtcaaccggagagatgaccacatatgaggacttgacgagccgggttcctcgccccgaccggactgtttcttggaccaaccaagtacatggtcatccaaggggtgaacctggcgct

SEQ ID NO: 424116 - DNA, 519 bp, Oryza sativa nipponbare
  unsure (1)..(519): unsure at all n locations
cccacgcgtccgcccacgcgtccgctttttgttgtgcacagctcttgttctccattaatccagccgtgcgtgcagttgaggtccacgtgctgctgctctctgtctgctcccatcgaacaaatcaagaaccaccctctccactctccaatccaatctcgaataggaagaaggatgcttggttttgcgccggcaccaggccggccgctcttcgtgctcttcggttcctccatcgtccagttcagcttcagcaatggcggatggggcgctgcccttgcagacatctacgctcgcaaggtctctctctgctctcccatccctccctgccacatcaactaactattttggtcctccaaatttttcatattagattgttcaattcctacccatctgccataggagattcgttttcttctcgcatcttgattcctcatgcctaggccaatgtaaatctagtctttttttttaatacaagagatgctttgtcttgttttcttgtaaggcttcnagttagtttgatag

SEQ ID NO: 424117 - DNA, 214 bp, Oryza sativa nipponbare
  unsure (1)..(214): unsure at all n locations
ccaaccgccgccgccgccgccgacgacccaccggtcgccgcgtcgccggagtcgcgtactggagaggggggcggagaggcaccagccgccccatggcgttccactacccggaccacggcctcgccatggacccgtcctccgccgcggcgtcgtcgcccaaccctagcttctcccccggaggcggnggcgggggcgggtcngnggaggggagagg

SEQ ID NO: 424118 - DNA, 113 bp, Oryza sativa nipponbare
catgaacaggcagcagagctcatcattggctaacaccgctgcccagtctgagtacctgcaagctctaggtaatcctgccatgcaaaaccttgctgctgatgaacttgcaaggc

SEQ ID NO: 424119 - DNA, 497 bp, Oryza sativa nipponbare
cccacgcgtccgcccacgcgtccggaggctgaacattcaggaaaaggtggcaaaaattccaaatgggaactatcaattagaccatctttgcttcaaggagggttagaagactttactcctcctaaagcagaattaaggcattcaattggtggcattgtgcatgcttatgttgtcaaggtggatagagaatggatctggttaactgtatcaagagatgttatggcccatttatttattcttgatagttcagctgagcctggtgaactagaaaagttccaacagcgctatagtgttggccaggcagtgaaaggacgcattattggtgtgaacagggagaaacggttgtgagactgaaagcacttgcagtcagagtttccagagaattaggcaaacacaaaaccactttgctctgtgacatcaaacaaggaatcatgtggcgatcaaagattactgtgtggtgctgcatcaatgactatctcatgagtcattctgatgtg

SEQ ID NO: 424120 - DNA, 422 bp, Oryza sativa nipponbare
ggccccctccccgaccacgtccgccgcgagatcctcgagctcggcctcccggacgacggctacaattacctccaccacctccgcgagctccgcccctccgccgccgccgccgcctcatccttcgcgcccaaccagactgccccgcctctccccctcgacgtgaaggcgtatgatgccagtagggtgcggattgcttctggcaatgttgaggatgagatggacgaggggaggacgatgtgtaaggtggccgcgaagacagcgcctgtgaggcggattgagagggcggttgatcctgacatcgcgaggttgctcgacgagaccgatgtctcccatggcgggtcggaggatgagggactggaggaggattttgtcatcatggcaaaccgggctgagggggatgaggaggaagatgatgatgatga

SEQ ID NO: 424121 - DNA, 489 bp, Oryza sativa nipponbare
ggccgccggctccatcgtggtggacttcccctccatgggcgccgcctgctgcttctccagcctcgagtccctcctccgcgactccacctcccgcttcctcgccgccgtctccgccgcgcccgacccggacctcaccaacttccgctccctcttctcccgggtgctcaacacctacccggacccgccgctggaggccgtctggttcttctccgcgctctccttccacgacaaccccggcgacctccgcagcctcctccacctcctctccgccttcaccgcctcctcccgctccgccgccaagccgctcgccctcctcgcccccgtcgtctccgagctctaccactccgccaagccccggagggaggccgaggccctggtcgaggccgtcctcagctacatcagcatctgcagcagccgcgccgcccccgccgccggcgatggcgccggcgccggcgccgacgccgggagcctgctaccggccttcggcga

SEQ ID NO: 424122 - DNA, 448 bp, Oryza sativa nipponbare
  unsure (1)..(448): unsure at all n locations
ccgcctttctctcctccattggaggattagaacggagagagaggaaggtggggaaaattgttagatttgttcatccattatattttcttgaaaggaaaaggaaggcgaaggaattcaggtatttgcatcacatcacaatctgcaaagcaggaatacctgaaactctcatccagagttgacgaaatcatgtcaacttagaatgatatcaaggctcttgttacattcagaagatcagggcttcaggccctgcttgtttgttgctggatgaagacattcaccaggaaaccactgcaaagtgcagtgcacgtacaattccttcgatcaagtggaagggcatttcatgggcttatagatcaactntgttccaaatgtcctaaacatgatgatggtgccactttgcaaagtgaaaccacttcaaagcaagttcatgtgtttaatacaagttctt

SEQ ID NO: 424123 - DNA, 291 bp, Oryza sativa nipponbare
ccggcctgtaggaaggggagaagaccctcctaaaatgatcatggaaaacatgcatgtgatgcgagtgattctgatcggaatcggcgggaatgggtggattcttttacgtgtaggtcgctcgtgcaaacggagacaaatagattttgggccgattaccgctggaagcactgtgtttggactgggctttagcgactacgctcatgagtcgacctgactactactacagtaagtatactaagcagtacagctacagcaaatatgtttcggaatcctgactacactagctgagtt

SEQ ID NO: 424124 - DNA, 479 bp, Oryza sativa nipponbare
accgttttgatgatggtagaatggcaattttctagtttgttgatggcactttgggaagtgggcgtttgcagatggtgcatataaagaagagtatatttcacaaaactcttttagtttattatgccaaaccatggtgatttatgattaatgacatctatatactctaaactattcaaccctgcgaatttcaattaatactaattttctcgtcatgttgagccacattatcctgaaccattatggttattggatagttgttctctgtctgatatttgcaaccagatcagaccagctgctccattcacatatcgagctcttatgtggtacttgccttatgtgcttgttatgctgtttcagtattgttcgctattatattatagaacatcctaaataacattatgttctaaactttaagagttgtgcattaaagctgaccattattcttgacatttgcacagtttcaatgttttgcagactta

SEQ ID NO: 424125 - DNA, 229 bp, Oryza sativa nipponbare
acccacccatctctctccctccaacgatccatccatcgatcgatcgatccagcttgctcgcttgcttgcttagctagctaccgacgagtgacgaccatggtggtggtggtggcgccgatcgcggtggcgtccgcgggtctggggatgctggccggcgtggcgatggcgaacaggagcagcaacagcagtagcagcagcggcagaacgtcgtcgccggctgcgttgctgc

SEQ ID NO: 424126 - DNA, 383 bp, Oryza sativa nipponbare
  unsure (1)..(383): unsure at all n locations
ccactaccacgctctccctctctctctctctctctccttgtggactcgcagtctcgctcgctcggccgcccccaccacctgttcgaccgaacgcctccccggcgggcggcgaggagatggtgttcaaggggaggttcttctcgtcccggcacaagtcgtcggagtcgtcgagccccacggacgggagcaacagcccgcggacgcccacctccgcgccgcccgcggcggggtcgccggcggcggcgtcgtcgtcgtcgtcgtccagatccgacaagaagaagcccaaatcggagacccccaggaagcgcgacaagctcttcggcggctccgcgtccgggtccgccgcctccaagggcggggcgcgnnggcgcgctgcgtcggcc

SEQ ID NO: 424127 - DNA, 373 bp, Oryza sativa nipponbare
  unsure (1)..(373): unsure at all n locations
atacactcttttttttttctcgcccggtcgcggcggccataccgcaacaggttctcctccgccgtcgcttccacggcctccccccatcccaaacgcggtcgatcgccggcgaatccccaccggacgccgaggcgactgccccgccgttcgccaccttccatccccggcgtccccgaagtaacccaccgcctccttcttcttccctccatctctcctgcacccgagtgagggcgaccgcgatctctcagatccaccgaatccggagatcccgctcgcgatcgagtcaaacgcctncgaccctttaatctttgcccgcccgcgcgncgacgacgacaacgaggacctccccactaggatgagcgggaggaagaat

SEQ ID NO: 424128 - DNA, 75 bp, Oryza sativa nipponbare
gaaggatatctcaaaagccattttatctgctgtcgccttatgtctcaacggtcaccacatccaataactacattg

SEQ ID NO: 424129 - DNA, 128 bp, Oryza sativa nipponbare
cggacgcgtgggcggacgcgtgggcgagacgagaagaggagaagcggagcgcatcgctcggtcttccttccttccgtccgtccgcggggcacagacgcactcaccaccctttaataacgcgcgagatc

SEQ ID NO: 424130 - DNA, 525 bp, Oryza sativa nipponbare
  unsure (1)..(525): unsure at all n locations
ccgacgcgttcgcgatcacatatcgccgctgtatcgtataaaaactctatgcggacgcaaatagtgcggaggcggagggcgaggctagggcgcagagtcaccagcgaggagttccgcaggcgcggtgtggacggngctcctctgcttccgcacacggcgggcggcgacggcgagcagggttggaggggcggcgcggcgacctcctcgttcctgccttgcctgcctccatctggtgttggaaatatcataagttttgggacaagcaagagaggacatggagccatcatcacaacctcagccggcaattggtgttgttgctggtggatcacaagtgtaccctgcataccggcctgcagcaacagggcctacagctcctgctgtcattcctgccggttcacagccagcaccgtcgttccctgccaaccctgatcaactgagtgctcagcaccaactcgtctatcagcaagcccagcaanttcaccagcagcttcagcagcagcaacagcgtcaactccagcagtttgg

SEQ ID NO: 424131 - DNA, 461 bp, Oryza sativa nipponbare
  unsure (1)..(461): unsure at all n locations
cccacgcgtccgcccacgcgtccgaattaatcaaccaggaaacaactgctgcagcagctctcttgaaatctagcaatcaaggttgcgcggatatattatgcccagtgttcttgaaagatattgcaagagccattttatctgctgggaaatcatttcagcttgttcagcatgttcaagagacacatcggattcaaactcgtgaagtcatacatgagtntaatattgatcagcatggcaattacattagtcaacagaagtttcggcctgatacctcaagtataagaattcaagataagcgtgaagatattattgaagaatctacaggccagtttggaaataatgctngcaaaaatggatttcttaactttgtcttgagagtttcttgatatgcctattctggtctgttggaaaatggtgaccatgtngatgatactttaagaaagtgtgtgctgataatgctc

SEQ ID NO: 424132 - DNA, 455 bp, Oryza sativa nipponbare
  unsure (1)..(455): unsure at all n locations
atttgcttttgtctggagatgaactggatgagaatctacaatacgccacctatcttttggtcaagtgagactatacaaaatattatttttctatatttagccaccttagtttctgctgacttgatcaagttgtttgtagaaatttgcctgctgtctcaactgtcccaacaactgataactttcatggtagttatgttatgttgttgaatttgaaatctcgaatggcaattgcatgttagatcatgtgttgagtggtgcaatattagatgctccatacccaaactgtagaatataatngtgttccagtcaaattaattgtggtaatactaccgtccatctagtgcaatacagctgtagtnatttgttcaggaatccatgacatccaatattttcattccttctctttttggaaatctattgtcaagttaaagttaaaatgggtaattctggatttt

SEQ ID NO: 424133 - DNA, 451 bp, Oryza sativa nipponbare
cccacgcgtccgcccacgcgtccgcccacgcgtccggcccccacctcccctgcctcctcgccttcctctcccgctacccctcccgcgccctcgcctccctcgcctccgccctcctctcccgcttccccttcgcctcctcctgttccccctccccctcctccgacgacgaccacggcgtcgaacacgaggaatcgggccgcgtcgatggggtggaggaggtggacgagcacccggccgacgacggcgaggtgaggcgggaggcggtggtggtggaggaggagcgggacgcgcgcgccgcgctgcagcgggagctggagaaggagcggagcgccgcggcgtcggcggccgaggaggcgatggccatgatcctgcgcctgcaaaaggagaagtcggcgctcgagatcgaggcgcgccagcagcgccgcaccgtcgacgagcgctgcgccttcta

SEQ ID NO: 424134 - DNA, 279 bp, Oryza sativa nipponbare
  unsure (1)..(279): unsure at all n locations
cccacgcgtccgcttaaacaatcaataattaccattattaccttcaagtacctttttccttgtcccctctactttatcctcctccatgattgagaggagtgattttcccattctttacagcttgtatgttcccttggattattgccactntaataatgtactctactcatgacccaagttgagttaaatggtattcccacanaagatcgtcgagtaattatgcatttcaaagtaaaaggggttcaatgcttcttttgttttgaatatagtatgattcaa

SEQ ID NO: 424135 - DNA, 158 bp, Oryza sativa nipponbare
  unsure (1)..(158): unsure at all n locations
gcgcgcgcgcacagcacgtcgcggtgcgagtcgtactgaaggggcggaagcaccaccgccatgggttcactacccgacacggctcgcatggacccgtctcgcgcgggtcgtcgccaaccctagcttctcccccggagggcggnggcgggggccggggt

SEQ ID NO: 424136 - DNA, 582 bp, Oryza sativa nipponbare
cgagaatcggcggcggcggcggcgagagcggagagagacaggagggggcggcggcggcggcggtggggcgcggagatgacggggaaggcgaagcctaataagcacacggcgaaggagatcgcggcgaagatcgacgcggcgacgactaacaggggcggcgggaaggccgggcagaaggaccggctggggcaggacaagggcggccacgccaagctcgagtgccccctctgcaagaccaccgcccccgacatcaagttcatgcagatccaccacgaggcgcgccacctcaagctcctcttcgagcccgacaagctcaacaactttcacggcggctgtgccttctctgtcttttttcgttattatttcttattttttattattgctattatttatttttattaattttctatttattttatttttatattttattttttattctttattatatttagtattattatatttatatttatttatttttattatgtttttttcttatttatatatattctttttttgttattgtttttattttttgttttttattttttttatttttatattattttatttattttt

SEQ ID NO: 424137 - DNA, 326 bp, Oryza sativa nipponbare
ctcacgcggcggttctgggcgcggagaacgcggccgaggcataggtgggcgaggctatggtcactaccgagactactgaggtgatgatatgtatggcttgcaatgaggatattgaggaggcggcgagtagcagaacttgaagtctaaaaggcgctcatgacaggtatgggtgccttgctgcacactgctacacactatgtcgacgaggctgttatggtgatgactatgcacggacgtgtatgaggacttttgcgcaccatatcagtgctgcccgttatattcatatgaagcgtgtacattcggagcgtgggaactggggaactacc

SEQ ID NO: 424138 - DNA, 469 bp, Oryza sativa nipponbare
  unsure (1)..(469): unsure at all n locations
cggacgcgtgggcttggaacgtgaacagcgcgctgactttatgaagcttggcagccatgtacatgtggatgtgcatgccgttgtcttggatctccctgcaaaggtttgtatatcgcgctcagtaagccggacgggccatgaaggaaacctgcaaggtgggagggctgccatggttgtgaaccgcatgctgaagaacaaggaaacaccattgctgactgaaggtttcagtcgaatcatgttctgtaaggataacaacgaaattaaaaaggctgttgacatgtatagtgcattagggccttcagatagtcttgattctggagttttcggtcagaatagcaaagggcctgtacaagttggcataatgaaatntctaaagaaaccaggaagctctgctgaaaaatccggtggacataaggttacaccgaatgaaagcataccgcanatgcaaaatcatatttcaaaacagcag

SEQ ID NO: 424139 - DNA, 88 bp, Oryza sativa nipponbare
cggacgcgtggggcgtagtagcctcgctctctctcgcagccgcgcgcttggtgggagggggggattggggatgatggggagcgagtcg

SEQ ID NO: 424140 - DNA, 291 bp, Oryza sativa nipponbare
  unsure (1)..(291): unsure at all n locations
ttcccgatcgaccacgcgtccctcctgtgcgcagcgtgattgagagagatcggaggagatcccgtggcctcctcgatgaggtatccgactccgactantctatccctggtcgtggtgtacctacattatcactgtggcttttttatatttatatttatatctaaatatgtgttgctgggtgatgattttgagcccagagttaccgtattttggatcgatcgtgtcgttggctagaaatcttatctatcttcgttgtattctattctctataacatcttttacattttttta

SEQ ID NO: 424141 - DNA, 58 bp, Oryza sativa nipponbare
tctattcattcacaagaattacactactactctttctatgaaagatcatgacgagagc

SEQ ID NO: 424142 - DNA, 320 bp, Oryza sativa nipponbare
cggacgcgtgggctcctctcctctcctcttcccccgcttctcccctcttcccccaaccaaattccaatggcggccacggcgatggaccacgacggcggcgaggtggtcacccctggggagctcctcggcaactcgtccctcctagcggggctcggcgcctacgccgacggccgctgcgtgcgcgcgtccatcactggccatcgccgcctcgtgccgcctcctcccggctccaccgatcagaggtccacggtggaggtggtcgggcacaaggcccatggagctgtgccgcagcccgggagcgtcgtcattgcgcgtgtgac

SEQ ID NO: 424143 - DNA, 170 bp, Oryza sativa nipponbare
cccacgcgtccgcccacgcgtccggcaaaggcttgatcagaattaatccatttaattctgctctgccttgcaaggaactttgcctgcaggcttctccatggattccaactccatccagcggtttgctgctctttatttcagctcctttgctgcgaataattataaattaa

SEQ ID NO: 424144 - DNA, 241 bp, Oryza sativa nipponbare
cccacgcgtccgcccacgcgtccgcacagccaggcaaagcaccgacgcacgcgcccctgctcttccctctccgtggcggcatggcggcgtgccccctcctcccgctgctccagctctagccctccctccacaacatcctggaatggatcctctacttggctcgcggagcaagggcacagatgcacatagccgggcataatacgcactaatgagtgtcgcacagcagcacgcttactatgta

SEQ ID NO: 424145 - DNA, 365 bp, Oryza sativa nipponbare
gcgctgatccccaatataattggattcacaagcttcagaagtgcaatggtaaattccgaagcacaacagaaggttctcttaaagggatcgttgaaggtactgcagaggctcacaagcattgaaggggaaattggcataacactgcggtacaagatatcaaaacatcccttcttactgcgaaaccttgcagagatcttgcgagacaatagcagcaacaaacaagaactaaggaagctcgtggtaggaatcctcagaaaccttgccattgacagacacacaaggcaagagatgggacaaatgcaaatgctcattaccacgctgatcaaggcattcctcgattttaaaggattatttaagttcagatg

SEQ ID NO: 424146 - DNA, 489 bp, Oryza sativa nipponbare
cggacgcgtgggcaataggtgatttggtgagtgcttcagatggttctccgctgaatgttgataagcagggggatcaggggggtggtgcgtgaagttgtcaatgacgagcctgttgattctgaagttgtcaatggtataaagcctgagcctttggtaggcgagtctgttgatgctgaggttgtcaatggtgtcgtgcctgagccttttgtaggcgaatctgggggctccgacggtggtggtatgcatgttgaggatgaattggagatggagggtggaaagtctgacaatgggattgctgaattgcctccagtggtgagtgctctagagaaacaagatactgatctcgagcttcgcaatgattattctggtgcaaaaaatggcgcggacaatcattaggatgcaacgaattttgttgattccagttctggatatgtttgcacaagagatggcgcatctgtacctttaaaggttcctgccaatgttgacgac

SEQ ID NO: 424147 - DNA, 229 bp, Oryza sativa nipponbare
atctctatcgctggcgcgtcggcggcgcggttcagacggtacggtcgggactgtcacggacacggacaccactgacacggcctactcttcgtacggtcagccgcgacgggcacttttcacgtcacacgtatcgacgcgctgcgtattctgcacgctggctgcggtctcgcgacttcccgcgcgcacgcaccagggtaactcgcgtcgcggccacgcatgagcacgagtc

SEQ ID NO: 424148 - DNA, 167 bp, Oryza sativa nipponbare
cacggaggagtattccgacgaggaggactccgacgacgaggggaccgaggacatgggcggcggcggcggtgatgagagggggaagaggaagagggggttttatgatagataggggtggtatattaataatttaatattttttaattttaatattatttttttaattt

SEQ ID NO: 424149 - DNA, 52 bp, Oryza sativa nipponbare
agcgtgcgtaaaaaacctcaccatcatcgacccacttgttcctagcgatcta

SEQ ID NO: 424150 - DNA, 332 bp, Oryza sativa nipponbare
ctctccgcgaccaggctctgcccccccagcgcgacgaactgcccggtgggcgatcgctccaccgccgccggcgacctcactgccccccaccaccaccgcgaagccgccggcggcacccctccccccgccctcccgcccgccgcgatccatccggtacaaagagtttatttgctgttgtgagctatccgaggttccaaatccaaaatgagtaccactaatcactatcaacacatcaagtcaaacaagcctgttctaggcaaagcaagaaaattggaggatctaatgttaaaaagtgacaaccggatatgtgctgattgtggtgcacctgatcc

SEQ ID NO: 424151 - DNA, 69 bp, Oryza sativa nipponbare
cgtccggatccgggtcgaccaccgtccgacctggccgactttctttttccacttaccctcgctcgctcg

SEQ ID NO: 424152 - DNA, 278 bp, Oryza sativa nipponbare
tagattctagatcgatagctgcctacctttctttttttttatttttgcattacgaagaaaatgataccccaaccacatacgaggcacgaggttccaaaacagaaccactgtttatctggtattaccagaaagtacagcaactgtgcacatatcgtaactaactgtactcacagcaccccatgtattacataggcattgttaaaaatttagattacattctggcacttgcatgcgagaaactttacattgctcatattgattgccgatcatttttatgc

SEQ ID NO: 424153 - DNA, 92 bp, Oryza sativa nipponbare
aaaatcttcatcaatatgttgagtcattgaaaactgaatatctacatgagcagcggcgattgggtattgccattgttcattttttagaggca

SEQ ID NO: 424154 - DNA, 259 bp, Oryza sativa nipponbare
ctcaattatcgaccataggctcttgctgtctgcttgcagtgatctgtgctggaaatctatatattgcaaaccttcccaaggggcgtgctagatctcgaagacgtggtggacttataccattagttgactactattcagacgattgcagaacacactgcatcattgaaagagtgtctggctaaagcagaaggcagcgcatacttatgatccgcatattgtgcctataaagcacacattctgacgactgaatggatttatc

SEQ ID NO: 424155 - DNA, 75 bp, Oryza sativa nipponbare
  unsure (1)..(75): unsure at all n locations
ctcgagaagaacaagacgaacacgctctcttccaaagctgaaagcatgggttcgactcgcctnctcgtactgctc

SEQ ID NO: 424156 - DNA, 219 bp, Oryza sativa nipponbare
cggcgcgtcgtgcctcggcctgcgcctgcgcctgcgcctggtacgagcgccacacaataagtatgatgaagaacgaatgagtgggggagtttggtaaagtgagtgaaagcgactacagcctattggtcggagctcgttaccgtacttgttgatcagtacggtgaggatatttcttagctgatgttttagtttacaatctaatatggatctgatttatga

SEQ ID NO: 424157 - DNA, 63 bp, Oryza sativa nipponbare
cctgcgcctgcttagtggtgctctctccctttaccttctcttggtcagtccgggtcgctaggt

SEQ ID NO: 424158 - DNA, 305 bp, Oryza sativa nipponbare
ctgaccccaccaaacttagcgagggggaagggagaacggtggtgaacagcgcgacggacgacggttagcgagcgagcgacgacgcaacggaagaagaaaaagaggaggacacggcggcgcacgggagggaggaaagaagaggaggacgactactcgcgcgcgcgcgcgccaattcggaggcgccaccaccggttcgtcgtccctcccccctccttcctcctgttcctcttcttgtgaggccgccaggaagagggataggagaggaggcggaggcggcgcgacctgacccgtcgcgcgccagcagc

SEQ ID NO: 424159 - DNA, 154 bp, Oryza sativa nipponbare
gcggttcttgacgtggttccggcggacatggtggtgaacgcaacgctggcgtacatggcgaagcacgggcgcaacagcccggaggagatcgcggcggtcggggaggtgatgcacttcttccacgtggactacacgaccgtgaacccatcgaggt

SEQ ID NO: 424160 - DNA, 385 bp, Oryza sativa nipponbare
  unsure (1)..(385): unsure at all n locations
ccacgcgtccgcccacgcgtncaggagttaagtagcacaagagaggtgaacagacgtcgggagcgtgttctctagccatgtctcggtagacggacctncctacccgctggccgncgatgggtgctcagatcacacggagggacgacagcttgttcacgcagagctgcaggtttccgtcggaggatccattcgtcggtgagccgccgtgctggctcgatgatctcctcgcggactccgggaagagccacacccttcctcctctcatgagagcctgcagcgattctgatgctatcttggatgtgctgacgtcgttccagagcccaatctaccctatcgatgaaggggatccgcagccggttggcgaagcttgggagtcgttcaatgc

SEQ ID NO: 424161 - DNA, 169 bp, Oryza sativa nipponbare
tgtggacgatcactactaccattacgatggtgacgaagacgatgacaactactaccatgatgacgacgacgacgtcttcccggcaggccggtacggagaatatacgacggcgacgacgacgaatactactaccgcaatgatgaagtagacttctccagcatgccggctc

SEQ ID NO: 424162 - DNA, 168 bp, Oryza sativa nipponbare
acgtgtctgcgtcctccttcaaccgggtggaggggcccacgcggcgacgagcggcagatccggcggcgtccagcggcgcgtcggaagacggctgctgctactacgccgtcgtcgactgtggaggcgcatcaccggagctgcccggccgcggtccccgccaacgccacc

SEQ ID NO: 424163 - DNA, 292 bp, Oryza sativa nipponbare
atccatcacttaaggtattctaggctcattctgctctttccccacaaccttttctacctaagggggtgactgtcaacacaaattcttctgttaacaaaacactttcaactttattatcctccaacgtaaaaattaaattttcttttcgaagctctgagctgacctctttcaataacacaccttttcaagcttttggcaacatatacagcacaattaaccaatctctccctttcaccatggacaatgctactacaccaacgattcaatcaattgatgacagatctttatcaac

SEQ ID NO: 424164 - DNA, 425 bp, Oryza sativa nipponbare
  unsure (1)..(425): unsure at all n locations
catcacttgtcctgtgaaactgcaattatgtaacaacaatttcttcaattttatagcaggataggcgatgttcctgagataatgaggcagatgccaccccttcctgtaaagttgaatgaagaactggctaactctatgttgccgaggcctccacatacatgatatgtgcaacagtttgctcaaccaaatcaattgcgcatgaagatcagtttagatagatgggttatttgcatatgctntgtcgctatagattccagatgtctgattgtgctgtccagatcttaaatccagccatgtaacaattctataccttggttctatttgttcagctgatagtaggtgctccgtgtacaaagccagcagtttcagtgaaacaagttcgtagccctctagtccttgtagaaaaaaaacaatagggttaaact

SEQ ID NO: 424165 - DNA, 62 bp, Oryza sativa nipponbare
tgacaatctcggcggaaagcggcggcggcggcgacggcggcggctgcgggtccgatggatct

SEQ ID NO: 424166 - DNA, 152 bp, Oryza sativa nipponbare
gcgcgacatcttatccttttatcctataaaccacgctcttatacactgctacttatttggcgtttagttctcgcctccttactgtgcgtggtcaactcttacggatggtgacattctatccctcacatcttccatcgcccaactgtcattgc

SEQ ID NO: 424167 - DNA, 91 bp, Oryza sativa nipponbare
  unsure (1)..(91): unsure at all n locations
gtccggattccgggtcgccccgcgtccggcggcgcccccacacgcgccgccgccgtcngccttccccttcccttgcctcgccggcgcccga

SEQ ID NO: 424168 - DNA, 59 bp, Oryza sativa nipponbare
  unsure (1)..(59): unsure at all n locations
tgccaaccacttggatgctcaggcgaangtctaatcacttagaccacatgtaggaggta

SEQ ID NO: 424169 - DNA, 243 bp, Oryza sativa nipponbare
  unsure (1)..(243): unsure at all n locations
accgtcgagtctctactctgtgcacagcgctctctctcgtgcggcgagacaccgggcagcanccatggcgtcccgacctctcttaacctggcaactttctcctggcgctaccagcgcataacaacagcgacgtccggcctcgacgccgacgcctgcgccgagcgcgacgccatcgtcttccgctcctacgtcgcgctcggctcctaccaggtgagctcagctcccttgcctttcccctcggtc

SEQ ID NO: 424170 - DNA, 161 bp, Oryza sativa nipponbare
gtcgccacgcgtcgccaagacaagcgacgatcgagaacgaacgaacagcgcgtggtccatctcctctctctcccggagccccaactgctcagctcgcttttctagcacacacacactggcggggcctatgcccaaccccgctaaggtggtctgtgcagaga

SEQ ID NO: 424171 - DNA, 264 bp, Oryza sativa nipponbare
  unsure (1)..(264): unsure at all n locations
caaagagaccacaacgattcacaaggtgagctagtttattttctgcaacaaggaaaccacatggtttctgatttttgtgtgttgattcgaatgaggagtggtggtgtactatctcatttttttttcttaaacactgtgctttcagatctgagacaaaggtgattngtggaatgaacaaagtcatatgtctttcttagacaccatgcttttcaaatctgagcaagggtcatttttgtggaatgaacaaagcgatatgtcttctta

SEQ ID NO: 424172 - DNA, 85 bp, Oryza sativa nipponbare
cccacgcgtccgctacccacccaccctctcgccgtcgcagatccgatccaggaagagctcgccgccgccgctgccatggcgctct

SEQ ID NO: 424173 - DNA, 388 bp, Oryza sativa nipponbare
cccacgcgtccgcccacgcgtccggttctttttaatatgctaaatgagcacgcgacaagatcccttcctgatctgccaccgctcgtgcgctcgctagctcgcggataatgtatcgaacaactgaggagacgcggcagaaatcccaccacctcaccagccaacccgcgcggcgcgccgcgccgcggcgtggttcgattacccaccgatcgatctctcacgccgcaccggcgcggtctcgccgccgccgccgccgcggcagctggaatcgagaggggaagggcgacgggatcgcggtggggaaagccggatgaggaggagggaggagcttacagggtgttggcgtgctggatgtcagcttcgagcaccttgagcgagtccttgtacgcct

SEQ ID NO: 424174 - DNA, 246 bp, Oryza sativa nipponbare
  unsure (1)..(246): unsure at all n locations
cagagtttcaaaagagaaagaagtatagccccttcaagctgtcacagcactngtgtctaagagctccaccttcatcacaccatgactgcaaggttggcactgctcgccagccttcttctcctgctccaactggtgccgccatcctctgcctggtgtggagctcacggtacgtctacctattggcatttttatcacatgaacatgggaccggaaatctattctgaatgacacgcagacctactgctg

SEQ ID NO: 424175 - DNA, 146 bp, Oryza sativa nipponbare
gagtccggtccgattcggtgccagcgtcgtgtctctctctccttctcgagacagcaacgcgcgcgcaagggacggggagcagactcggctgtctcctcgccggactcctcgcttcttgccgccggcgcgtttggccgcgagcgcgg

SEQ ID NO: 424176 - DNA, 136 bp, Oryza sativa nipponbare
cccacgcgtccggcgccccacccgaagtccgtctcgtacgccatgtaccggtgcgacgacctctacctcgtgaacgacctcaccggcggggtcgtaggcttgcactggtcgagcacacttcttctagtggtccaac

SEQ ID NO: 424177 - DNA, 274 bp, Oryza sativa nipponbare
  unsure (1)..(274): unsure at all n locations
cttccccaaaccctccacccaacccgcctcctcgagcgacggcgncagccatggcggaagcagcagcagcacctcccgccgccgccgccaccaactacgaggtggacctcggcaacctcatggcctacgacccgtcgcatcacctccccgccgatcctcctcagggaggactgaggagaaggcctcggagggacggactggccagcggcgcgcgcctttgcctgcgcaccagacggacgcctgtcgctcgcgcaccacgtccgagagttacagc

SEQ ID NO: 424178 - DNA, 56 bp, Oryza sativa nipponbare
gcgtcgtgcccccctccctcgataaggtatctctttttttttgctgagcgtttcgc

SEQ ID NO: 424179 - DNA, 77 bp, Oryza sativa nipponbare
gcgatcgtgcccctcgccctcgccctcgctcagtcatacagtgttgtgtagctactcccatgcgatgcctcgcgtaa

SEQ ID NO: 424180 - DNA, 60 bp, Oryza sativa nipponbare
gaacgcgccctgtctcggctcattaagcacgccggatggtgtgttacgcacaggatgacc

SEQ ID NO: 424181 - DNA, 427 bp, Oryza sativa nipponbare
  unsure (1)..(427): unsure at all n locations
gagatgatgacatgggtaccagacgaaggacgcgaatgtgagttgtgcgagcactggcttcgattgcatgccatagggtgctgtgctgtcagttttggttgtacctgagattgacttgacttagttgctgagaaatcaaggtgtgttatggcatagagcattatatttatatgttggcaaactattaggtttagccttcaagttgcgagataagtgtaacattattttgcagcaagcactttacaggaaaatgttcagacccaagtgggctctatgagactgacccagttgggctgacctgaggcagttgctttgggttggtctggctgtttgtatcaacttatccatcgacggataatccatccaatttggctctaaaaaaaaaaaaaaaaaaaaaaaaaaaaaaaaaaaaaaaaaaanannnnnn

SEQ ID NO: 424182 - DNA, 332 bp, Oryza sativa nipponbare
  unsure (1)..(332): unsure at all n locations
gcgacgcgtggtccgactgctaacacctctcaacgaaagacctctaacctatgtaccctaacgtgggcggtttgttatgcagatgagagcttaacgggttgtacgcatggttcctctagcgcagggacacggatcgagcgtaggctcgacgtcgatactgcatgatcggaatgtagggcgagcacaaactgacgcatagcacgatcgaggtactcgactgcacgcacgcgtacaccattctgttcgtgagccccatgcgaagacacggtacgcacaacgtgcaggcggtggccgtcgagcaggcggncggcacctgcgacgcagtacaatgc

SEQ ID NO: 424183 - DNA, 578 bp, Oryza sativa nipponbare
gcgagcaccgcaattgcagggttccggaggccgaataaaaaagtttggcctctccccgcaaaaaagtaaaaaacccaaaacaaccatccaccagcgcatcgcggcaccgcgagcgagcgagcggagggagggaggtggagagcaaaagttcgataaaaggagaggaggagacgaagcgtcgaagcccaagtaacatccccccaacctccgcctcctcctcctccccctcctcccatgcccgcatcgagatcttagccgcgccggagatcgagaggtaggagcgtcgactcggtcgcttttgatcctttcttcttgccgacgtctttgtttgtgtttcctgaatagtaataagtcttttttgacaactttattttaaattagttcgtatgtttatgttattaaatgttttattacttcattttatgtattttatataatatatttattttttttttatttacgattatttttttatttttttaaatatttaatatatttttatatatattatttatttattttttgtaataaatttttatttttatattttattatattatttgttcattttttttata

SEQ ID NO: 424184 - DNA, 440 bp, Oryza sativa nipponbare
  unsure (1)..(440): unsure at all n locations
cccacgcgtccgcctgaaaccaatcaagcaaagcaacagatgaatagattcttcaaagcatattacagccatagcggggaaggggggagtagagaataaacttagtaccacttgaaatcgaccccccgcatcgccatggcctgctagctagatctggccggaggagcgcggcagcatccacgcccccgcactccgctcacttcagtgagcccctcacttcaactccagctagggtttctcgcgaggagagagagagagagagcggcgtcgcactcggcggcggggcggggcgacgcgaggaggagggagtacggcgtccccctcccggcgtcgacgcgagtagggcccccgcgcggcggcggcggcggcgccgggaaggtcgcgagcggcgaacgcgccggagagaggnggaggaggcggcgaacgaagaagctttcagc

SEQ ID NO: 424185 - DNA, 278 bp, Oryza sativa nipponbare
  unsure (1)..(278): unsure at all n locations
tcgaccacgcgtccgccacgcgtccgcggacgcgtgggtggatctaggantttttagcaaggggtaaggaggcgggaggagatggggagagagaggnaggttcccggtgtnnnangcngcgctcggcgccgtnntctccgccttcttctccaccgttctcgactgattctacctcttcttgcctgacttctactacagctttctcaagttgtctcgcaaccttttatagctcctaatcctcactttacatcttgataactataccattgattacacct

SEQ ID NO: 424186 - DNA, 346 bp, Oryza sativa nipponbare
gtgttggctgttcaacctgcaatcgactgtggtgcacgcggaagagaaggatgtcaactatctgggctggaccgaattgcatggccacttagaataggtgactgcacttgagtatagcataaacaggggacttacgctcttactctcttgggtgtcgcaggtgtctcaataaatctgatgtactgtggcactgccagagtgagatgctcgccaactagctcgctcacatgatggctaacagtgctcagagcttgtcaaacaagctaatagacggcgatctctacatttatgcagagtgctgtttaatatacgaggaggactctggtcaagtgacagatctccacat

SEQ ID NO: 424187 - DNA, 454 bp, Oryza sativa nipponbare
gacattcataacaataattagaggatgcagaggcgatcgagatggtgcctcaaccaagaagcggacgaccaagcacccgtaggtgcagtcgcctaagaacttctgcgtggaatgtatgctcgttactacgatggccgagcgtgagaccgctcacctatccgtttacacagtgtacaatagagtcgtacatggtgtggatgacgttcaacatgtagtcgcagtcctggacgaacactgccaacaaaatcgcagacgcaacaacaacacgcacaacaattcgcgcagacgttgatattaaggtttagatcaataaccaacttgatgacaagatgaatggatggatgatgctatgcagaatgctgcagctaatatacacgttgatattgatctgttatatagtaggttatcacgattatgctacctattacttaaacttaagtactaacttaattat

SEQ ID NO: 424188 - DNA, 432 bp, Oryza sativa nipponbare
  unsure (1)..(432): unsure at all n locations
aatataagcctaatgagtgtgattccaaaacgttagaggtaccagggcattatggacacacgaagaacccattggcattgtacagcactatgtacccacatgtcaatcaaggaaatttactccagggactcaacacaaatatatttccaggaacagatcctaaaatttcgaacctgattcaatctgctggatacatacaacctccttaccctgatttgtcaggtcttcattacccagtatcatatgcaggtgccttagtgggagatacaccacagtatttctctgatggtaaggtaaacataccaaacagtcatagcaatcatgcctcatctgcagcaaacacanagatagggagtaagaatgaaggacctcctagggctaatttattgtctatgacatcctcaagaatacgggatgaaatctggcaaatta

SEQ ID NO: 424189 - DNA, 214 bp, Oryza sativa nipponbare
tgcagagagagatgttcgagagtgcatacgatgatggcaagagaaaaacgggatctgaggatcgcatcactgcgcgtctgtggaggagctgaaacaccagaatacagggaggatagattgtaacagaaggggacattcatatcttagaaaagaaatgaatgataaagcatgtatgcttctgcccataaataatgaaatgaagtaatattttagc

SEQ ID NO: 424190 - DNA, 480 bp, Oryza sativa nipponbare
cccacgcgtccgctttatcatcattttcgtggacaacatctgacaatatggatatgggggattggtcaaagaagtgcaaggaagccttaagcaattttgagctgttgaaggaaggaaagagcaaagatgatattatttatgacaaagctgtccaggtattacatggcaaaaaggatgagttgcatgatatatttgagagtgcactcaagtccagtgatttgaagggtctgcatgctgaatgccttacagatatgtggattggcagagacaggtttgctttcattgatctgagtgcagggccatttgcctggggccctgctgttggtgggggacgtgttcgtactgaacttagtctacccaatgttgcaaagactgttggggctgttgcagaagttatagaagaagaggctgaagctaaattacaagatacaatcagagagagattctcatcttttggcgagaattaccatgcagtagata

SEQ ID NO: 424191 - DNA, 483 bp, Oryza sativa nipponbare
gttttgttagatttcatgcctgattcacttaatttaatttttataagctttgacagttttgcaactatttttccaacatatgcattctggaaggtctcttttctggcaatctctctttggatatgtctgagggatcaacatggaagataaggcgtagtggtttctgtggaatgagatcaaagaagtttaatggtttcattgatcttgatgcatatgatactatagcgatgaaactcagaggggatggaagatgctacatatctactatatacacagagaactgggtgaattcacctggacaacaggaagataattcgtggcaaggccttgtgtacttaccccaggacagatggcaaatcatgaaggtaatttcaatttcaagttgaaaagatatggtttttgatgatacgacagcacttgtcctttctttcagatcccctctgattcgtatctacccacatggagaaggaaatggatcgaagc

SEQ ID NO: 424192 - DNA, 495 bp, Oryza sativa nipponbare
ttcgctgtttattatctgcatctcatttggagaattcttataccggatggccttgggatgctatgaaaatatatgccgagcagttaccatcattatcttgtagtgttctttcttctgatctgttcagaaatgcattttgtattattcaccaaagtggtgaacaaggaattaatttgagggaaatttcgcaggcattgcatccactaggaatgcaatatatcgaattggttgttgatacccttgaaagatttcagctggccattaaggtcaatgcatatgatggtgtgcagattgttgattcattacataagccaaaatatcatataaccacacttgctgaatacagtcaatgcaactgtttgtgagctccggtttctgagacagaatcaactggggacaccagaaatataatgaaagagaagtatgctgtgcctattaatttgcaggaaactgtaaaaaagcttggtgatggacaacatggttcagttctcaatg

SEQ ID NO: 424193 - DNA, 506 bp, Oryza sativa nipponbare
tctgttactgctgattctattagtgctagtttgaatttggatcaacactaacttttcatactgctgcttgcagagtagtgatagggcctatgttctatgctttgtggagttcagtgatgcaaaatgtgcaataactgctatggaggctctccaaggttattccggtgtcattgatttatcgcattgatattctcttgacagcttttcatatatcctggcagagtcggttttgctagtatgggattataatcatgttacattacatatagaattgaatggtgtcttgataattgatatgcatggtatccattggctttttttctttcagtagtatttcacagttcacagtgtctgttagattcttgtgacacactgatactaaccatatcttccttcaagagctgtagctatttaaacaataaggcagacagttcgctcatatttcatagcaaacctaaggatagtaggaatcaactttaaacctaaggcttgaacaatgagctttc

SEQ ID NO: 424194 - DNA, 84 bp, Oryza sativa nipponbare
  unsure (1)..(84): unsure at all n locations
gcgcgcaccccccgagagagggtgggccccgcgtctacacctnccggagccaatggcaacccaagccgccggctcggtcggtcg

SEQ ID NO: 424195 - DNA, 309 bp, Oryza sativa nipponbare
tggtgtgtgaactcaaacttgtaaagaaaagccgttaggatcacctgatcgtggagagcttgtcctgtttgaaccattcgtctgccagtgggttgtatttcatctttcattgccactttagtttgtatctgaccttattctgagatcattttggttaacactctgggtatattttggctacctcttatggtgtctatttatgatcacaggcataccagctactagtctgagactattgacttgatctagatggatgtcattggatcagactacagtatcgaatcaactccagtcatgcaatgtcttata

SEQ ID NO: 424196 - DNA, 196 bp, Oryza sativa nipponbare
  unsure (1)..(196): unsure at all n locations
cccacgcgtncgnccacgcgtncgcccacacgtnacgccacgcgtncggtctcgtcgatcgatcgatcgatcttcgcgggggttggagcgcatgcatacccgaaattttggtgagtctctgattggacatcaaacgattcttttcttgggcgatttctttgtttgggcgtgcgcacgaatcattatggtatgatta

SEQ ID NO: 424197 - DNA, 230 bp, Oryza sativa nipponbare
cttttagccctggttttgtaggaatggcattatcctatggtctatccctgacatgtctttagttttctctattcaaaggcgatgcgagctttcgaatcaaatcatttctgtggaaaaggttaaccaatacatggacattacaagtgaagcagcagaagttatcaaagaaaatcggccagcaccagattggccccaagttggcaaggtggagcttagagatttgaagatta

SEQ ID NO: 424198 - DNA, 163 bp, Oryza sativa nipponbare
ccttatcaatgatagcatctatcttcttgatgagaggtttgaacaaaaatccttcgaactgaaagaaatataagcttaaatggctaatgttgtataatgggaaaacacgccacctcaagaaagagaagagagattgcgtgtatttcatcaatgggagaatgtt

SEQ ID NO: 424199 - DNA, 114 bp, Oryza sativa nipponbare
gggggaatgggattgtcttcctgcagcggctctcactcttggccgcgaccgcgcgagcataaggacgtcacatccctctcatgtctactcacagcgacgtgccaatcacacttc

SEQ ID NO: 424200 - DNA, 66 bp, Oryza sativa nipponbare
gttgttgtaaagttgcgagagagagagagagagagatcagttagtttgttgagtggaagcagatca

SEQ ID NO: 424201 - DNA, 82 bp, Oryza sativa nipponbare
  unsure (1)..(82): unsure at all n locations
cccacgcgtnncgcctgagtcgagtcncctccccaccgccgcccaacatgcttgcccccggccgcccgcctcgcggcccgcc

SEQ ID NO: 424202 - DNA, 117 bp, Oryza sativa nipponbare
  unsure (1)..(117): unsure at all n locations
acttgaccattggggggggataaaaagagacaaaccatccnaaagatcggatcactcacgctctaggacactaagccctgcgcatgactcaatcttcgccagtcacgatcactgatt

SEQ ID NO: 424203 - DNA, 216 bp, Oryza sativa nipponbare
gcggcactcatccggacacgcgtccgcaaagatttgaatctttatagtataaaaaaactatgggagatattgatttgaggaggacaattgtcggagcatctatcatgtcgaaagaggaaaaccaaagcaatcccctgttctactctgctcgtctgatgaggtacgggatgatctgatccactggaccgtacggcaggtacttgctcacctggaacc

SEQ ID NO: 424204 - DNA, 80 bp, Oryza sativa nipponbare
tccgattcccggtcgaccagcgtgcgcaattctgagctaacacaacaacatctatctctttgcttattaagtcttcccct

SEQ ID NO: 424205 - DNA, 71 bp, Oryza sativa nipponbare
  unsure (1)..(71): unsure at all n locations
cggacgcgtgggctgacgcgtgggccccagctccataagctcagctatggctntatacactgtcacataca

SEQ ID NO: 424206 - DNA, 115 bp, Oryza sativa nipponbare
  unsure (1)..(115): unsure at all n locations
ctgctcgcaacattgaggatacatgcatacgacttangaaacttgcagagtaaggctgaaggccacgttctccagatggaacacttgtcatagatggcaagaacagttctgtggt

SEQ ID NO: 424207 - DNA, 440 bp, Oryza sativa nipponbare
  unsure (1)..(440): unsure at all n locations
cctgcatgtaagccgcacctagatttattctacttcatttaaaatcttagtaatttctgcggtgctatacgcaaatgagagatgagttataggcttgcaacatgtgtatgattagaagattggcttaaccttgtggtcaacttccatatggtgtactaatccaattccgtgaagctcacagccgttgagatctctntaatcttaattgttttagataaatgccacgatgccctagaaatcgaactgctggagtgaagttacttggaggacttattatggcattatctgtgacactcttggcgaatttttgtcattgaatcactctagtgataccatatttccggaaacaccgtatttgacttaattattcagtgttacaaatttcattattattctagatgtaaaagaccctgaagtgtgtgtgacgggcagagtctaat

SEQ ID NO: 424208 - DNA, 346 bp, Oryza sativa nipponbare
ggcgaggaaggtgctgcgggcgacgcagatggaggcggcgcgggcgaggctgcgggcgtcgggcgcgggcaccgtgccgtacgccgagttcctcggctctgctgcgacgccgcggcgcggagtcgggcctccgcgcgcgcgcgctgacagtcggatcgcatcgtctggaagacgcttctaggccgaaggtgcaagcacagaagcatacgatcagacgaccatgctgaggcacaggagatgagcagagccaagcaacacgacgacctcaggggggttgtggtgatctggcaacggtatagtaattgggttagggagacatgtagactcagtagcgtacttctcgcaa

SEQ ID NO: 424209 - DNA, 321 bp, Oryza sativa nipponbare
cccacgcgtgcgattaaatgcatcaccgcaagaaggatcacgaatctcgattgagtatgcacacgcgacttacagtaggtccagcgtctgccgcattctgcagatgcacataaatccgaagaagcacagcagaagagctgagtgaggctgctgcttcacaaggtggaaaagctacataagggcaacagaagaaacgtgccacagccctacactgaaagtcgctcatcacaatcttattgttacgcttgtgggattatttttgttgttaatcttagtggttaggcagggcgaagatcttgtaacatgattccatccaaaact

SEQ ID NO: 424210 - DNA, 291 bp, Oryza sativa nipponbare
gcgcggtctaatccgattcaaacccgccgtttccaagcttgctctcctctcccccccaatccttccctcccgaggtggcaggtgctcggcgggatggcgcagaaggaggccaatggcagcagcaacggggagcacaccacccgcccgccgccgacgccctcgccgctcggttctccagttcttcagcgacctgagatctcgcaccggggactgctcatcggctcgcacctcgcgcagctagggaacggagcacagcattgcgcaacactttcactgttcaagacacctgag

SEQ ID NO: 424211 - DNA, 140 bp, Oryza sativa nipponbare
tcgcttctttaacattctccaccctatgcaagtcgccaggcttagaacaagcaaacaaaacgacgactgacgagcagtgttgtgagcgtcgcactcacgtgagcgacaaagcacagaaaaaaggccaaaggcgatctggc

SEQ ID NO: 424212 - DNA, 260 bp, Oryza sativa nipponbare
ccgcgtaccgtccggattcccggtcacccacctcggtctagatcgcgagcggcgccttttttttttttcacatatacattatgattgatcatctatggagaaataacatgacaagccaacatccattccatgtcctatagttaactgaaaaaagaacactgattccctaaaatccatcagactataaagatagaatagggagagatttggtttttaccagagaaaatagcataccgagagaaaaacccttctaaaatcct

SEQ ID NO: 424213 - DNA, 484 bp, Oryza sativa nipponbare
  unsure (1)..(484): unsure at all n locations
cccacgcgtncgcccacgcgtncgcccacgcgtncgcgaaggatgttcacatgagagtacaattggtaaaggtggaaaatcaacaccgtctgtttgcttgcctgcagaaaatggggttagtaaggaaaatatcatccacttctcgaacatggatggtgcttcctccattagtcctgcatttacttcaaattatcagcaaagtaagctggcagatccaatccaatcaaaaccgaagccccttaccccaaaggatttaatgcctgtccaatttagttcgtcgctgcctgatcctacctcaatctgttttgagggtatagctgccataactacacccaattntgaggatcatggcaacagagccagcattgcttcangggcaaaagatgtgaacatgttcccaacatttaaagaccagtccagntatcgtcatgatgcactgttttctaatgtcaatgggtacatgcaacaaagacgaaataatcac

SEQ ID NO: 424214 - DNA, 177 bp, Oryza sativa nipponbare
agcgccgcataggagagcagcaatgaggccgtcgctgatgagatccgcctcgcaggtcctgcgccgccgccgcggctactcctgcgcctgcggccagcctgatcggaaggtctccatcctcggctcggccggcggcatctgtcaacacgttcaccctccttatgaagctgaacccgc

SEQ ID NO: 424215 - DNA, 122 bp, Oryza sativa nipponbare
  unsure (1)..(122): unsure at all n locations
cccacgcgtncgnccacgcgtncgcccacgcgtccgtggcgacgtcgaccgcggggaaagagtccggtgcgaggtgaggatgacgccagcgaggtggctgggtgttcggcagcagcgactac

SEQ ID NO: 424216 - DNA, 239 bp, Oryza sativa nipponbare
ctgctcatggtcttcactaacaattcaaatatgttgagcaatctcttctatgaatatgatacaccattgattcttggtaaaaacacaaagacatccatggatttttccgaatgtgaaaatcttggaaaagattatcttaatatgcttgaaattaacaccaaaggtctccagtcgatgttctgtcaagtttgtggacaaaatcaaccatttttccaaacaaaaaaagactactttcaaca

SEQ ID NO: 424217 - DNA, 379 bp, Oryza sativa nipponbare
  unsure (1)..(379): unsure at all n locations
nncgaattgacaatgaactgtcacggaaggtaaatgaagtaattaatgaaataagaccgccgagatgttcttatttaagttgcgtctatgcagaaagggtgaaccatctggtgatttcttccgctcatttttgacaaaagacaaagcacctggtggcctttcctatgggagttcttgtcatgtgcacggcaatcagagcagatgactgcatgcatatctgcgactgttttgtagggatgatcaactaaagaatagttcgacaggtctgcagactaggcatcaatatgtgatggtaactattctgaatattcagatggctgattacaatatttgggaaggttttgaaaatatgtgtgatctttttgttacgctcttgatt

SEQ ID NO: 424218 - DNA, 160 bp, Oryza sativa nipponbare
  unsure (1)..(160): unsure at all n locations
tcgacccccaacccttcagaacctttcggcttccggcggggccggggccggcgacttgggcgggggaaccctagggggggcttgggcccggccttggttggcgggcaacttcgggattcggcttcttcggctggttcttgtnttcgggcccttcggcggc

SEQ ID NO: 424219 - DNA, 150 bp, Oryza sativa nipponbare
aaaccttttagcttctcagccttttgcctctctttctactctctttcttggccgtctctcttatatccctcaatttaaccatcgagggcggccaaaaaaaagagagaaaggaagagcaaaataacacattacaccatggcgcgattcgtc

SEQ ID NO: 424220 - DNA, 78 bp, Oryza sativa nipponbare
ctgatgcctacaatctatcttgacagccaacccttcgtctccatcacgattaactacaggcaaagggtgctacaacca

SEQ ID NO: 424221 - DNA, 426 bp, Oryza sativa nipponbare
cccacgcgtccgctgtaataccgcaccgtccgtgctgagaatcgatccggtgcctacacagacgcgcctctggtgaccgatctggataggagcctgggcaccgccggggatccctggaattcttgccaggaatcgacagccgctctgctgccggagatgaagatgacatggacgctgtcccagacggcgaggatgcacacgacggacagatggagcagctcgacctcggcgtgtgggtcgcggacctggctcttgacctggatgtccgacgtgatgaggacctgtcagttgaggggcagaggcatgaactccacgactgtaaggacgacgaggaagtggacgatatccaggctaacggtagtaaactgcgtgattacacaaaaggcgtggagaacaacattcgccaaattgagcttgattctatac

SEQ ID NO: 424222 - DNA, 436 bp, Oryza sativa nipponbare
  unsure (1)..(436): unsure at all n locations
cagccaaatcccttcgggccaccactacagccgcagcatgcaggcattgctcaggcacccaaccccttcctcgatgctgggttcggccctttcccagcatcaaatgggatgcacccgcaagccaacccgtttggaaccgcccaacttttgtagggtcacagttaacacacgagatgggcacttgggcagtgcaaattcaagtctattgagttgcatattgcatattcagaagtgagatttgcagatgtcgcaatggtatacatactttgtattggcttctcttgggctgtgtggccgcttggcgatcttgattttttgtagttcaagcctgtaaacctcctgtgcagtagtatttgtttttttttttcaccatttgtgacggcggctggtctgggacgattctccttgtaaagaanattattttctctgattcata

SEQ ID NO: 424223 - DNA, 114 bp, Oryza sativa nipponbare
cccacgcgtccgcccacgcgtccgcgcgcattgaacaactcgtcgatctgtccggcgagggtgagtgcttcttggcgtgttcttttcggcgacttcttgttggggggggggggg

SEQ ID NO: 424224 - DNA, 409 bp, Oryza sativa nipponbare
  unsure (1)..(409): unsure at all n locations
gtccagtgattcaagaagaagcagaaaaaaacctgctccaagttaaggtctttccaacatttcgtctcatttgcacatcagttacctgtttgcctggccgcaatattctccagatgatagcacggtaatctgctgtcattcgcacttctgtgaacggagcagcaagatcaacatgcgaaggcgagaccttgtaagtacatgtccactgttgaatagcatgactgaagcggcgatccatgattcacctctgacaccattgacacattagcctgccattggctcgtgaagaagcgttctacttatggtgggcacacagagatcgttgagtagttaatttgctttgattgactngactgagttgtgtnctcgtcctctccactctccaggaaagtctcaacgagtcatgcgt

SEQ ID NO: 424225 - DNA, 493 bp, Oryza sativa nipponbare
gacagtgctaggacctcatcagtggcctcatagttcacagcattttccccattttatattgatcctcaattgataactctcttctctgttttcttgtattccagtagcagtgatcactggtcagtagacttagctgtatgtcctttctcaaaactatggtcccaactatatgggaacaaagaaacaggctatattcttttgtccctttgtccttagccttgtctaatccaaattaagaagaaaaatgttctttggctcttatagaaaaaaaaacttttcaatgctaaagatgacataggctttctcatggtgcttcttgtggtgatttaacgtagtatttaggagctgatgtacactaggaggagggaaccccaattgcccttaatatacaatttattctgcttcaattctttgtttcatgtttcacatgggcaattctgaaataattttggcatgtagtagctatatttctattacaatggactgatgttct

SEQ ID NO: 424226 - DNA, 410 bp, Oryza sativa nipponbare
gcggccacgcgtccgcccacgcgtacgccgcacgctgttcggctgtgctccgcatgaggttatacagaaggagcactgagctcatgttgttgagcagttagacttttgcctgctggttgctggccaagatccgctctcgtcgtctgcagctttgttcgaagcctttgattctttagcgaagaaattgcgcctattgggtgatgttcctcttaaaatatcaaccgtgcaacctctagatccagcttttagacacacgtctgtgtttcctcctgagcctcatcctttggcatatgaaaaaaggtcttctcagaggctgccaaattttacagctacttgcatgcgatcattagaagtaatgattcagctagagggatctggtaactggcccttggatcctatagccatggaga

SEQ ID NO: 424227 - DNA, 63 bp, Oryza sativa nipponbare
acgccagccgccgccagctcactaggccgacgcacgcaccgtcgccgcgccacagttccagcc

SEQ ID NO: 424228 - DNA, 496 bp, Oryza sativa nipponbare
  unsure (1)..(496): unsure at all n locations
cttcaataagccttttcatcttctccttcctctggcaacgcgaaagacgcggtatgatctctacttctatacccaggagcaaccgtagcctccgtatacgactttggaggaacgcaggtggcatggtcggctaattctgggctggctgcagggttcttgaatggacaagatgttctccttcaggtccagcgtcagatcaacttccaatggtgacaaagcctccaattcaatcaccgaggcatcagagatgcaggagaaattgaacaagctgcaggaagagctgaagaatgagaaaaaggagaaggcgcgtgctctggatgagatagcagggctcaagaagaaaaagaatgagaataaggtgacaagcaatggaggtgatgataagttggaccttgtgcacagattaagagagttagaaggtgaacaggaggcagcaagggattcagagaagaaacttgctgtgtcattgngggcccaaacgaagcagcttgaacaa

SEQ ID NO: 424229 - DNA, 523 bp, Oryza sativa nipponbare
ctaaatgccaatgacgacggaaagcttatcaacgctcttcctgatgaaaaatatgagcttgattggttcttggtggatagtgccaaaggtggaaggtcagattttgctcttattgcttcttctatgggaagtagaaaaattgctcaagtgctgaaattctctgtttattccttaatatgagatcatgggatttgtaatgaatgctcaaaagagtaaaagttgactcaaataacctcttacatgtttgtgatataccaacttaaacatcagcaccttgtagcactatcatgtatatgctagtagttcttgagttcaatattctacttcagttctttatcttgcataatgcatacttactaaaagttcttggagtacatgctaatttacttgcatatttccctgctagaacaaatatatggctgacatctacatcttgctctatatgtttatagtggcaagggattcaacctggcagaagtttcagatgccgtctgttcgaagcaagaatgggtggcttttagct

SEQ ID NO: 424230 - DNA, 202 bp, Oryza sativa nipponbare
ctcaatcccactgacacccgagagcttaccaacgctctcactgatgaaaaatatgatcttgtctagttctttggctataagccgcaagaggttgaatgtcagagtttgctctcattgcttcttatattggaagtagaaaaattgctcaagtgctgaaattctctgattattacttaaaatgacaacatgggatttgctagtg

SEQ ID NO: 424231 - DNA, 299 bp, Oryza sativa nipponbare
gccacgcgaggtgcaacccgagcacgcttggctgcgtatatggtcatatgcaacacatggagtagcctactgctagctagtgccggagtgctcgcagctctagatgatgcaatggatgacggagtcgcatttcggtgcctgtacattgatgctgatgaggatacatttggcgcgctgcatgcgttacaacaagtgattaccattgagcatgctgggggacactatggccctcgaccacaaggtattggcaatacagctcctagtggtattacagacgcagcaagcaagatcgatcggtc

SEQ ID NO: 424232 - DNA, 373 bp, Oryza sativa nipponbare
cccacgcgtccgcccacgcgtccgccgagatctcctccgccgcccacctcgtcgtcctcaacgccgcctccctcctctcttccaccggcgcctccctcccggctccacctccgcctccggctactaccgtccaggagctcccccccgtggtggtctccgtgcctcaggaacccccgcaagaagcagccaagggcgacggcgactacgacgtcgtcgagctcgacgcctccgagcttctcgcggagcacgtccacttctgcgacatctgcggcaaggggttccgccgcgacgccaacctccggatgcacatgcgcgcccacggcgaccgcttcaagaccctggacgcgctctccaggcccggccagccgaagcc

SEQ ID NO: 424233 - DNA, 192 bp, Oryza sativa nipponbare
gttacgcggttcgtctagcgtttagtgggttgagatggcgagcgccagatgtcgagtaccgctgcttcgtcgaaatcatcgcctgggtcaccaaccaccgatcacttgcttcatcctacaaaacaaacagatatatattcatccacaaaacataaactgcatcattactaaaaaataacataattatataat

SEQ ID NO: 424234 - DNA, 501 bp, Oryza sativa nipponbare
  unsure (1)..(501): unsure at all n locations
cttgccactaaagcaatcatcgcaaacccggatccatggattaaaggctactaggacaggcactgatcttccaaatgaccaaaccagactttacctctgaaaaggacattttaccagatcacctattcccagtatgtactatgcatctactgatcacatcaggcaacctataacaactccacccctgagaagaagcaagttgctcattccggtgatctttctccccaaaccactgacaatggccacagagtgtggtgtgaacaaatcccgccgcttcgatcctggcatgtcgaggcgaacacgaagatcaacaagtctcatcgtttgttatcaagatcaacatgcgccgtccctggtgcagcagctacgtcaagatgacaagctgaagacattgttccagcgccaaggtatggagcttcagccaccatatnccatatgagatcaggagctgcaaaaccgaaggtgatgaacaaggagacaccgaatcgataccatgatgag

SEQ ID NO: 424235 - DNA, 317 bp, Oryza sativa nipponbare
acgcgtccgcttaatacaatgatatacaagccttttacgtattaaaaagaaaaaggttcatattacaactctcgcctggctataagagccgcagggtgccttagagttacaaagcggatgtctcgcgataccgtatgaaaaccttttttttaaaaatttctcagccaatataagctggactagctcctattcacgcggaaggatccaattaacagctttctctctgctgctgccaccatacgctctcattaattgtctgatgctctcattgcatgtgcaaaatctattgtgctcacacttgttgccgatcactttta

SEQ ID NO: 424236 - DNA, 279 bp, Oryza sativa nipponbare
cacactcttcctctcatgcttacggcgacctctaaggcttggatctcactgatgcttgtgctcatcagactgactatcggcacctgaggagatggcccaagatgctgatgctgcgaatgacggttgcaatgccactgcacctgacaagcttacacttgtctcatgactgtttcttgaagccagaagagatcacccatatataaggagagctctctactcccctaaataaatacactgctggatactcagttcataatgttaataagctgctcatgagct

SEQ ID NO: 424237 - DNA, 484 bp, Oryza sativa nipponbare
cccacgcgtacgcccacgcgtccgcccacgcgtccgaccacgcgttcgctgacgcgtgggctactaacaaaggtatcagaggaaattaacgtatatatgtagctatatatagaaactgacttcattcaaaggcaagaacagaaggcaaggtatactgatactaggtgacagcatgaaagctgcccacatggctgagacatatcagacatatgatcatgactctaagcatccccataaaaagagaaagcactcacgctgtgaaatagccggcgagctgacaccacacggttgcaatgttaccacggagcatacgcagaacagcagcctggctaaagagcattagactacttcctacactgaggctatgcccggtacaacatatagctgactttccaccactaagactctgacgactgaagcgtcaagtacccctagttaaaccagaaatggtgttaacattcctgtaaagtctacacctacaaat

SEQ ID NO: 424238 - DNA, 468 bp, Oryza sativa nipponbare
cccacgcgtccggaaaaagtatcaatattggtgcattgttttcatgcctctttgcattcccgtcgcctgttctgaatctctcatctggcaggcccgctatcttcagattcgtgattgtcctgttcaatggagatggtgtagatacctgcaatcatttatttttatttttaaaagccataacaggattgttcttgagcgaccggaatatgggtatgcgacatacttctttgagattgtgaaatcactgccaatacaatggcagatccaaaggatggttactgcaatgaagcttagtggttgtggcaggacagctctgattgaaaataggccattattgattggtgaacatttgacggaaggagaggcgcggtttttggaagaatatggctgggtaccaaattctgggcttggcacaatgctcaattaccgtgaccgggtagttcatgacaggttgaacgagagatctgg

SEQ ID NO: 424239 - DNA, 307 bp, Oryza sativa nipponbare
acgaccacgcgtccgaaccacgcaaaaaatctgccaaaagaagatcccccaaatccgccaccgcgctcacgccggcgcaaccatggcgacctccggctctttgagctcttccgacgcgttgggatccaccagctcctccccattctacttctacaccggcacctaccacatacgcttctgcttgtatcaatccggcctcagctgccccagcgactactccctttcccccgactgcgccccaagcttgtgctactacctattctactgcttctactgcggcgacggtcccacttttggatactcccta

SEQ ID NO: 424240 - DNA, 165 bp, Oryza sativa nipponbare
gccgcccacgcgtccgcgccactcccctcctaccccactctcgtctcggagaaggcaacgtcgccctcgccgccgcggcggccggatccggcggatggcgaactcgaagcggctcccgtactccacggccggcggcggcgggggaggaggaggaaggaggggagg

SEQ ID NO: 424241 - DNA, 421 bp, Oryza sativa nipponbare
gcgaaccgcacgaaactggtgctgataataaacttccatctagtgtggcagaagatgcagtgcaaggtgaaattgatggcagtgctggcggggacagtcaaataattgctggtagttccgaagcagaaatcaacaattctactgtggctactatagctgacagccaaataccttttgatccctcagataaggacactcttgcagaagatggcaatggtctgcaacgtgaaggtactactgtggatgtgactggttctaaggaagatgatatggaagctgaagagaagcagatggatgatagtcatttgcccgctgctttacaatcaactgagtcaagccagcccacaaaacatgctgcccccacacaagatgatggcaatggtctgcaatgtgaaagtaccactggtgatgtgtctggttc

SEQ ID NO: 424242 - DNA, 366 bp, Oryza sativa nipponbare
atctgattctgagacacagtctgctcccccaactcctaagcctgactcggaagagacaacaccaaaacagaagcgtaaaccaagagcagctggctttgatgtcttccttggttctggtggaagttcagacattttcaagaaggggagcgatggatcatcatcatcttcttcagaatctgattctgaggttgacgaattgagagaagacaatgtgtgatggaagtccttttgcattgaacgaacgaattgccgagctaaaagatgagcttcaggaagcaagggaaaaacttggggcacttgaggaaaagaatacacgctgcccatgtgaaaaactctgtgggaagttgaaggattcgcactcagaaa

SEQ ID NO: 424243 - DNA, 476 bp, Oryza sativa nipponbare
cccacgcgtccgggaaatcaaagttctcctcgattgttttgaagcttcgtgggattgaggaggagacatggagacaacacgtcactggaggaaagcttcgggaaattaccgaggaagccaaggcttttgcaattggaaacaaggctttagctgctctctttgttcatacgccagctggtgaattgcaacgccagatccgagcatggcttgcagagaactttgagtttttatctgtaactggtggagatgttgctggagcttccgggcaacttgaattattatcaactgctattatggatggatggatggctggccttggtactgcgagacccccctcaactgatgctttgggtcaactgttatccgagtacacaaaacgagtttacacatcccaactacatcacttgaaggacattgctggcacattggctacagaggtggctgatgatcccgctcatgtcagtaagctacgatct

SEQ ID NO: 424244 - DNA, 258 bp, Oryza sativa nipponbare
cccacgcgtccggtaacacctgcgcacccactgactgaaccagaggagttgaagcagagtaaaacagagcaaggcggcaagaagaaatacgctttcagctttagaaaacataatatgtttagatgaatgacttgtggggctagaggccagctgtatggcgagggaggttaaaaaccccgtgatactatatctgttcgacaattacttctctgtttcatattattaatcgtttgaatttttgagattgaaagtttcatt

SEQ ID NO: 424245 - DNA, 402 bp, Oryza sativa nipponbare
  unsure (1)..(402): unsure at all n locations
cccacgcgtccgcccacgcgtccgctccatccactgtgtcgccgccaccagcatccactccgccgtcaccaccgtccccttcctcctcctcccacccgccgctgcgggcgccgctgctcatcaccatctccttcaccttctctttccccaccctcacgccgccgcccaccacgccgtcgtcctcctcctcctcggtcgcgcttcgatccccatcgccatggccttgggtggcgtgtccatggccatcatcgccatggcctttgggcgcggcggcggcggcggaggcgggagcgtgaaggggagggacatggcggngagcggatgggcggccgacgcctgctgaacggggcgacctccctggcgcggcgctcgagcggcaatgcgcgcatcggcctcgcgcga

SEQ ID NO: 424246 - DNA, 250 bp, Oryza sativa nipponbare
tcgcactcgtacaattcgccaacaaccaaatcaactactactacctgaatgtggagctcactaatcaacaggatattaacagcgtggcgggtactatcagggagacgaacacagctcttgaggcagcaacttttcctggaggctatcccagacgattttacaccgattgcaactctgatcacaggttacctggcaaggatggtgtcataaccgatggagctagcggcatcgatccagcaacagccaagga

SEQ ID NO: 424247 - DNA, 179 bp, Oryza sativa nipponbare
gcgcgccacgcgtccgcccacgcgtccgctcgccacgccgcccctgccccgtccacaggcacagcccatacgatttcccttctgaatccggctgatcgcctcctccggcaccggcgtgttcgattcgtcttcccgcggcggcggcggcggcggcggcggcgaggaaagagggggtgagg

SEQ ID NO: 424248 - DNA, 296 bp, Oryza sativa nipponbare
gcgcccacgcgtccgaacattcaaacacactgatacaaataaaaagcctatcgactgccctattttacccctacccacccatctcctgctcgagctccacctcctgatgggccctgttcatcactacgcaccggctatagctgctacttccgacgatatgacctacaacgccttttcacaccactgatatagagcacctgtagggtaaacagatcaaactcacgtatacttcaaacatccaaatacgctataaacttgaccgatgatacataaagacaatgtatactgataaacct

SEQ ID NO: 424249 - DNA, 398 bp, Oryza sativa nipponbare
gcgccgacgcgtccgggcgttcgccacactggtgggagtgggaggcctatcgcctgccctcttctccccctcccgccccctctcctgctgcggctccacctccgtctcggccccgttcatcctccgcgccggcggcggcggcgacgcccggcggcatggcctccgacgcctcgtcaccccactgagagggagcgcctgcaggggagagagtacgaactcacgtgtactccagtgtgccaatgaggctaatgtggtgaccgaggatgacattgtgaacgatggtatcgatgatgaaaccgcttccgatgctgaaatggatgaggatgctgaagcaaatggtgatgagtcgtcaggcactgatgaagatgcttctgtctcctggatagagcagcagcctc

SEQ ID NO: 424250 - DNA, 470 bp, Oryza sativa nipponbare
  unsure (1)..(470): unsure at all n locations
cccacgcgtgcgcgcccacgcgtccggtggaagcggcggggcagcaggcggtgggcggagcgacgacgggcggcgagaggcgggcggcgtagcgagagcgctgcgtgggaggaggtttcctcttcttcctcctctctcctggcatctttggcagtcggcgatacggcggcaggagcgctgggtgggtggggggagtcnncaggccacgggcgacgatgagacaatggccgtcgccggcggcgcagcgcgcgacgaggcgccttcccggggcggccgacggcgccggcgcgcgtcctgggcatgcagcggtggcggcgacgcgaccacggaagaaggggagcgcagatctggcggcgctgctgctgctgcggcaacaggcgtcagctccgaatccggaagctttccttcccttcttgccagcggacattcaccttcttttaccggctcaactggatatgtttagcttacat

SEQ ID NO: 424251 - DNA, 481 bp, Oryza sativa nipponbare
  unsure (1)..(481): unsure at all n locations
cccacgcgtccgcgaccaccggcggcggaggagcgggcgagctccggcgatcgccgccgtcgccgttgccgcggaggatgatggcgaggagcaccatctcaatccgttcttggacgccgccccgtcgtcgtcttcgtcgagagtccagttcaggtgctgtctttttttttttttcctttgcttcgtgttagctcatcgggttgtgtagcgggggagcaggaaggtggcgtcgcgcgcggtgtggctggaggaggctggtgcggcggaggttgtggacagcaagggcaagctctggctgaccaccggtgtcaaccgggacggcaagctgtactacaatgtcgaggagattgggttcttggcagaaagaggggcattggttcttcttgattacgagggtgaaacaattggaatggaggaaatctacggaaagattgctggagggaaatatgggtgctcctgggatgccttncaagcttacaag

SEQ ID NO: 424252 - DNA, 491 bp, Oryza sativa nipponbare
  unsure (1)..(491): unsure at all n locations
cccacgcgtgcgctgaattgtcctcctatgaattacattcaatttctcttccttacacgtggggttttatgtgtgctcagtgactacgccgtagcaagttatacttgctgatccatatgtatctttgctaaacagtactatgtatggtggtttaattttaatggttgcaaatcttggtttccctgtaagtagctagctagcatgatttttttttcagtcatagtttactcttttaacgggcaacttgtttataaacaaacagctcacgggatgttggccttatgtcattctagagcacttttcagagtttaatatgacacanaggctntccaaacgatggcgatgcctacggataatcattttcctgctgctcttacatatnntatatatatatatattcttttatttacttaattattttgactgataagagctggagactgctatatttcataatgaatattcttcctttatgtttaaatcaattaagt

SEQ ID NO: 424253 - DNA, 224 bp, Oryza sativa nipponbare
cccacgcgtccgcccacgcgtccggacaaatatatgtgttgtggctaaaaacaaaaaataaaataaaaacaaaaaaaaaaaataaaaataaaaaagagaaaaaaatttaaaagtgttgtaaaaaaaaacataaattatgttgccatattaaattataaaatatttggtccccctttctaaaaactccaaatttacttcccctttcttccgccgctttatctttt

SEQ ID NO: 424254 - DNA, 455 bp, Oryza sativa nipponbare
  unsure (1)..(455): unsure at all n locations
gcgcggacgcgtgcgttctctttgtatggctacaacaagatagttcttgtaacacttagcatcagaattcattattnccaaactgataatggtgaataccatgatctgccaatggaactcaacanctcatcacttctaattaccataggagataatcaagttaatgctttgattgctcctgcatcactgcttgcccataatgctgaattggacgggaagttgcggttcataacatcgatgacagcgagtgttaagtcatttacaatgcgatgaacattaagtttgataactctatcaacgcaagttttatcaacccatctaaggtgagaagatacatgctccataactcatcctgaatggttcaatggtcctcaccttacaggccatgggtagtgagcatccaaatcccaatgcttctttttattatctaacagtaggtaccatcacactatttc

SEQ ID NO: 424255 - DNA, 370 bp, Oryza sativa nipponbare
gcgcgccgccgcggcccgcggcccaagccgccattatccgctcgacgaacgtcgccgcgtcgcgctcttcccggaggctctctctgtggccggtctctgtagggctccactaatggcgaaaacgcggcgcggcacgtcagtcgccaagggttcgggagataagaggccatccacttatccaccctagcctactctgtagggaagacccccgccgaacgctgcgccggtcgtcgccggagtccgggctcagcagatcgaccccccgtagagtcattaaggaaagggtttgagtgctcagatggggtgagaagaagctatccaagggcggcgcagacgttgtatcgagtccgtactatctctctcttttagc

SEQ ID NO: 424256 - DNA, 306 bp, Oryza sativa nipponbare
ggaacgctgagtgcacttattttatggtactatcactacactcttcaaactgagtttgaggaactgcagcttggaaggacctgcactgatggagtggaataccccaacgaggctatcttgatcttagctggaatcagttaaggggttcaataccatctgggcgaccagcgagcacacataaccacgatagatctttcccacaatcttgtacatggatcacttactggaagtccgtctggccttgcgaatctacaacgactgtctttggacactaacagtttgtgctgcactgctccatcatatgtc

SEQ ID NO: 424257 - DNA, 443 bp, Oryza sativa nipponbare
  unsure (1)..(443): unsure at all n locations
cggacgcgtggggttcgcctcttctccaataaagcagccgccccagcactcacgaactcctggaatcatccggcggcggcggcgagaggggatgggtggagcatgctgtcccgcgcccgagtcctgctcgaggagggcaagccgtcgctcgcgctgcaggcgattctcttggccataagatcccaaggtggtgaacaggctctcatgcagacgctgaaccgtgcacgggaactctacaggcaaagatcacagcccagccctagtgttgatgatctcgcttctttgcttgcacaatgtgctatagcagagtcgcagtcaacaaacactaatcctcaacaagtacctggctctgaccctgtcatgatgctggattctgatgaagtctgcatacttgctgagagtggaaggaagcanataattntagatgcttttgctgacggcag

SEQ ID NO: 424258 - DNA, 367 bp, Oryza sativa nipponbare
attgaatacagcgctgagttcgcaagtactcctagtccaagttgattttgatgatgccggtgcgctctagtagacgtaatgtgtaccctcgctcactttgctggtacttgaagggcacggaagctgtagtctgtaaattatacttctttgtaccaacttccctaattatttcaagcatctcaagctatcatttttgttggcagaaccctcaacaggatttatgttaggatttcagaataagggtcctaatagatttttttttttgcctgctcaaagcaccatgttttacaatcaatggatgtttgctcaacttatctctcagttccagccttttttacggctctcgtgttatttattcctataccgc

SEQ ID NO: 424259 - DNA, 375 bp, Oryza sativa nipponbare
tggaacgttagttggaacgtgttcctacgttgtttggaacgtccctctatctctccatggtcgtaccacagcgtgatgagggcaatgcttggcgattctccactgcatgatggtgctgacgctcgtacatgcacagcagaacgttggcgagcagcgagtgagcaacaacagcgttcgtcccatccagatgagttcaaatttagtgaaagttaatcaaattatagattttgcttgaaaattttggattgcctttccatcattttccatcgtgccacattaatttctctatcagaccactctacttgttactccataccttgtactaggacgactctcaagacaagttccatccattttcgggacgaagtccacata

SEQ ID NO: 424260 - DNA, 80 bp, Oryza sativa nipponbare
acagcgcagtcttgatggggattgggacgcgcgatgtatccgtgcattaagcgcggcaggtcctagagggttctctcaac

SEQ ID NO: 424261 - DNA, 244 bp, Oryza sativa nipponbare
  unsure (1)..(244): unsure at all n locations
gtcgcggggcccgcaggcggtgcatcccccagcacaagcaggcctgatgagagtgaacatcctgggaacccgcaccttcacntgtcctggctgcgactgtgcagtggaccactcgtgcacaggcggccgtgaacaactttatgacggccacactcgggcagatccgccgcgtgggggctacgggctatgcgtgcctgtccgctccggcctttcggccatccgggtgctaccgtgcttcaacctc

SEQ ID NO: 424262 - DNA, 492 bp, Oryza sativa nipponbare
cccacgcgtccgagcgcaagtggcattacagctgaagaccatcaccagggaggtcttccttcactgctgcagaatggcagcatgatgggtcctaacaatggatttgatccagtcaaggttagagatgatcggatggtattgaattcaaaaatattgaatctacagaagaagtggaacgagtactgcctgcggctccaccaagactgccagaggatcaacagagatccttacaaaccatttccacgctatattggtgttcccgctgacaaagaaagatcagcaaatccaagcaaaggttctgagtcaattggggttcaaaaggatgttattaaaccttgtgcagtgtctgctgtacattccagctcaactgcaaggcctatttcatctccatctgtcaccaacaaaagaaatggagatcttgtattgaaccttcaagccaggcattccaagagtgatgaaaaccttcaagaaaggggcatgcaatcccaacat

SEQ ID NO: 424263 - DNA, 369 bp, Oryza sativa nipponbare
cggacgcgtggggcgccgcgagcgaggccatggccatgatgctgcgcctgcagcgggagaaggccgaggtccagatggagctccggcgagttccgccgcttcgccgacgagaagatggcgctcgacgccgccgagatcgaccacctccgcgccgccctcgcccgccgcgcccgccacctggcgcgcctccgctccacgctccgggagtaccgccacacgtgcctccgcctcggcatcccactcgccgagggcgaccaagccgatgagttggccctagacgacgggttcgttctcgagggcgaggatggcgacggcgccggatactacccagagctacgctgctacgacggggagtactactacgaggat

SEQ ID NO: 424264 - DNA, 350 bp, Oryza sativa nipponbare
  unsure (1)..(350): unsure at all n locations
cccacgcgtnncgccatctnctnctntncccaacctctccccttcccgtgggctgactgacccccttctggattcctgatccccttacaccaacgcgcgggccttggtctttccttcttcttggccttggcttccccgtgtggatctagcctagcccccccttccctctcgccctcgtgcttctcacgagatggactaccgcgacagggaggtgcggctggtgaggaggaaggggaagaagaagctcgctccgccttcgcctccgccttcggcggcggaaaggggcgagagggacaggttggacgagctccggcgggactaccgcgatgtgctcaaggataatgagatga

SEQ ID NO: 424265 - DNA, 260 bp, Oryza sativa nipponbare
cggacgcgtccgatgcacgccgtggtggatgttgtcgccagctgcactgatgagaacagacaggatcagtgaggatcatgatgcatcttggtgcaacggtggagacctcctacatctgcctgggctgcaggacacacatggttcaagttgtactggattgcccactctacattattaaaggtgatggtcaaagatcttgtttgtaattattagcagctgtgtagttgctgttgttcttttaacatggggattggaaagct

SEQ ID NO: 424266 - DNA, 314 bp, Oryza sativa nipponbare
  unsure (1)..(314): unsure at all n locations
ggcactcgcagcgcctctgctccgcctccggctgctgcctctcgccgccttcgtctccgtcgtctccctcaccgcggcgcctcggcgtgcggaggcgtggggcaagcagggccacatcatcgtctgcaagatcgccgagaagtacctgtcggagaaggcggcggcggcggtggaggagctgctgccggagtcggccggcgggagctgtcgacggtgtgcccgtgggccgacgaggtgcgattccactactactggtctcgtnctcttcactacgccaacaccccccaagtctgcaacttcaagtactcacggga

SEQ ID NO: 424267 - DNA, 340 bp, Oryza sativa nipponbare
cccacgcgtccggcagatgcttcaggatcgtattggccagctataactgaaatgggaggcgccggtgcgatgtgcctgcttgatcaccatgttgccaatgacaaattaagtcttctctttttctttgttcatatctgtgagctaggggcaaacatgatgaggtatttattgttgcgatccttggcaatgcgtgcaatatgtgtagtgttgctttcagtttttgaccgatattaaattggttcataagctcatcctacatgggctgtgtgttgagaatgaatgcttctaacaatcctttaaaatcacgagatgccactttatcagaaaaaaaaaaaaaaga

SEQ ID NO: 424268 - DNA, 238 bp, Oryza sativa nipponbare
  unsure (1)..(238): unsure at all n locations
accaggcccctgaaaaaacatatttcttacagttcagtccctccgccgccgctggctcgcttctccggccaccgcgcaccgatcaacgcttggcgctgaccaacctccccacgggcggtggtggccatngcatggggttctctctgcaccggatgtagatgtgcacgcgcttgctgtggagcaccagctttttctggcacaggttacagggcgttgtcgacggcggcttgattggggg

SEQ ID NO: 424269 - DNA, 141 bp, Oryza sativa nipponbare
cggacgcgtgggcggacgcgtgggttttgtagtaagcaacagagtaaattaagaaagctgtgactgcaatagtggatggctcgaccggcagctcgccgcggcgcaaggcgcagccgcgcccgcggcctcctgctcctcgcc

SEQ ID NO: 424270 - DNA, 52 bp, Oryza sativa nipponbare
gctgaaggtgatattcagattttcagagtgagtgctcacgtgttgtgcaatc

SEQ ID NO: 424271 - DNA, 213 bp, Oryza sativa nipponbare
cccacgcgttcgcgcgacgcggcgacgccctatggcgacccaccacgcccgccgcctccccgccgccgccgccgtcctggggctcgtgctcctcgccggcgggtgcgcggccgacgacacctccagcgacgacgacgcgggcgtcccgacgtcgtccggctgctccaacaagttccagctggttaaggtgaagaattgggttaatggaactga

SEQ ID NO: 424272 - DNA, 541 bp, Oryza sativa nipponbare
  unsure (1)..(541): unsure at all n locations
gtcccctcctcccccgcgctctccctctccccctcacgccgtcgcgtcgctgtccccgacacctccgcctccgcctcccgctcccgccgccgcaggtccgccgttcgccgcctccgttgccgaccgccaccgccccgcgccgccttccccgcctcagcctccgcctccgcctccgcctccgcctccgcgcatcgcaacgcaacctcaggcgcagaggcggcgacttgactcccccctccccgccctctcgctctagggtttcctcccctccccgtcgtcagccgccaccccaccccctcccccgccgggcttcgccatgtacggtcaccgcggggcaatgatgggaggcgggggggtttcggatgggtacgagggatcaaagaggccacgaatgatcgaatccaatccatacttcgcagtgaccgcaggcagtcccttggatgtctcaaagagggccaggatgatggaaccagcccctncctatttcggagccatgggcagcagcgctgctggtggcaccagtgccttctaccagccctac

SEQ ID NO: 424273 - DNA, 395 bp, Oryza sativa nipponbare
attcccccaaaaccctagcggcggcggcgcgcgctcccctccccacctccgccgccgcggcgtcgaggcagcaccggagggcgatggcgtcgacggtgctggaggcgacgcgggcgaagcacgaggacatggagaggctggagcggctggcggtgcgggagctgcagcgggagcccgccaacgcgcgcgaccgcctctaccagtcccaccgcgtgcgccacatgctcgacctcgtcatctccacctccggcaagctcgtggagatcattgtacggacaaaggaaaatgcagagaagaagctgactctcacatatgaagaaatggaagcagaacgagaagaggaagaagtgcaagctgatagtgaaagtgatgatgaagaccaacaaatctacaat

SEQ ID NO: 424274 - DNA, 459 bp, Oryza sativa nipponbare
  unsure (1)..(459): unsure at all n locations
cgaggatgctaataacagtgaagtggctgaagctgtgaactcagatcctgtcgccgacaggaagacggccatcgaggaagtagagattaggctgagggaagaaatggggcatcacaataggattgccaggcaggttagggagaaatcacttgccaaccttcggatgcacctgccagagctcttcagaaacatgactgattttgctggcttctgctatgaaatgtacagcaatttgagaaaatctgctgtactgcccaaagatgaagtgcaaggctgatgctgtgctcccaaaatgttagttatgttgattctcgagttcatcagctgtaggggaaaatactggttgtagctgttcactggtatcgntttgatgtgctgttttccttttcttttttgaagtgcatcgtagagctcgtgagaattaatgatttgatctgcctgtaaattgaaacgatccta

SEQ ID NO: 424275 - DNA, 489 bp, Oryza sativa nipponbare
cccacgcgtccggtggtggtgagccggtgatcgatcttgcatcttgcgagcacacgggattccagatcgatcgagctatagctagctagctaattagttaccacgtacgaacgagtactttacaactcgatcagttcatcaaattaactcgatcagtggttaagtttcgcacgacacacgcgcgcggatcggaagccatcatgcagatgcaggtgctcaccgctgcttcttcgctccctcgcgcgaccttgctccggccggcggctgccgagccatggcgccaatctttcctgcagctgcaggctcgtccaatccagcgaccaggtatcatgctacactgcaaggcccagctacaggggcaggaaacgcgcgagcgtcgtcagctcgacgacgatgaacacgctagaccaccacagggcgggcgacgacacgtcgcagcaagcaccagcgagctaccctacatgatcgagtccatcaaatccaagctga

SEQ ID NO: 424276 - DNA, 260 bp, Oryza sativa nipponbare
  unsure (1)..(260): unsure at all n locations
gcgcccagatctnctnctctcttccttgctcagctggtcttggtcctcttgctaggtgaaacactttcttggattgctgagaccatgttgagatcaagaaaatccagggtaatggtgatgctagttactgctgctcttctactgacggatatggccgccgttagctatatgcgcaggctcatatcggacctctatgtcatgtgggtggtgtcggcggctcgccgccggcgaaaggcgggtacatgtcaaggttgcaggtt

SEQ ID NO: 424277 - DNA, 297 bp, Oryza sativa nipponbare
ctccctcgctgctccgaagtgtcccgcacttctcgtcttcctcctcgccgtcgtcttccacaaccaccaccgcgccgccgcctaccaatccatccagaccttctcctcccccgccgatgcacacaaatcgccggtgacgtcacgccggtgaagcagcagcactaggagaaggaggagcatatggctggtactcgctcgctccgtccgtccgtcggctcggcacctgcgccgggcgctcgttcgctcgcgcgggtggccaacccgcgccctgccggcttcgggttctctccctatccg

SEQ ID NO: 424278 - DNA, 465 bp, Oryza sativa nipponbare
caattgaccagttcctggtctccatttttcttttgctaattttttgctggtcagactgctcatttacaaccacttgtagtaggcagtagtacatgattcagcaagtcagctctgtcaagttggcatgttcagtaatgtttacttcagcaatgtccttatgagtatgacttttgaaaacaaaatcaaaatctcgatatgtttgatgaattcgcacagctgtttttttgtagttgtatatggctgcttgtagaagttgatctgacatgcaaaagaaaatgttcttttttaggttaaaattgtggcagtggtcatgtcagcgatttttataattcttaagaagacatcgtgatataccatattttatagtctaatttttgttttaccatctagtatactaaaactgtatataatagaggtacctggattcaggatccactatctcagtatacctaaaattcggatcgg

SEQ ID NO: 424279 - DNA, 133 bp, Oryza sativa nipponbare
  unsure (1)..(133): unsure at all n locations
cccgcgtccggttctagatcgcgagcggtcgngcgggtttttgttgttataaaagaaaaagttcctttgtttttatgcatgtcactttaaaaaatcacaaaaaaaaaagcaacacaaaatactcacatatata

SEQ ID NO: 424280 - DNA, 114 bp, Oryza sativa nipponbare
cccgggcgacacaatacgccctaacctggggggtcagttagctttttttttgggttaaaacggacctgaggaaccttggctggccagcaaacctttggccggcctaagggcgct

SEQ ID NO: 424281 - DNA, 154 bp, Oryza sativa nipponbare
agcgtccgcaatgcgtatcgaggtcacatctgactgtgacaatggcggataacaacagcaagctctcggagcccctcctggctgtggcgctagggcggctcatcatgctcaagaccggcgccaagcccaagccggctgcgtactgcgagaacca

SEQ ID NO: 424282 - DNA, 134 bp, Oryza sativa nipponbare
  unsure (1)..(134): unsure at all n locations
ggtgccgggattcccgggtcgcgcccgcgtgcgcggacgcgtgggcggactcgtgggggggggggtgggttcaaacattatagtgtgaagcatanntattanaatnctacatatatgtanatcattttcttatt

SEQ ID NO: 424283 - DNA, 351 bp, Oryza sativa nipponbare
  unsure (1)..(351): unsure at all n locations
cgcccacgcttgtccgcccacgctgtcacgcttctgctgtatgatctcactgtatgataactcgctatctcatttgtcactcgctactgtgcggctaatcgggcaggaggccgaatggagcgggcggaagatgacaacaaagaggaagcgtgaagagccatacctcttgtcatctctggggggtgctgtgcaactacctttgtatggagggccgagcaaagagggagagagagaggaaaacgataaaaagacgtgattactaatgatggtgcctatacaaaaccagacccanggccagcgggcggcggaggcngcggtttancacggatccccagggaggggcngcggcta

SEQ ID NO: 424284 - DNA, 158 bp, Oryza sativa nipponbare
gcgcctccgcctcgccgccgccgccgatccgccattgttgttgctgacatggtgtttggttgcagcatgtacctgccgacgcaggatgactccaactacgagtcgagctcgccggacgggtcgcactcgtcgtcggcgccggcgccggcggccgtggg

SEQ ID NO: 424285 - DNA, 199 bp, Oryza sativa nipponbare
  unsure (1)..(199): unsure at all n locations
cgtccgcaacgctacacatgagtatcatggcatgagcgtatagagaagctcatgctctatggcatagtgctcgccgtgctcgacgtcgtaggaggcaccaggtgtgtgaatacaagcgaacttgtattagtacgtgatttgaatggtaatcctttcaccctgacttgnaatantcttattttttttagggggggggggg

SEQ ID NO: 424286 - DNA, 195 bp, Oryza sativa nipponbare
aggagatcgtatgtatttattttcctagttttcaaggtgtggggaagtgatgttggagaattgaactattttctcatgtgtttaggtattgattgatttaattttaaattttttaaaaaaaaaaaggaaagaaaaaaaaaaaaaaaaaaaaaaaaaaaaaaaaaaaaaaaaggggggggggtataaaaaataaaa

SEQ ID NO: 424287 - DNA, 231 bp, Oryza sativa nipponbare
  unsure (1)..(231): unsure at all n locations
ttcacatcttactgaacagctactactcctgggagctagctcaagctcaagctcaatctcaagctctttccactaagctccgtgtgtctagctcatcaatacctggctagctagctagggtgttgatcgatatatatnctaaaataaggaggggacttttttttttttagggggggggggggggnaaaaaaaaacggggggggggggaaaaaaaannnacggggggggggg

SEQ ID NO: 424288 - DNA, 254 bp, Oryza sativa nipponbare
  unsure (1)..(254): unsure at all n locations
caaacatcaaaacgttataagagttctctagcgtgcatcacatagccatgaagatctttgtcatcctctctctcctcgccctcgcagcgagcagcgcctcggcacagtttgatgcttgcacctatgggcaatgccagcagcagccgtttatgcaaccgatcatttttctgggcgggggggggggnacacaacaaaccacggggggggggcaacctnnnaacaggggggggggccacacctttacagggggggga

SEQ ID NO: 424289 - DNA, 97 bp, Oryza sativa nipponbare
  unsure (1)..(97): unsure at all n locations
cccacgcgtccgctggaggcggcgccgcgcgcgttcctgcancccagccactacgacgccgacgaggtgttctacgtcaaggagggcgagggcgtga

SEQ ID NO: 424290 - DNA, 278 bp, Oryza sativa nipponbare
cgtccgcacccggtcgccccgcgtccgcaaaattccaaatccatggacctccggatccccgcgggggcgccccctccgcggagttcgagatctccggagtcccgtctctccggcgctgtcaagaaggtgatagatctcgatgagctgaggatgctggctgtcaggggtccctgcggcccgcgccgtctactggtgaactgtgtgggctattgccatgtcgtgcctggggagcaggattggcaaaaaagaccagaccagctttaagaagatccttacac

SEQ ID NO: 424291 - DNA, 119 bp, Oryza sativa nipponbare
  unsure (1)..(119): unsure at all n locations
gttcttttcgcgagcttccccctgtttttgtttttaaaaaaaaaaanttcctttntttttatccatgtcactttaaaaaatcacaaaaaaaanaccaacacaaaatactcanatatata

SEQ ID NO: 424292 - DNA, 155 bp, Oryza sativa nipponbare
  unsure (1)..(155): unsure at all n locations
attcttcctcgctagtcgctagcctgcagattgcggcgtcccctcccctcccctccccatccatggcgcctcctctaaaccctaaccccgcgtagtccccgcccccctcccctacacctcctcggncccccggctgtccccgtgcccgcgcccct

SEQ ID NO: 424293 - DNA, 380 bp, Oryza sativa nipponbare
  unsure (1)..(380): unsure at all n locations
gcaatgctcatcgatgtctctatcctgactgtgacaatggcgtataaccacagcaagctctcggagctgctcgtggctgtggcgctggtgcggctgatggtgctcgtgaccggcgccaaccccacggcggctgcgtgcggcgagaactactactgcggcgccgcacgcgcggcggatgggtgccagccctagcaggacgtggtgcaccaacgatacgatgacagggtgccgcgcgtacctgctgacacactgcagaaatttaaaatcccccgtggacgcaggcaccgaactacataaagtaaggggatcatcagagagagaatggatcgctccatgtctgcccnaagtgatagtataattactttngaaatatatgctgt

SEQ ID NO: 424294 - DNA, 96 bp, Oryza sativa nipponbare
cgtccgatccggcgccagcgtcggcgctcgctgcgcgcgcgtccgcatgtgtgtgacatgggttggtgagatgactgcgaccagagactcatacag

SEQ ID NO: 424295 - DNA, 172 bp, Oryza sativa nipponbare
gggggcgcaccccgcctccgaggcttcggggcgcagcatacgggcccgcgctcccttgattgatccgccgaccaccggtcaggacgcgacggctcgagactcttcggccgcaggatcacgccgccactcgactcctcgacatcgatgcgcgagcagacgcgttgccatgtct

SEQ ID NO: 424296 - DNA, 220 bp, Oryza sativa nipponbare
cgtccgcatccggtcgccccgcgtcgcccgcgtcgtggaggcgggactatgggcaggcgtgacggcaatgccaaggcagcttatatggtgtgtgtgtttcggcgggggagaagcacggctacttctacacagccacccggtcccgggagggggacattggcggagagttgcaggcacctaccatgtcatcatgaaatgagcttttctccttctcttgtcc

SEQ ID NO: 424297 - DNA, 315 bp, Oryza sativa nipponbare
gatcatcaaagggcagcaagggcggctttttccttggggctcttattggggccattggggcccatttccgcgccccagttagccaagtggaaatataaggttacaggacacggcacatgcgcaactcggatagggcaagacacagctcctctgacaccctgtcccgtcagtgctctacaccgacatcacaccccgcgagagatgccagaggctgtttccccgcgccggcgcgctctcgctgtgcatacactgctctcacaagctctgcgagatgtgaccccagagtgtctttgcccccatacgcccggatgttga

SEQ ID NO: 424298 - DNA, 268 bp, Oryza sativa nipponbare
  unsure (1)..(268): unsure at all n locations
agcgtccgaaacgttacaatgattaatggaatgaggtatagagaagatcgtgctctatggcatagtgctcgccgtgctagacgtcgtaggaggacaggtgtgtgaatacaagcgacttgtgttagtactgatttgagtggaaagcgttgtaccctaacttggaatattcctattagtgctacttagtgggggggaggctcaacaaatttataatcatccaatcacannttcatntagagaatgnttaaacttatcaaggtggattttt

SEQ ID NO: 424299 - DNA, 126 bp, Oryza sativa nipponbare
tttttttgttttttgatatttaggagatcgtatgtatttattttcctagttttcaaggtgtggggaagtgatgttggagaattgaactattttctcatgtgtttaggtattgattgatttaatttt

SEQ ID NO: 424300 - DNA, 108 bp, Oryza sativa nipponbare
  unsure (1)..(108): unsure at all n locations
ttcacatcttactgaaacagctactactcctggtggctaactcaagctcaagctcaatctcaagctctttccactaanctcccnntncccaactcatacataccttcc

SEQ ID NO: 424301 - DNA, 132 bp, Oryza sativa nipponbare
  unsure (1)..(132): unsure at all n locations
caaacatcaaaacgttataagagtggtctgncgtccgatcacatagccatgaagatctttgtcatcctctctctcctcgccctcnncacnagcancncctcnncacantttnatccttncacctatnnncaa

SEQ ID NO: 424302 - DNA, 80 bp, Oryza sativa nipponbare
gtgctcagctctgggagaacaacttaccggcggcgtgccgcgccgcctctgacgcaatggccgactccaggtgctgcacc

SEQ ID NO: 424303 - DNA, 97 bp, Oryza sativa nipponbare
cgaaggccaaaacgccttgggcggtaccatccacaaattctccttggcctccaaacaccgagcccgactctgtgcgatcctagggtgggggggacta

SEQ ID NO: 424304 - DNA, 220 bp, Oryza sativa nipponbare
gcgtccgtcggaatctcaccacccaacccgtgcgggttagatagcccgcttcctcctctctctctcagctcaccacacctcgagtcgccgccgccgccgccgctgctgctgcttacctcctccgcgccgcgcactccttgcactagcccatggcgacggctatgatggctttttccggcaccggggggggccctcgccgcgcgccgggcggggggtcctt

SEQ ID NO: 424305 - DNA, 336 bp, Oryza sativa nipponbare
  unsure (1)..(336): unsure at all n locations
gcgtccgcgaccgtataggagtagtcgtgtagcagctagctagctagcaatggcggcttcttcttcttcttcttcctctctggcggtggtggtggtggcggcggcggtggcgctggtcgccggcggcggcgcggcggtggcgcagctgtgcgaggagtactacgactgcacttgccccgaggggggggacatcntgcggcgggtgcggggggatgcncaccggancaacncccggatcttcncgagcctaatccggctccatttccacaactggttcgngcaggggtgcgacncgtnnctgctgctggacagcgtccccggggtgccctnggagaa

SEQ ID NO: 424306 - DNA, 82 bp, Oryza sativa nipponbare
cggtcctcattcccgggtcgccccgcgtccgcgcctcttgggcgccttcactcgccgctcgcgcccaatcgtcgttgcacac

SEQ ID NO: 424307 - DNA, 120 bp, Oryza sativa nipponbare
tccaattccaattataattccaagaggcttatgatcaactcaactgaagaagaagaagaagaagaagaagaagaagaagaggaggagggttgtgaactgatttgggaagggagggggagg

SEQ ID NO: 424308 - DNA, 202 bp, Oryza sativa nipponbare
accttccatattttttgcaccaaaatatttggtttcacaccagggaatggttttaatggtggttcttcgccgcctcttcctgctctccggcaacgggaaccttggcgagttcccaccaccagaaccagggggtttcacaccccggcccctttttgtaagcaagaattgggctaccctttgaccccgttccgggttggccggc

SEQ ID NO: 424309 - DNA, 60 bp, Oryza sativa nipponbare
  unsure (1)..(60): unsure at all n locations
cggacgcgtgggcggacgcgtgggcggagtcgtnggcggacgcgtggggttctagatcgc

SEQ ID NO: 424310 - DNA, 136 bp, Oryza sativa nipponbare
tctccactactagcccacagctcccaaggatctctgccatttcttgagctggtcgatccatcggggagggagagaggtcgaggaggcggcggatggggagaggatggggtctggatctttactcaatctgctgtcc

SEQ ID NO: 424311 - DNA, 209 bp, Oryza sativa nipponbare
ccaaagctaattaaggaaacataaaaatcacctttcaacagggatgtatcggtgctgtgtgtttttttggggggggggggaaaaaccgaggggggggataaactatatagggggggctgacaattgacgtggaggagaatttttgtactggaaataaaaaccctaagatacacgcgtgaagttgaggaggatccaaaatattaggggct

SEQ ID NO: 424312 - DNA, 229 bp, Oryza sativa nipponbare
caggatcctgggtatatggccatgagggtggaatatcatcaggggccatctttgatgaatatacaaatgatgtgctggacatggcaccagaatcctgctttcccaggtttaaataccggaaaaatgaagcttcgacagaggggggcccataaccaattgcctcctcttgaaggggggggggagacgggaagaagcttccgtccagtgtcaaatccctaggggggggggg

SEQ ID NO: 424313 - DNA, 258 bp, Oryza sativa nipponbare
  unsure (1)..(258): unsure at all n locations
cccacgcgtccgtctagatcgcgagcggccgggcgttttttttttttttttgaagcaacaattgcaactcacgattggattaataaatcnttctttncaatatatcccaatccaccaatcctnttattacattacaancacccttacacaannnaatacttttttttttttcanacgggggggggggcaaaaaaaaaaatagggggggggggagaaaaaannccttggggggggggggggggggaatttggggggggg

SEQ ID NO: 424314 - DNA, 125 bp, Oryza sativa nipponbare
cccacgcgtccgctcagatagcgacctgaaatgtaaggcttgagaacttgagtgtggtgctcaaaccatatgtaaatattgttctgcctattcttaatgttcatttagtacgccgttatgcatat

SEQ ID NO: 424315 - DNA, 175 bp, Oryza sativa nipponbare
  unsure (1)..(175): unsure at all n locations
tctgggtgctggccgtcttccccaccgtcccgttcatgcccntcagacaaacgggcggttcactccttggagcgatgctcatggggcaaatcngggggatatcaaaaaagaaaacaattacttttttttttggggggggggggggggaaaaaaaaagggggggggggggggaaaa

SEQ ID NO: 424316 - DNA, 180 bp, Oryza sativa nipponbare
  unsure (1)..(180): unsure at all n locations
tccgcatcccggtcgaccccgcgtccgctctctcccccatctctacagacgcagcagcagcggcggcggcgacaagggaagccgatggccatggcgacctccaccttctcccccccggcctcgcagctctccctcacccgccgncgnctncacccgggccccgnccctcctcccctntcc

SEQ ID NO: 424317 - DNA, 106 bp, Oryza sativa nipponbare
gtccgcagcagcccgctggattgcaagaaagataacagcatgtctctgtcaagcagtcagtcaatgcccatactaccaaatcagggttgatgcccattcattgacc

SEQ ID NO: 424318 - DNA, 195 bp, Oryza sativa nipponbare
  unsure (1)..(195): unsure at all n locations
cttcgtcttcgtcttcctctcgccggtgattgaattcgatccaatccgatccaagggggangggaancaatggcngacgacnaggagcgtcaggacgctgnactactccgacgcggaggacaaccccaacctcctcttctgcaccaccatctacgaggtcgacctcctttgctcctggggggggggcctccccct

SEQ ID NO: 424319 - DNA, 114 bp, Oryza sativa nipponbare
  unsure (1)..(114): unsure at all n locations
tcccgggtcgccccgcgtccggatggctgtatctgattgccgcctgggggatcgtagaaatggaacanaacttgtgctcacttatgaggaccaggatgaagattggatgcttgt

SEQ ID NO: 424320 - DNA, 155 bp, Oryza sativa nipponbare
  unsure (1)..(155): unsure at all n locations
cggactcgtgggcggactcgtgggcggacgcgtgggcggacncgtgggcccaccgtcacatctcacnttatcacatgctactatcaangagacattccttctatatttcatcacaccgttctcgctgccacgcatggcatctgaggagngngaga

SEQ ID NO: 424321 - DNA, 230 bp, Oryza sativa nipponbare
  unsure (1)..(230): unsure at all n locations
acagacttcgtactggctatcatgacgaccattctgcatcgtgcctcggcctcactatcttctccaagagaccatgagacagccttcattagctggaagctgagcttatacctgactgggacccacggatgaccaacatggaagacaccaatgtcgtttttttttgagngangggggggcggcaacctagcagcagggaggggaacatgaggtcactgagttggagggga

SEQ ID NO: 424322 - DNA, 241 bp, Oryza sativa nipponbare
  unsure (1)..(241): unsure at all n locations
gtccgatcccgtcgcccccgtcgggtgacatctccacagggattagtgtgctcagcagggaatctgttgcctctgctccccctcccctctgctgtcctgcttcgccactcctccattccatttgatgatggctcaccccacactggtcgacattttaccctggtttggcgctgagctgatccaaagccatagtgattccaatggcgtgtccttgtgcagagctggctcattccaccnatgc

SEQ ID NO: 424323 - DNA, 64 bp, Oryza sativa nipponbare
  unsure (1)..(64): unsure at all n locations
cccacgtttccgcttcgctttttgcctcnncgtcngtgctccacagcggcggcggcgggggcgg

SEQ ID NO: 424324 - DNA, 125 bp, Oryza sativa nipponbare
  unsure (1)..(125): unsure at all n locations
gggcccccttttttttttttttttnntttcccaactttaaaaattttttttncaaaagttacaataatactacacacaagggaaggtcaacaaccccactctaacctaacctaacctcctccttt

SEQ ID NO: 424325 - DNA, 132 bp, Oryza sativa nipponbare
  unsure (1)..(132): unsure at all n locations
cgcggccaccctgatgcagccggccaagctcggcggccgggcctcctccgccgcgctgccatcgcgcccgtcttcgcacgtcgccagggcgttcggcgtcaacaccggngccgncggcaggatcacgtgctc

SEQ ID NO: 424326 - DNA, 64 bp, Oryza sativa nipponbare
aatggatgtaacctgtctgctattatgataggtggggataatcgaatatatgatatatttactt

SEQ ID NO: 424327 - DNA, 119 bp, Oryza sativa nipponbare
gcgcccacgcgtgcgcccacgcgtgcgggggggggatcagacaagttcgtcctctccgccatcgtgctcgccgtcctcaccgtggcggcagcggcggcgggctacggcggctacggcga

SEQ ID NO: 424328 - DNA, 106 bp, Oryza sativa nipponbare
  unsure (1)..(106): unsure at all n locations
tnatntnanaaaanataataataatntactctttntntttnntgttggagacaacctnacaccangatacaggattaatgcaaattttttttttgggggggggggg

SEQ ID NO: 424329 - DNA, 162 bp, Oryza sativa nipponbare
tcggaatctcaccacccaacccgtgcgggggggggggcccgcttcctcctctctctctcagctcaccacacctcgagtcgccgccgccgccgccgctgctgctgcttacctcctccgcgccgcgcactccttgcactagcccatggcgacggctatgatggc

SEQ ID NO: 424330 - DNA, 250 bp, Oryza sativa nipponbare
cacaatatatagagagctccatatgaatctcctctctctgaccataacgaatacaacatcgccgaaagcacactcgctatgtagccaaccataactaccaccacgatgagctgcaggcatgcgtgttattttttatcaagaggggggggagactgcctgtctcatgaagaactaactcctaagctacgtgagagagagctgcctgcttttttaaacaaacagacgcacagactccccatctacagatgac

SEQ ID NO: 424331 - DNA, 126 bp, Oryza sativa nipponbare
tccaattccaattataattccaagaggctgaggaggaactcaactgaagaagaagaagaagaagaagaagaagaagaagaggaggagggttgtgaactgatttgggaagggagggggaggaggaag

SEQ ID NO: 424332 - DNA, 174 bp, Oryza sativa nipponbare
gccgcgtaccgtccgcatccggtcgccccgcgtcgccaccgtcggtctcgccggacgagcagtagggtcgacttttttttcccacaggagggcgagagatgttcggcgcgcgccgaaaagagcgacaccgcggactacgagtgcttggggtgcccaagatgcgtccagatgacc

SEQ ID NO: 424333 - DNA, 157 bp, Oryza sativa nipponbare
tagattgcgagtcaggcacgctctttgggtgggtgttgacgataaattttaggcgcgtttattccaacttaattgcgccaattctaagacataggagctattaataatgcttgaattctaagggtgaattaatagggaatcatgaccttgagagcga

SEQ ID NO: 424334 - DNA, 231 bp, Oryza sativa nipponbare
ctcctgccgaggttgacggcgaggagtgggagattgctggcatccgaaagatcctccacagcgaccagatcaggttccttgacaaggcggcgacggtcaccgaggaggactactgcacgccgggggacatcgaggactcggggaggcgtggcacgttgattttttcccccgggggggggggagaattcaccccccccaccttgtaaagagggggacacttaccgggggggc

SEQ ID NO: 424335 - DNA, 326 bp, Oryza sativa nipponbare
cccggggcccccaagccgcccaatttgtgggaaaaattagcgggggaggggggggggctaagggtggttcttggcgctgttcggcttgcgggacaggacacatagggggaaaccacacccaagacaggggggctacaacccgggccccgtttggaagcaggaatgggctttttttttacccggtggggggttgcccggccttggttaagcgccagtgcgttgggcctgggacgggcggccgccgccagcaaggcccgggagaatggtggccgcaagttcgccgagttcacagacaggttgtgcacgtgccaggcgatcaaccacat

SEQ ID NO: 424336 - DNA, 60 bp, Oryza sativa nipponbare
  unsure (1)..(60): unsure at all n locations
cggacgcgtgggcggacgcgtgggcggactcgtnggcggacgcgtggggttctagatcgc

SEQ ID NO: 424337 - DNA, 252 bp, Oryza sativa nipponbare
cgtccgattcccggtcgcccacgcgtcgggtctcactactagcccacagtccagagtttgcatttcttgagctggcgatccatcgggagggagagaggcagagcggggaggggagaggatgggctggatctttctagctgctggcaacacttcgagtctcccggtccattagtgcgtgggtatccatatatgccttggggagcataaaacaaatctctgtgatgacagcatggtcattactgggctcactcg

SEQ ID NO: 424338 - DNA, 245 bp, Oryza sativa nipponbare
cccacgcgtccggctagtgtcgccattgccattgtcttggaaggaggttggttagcatggctcgcgtgtcggcggcggcggttgccgtgctggtggtggcgttcgcggcggcggcggcggcgcaggagagctgcaacaccgagctgccgggcgtgctcgtcggcaactactccgggctgaattgccagccggtctggaacaatttcgtgctccggtatcaccaagacaagaacaacgtgctgagg

SEQ ID NO: 424339 - DNA, 349 bp, Oryza sativa nipponbare
  unsure (1)..(349): unsure at all n locations
cccacgcgtccgcccacgcgtgcgcggaggcgggggaggacacatangcggacgcgtgggcagacgcgtagcacagacgcgtgagattgagccgagaatacttggaccggttccggcgggcataccaattttatttatattgagactgattaaccgagagctttttttttatgagggggggggggggaaaacaaaaaatcaaggggggggaaataaaaacatactaggggggggggggggtgaagcatttaagggggcttnnngatgcacatcttngaagttgacatgtatngaacacaaaatagatcgggctttaacatcaaatggtaaaagcgaaatttgnttattg

SEQ ID NO: 424340 - DNA, 141 bp, Oryza sativa nipponbare
  unsure (1)..(141): unsure at all n locations
ctctcccccccatctctacagaggcagcagcagcggcggcggcgacaagggaagccgatggccatggcgacctccaccttctcccccccggcctcgcagctctccctcacccgccgccgnctncacccggnccccnncctc

SEQ ID NO: 424341 - DNA, 228 bp, Oryza sativa nipponbare
  unsure (1)..(228): unsure at all n locations
cagcattccgctggattgcaagagggataacagcatgtctataccaagcatccagcctatgcctatactaccaaatcagatcttattccncattcattaaccacnatctaccctttcanactaaaagaagtattcctttctgatgtgaggctgctgccattgctatattatggcctggggggggggggtcatttttctccagtcatatccactcttcttcaacacata

SEQ ID NO: 424342 - DNA, 230 bp, Oryza sativa nipponbare
  unsure (1)..(230): unsure at all n locations
cttcgtcttcgtcttcctctggggggtgggtggagtcgatccgatccgatccaaggnggaggggaagcaatggcgacgaagaggagcgtggggacgctggggtgatccgatctgaaggggaagaacgaccttctcttctgcagcactatctacgacgtttttttttttttggggggggggggggggccancaacacggctggggggggggcaaaaaacacaacagggggg

SEQ ID NO: 424343 - DNA, 353 bp, Oryza sativa nipponbare
acagaatactatggctgctatgacgaccatcatggcatcgtgcctcgtcctcactatctcgtacacaagagaagatgagcctgcacttcattagctggacagctgagctcatagctgactggtatctacggatgaccaacatggaagacaccaatgtcgtttttatcagagtaatcgattgacagcagcatagcagaaggaagatgaacatgaattcacttagtactacgccattgatgatgcaaatgggtagatatgcacaggagagcgcctgaggcgcataggcagttagagcaaggtctcatgtttacgaatggatgctaatcctcacatgcacggctagatgaaacaag

SEQ ID NO: 424344 - DNA, 142 bp, Oryza sativa nipponbare
  unsure (1)..(142): unsure at all n locations
cccattcgtccgcttcgctttttgggtgnncgtcngtgctccacagcggcggcggcgggggcggcaccggagttccaccgngcccgcctacatccnnnnttnangagatagagcagctacaaatggcctccggcggcaacga

SEQ ID NO: 424345 - DNA, 253 bp, Oryza sativa nipponbare
  unsure (1)..(253): unsure at all n locations
gggccccctttttttcttttttttcgtttccaaactttaaagaagtttctggcgaaagttacaaaaatactacacacaagggaagggcaacgaccccactctgacctgacctgacctcctcctttcgcgcgctgaaaaatggcgctggcgcaaaaaaacgctgggaaacggtcgcccgcccgggcgcgcccggaaacntaagnaaaatagtgcgtgctaatgctnaaaaaccggaccccannnaccannaaaa

SEQ ID NO: 424346 - DNA, 128 bp, Oryza sativa nipponbare
  unsure (1)..(128): unsure at all n locations
gaggggagtgttcgattcatgagtcttcgtttgcggattcatggttgattttttggagatttaggtggagaaatgtcgtgcgtttctccttttattttttntataaaaaaatttgtangtgcttttgg

SEQ ID NO: 424347 - DNA, 191 bp, Oryza sativa nipponbare
  unsure (1)..(191): unsure at all n locations
aatggatgtaacctgtctgctattatatatatgtatataatcgaatatatgatatatttacttaaaaaaaaaaaaaaaaaaaaaaaaaaaaaaaaaaaaaaaaaaaaaaaaaaaaaaaaaaaaaaaaaaaaaaaaannnanannnnnnaannnannaannnnnnnnttttttttnnnnngggggggggggg

SEQ ID NO: 424348 - DNA, 77 bp, Oryza sativa nipponbare
cgtccgcgattcccgggtcgccccgcgccgccgtggcgcactgtcggggggagaaaaattctccttcgcatggctcc

SEQ ID NO: 424349 - DNA, 153 bp, Oryza sativa nipponbare
  unsure (1)..(153): unsure at all n locations
cccactcgtccggcgagcggccggtggcgatggagaactaaatgcaagcggncantntanannatncaatnnnactnntntnananaanataacaannatttacactttntntttncttttnnanacaacctcacaccacnatacannattaa

SEQ ID NO: 424350 - DNA, 454 bp, Oryza sativa nipponbare
cgaacgcttaaaagtacatacagagctgcgaagaggggtttgagtgtgatttggatattaagcgctgcaccaagactaactgtacgaatgcaggggctatccatcatctatgccgggaacatactcgatcacgcctgtacttaaagcatggcactatccaggtcaatttatggaaggggtgggtgatccttctctcagcatggatgagggggcccatgtccttcttggctgtgagcatgcaatggaccattcgaaggcatatacaggaggtgggcagcatggatggctcacgatctggctgctgtgtctgcatctgaacatatgactaacacatcgattggacgaccactacccggcacggcagggacacaagggatcccggtacaaagacagggaggcagcaacctgtgcctgggcctttccacttgtgtgtgatttatatgtgatctgattt

SEQ ID NO: 424351 - DNA, 236 bp, Oryza sativa nipponbare
ctagctgagagcgcgattagcgcccttttttttttttttctaggatgctcaagtctaggccgatctattccaactcaagcacgccaattgtattgcaaagaagcatttaataatgccgaaatactaaggttaattgaataggcaataacaacctgggattttttttctggcccgagtattatcgtgacccctgtcacgcgcgagacccacagctctcttttatggggggctcgcgg

SEQ ID NO: 424352 - DNA, 84 bp, Oryza sativa nipponbare
gtccgagacgacgtcacccacaaccgcacgcgcagatccgagaggcgagagcgagagcgaggtgggaatggcagggaggctgac

SEQ ID NO: 424353 - DNA, 154 bp, Oryza sativa nipponbare
aagatgttaaacaggagcatgcgaaggccgaggattctaagccaaccgccatacctagagctgttgggagctgaatgtgcttcatttgccttagattctggactcagtggaagccaagtgaagtgtgacatgctagcatgatggacgaagaacc

SEQ ID NO: 424354 - DNA, 354 bp, Oryza sativa nipponbare
  unsure (1)..(354): unsure at all n locations
gtccgcattcctggtcgaccagcgtncgctcgacaagctgtgatattagcaggatggacggggagcatcttgtaggaggacgtggcagggtagctgatgctgttgtaacctccgtatgaacgtgttcttgctggggtagacggatgggcgctcaacaggaggatcaagaacgacggcaccaacatcgttaacagacggggggagtaggcgcaatcgtctgattggatgctgagggcaatagttggctggaggaatcatatgtacatgccggtgcagctccgggtgattctccacagctntggtgcatgttgctgggggatattncttaaccttcgggaagggccatgtctttga

SEQ ID NO: 424355 - DNA, 213 bp, Oryza sativa nipponbare
  unsure (1)..(213): unsure at all n locations
ccgtggatttgattcggcctcgtcgtgcgagtagatcagcatcatcagtaggtaaggtggtattggcgatttggcattcaaaggattcggtggatgaatgaatctgattgtgtatgaaccgattaaaaagttctnttcctttttttctttcatattttgatttttggtgaatcgatggtgtgtaatgtaacataatatatgttaaaaagcata

SEQ ID NO: 424356 - DNA, 242 bp, Oryza sativa nipponbare
tctacggctcctatgactactgatctagggcccagcccgcctatggcttccgacccaggccgaggaggagaacacctacagctccggctatggatctgggtacggaggcggaggagggaagcagcatgatgaggagagctacggctccggctaccgtcgcaagctctaggtcgaggagagctatggttacgcgggctatggctgcaggaagacccaggacgagagctatggtaggtggttct

SEQ ID NO: 424357 - DNA, 59 bp, Oryza sativa nipponbare
cgcctgcagtacgtccgattccggtcgccacgctcgcatgagttattttgacgatttgc

SEQ ID NO: 424358 - DNA, 100 bp, Oryza sativa nipponbare
  unsure (1)..(100): unsure at all n locations
ggggggggggtttttttttttnnnggggggggggntnnntnnntnnnnnnnggggggggggggggttttttttttttttttnttttttttttttgggggg

SEQ ID NO: 424359 - DNA, 185 bp, Oryza sativa nipponbare
ctctcatgagagtttgaagcgtgaaggctgtgtttcttgcgggtttcttgtgtgagattggggtttcatgtctgtatgtgtgtatttgtgtggacatctaactttctggtgttgtgcagacctaagtatcttggatccgcttgtgatcgaaaaaaaaaaaaaaaaaaaaaaaaaaggggggggga

SEQ ID NO: 424360 - DNA, 281 bp, Oryza sativa nipponbare
cctacggctcctctggctaccggatctaagccccagcccgcctaatgggcttcccgcccccaggcccaggaggagaacccctaccggttccgctattgatctgggtaccggggttgaagaagggagccacaagaaaaggagaggttccggttccgcttccggtccaaggcccaaggtgaggggaggtattggtcccggggccaatgccggaggaaaacccaagaaaaaaggttagggggggggttctgtttttgattatggcaaaaaggcccagaataaaa

SEQ ID NO: 424361 - DNA, 183 bp, Oryza sativa nipponbare
actttcctctctcttttccctttctctccccttcttttcctttttttttttttttatagaggaaaaaaaaaagggcggcccgctaccccggagccgatcttcctcccgcgcgcccgcgccgcgccacctcctctctgggcgcgccccaattgaccccacgggcccactgtttacaaccttccc

SEQ ID NO: 424362 - DNA, 381 bp, Oryza sativa nipponbare
cgaacgcttaaaagacaaacggacgcggagggggggtttgattttgagttggatattaagcactgcaccacgactacctctactacagcgggagctctgcctcttatatacggggaatctactgcatcacccatgtgcttagcagcataagactatccaggtaattttatcgaaaagggggtgagccttctctcagcaggggatggggcccatgtccttcatggctgtgagcatccaatgtaccattcgaaggcatatacaggaggtgggcagcatagataatcacgatctggctgctgtgtctgcatctgaacatatgattaatacattgaatggaaaaccacttcccggtactgcaggaacacagtggatcccgtagca

SEQ ID NO: 424363 - DNA, 77 bp, Oryza sativa nipponbare
cccatgcctgtccgcccacgcgtccgcccacgcgtccgcccacgcgtccgcccacgcgtccgcggacgcgtgggcgc

SEQ ID NO: 424364 - DNA, 415 bp, Oryza sativa nipponbare
gctcgaccaagctgtgatatttagcagcgcatggacggtaggagcatcttgtgaggaggaacgtggcggtgtcgctgctgctgctgaacctcctcatgtacgtgttcttgctggggtacgacgggtgggcgctcaacagctccatcaagaacgccggcgccaacatcggcgtcagatggggggagcagccgcggtcgcctgactaccggcagagcgcgaggttcgcctggaggaaccactctgccacgcccgcggagctggcggtgacgctgcacagctctggtaaagggtgctgggggatccaccttaacctttctgccgcggccatgtcttcgaagcagcctcacagaatttagtaggaaaaaatcgcaggacctctccaacttgattcttactgactaaagaacaaggatgc

SEQ ID NO: 424365 - DNA, 87 bp, Oryza sativa nipponbare
ccgggtcgacccaccgtccccatatctttttctcctctaggtgagggtttcatccccctccattccctcccatgggcaagattaaat

SEQ ID NO: 424366 - DNA, 122 bp, Oryza sativa nipponbare
ccggggcgacaccacgccgcccgcacttatagatccacagtgcacctctaggcagtgtgttgcctgcacggctgtggggtctttacaggcctctgagcacaatggaataccccagaggttga

SEQ ID NO: 424367 - DNA, 99 bp, Oryza sativa nipponbare
cccacgcgtccgcccacgcgtccgcgcacgcgtgcgcgcacttgtagctctcgacccccgcatctgatccctccttttgcgtagttgagattgaaatct

SEQ ID NO: 424368 - DNA, 738 bp, Oryza sativa nipponbare
  unsure (1)..(738): unsure at all n locations
gcggcagagtatggcagggaaagccggcggcctcaagggcgtcgccctcatcggcggnncnnnnnnnnnnnnnnnnnnnnnnnnnnnnnnnnnnnnnnnnnnnnnnnnnnnnnnnnnnnnnnnnnnnnnnnnnnnnnnnnnnnnnnnnnnnnnnnnnnnnnntttttttttttnnnttggggtggttnntnnnttnnttttttttttttttnnttttntttttttttttgtttgttttttttttttttttttttttttttttttttttttttttttttttttttttttttttttttttttttttnttttttttttttttttttnttttttttttttttttttttttttttttttttttttttttttttttttttttttttttttttttttttttttttttttttttttttttntttttttttttgttttttttttgnnttttttgtntntttttttttttnnttngttttttttttttttttttttttttttttttgtttgtttttttttttttttttttttttttttttttttttttttnttttttntttttttttttgttttttttttttttttttttgtgttttttttggtttttttttttggtgtttttntttttnttgnttgtgttgtttttttttttttgtttttttgttttttttttttttttttttttttttnttntttttttttttttttttgttggtgtttttttttttttttttttgtttgtttttt

SEQ ID NO: 424369 - DNA, 139 bp, Oryza sativa nipponbare
  unsure (1)..(139): unsure at all n locations
gggggggggtttttttttttttnnnnnngnnnnnnnnnnnnnnnnnnnnngggggggggggggggttttttttttttttttttttttttttttttggggggtggggggnnnnngggnnnnnnnnttttttttttttttt

SEQ ID NO: 424370 - DNA, 185 bp, Oryza sativa nipponbare
  unsure (1)..(185): unsure at all n locations
ctctcatgagagtttgaagcgtgagggctntgtttcttgcgggtttcttgtgtgagattggggtttcatgtctgtatgtgtgtatttgtgtggacatctaactttctggtgttgtgcagacctaagtatcttggatccgcttgtgatcgaaaaaaaaaaaatttttttaaaaaagggggggggga

SEQ ID NO: 424371 - DNA, 74 bp, Oryza sativa nipponbare
  unsure (1)..(74): unsure at all n locations
gtcgaccagcgtncgctcatttaacacaagctaagctgagggtgagctaagcttaagctaagctaagcttacgc

SEQ ID NO: 424372 - DNA, 364 bp, Oryza sativa nipponbare
cctactgtcttcctctggctacggagggagggcgcggcccgcctatggctttccgcccccaggccgaggaggagaacacctacggctccggctatggatctgggtacggtggtggaggaaggaagcagcaggaagaggagagctacggctccggctacggtcgcaggccttaggtggaggggggctatggttccgcggcctatggcggcaggaagaccgaggaagagagctatgggggtggttctggttatggatatggcaagaaggcccaggaagagagtgaagggccctatggttctggtggttaccccaagctgaagccttacagagagtaggagacccagggtcgctaatgggtaggggg

SEQ ID NO: 424373 - DNA, 65 bp, Oryza sativa nipponbare
  unsure (1)..(65): unsure at all n locations
agcttatgcattgagggagctgacgagcaactccnacaacntctgggccgnctgcgcacaaggcg

SEQ ID NO: 424374 - DNA, 549 bp, Oryza sativa nipponbare
  unsure (1)..(549): unsure at all n locations
cccacgcgtccggtcgataccaaggaggaanagtctgccagtagaacctttattgtgtttctccacctcgcatcgatgggccgaagtgcaattgcaaaatcggctggtctgctccgggaaatcaagaacaaacaaagctctaaccttatgagccgggtgcagccttcagaagcaaggtgaggggagacagcattgtgggtgccacacccaagaacagggatctactatcccaagggctttgagtgggtcatggaggatgtccccagcagcgcggcttcattcaggcagctgtactggctcaggagcggcgacgcagagacggcgagctctcccacatcaaatgatgctgctgcctttgatcacccatttgtgtagaagcatgagaggctttccactggaagaatcacttacagatgcagttgtggaagttctgaccattttgaaaggtgcatgcatcctatgaaacacttaacagttgttctgattcccagtgtgtaggtgtggcatccaccgacagatcaagaataaaggttgccctccttttctcca

SEQ ID NO: 424375 - DNA, 320 bp, Oryza sativa nipponbare
cgcaatgggagagtcaatatatccttccgcagtggggacaacgtgctgtacgattgggccggcgatggcgcgccgcggcgctactgctcgtggcgcggggtgctctgcgacaacgtcaccttcgccgaggcggcgctcaacctctgggggctcaatcttggtggctaattcaaccagggtgttggcaatgcgaaaagcgtcgagagggaccaacttaaacctcgagggaggcggctggccacatccatgggggggggggctaataaacagccatgacatgcagcagcaggtgcgctagcagctcaggctgggagcgcaac

SEQ ID NO: 424376 - DNA, 59 bp, Oryza sativa nipponbare
gccacgcctacggcatgttgagcatcctgcatactgacgatgctgactactgtaccaca

SEQ ID NO: 424377 - DNA, 122 bp, Oryza sativa nipponbare
cccgcgtccgggatgctgatgctgatgggtgcagatggaggagggggaggaggaggcgaggggaagaggaggaggaggcggcgtggtgggagggtgggggacgtgggaggagcctgtgctgg

SEQ ID NO: 424378 - DNA, 175 bp, Oryza sativa nipponbare
gaaaaaaatattataggaaataaagggtgagtttgcctgggtagaataaacacatttttaaaaaaaccaagaaaagattttcctcttctgtgacattccttcttccttctccggccaccggagccgtagccgaattgtgcctcttctccggcgaggggagagggagagagggggt

SEQ ID NO: 424379 - DNA, 271 bp, Oryza sativa nipponbare
  unsure (1)..(271): unsure at all n locations
aaaaaaaaaaaaatgaaacttggactcattaaaccaaaaaacctgaaaaaaaaaaatatttttaaaaaagggggggggttccaatttaaaaaaggggggggggacaaaaaaaacaacaagggggggggggccataagggccccttttttcccaccaacttaaaatnnncccccccatggaaaaaaaaaaaccgcaaaataattctttccctccccccnncttagaaaaaaaaaaaatnnggggttgaaggggggggaattaatcctcttgg

SEQ ID NO: 424380 - DNA, 343 bp, Oryza sativa nipponbare
gtcgaccacgcgtccgctgatttgaggtaaaaagaccttgaaagatagggtttattcatggttgtgtcagtttttgtcaaggctctatgtgctgtattaacatgtcagaagagtattggcgcataaaagaaaaaaagacgaaaaagaaaagctgaaaggaaagggaggaacataaaaaacttttttgtagagaggggggggtgaaaaaaaaaaaaaataaggggggggggggcgctttaaaggggcaagggttacgcccccctttgggggaggaaaaattttttttatagggtcaccaaaatacataccatggggcgggggttaaaacaggggggagggggaa

SEQ ID NO: 424381 - DNA, 139 bp, Oryza sativa nipponbare
  unsure (1)..(139): unsure at all n locations
ttcccggtcgccccgcgtccgcccacgcgtccgggcgaccgccgctcgcgggagcggatcgccaccgaccgcgccggtggccgcaacccggcgtggaacgccgccccgctccggntcaccgncccggccttcggcgcgg

SEQ ID NO: 424382 - DNA, 161 bp, Oryza sativa nipponbare
  unsure (1)..(161): unsure at all n locations
cgtccgcactcctggtcgaccccgcgtccgcccacgcgtccgcccacgcgtccgtcgcaacccagactcgcacaagggagaagagaagagaagcttcgagagagaggtggaggaggagacgagcgcgtggtggtggtggtgttggcggngatggatcgggt

SEQ ID NO: 424383 - DNA, 155 bp, Oryza sativa nipponbare
  unsure (1)..(155): unsure at all n locations
tccgaaaaacctcgtctcctcctcctcctctctctgganctcatctccattttcaaatctctctttgcttgctcgaggtgagccatggcggagctgccgctggcggcggggctgctcgacctgcgcccctgcaagctcgcccctccccctccccc

SEQ ID NO: 424384 - DNA, 334 bp, Oryza sativa nipponbare
gccaagcctacggaatgttaagcatgcctagcataggacgcatgatgactactgtagcacaccaaagcacgttaaccgtgctgcgcctgaaggttgcaacagactcctgtatgccaaaacttggacctacagtgatgatcgactacagctatatgcctttacatcttctatgtacgccggctagccgctaggtataaattatgtctcctatctatgaagggcatgcgctatgtgaatcagatcgcgccctagccataactggatatgacgaggttttgctaataatactataagatgaacgatatgcgctattctatacattagaataaagcat

SEQ ID NO: 424385 - DNA, 275 bp, Oryza sativa nipponbare
  unsure (1)..(275): unsure at all n locations
gaaaaaaatattataggagataaaggagagtttgcctgggtagaataaacacatttttaaaaaaaccaagagaagattttcctcttctgtgacattccttcttccttctccggccaccggagccgtggccgaattgtgcctcttctccggcgaggggagagggagagagggggtgggaggggggggccttccngcnagtggtctcctcccccccccgctnangaaatctctcnggacatcngngntgggggggggtgcctnatggggttctccgt

SEQ ID NO: 424386 - DNA, 285 bp, Oryza sativa nipponbare
  unsure (1)..(285): unsure at all n locations
ttttttttttttttttttttttttttttttttttttttttttttttttttttttttttttttaaaaaaaaaaaaatgaaacttggacttattaaaccaaaaaacctgaaaaaaaaaaatattttgaaaaaagggggggggttccaatttaaaaaacatttcanaaacaaataaaacaacaaacattttaaccccttaattcccccttttttccaacccacttaaaattnnccccaccatttaaaaaaaaaaaccccaaataaatccttcccctcccctccccttt

SEQ ID NO: 424387 - DNA, 109 bp, Oryza sativa nipponbare
ctgatttgaggtaaaaagaaccttgaaagagaggttttattcatggttgtgtcagtttttgtcaagtctctatgtgctgtattaacatgtcagaagagtattggcacat

SEQ ID NO: 424388 - DNA, 161 bp, Oryza sativa nipponbare
ccaccaccacccgctcgtatcagccggtggggcaccgtggccatggcgacggcgctccgcaagctctcctacgacgccctccgtcgacagccgatctcccgcataaccccgatatactacatggcgtccctgccggcgaccgaggagagatccggagtcac

SEQ ID NO: 424389 - DNA, 151 bp, Oryza sativa nipponbare
  unsure (1)..(151): unsure at all n locations
aaaatcctcgtctcctcctcctccgctctctgganctcatctccattttcaaatctctctttgcttgctcgaggtgagccatggcggagctgccgctggcggcggggctgctcgacctgcgcccctgcaagctcgcccctccccctccccc

SEQ ID NO: 424390 - DNA, 458 bp, Oryza sativa nipponbare
gaaagttgggattcctgcaattttcacggacttctgtgaagaagctgcacatctagcttcgtcctgcattacctccataactggtcaacccctcagagtcccaattcagaattgcaagtttgtatcaccatgaaatgttcagagattcaactcttaacaaataatatcactaactttttcaaagaaggcaaggataccatgaaatattttcatggacgaaattgccacctgtttttattatttagtctttcagaatagatgccttggttacttgtaagaatgtaagatgcactcatcagctcatgcttgtaaatacagttgtcgtataattgtagacctgtagtaacttgtaagatactacatatataataccctaaagttgcagaaagacttgctagtaggtagtagcaatcccatgctggacatggtgaaatatggatcagttatcaacagctttt

SEQ ID NO: 424391 - DNA, 98 bp, Oryza sativa nipponbare
cggggacccacacgtccgcgcatactccacagaagaagtgatgagcggaagaaggtgctatcagctcaacatagatggccgccagcatcattgttact

SEQ ID NO: 424392 - DNA, 275 bp, Oryza sativa nipponbare
gtcgacccgcgtccgatataagttgtgagcgagcttggagagttccatttgctcaggaaagtagccttcacttcaggttgtgacgtaagtttaggtttcagagtaatcgaatagaccagtgaaatctgccttatgtgggtcatttaatatagcacccacctgatgatattataatagactatgcatgtacgtgggtatactgtatgaactctgtgcagtgttgaaactggcggtcatggggcattctagatcttaacatttatttgctcccgcca

SEQ ID NO: 424393 - DNA, 212 bp, Oryza sativa nipponbare
cttgttggcagctacgtagagagcgagggctcctgaagatgatctactatcatctgatgatgactgacgataatgattctgatcatgctgataattgatgaacagctcctgctgttgatacgtacaccgatgatctgcctagagactgaatgaaaggaatgcatgtccatctagaccggcctagcaatgatagtggatgtctttggaggaaa

SEQ ID NO: 424394 - DNA, 402 bp, Oryza sativa nipponbare
ggaaatgcaacctggcagtgatggtagaggggggggtacagggacctctcttagcatatgagctgacattgtgctctccactgaaaatatgattgacatgcacatatcatgtatggcctattgtgtccacgagtcatactctcagatactaccatactctggtcacccatattacatgggggggggcgaattttcaaaatgatgtagagaaaatcgatgtattgtacctctcaggaaaaaaaaatcgatgtattgtcttttaagcttatacaagttactagcattgtacaattttcaaatgttgtagagaaaattgatgtattttacaggatcggtctgttcgataaacaaatgatttcttctgccattctggtatatataaatatttccattgatctatgt

SEQ ID NO: 424395 - DNA, 308 bp, Oryza sativa nipponbare
  unsure (1)..(308): unsure at all n locations
cggacgcgtgggtggaggggaagagcaggaggttcgcggtggcgtgcggggtgctcagccagtacgtgagggcggagcagaagatggcggcggcggcgggggcggcaccggcgagggcggtgacgacgctgagcctgatgcctggggcggaggtggtcgtcgaggaggaggagcggagggaggttggggaggaggaggcngnnccancnacngngccngccgngccgctgaccatcntctacngngggaggatgggcggcttcgaggacttccccgcggacaaggcggcngaggggatgcgcatggcc

SEQ ID NO: 424396 - DNA, 458 bp, Oryza sativa nipponbare
  unsure (1)..(458): unsure at all n locations
ctgcagtacctgtccgtactcccggtcgaccccgcgtccgccccgcgtccgcccacgcgtccgaaaaggtggagttggagctcatgaatccatccccagacagaggaggaggaggaggaaggggtggtcgcctcgccaagtcggtggcgattttgacccctcttcgccgctggcaaggtattaccgtgctaactggttaaaggagaagggttgaaaggccaatatgggcatttcagccaagtggattaaatcacttgttgggataaaaaagcatgaaaaagcacaaacttctgaaagcagtggagtgaggagctctactgcgcagttgctacacaagcgaanacattctattgatactgaaagtgctgctgcagtcgaagaactcagtgtacaaactgagcccttggcatgtgacacccaccttcangccatatcaaatatcacctcctcacccggta

SEQ ID NO: 424397 - DNA, 359 bp, Oryza sativa nipponbare
ggctatggaagtggaggctaaaaagatgaggcgagaggtagctgctatggagaaggaagttgctgctatgcgtcttgacaaggatcaagaaaacaaggctaagcggcctggaaatttcaaaggacctggaaccacttctcaggcgcctcatggaagcagaaatgcaccacggggtgggttgactcggaaccttcaataacatacctctaacaccagtcagcatgaatttcttcgatagtttcggatttccctttgtatttgttcctctgttcgtattaattttgggattgagatagcacagatgaccctgcgacacctagattggggaaagagtaggcttgcatctgacatcggctttg

SEQ ID NO: 424398 - DNA, 359 bp, Oryza sativa nipponbare
  unsure (1)..(359): unsure at all n locations
cggacgcgtgggtccctctcctcctgcgcaccgatggccgacgacggcgaggcctcgccgccgcaacctcctcctcctcctcctatcaattctccattcctcgccgcagccacaacgtaagctcgctcgctcgctcgctcgcgcgcgcgccttgggaaagaagaagagagcagagcaggccgggaacctgtggctgggccatgtccggcgtgcgggtggcggcgaaggcgcctgcggcggcggcggggtggccgtacgtggagtacatggcgcggtgggagcggcaggtggagcggaggcagctgttcctgcggagctaccacttctcgcgcgacgtcgagctctcgccgngggcgcgg

SEQ ID NO: 424399 - DNA, 225 bp, Oryza sativa nipponbare
gcgtccgcggacgcgtggggcgaaaatttcacgggaaagcacgggagcctttctttctccttcgatcgagcgtgcgcgcgtgtgtgtgtctgcggacagcacacagctgcgcatttcgatgcgagtttttggaaaccagaaaagaaaaagaagggaagggagtcagctctgaggagggagagggagagggagggaggaggaggggatcagggggagaggagggag

SEQ ID NO: 424400 - DNA, 70 bp, Oryza sativa nipponbare
cgaccttcgcgccgccggctcccctcctctccccacgtccgcgcgccgccggccggctccatcctctccc

SEQ ID NO: 424401 - DNA, 61 bp, Oryza sativa nipponbare
ccgctcgcgatctagaactagtgtgagatcgcgagcgagccgcctttcttatttttttact

SEQ ID NO: 424402 - DNA, 445 bp, Oryza sativa nipponbare
aagtgtgggaatttggatgcgaagcaaccatgtttattgtgcgatcagcgttcggcaggtcagtctgataatgcagcgtatctgtaccaccgctgtgtgcatgtggatggccgctctgaggcgtgacatgtcgtagtcacctatgcaggtggatcctgctgcagtttacatcggcatgtagcaatttggttcgatgatactgctctgatgtccttgacgaggagggaaataaggaacaagttaagaaagcaagcagttgtgccaaacaagggagtacaaagcagttgggtcataaaaattcaggacaggatctgttcctctgtgcgtgcactctgaaacatatgccatcatagtgttcataaccactggcccattcaagggatgagcttatttaagagagccacagaagaacttctgaaatgaccagggaaaagatgcaaaagcc

SEQ ID NO: 424403 - DNA, 100 bp, Oryza sativa nipponbare
agagcatatcatgttttaaaattttacaagatactttatgtcgtatctcaacacgtactgaacttgactgtaataaacgtacgatttacatattttactc

SEQ ID NO: 424404 - DNA, 351 bp, Oryza sativa nipponbare
caaggaggccttcttcttttttttttttaaaaaaggcgctttttccatgaactcttctttatagtatagcatgctgtaattgaatgcagtatgaagcaaaaaattacatagtttcatgcgactcatgcaggggttaacattctactaaacgccaggaggaagtacaagctcactatatcaaaaagtttaagcatgtcaaacagtactacattgttgctaaactggggaaggatggaacacttgagctccagttcaactgtcctgaagcttggcttccccagctttctcggtttcatccgaaacaaaattcttcagggactccacatttttggggcctttatattttgcaac

SEQ ID NO: 424405 - DNA, 158 bp, Oryza sativa nipponbare
gttctttgacatgaaaaaagcttgatgttaagtacagaagaaccagggcaagtcactaactttatggtattggagttggagtagaagatcagcagctccatcatcgacgatggcctgatccacaaagatggattttggtggtgatacttccagggagg

SEQ ID NO: 424406 - DNA, 108 bp, Oryza sativa nipponbare
  unsure (1)..(108): unsure at all n locations
cgacctcgccgcctcctcctgctcctcctccccngtgcgactccgggctcgtgccgagggggtggacgcgccggtggtgagagcggacgcggtgcggngggccatggc

SEQ ID NO: 424407 - DNA, 249 bp, Oryza sativa nipponbare
gtccgtacacttgactcatgctttttttttattatcaaaagacagtgggggaggcacccacggtatatattataaaagaataaagtatttacagggaagacaaaaagagtggaaagaaaaagactaaagacttaaattacagctgatcaatccatgattgaactaaaggcctgttaatctctttgagtctaattaaatgtagactcaattgactcatgcttttggattgaatatcttattgaatgggct

SEQ ID NO: 424408 - DNA, 239 bp, Oryza sativa nipponbare
  unsure (1)..(239): unsure at all n locations
ccacgcgtccggctcactccgggtgatgggaccactctgccttcgtccgtacctatgcgctgtacctcgaccagcgccttgagttcttcctccatgagcgcaagcaaggctccggctccaacgccagttccagtgcaaatggcccgtcaccgcgtgaccgctggggatcacctgagggggggggtcgccggtcaccctcatactcctcaccccctgnaaacngaaatgggtatggatat

SEQ ID NO: 424409 - DNA, 240 bp, Oryza sativa nipponbare
cgtgccattaggttatatatgaaagagaaatatggcagtgcaaattggttcgatgaaaaaatattttctcaacagacaatgtcagtgaaggaggccttgagaatattgctagtaccgtcagtagaaaaacaaatgaatgtgaaacatggtaataattcatttcgaattcgcttaactgatactcatgatgaaggttcacaaaagcttctaaggcttctgccaaatgaccgttgtcgtaaa

SEQ ID NO: 424410 - DNA, 279 bp, Oryza sativa nipponbare
  unsure (1)..(279): unsure at all n locations
agtagtgtgaaggcaggacacaagttgatagagaccttgagtccttgaagaaagacaaagtattgcgtgtattcaaactcaatactgggcaggatgatcatgcaatcatgttcatggatgattatctgaaacagatggcgttggcagtcaagaggtcaaggggtaaggaccaagatggtactgaagtttttgggtggtttgagagatatgttattnatttgaagcttgaagttagnattgatcagngngatntgttttntntgntatnanttggaggtg

SEQ ID NO: 424411 - DNA, 90 bp, Oryza sativa nipponbare
agcagaaaaaaaggttcaatttttaataacagaaacagattacagtttttaataaacagtaaaacaagcgaatgcccaaaggcaaaataa

SEQ ID NO: 424412 - DNA, 290 bp, Oryza sativa nipponbare
cttccggcatgaacacagatggctacgcactccatctgaaggctatcacggaggcatacctgaggccacagcaggaccagggattgctgtacctcaaggtcagcatggatggcagcgccgtacctgaggaacattgacctcaagacttacacgaactacaaggacctgtctactgggcttgacaagatgttcagaggcttaagtactggcacggatggcttatctgactaccgtaaggatggcgaatatgtatctgacttatgacgacatcgatgcagattgcatgctcg

SEQ ID NO: 424413 - DNA, 329 bp, Oryza sativa nipponbare
cccacgcgtacgtcaatacgatacattgcatactaagtgtgatcatcctagagctctacttctagttttccttttttatttcataaaagagaatactactgagtagagctatactccagcgtacactacggtctcctactcatagctgatacccaagctactatccttgtatcggccactgagagggacaagagggcacttagcccggtactacttggggcacgacatgtcagagggcgtgacataacccaagtgtggacctaggggtgcgtggagttttttccggagtggtgtcctttacggggacgcatacgagggcggggcggatc

SEQ ID NO: 424414 - DNA, 176 bp, Oryza sativa nipponbare
tctggactgtttgaatcttggctgtacgcgtgggggagttatctggtaaccaataatgactctactgcacaaggctgctcgatcatgcactacagggaggcaccgtcaagaatatgaactacaaggaataggcatatgatctggtacagataactatggattatgcatttaggatg

SEQ ID NO: 424415 - DNA, 169 bp, Oryza sativa nipponbare
agcaggttggacactgaggtgagccctagccctgtgggagatgggtggccactatcgagctgaagcagaggagcctctatgaggaggcatctgaggcctctgcgtggaagctactggatgagctctccctctctgatgagcgctgggaggaagtgaatgctttcatctt

SEQ ID NO: 424416 - DNA, 135 bp, Oryza sativa nipponbare
gggggggggacccctaagtggaccgcctctgcgttccgggcccgaattccggggtcacacaccttcctcttcttcaaggagagcttctcggggagagggaaagtcaggataatacttgtgagggggtcacatctt

SEQ ID NO: 424417 - DNA, 91 bp, Oryza sativa nipponbare
  unsure (1)..(91): unsure at all n locations
cccgcgtccgccccgcgtccgctagatcgcgagcgggccgccctttttttttttttttttttttttanaattaggagaaattcaatatcac

SEQ ID NO: 424418 - DNA, 291 bp, Oryza sativa nipponbare
  unsure (1)..(291): unsure at all n locations
cccacgcgtccgctcattggccagctcgttaattgattccatcgtttaatttccgccacgaattcgagctagctctgcccctccatctccatggtcgccatggagaagaagacgaagctggtggaagaagaagatggctgctactactacgactacggcggctatggcgatggcgtcgtcgacgacgaggggagggcgacggagctgcggccgatggcgctgncgcggccgcacacgcaggcgttccacctggcgtggatgtncctcttcgcgtgcttcttcgccgccttc

SEQ ID NO: 424419 - DNA, 183 bp, Oryza sativa nipponbare
cccacgcgtccggccgatctgggcgcgcgacgcgcttcccggacccggacatcaagcccggcccgctgccggagctccccgtgctgccgctccagtacatcgccttcgacttccccgccgcctacctcggcaagctcaaggcgcagtacgccgccaccgccggcgccagcaagatctgggggg

SEQ ID NO: 424420 - DNA, 79 bp, Oryza sativa nipponbare
  unsure (1)..(79): unsure at all n locations
tccgnatcccggtcgccccgcgtcgctgtcactctgagctgacacggtgcgagggaagaagcaacaatcgcccggggga

SEQ ID NO: 424421 - DNA, 317 bp, Oryza sativa nipponbare
  unsure (1)..(317): unsure at all n locations
cccacgcgtccgcccacgcgtccgcccacgcgtgcggttacaaacttcttaaaaaaaaaaatgcatccacaaatctacagcaaaactttgtattttgcggaatggaagtatagaccaaagacccctggaactaaaaggggtgcttcatcggaggagatgttaccaaatgagcgcaaatcttggttcatttagacacgaagaggttaaccgtgggttcaaccgatgaagcacccnttttagttncnggggtctttggtttatacttncattccgcanaatacaaaggtttgctggagatatgtgggtgcatttttttt

SEQ ID NO: 424422 - DNA, 159 bp, Oryza sativa nipponbare
  unsure (1)..(159): unsure at all n locations
cccacgcgtccggcgccaaggacttctccgccgccgagtacggcggcgcctcctccccgagggacgacgtanggcacggcacgcacgtggcgncgacggccgccggctccgaggaagccngncgcngaggncncccncncngaggagcgcnnggaggaa

SEQ ID NO: 424423 - DNA, 120 bp, Oryza sativa nipponbare
  unsure (1)..(120): unsure at all n locations
gtccgcgnacgcgtgggcacactcacacgcatcgcgtttgttcaatcgatcggccgtcaccgcgagcgcacgatggcgagcgctcgtcgcatccgcggcgtggcggcggtggggatcgcg

SEQ ID NO: 424424 - DNA, 321 bp, Oryza sativa nipponbare
  unsure (1)..(321): unsure at all n locations
ccactagaaagaacacatcgtattccctgtagcattcaaagtacaaatggatgtgtcaggcaaccaagaatcagaaggggcacatgagaccgaacaatcgaaatatcttgttaaatatgctatatttgtgaagaaagacaatgctgaatatggagttcatgttgtgcagcagatcctttgggtaaatggaatcagatatgtcttgcaggaaatatatggtattgggaacacagctgataagaatgctcatgaggatgattccgggaaagaatgtgtggtttggctttttgaacaaagagatattgntgttttttnatgcag

SEQ ID NO: 424425 - DNA, 117 bp, Oryza sativa nipponbare
  unsure (1)..(117): unsure at all n locations
tcggaagaaagagagagagattgaggaggaggaggaggaggagccatggctgcggtggtgcgtggngtgttgaacggnatncgggagaagggcctctgcaacttcctgcgccgtgcc

SEQ ID NO: 424426 - DNA, 318 bp, Oryza sativa nipponbare
  unsure (1)..(318): unsure at all n locations
gccatgtgtccgatccctttttattgggagagggatgctgctgtcactagctcactatagtggtacttgcaagtgcctgccgatgggtgccatccacacgaatacgaggacgacgaacgcgggagctccggtggggagggacaacctaggggggacagaggagatctattnagggggggggggggagaaaaaaatcaangntatcatgaactatntnnannangatttggtttccaccnacttcnntggtaacancagggcnagcatcttnaaggccagggttggtttggcctnaacgaaaaatttattgaggctggg

SEQ ID NO: 424427 - DNA, 371 bp, Oryza sativa nipponbare
  unsure (1)..(371): unsure at all n locations
cgagaagttggatctgtctcctggaattagggctattcgacctcaaaaggtgatcaatcttgggaggggtctactaggttgggttgatctttggcatggaattttaattttcaatgcacgtgatgaacaacctcagattcagtatgtcccgttgcctgagcccatgccactcaacaaggaaagttttcgcccatccaatcgctcggaaagctgccctatgttgtttcgggatgtcatttgtagcagcagcggtgagatcaagtttgttgagttggaacaacgacagaggaaaatacaacctattcctnaagagctagaagatgtccgcaaagaatcctaagacgatgtttgcgcccgggatgttttatacg

SEQ ID NO: 424428 - DNA, 445 bp, Oryza sativa nipponbare
cccacgcgtccgccgcttccccccgcaccgagcctccccctagcccgtcttcgccccccatcgcatcgcctcccgcaccatcaagattccggggccggagtcatgcccccagcgcagcaggtggaccctccgccccatggccgcatcgcctccccccagcgctgcagtcgcccctccggggggggcctgcgacgtcgcaccctagcgccgcaggtgcctcacacccccagcagccgcctcccagcctcttcgcctccttggcttgtatggagaaagggaaccatcgttgggcgcacgctgaaacggaaaccgttcgatccccgagtcccatctattcatcttcagttttttgaaacactggatcaatctgctcggccagctagtagcttctccttcatacaagcacatgcttggattgatctggtctaggattaaatacttcgat

SEQ ID NO: 424429 - DNA, 154 bp, Oryza sativa nipponbare
ccgttctcccgcccctctccaccaaaggctgagggcgtctccctccctccgcctccccactgaccatttccggggggtgtccatggaggataattaggccggggtgggggggctttaaaaccagagtgccaaccttaaaaattatagctgctta

SEQ ID NO: 424430 - DNA, 174 bp, Oryza sativa nipponbare
  unsure (1)..(174): unsure at all n locations
gcgcgcgccagagctaggtggttagcccaagctcgcgagatcgatcgctactataggctaaggacacgtacatggcgcagctcccgcccaagatcccggtggcggcgccggggcaccaccagcactgggcctcggccgggggcgcccgacacgcgggangggcgaatgagaagc

SEQ ID NO: 424431 - DNA, 156 bp, Oryza sativa nipponbare
cgtccgcgaacgcgtgggctcggactttggaatatctagactcatatctatacagaaacaccacacttcatttgtcataggggatatgaactatatggatcctgtttatatgaagactggaatgcttactgagaagagtgatgtgtatagctttgg

SEQ ID NO: 424432 - DNA, 156 bp, Oryza sativa nipponbare
cccgccaaaccccggctccggctacccctacggcggcgccggcggctacggtgccccgccaccgccctacggctcctcccccgccccctccgccccgccctacggcgagaagcctcccaaggaaggtaagacctcctcctcttccgccccttacta

SEQ ID NO: 424433 - DNA, 247 bp, Oryza sativa nipponbare
  unsure (1)..(247): unsure at all n locations
tttttttttttttttttttttttttttttttttttttttttttttttttttttttttttttttttttttttttttttttttttttttttttttttttttttttttttttattttaaaaaaaaaaaaaaaaaaaaaaaattttatttaaaatttttttaaaaaaaaaaaaaaaaaaaaaaaaaaaattntaaatttttnnnnnnnnnnnaaaaaaaaaaaaaaaannnnnnnnttnnnnnnnaaaaaa

SEQ ID NO: 424434 - DNA, 235 bp, Oryza sativa nipponbare
  unsure (1)..(235): unsure at all n locations
ccgtccgnactccggtcgacccgcgtcgcttagccggattcggaggaaccctagctagctcccgtctcgatcccgcgcccgccaccgcactcggcaagatgtcctacgaggacggagtacgaccggggtgaacacctttccggagggcggtgtcagcgagtcccttgagccatcagtgggtcactggacgggtgaaacaagatgggtgtcttgctgaaaacggggacctgcctgt

SEQ ID NO: 424435 - DNA, 504 bp, Oryza sativa nipponbare
  unsure (1)..(504): unsure at all n locations
cccacgcgtccgcccacgcgtccggaattagtgacaccactaacaatttgtctaaaaaaaaaaagaaaccaatttcagttgctggcctctgtttttggtttcttttatttttgatcttggcattctagattttgatgtattttcaggcttagcaacatcaatggatggtatcaatagctggatggaagtcgcatactggagacacagagctttcagcttctcgattttcacaaggagttcaggcaacaacaataagcattcttttagacacttctgcaggaagaaatcatgaatctgtatgacctcatctatgctccttgcagtttgaagccgatcatgcatcaaatgccaatttggttcaagaacctcaaaggttagataatgtaaaaggctgtttacaaacttgagcatgctgcggcaaagaattgatgaccgtaggatttatgtantgttagttctcttggtggggttgggcccggggttgtttagggcgttntagtttgg

SEQ ID NO: 424436 - DNA, 320 bp, Oryza sativa nipponbare
ggtcgaccacgcgtccgggtaatttaaagctgtgtgactactgctcgcagatatgatgtgaggataatggtgaagggtataacatgttcacagaacatttcacagtactctcaccagcctcattataagtacaaaggtaactgtcttatttatcgaacaatcagctatggaatggtatgatacttctcagaaaaaaaaaactaatggccataaatctgagaggattctaaagggaaggtgactctgtacattggctcaattgtcacgttgcaactactcacatgctctggccagctactgaaaaaggatagatgaaaggt

SEQ ID NO: 424437 - DNA, 189 bp, Oryza sativa nipponbare
gctcgcttggtcgcttagctagcttttgccccacgcgtacgtgcgtatatagtgtgtgaacgatgcatgctcagctctcgagtctcgagcaagaagaaaaacaaataaataaatgctagcatgcatgcatgcatgcacgtaggatgttggactgtcatcatcaataaaagatgagtgggtgatctacgc

SEQ ID NO: 424438 - DNA, 406 bp, Oryza sativa nipponbare
gaacagagaagatagatactcctttcatcttaaaatgtaagaatctagtactggattagacattttatagcattacgaatccggatagagatatttaccagattcatcgtggtatgaaatgtctaatccggtattaggtttctaattttggaacaaagagagtaataaacaaaacgtgaagagatgaagctattctggccatctgggtcaagagccaagagatgagtttcactatcgatcggagtcagcgtagcagcgggaaataccactgctggcagtgcatttcagcatctctccaaaagaccagggacagggaaacagcattagacgcaggtttatatattacatggccaaaattctacgcggggaggcagatcaatcgcttgtagacacaacttgctcctcc

SEQ ID NO: 424439 - DNA, 72 bp, Oryza sativa nipponbare
gaccattacactggtcagctggcttctgctgaggtagtgagctagtattacataggagcggcaggggcacca

SEQ ID NO: 424440 - DNA, 178 bp, Oryza sativa nipponbare
  unsure (1)..(178): unsure at all n locations
gagaaagaggactctctttgggcattggctttcttagtcatattcgcatcatggacaaccaaaaacaagggggtggttgatgtggggctcagttcttccttgtgtcggcctacgtcanacggccgacgtgagaagaaaagtagcaagaatgatataattgggattgaagtggttacag

SEQ ID NO: 424441 - DNA, 566 bp, Oryza sativa nipponbare
cctctgctgtgcgatatcattcaacgaagtgtgtgattacatggtgccaatgctcaaggaagatctgtggttaatggtgtacttcatgaagcgccactattattgatacctacataaccatgccagtctgtaagaaagcactttcacactggtgtgccagtatagttacaataaagacgatttacggaccctacgcgtgagttagggttgctggctaagaactccatattaccagcattgactgaacatgctattgccaatgcttattatattgcgaggaattaatcccgacctataacgagtactagggcagatgagagagcgaccttatactccttacctacctcagaacagccggagacgttaccaatttatacctgaaagcctctctttattacaactgttgaacttatagagtatgagtgctatgcaagcatactaactatgctgcatcttgcttgctgtggatgctatgattacacttatgtactgttggtatgcccagatcattattcttgcacactggattgctgctagagtaaatctattccataatgctattctct

SEQ ID NO: 424442 - DNA, 180 bp, Oryza sativa nipponbare
  unsure (1)..(180): unsure at all n locations
gccgcccagatctcgcttctagaaccttccactccagggcggaggcgggatgcctcctcaggagcccgctcccgcggcgaacggcgccgcccctgcccccgcccccgccgccgcggcggctgcggcgggaggcangcgccggangcggggncggngggcggcggccgcnggggggggggg

SEQ ID NO: 424443 - DNA, 126 bp, Oryza sativa nipponbare
aataaaggggggggaaaaaaaaacatttttttggggggggggggggtttttttttttttccccccccccccgccggggggggggggggccccaaaaaaaaaaaaaacacgcgtttttttttttttt

SEQ ID NO: 424444 - DNA, 314 bp, Oryza sativa nipponbare
aaaaaaaaaaagaaaaaaaattgggggggaaaaaaacccaaaaaaaaataaaaggggggggaaaaaaaaagggggaaaaaaaaaaaaaaatttaaaaaagggggttttttttaaaaaggggaaaaaaaaaaacaaaaaaacatccggggaaaaatgggggggggaaaaaaaaaaaaaaaaaaactctcctggggggggaaaaaaaaaaaaaaggggggtttctttataaaataaagcccaggggggggggggaaaaaaaaaaaaaataataatatattattatgagaaaaaaacaccccccccaggaggtggag

SEQ ID NO: 424445 - DNA, 82 bp, Oryza sativa nipponbare
tttaaaaaaatttttattttttttatattttttaatatttttttttttatttataaaaaaaaaaaaaaaatttttttatatt

SEQ ID NO: 424446 - DNA, 88 bp, Oryza sativa nipponbare
catgagtccagacagctggaatcaggatgaaattggggatattgagaatcacactcagaatgaatttaatgatcgcccctggatagat

SEQ ID NO: 424447 - DNA, 294 bp, Oryza sativa nipponbare
cccacgcctgtccgcccacgcgtccggtcgagatcgtcgcttcggcgtaacaacaaataaggggagatccccaagtcctaacccgaatccatttccaataatccatttcgccacgatttgttcttggttgtctgagagagagagagagagagatccgtatacattgctgctacttgaggtcaagcccgttcgttcgcgcgcgcgcgcctgtctgtctctgtttgattgattcttctacgtcgtcgacgtacgcctgttcatgatgtcgctcaacctggctcaccagaccggagc

SEQ ID NO: 424448 - DNA, 135 bp, Oryza sativa nipponbare
  unsure (1)..(135): unsure at all n locations
gccacggagnaaaagcttgggtgatttcttggaagcgaagagtgaggggagaagaagaagaagaagaagaagaagaggggggaggaggaggagcancatggctgagcacaaggaggagcagnnngnganggagaa

SEQ ID NO: 424449 - DNA, 157 bp, Oryza sativa nipponbare
  unsure (1)..(157): unsure at all n locations
cgctcgccgccgccgccggctcagcttctcctcctcctccgccgccgccgccgccgtcctcgggtgaagcagcgcagttcggaggagggaggcggagggggtttgntcgccaacctagctcgctcgctcagctgccgagctcttcttcgctggtctt

SEQ ID NO: 424450 - DNA, 164 bp, Oryza sativa nipponbare
  unsure (1)..(164): unsure at all n locations
cccggtcgccccgcgtccggaggacccccccaaaatcacacgcgccaaccagatcaaacccacctcgcaggagaagagaagcgatctacctctcctcgaggtggtggtgaggatttggagttgaattgtggggagggggacctngngggtgttgnnggtttgga

SEQ ID NO: 424451 - DNA, 310 bp, Oryza sativa nipponbare
  unsure (1)..(310): unsure at all n locations
tttttttttttttttttttttttttttttttttttttttttttttttttttttttttttttttttatttttttttttttttttttttttttttttttttttttttttttaaaaaaaaaaaaaaaaaaaaatttaaaaaaaagggttaaaaaaaaaaagggaaaaaaaaaaaaaaaaaaaaaattttaaaaaaaaaaaaatgtaaaaaaggttttaaaaaaaaaaaaaaaaaaaaaaaaattgaaaatttgaagggggtttttttaaaaaaataagaatttgnaaagaaaaattaaaaaattggggggggg

SEQ ID NO: 424452 - DNA, 195 bp, Oryza sativa nipponbare
gtccgcaccacgcgtgcgctaccgtggccttcgactttcccctctctctctctctccggcggcggcgaggccaacaaagggctacagatcgatggaatgcgacgcggaggtgatacactgtgtacttggactatgtcgtaaaccaatgtaaaaatgggatactcgttagataatatgtcctctcttggggggggg

SEQ ID NO: 424453 - DNA, 393 bp, Oryza sativa nipponbare
  unsure (1)..(393): unsure at all n locations
cccacgcgtccgacaaactcaaaaaagttctgctagctaaggagagcagcttgtttgaatttcgggcagttggtggccaggttgaactctcaatgagagggtggcaatctactaatcggtactatcttgcgatctctggaaattgaagatcagtataactaccctggtagtcctgtaccaaggtgtttggcgagatcctttatcaatagcgtgcaaaccaacgaagtcccaactcctagtcgaaagaatagtgcaggacctanaggtactgcactgaagaaaagtgacagtgaagaaagggtttttgaagcatcagatgattttgatgaatttgaaacacctatgctggatgagaggagtgtatcagattatttcagcacacagaactttttg

SEQ ID NO: 424454 - DNA, 175 bp, Oryza sativa nipponbare
tgcctacgctccatgagggttcgtaggctcggtgatgaagttcatcacggggacgggcataattttcgtcccgacagccacgtccacgaggcccatgtggaggagcttcgagtccgccatggcgagcttcccgtccccggccgtgttcggccgcgagccgctcgtggtcaccaag

SEQ ID NO: 424455 - DNA, 379 bp, Oryza sativa nipponbare
cccacgcctgtccgcccacgccgtccgctccgcccttcaccgcctccgttgccggccaccactgcccccgtccacgcctcgcgtcgccgcccccatccccgtccccgccccgtcgctagggtttcgtcacgagcgacctcccgccgtggaagcttccaccttcctcctcatccttgtcctcacggccgcggcgttcgcggcgtaggcggcgggggacgggtgcagcgccggatgcgagctcgcgctggcctcctcatcctcgagcgcctccaccccaatactttcttcgtcctcgcctcgtcgcgtcgctctgtcttctcccctccctgcctcttcgggtgatgtcttcatttctttcccctttcgtgcgaatgggacc

SEQ ID NO: 424456 - DNA, 86 bp, Oryza sativa nipponbare
tttttttttttttttttttttttttttttttttttttttttttttttttttttttttttttttttttttttttttttttttttttt

SEQ ID NO: 424457 - DNA, 193 bp, Oryza sativa nipponbare
cgaccacgcgtccggtcctttctcctttgtgcgtcacggagtgagcagtgtacatacgttactagctcaaggctgcagcggagagagagagagagagagagagagagatgggcgctgtggctgcggttcgtgccgcggtcctggtcgtggccgtggccctcgccgcggcggcggccggcgcgtcggcgccgct

SEQ ID NO: 424458 - DNA, 187 bp, Oryza sativa nipponbare
ccgtttcatttcacctatttttacatgtctatcttttttgtgtgtagtacataaatgcaaataatgcgtctcttttctctcatcatagcctttcgatcggtagaagctagaatgccagagatggtgagggcgtcaacagccatctctgcgggaagagtcgtcgtcgtcgccggagcggcggcgttgg

SEQ ID NO: 424459 - DNA, 236 bp, Oryza sativa nipponbare
  unsure (1)..(236): unsure at all n locations
cgacgacagagaggcgaggaacagagagaggggggaaagcgaaacgtacaaattcaaaatcactccccaatttcccccgaataattccaccgtcgcctaaagccagtttcatcgggaacgcctcgaattttccgatccctaggcgggcgggcgggggaggtggagtgcccgcngcgcggcgcggcggnggntngggnnnggggcncgnnggngnnngngngggcgggggggggggg

SEQ ID NO: 424460 - DNA, 189 bp, Oryza sativa nipponbare
cggcactccgatgctctccagccatctccggcgccggcgccggcgctcgccggagctccgccgagggactctcccctcctcctaccgctcgcctccgccgccgcgtcctctgcgcgatccgcgccgacgcgccgcccccgatccacctctccgcggcggccccctcgcggccggcgaagcgcgcccgct

SEQ ID NO: 424461 - DNA, 303 bp, Oryza sativa nipponbare
  unsure (1)..(303): unsure at all n locations
tttttttttttttttttttttttttttattttttctttttttttttttttttttttttttttttttttttttttttatatattttttataattttttattatatattatttttttttttaaaaacaaaaattaaaaaaaaaaaaaaaaaaaaagagaaagttattttaaaaaaaaaaaaaaaaaaaaatagaaaaaaaaaaaaaaaaaaaaaaaaaaaggggggttgggttgggaaaaaaaaaaaanaaagagggaaaaaaaaaaaaagggggggaaaggaaaaaggaaaaaaatttgggggt

SEQ ID NO: 424462 - DNA, 179 bp, Oryza sativa nipponbare
  unsure (1)..(179): unsure at all n locations
tttttttttttatattattatttatatacactactaagtagaaaagaatgccacagacacggtaataaaaatggcagtagatacataagaaataatttaattacactagctagcagtggcacantctgaaaaaacaacgtganaaaaaaaaaaaaaaaaaaaaaaaaaannnnaannaa

SEQ ID NO: 424463 - DNA, 342 bp, Oryza sativa nipponbare
gatcgcatccgccgccgctgtttctgtgccgctgttgcagcataaattaaatgatcgagtgacctgctttatgcgaggatgcattttcgcagctgctgtccgttgctatctgctgtatgcagcaccactgcgcaggtggatgaaccttgtctgggttttcagcagtgtcatgtgccatatggtgtgctggttgagcaccactagcttatgagtatatactgagcttcgtgtggctttgaggacaacacttgctgacaagcaccctattctattcagatgtgagactggtgggaaaaaacgatctctagcaacaaattatggtggtggtgcaccaatttcact

SEQ ID NO: 424464 - DNA, 194 bp, Oryza sativa nipponbare
  unsure (1)..(194): unsure at all n locations
gccgcggtccgtccgcatcccggtcgaccacgcgtccgcgcggtgagcgcgctggcgccgtgcgggccgttcctgctgggcggcgcggcgcggccgggcgatcggtgctgcggcggcgcgagggcgctgcgcgggatggcgggcacggcggaggcgcggcgcgcgctgngcaggngcctggagcagnccgggcc

SEQ ID NO: 424465 - DNA, 233 bp, Oryza sativa nipponbare
acaccacaccattttcagcccatcatattatattcatttatattagtatcaaataacaagtgggctaagcccacataggcccaacaatcaaccacaataacaacaacccatatagcacaaaggttacaacccgtatagcaactggttcttctgataatgcaccagaagtcttacaaaccgaaaaaaaacaaaggtttcaacaaactgcatgcaccatcaacaatcacctacaa

SEQ ID NO: 424466 - DNA, 61 bp, Oryza sativa nipponbare
tttttattttattagttttttttttttttttggtgcttctttttcttgttttaggagggaa

SEQ ID NO: 424467 - DNA, 92 bp, Oryza sativa nipponbare
cccacgcgtccgcccatgcgtccggttctagatcgcgagcggaacatctttctatgatgcggctgctgctgacgacgcctgcggcggtggct

SEQ ID NO: 424468 - DNA, 71 bp, Oryza sativa nipponbare
cccacgcgtccgcccaggcgtccgggagcggcgcgcctttttttttttttttttagcacaaggtccatcta

SEQ ID NO: 424469 - DNA, 178 bp, Oryza sativa nipponbare
ccgcgcttttactattgccaatgcggggttggagtcgacacctacctttctcagatgatttttggagaaagcgcggttaagggcgtataaaaaatatcataatattggctccaacctcattctctagaagaacatctacggagtgctcgtgggggtgcaccatcgggcactgtattct

SEQ ID NO: 424470 - DNA, 195 bp, Oryza sativa nipponbare
cccactcgtccgcccacgcttccgcccacgcgtccggccggcatcacgtgccttaatggcctcgctcgtacccagaccggcagtccacagagaccgcgaagttaaagatcgacctgaccatgataagctacggccaaaagtcatacaacaaaaagtaccttttttttttttagaggggggggggaaacaaaaatt

SEQ ID NO: 424471 - DNA, 199 bp, Oryza sativa nipponbare
cgacagcaatttttgatccatatctcagttatcttatctatctagaattgaaaacgacttggttacttggtttattggagttttagttttattggtagttgaactaggcatttaggcaatgcgcgtggattgggtattttgtttgctcggatcttttattttgctttataagttatcatatggattgctactttatgtc

SEQ ID NO: 424472 - DNA, 368 bp, Oryza sativa nipponbare
  unsure (1)..(368): unsure at all n locations
cggacgcgtgggcggacgcgtgggcgcggagaagaagctcgccgaggcgcaagatcggctcgcccggtatcgagatcgcaagccgcctccgccgccgacccatagggaccccaagccgtcgctgccaccgacgacgacccagagggaccccaagccatctcctccacagcacaaggcgccggagcggccgcagcttgtcatcccgggggcaaacaaccggccacccccgcgcccagagcccatgcctgggttgaagaagaccgccgctccatcatcctcctccgcatccgtgccgncggagcggcccagggcactggagaagaagcccaagcttaagatcgaacagaaggagcatcagaacttgattc

SEQ ID NO: 424473 - DNA, 293 bp, Oryza sativa nipponbare
cccacgcgtccgcccacgcgtccggttctagatcgcgagcggccgctcgcgatctagaacggcaaaccaaaaataaaagcacaaagggacgcttaaatacataaaaagaagatatattgacatttaaaaaaggtgtatggattacatgtatataatcctcgcaaaaaaatgcatgtatatattgtggatttagccatctattttccctgctctttcatgccttcaaaagggccagcggtcacttggtattgtgtgggtgctctgcacatgggtatttttataaatatgtaaat

SEQ ID NO: 424474 - DNA, 199 bp, Oryza sativa nipponbare
aggaaggaagagggagggaggaaccctaatgcgacctgctctcaagctccatctccattccattcccttttttgtgtagtagcaatcataggtagtactagtatactagcattccccaaccattccttcctacaccaccaccacctatcaatcacccattcaccacctaaaaattggggggggggtgctcctcctcctc

SEQ ID NO: 424475 - DNA, 96 bp, Oryza sativa nipponbare
tttttttttttttttctttttttttttttttttttttttttttttttttttttttttttttttttttttttttttttttttttttttttttttttt

SEQ ID NO: 424476 - DNA, 63 bp, Oryza sativa nipponbare
gcagcctgaccccaggcgaacgagggaggcgggccagagagcaaggcaaaaggaagctggagg

SEQ ID NO: 424477 - DNA, 179 bp, Oryza sativa nipponbare
  unsure (1)..(179): unsure at all n locations
tccgnatcccggtcgccccgcgtccgcccgcgtcgtttcgagcgaattctccaacactttcacccaccggcgcgagaggagaggaagaagatagatgatcgctccgccatactatgggctcaccccatcgcgctccaccgcgtgctccccagagctccgncgctcgngccagtttgaat

SEQ ID NO: 424478 - DNA, 532 bp, Oryza sativa nipponbare
gtgcagaaggtctcaattctgcaccaagagtgacacctaaagacaaggagtttctttcattgagtatttcatcacaacaaagcccagttcttaattcaggtaaaggccatgatgggacatcaggtgccgcacgtccagtacatgcaccagggcatggaaatcctaaagctttggccactgaggcccgtggttctctatctctgagtattgcaccgaatgtccatgaccctccagcatcaagtaaggagcctaaggacgatgcatctccaatagcaggcatggtctcagaaagccagcactctcaagcacctaatgcagtcaccaaggggtataatgctcccacacccatacctaaggagtcaaaaggccagcatttacagagtggagtgcacagtcaatcgtctgggccagacgatgctagcagcagcaatgtcgctcgggcagctgataccatcgtcgccctatcaactcttcgagagaagggcaggtagatgttgcagccccttgtgctgatcgctctttgctttttgct

SEQ ID NO: 424479 - DNA, 343 bp, Oryza sativa nipponbare
aaatcaaccaaagaattaacatgattttgtgtaatttagtatggtccatggatcaagtaccacaaaactatacaaaaagaatgatattgcatttcacacttcctatgaaagaacgacgatggatttctgtacagaaatcaggtagcttaatctacaagtgagtcggcaatatggaatattttgaacaagatgctggtggaagtacatgtagtcagacgactgcatcagatcgagtagggaattcaaggccatgaagtgctccaatgttgtgcagatcctcagcagagtacaatggaagaaaccagagcaactttttggtgccaaaaacctgctccaagttttt

SEQ ID NO: 424480 - DNA, 108 bp, Oryza sativa nipponbare
gctcgtgctgcacacagatcgcgtggtgtgttgctcgcggcggtgccgtcgctccaattccttattgatccccgatggccgtgtatccttgccgctccaacattcagg

SEQ ID NO: 424481 - DNA, 113 bp, Oryza sativa nipponbare
ttttttttttttttttttttttttttttttttttttttttttttttttttttttttttttttttttttttttttttttttttttttttttttttttttttttttttttttttt

SEQ ID NO: 424482 - DNA, 83 bp, Oryza sativa nipponbare
tttttttttttttgttgctgtcataggtcagcgttggcactacaactgcaccataaaatgtgatggtatgtttttcagttgct

SEQ ID NO: 424483 - DNA, 208 bp, Oryza sativa nipponbare
  unsure (1)..(208): unsure at all n locations
cggacgcgtgggcgcgagcggagattttcccccacgatttttgctgttcatccgtgtgggggaggagagattccgcgtcgattggtggtcggatcggagcgaggagaagcccccgtgttcttggctttttttcccccgatcgaatccggtggaaagcgagcaataaaaaccacttcttgtgtttttcgtttntgggtttctttttctt

SEQ ID NO: 424484 - DNA, 179 bp, Oryza sativa nipponbare
gctaccttttattgaatgctgctatctaatgcactgggttccccctggcgaggaatcatgagtctgacgacgctgcgaaagttattgataaagcattaacaacagcaggcatgtgggatattatcgacagtactgccattgctatcggaaggagggatgcatggacatattacaccggc

SEQ ID NO: 424485 - DNA, 148 bp, Oryza sativa nipponbare
ccgggtcgcccacgcgtccgacttattcaggacactgactaccggggcggagagataagattgaagccttcgtgtggatgatgaggagcctgtgaggtcctgctggtccacttgcgattgttatgagctgtcttgaggttcattcgtc

SEQ ID NO: 424486 - DNA, 368 bp, Oryza sativa nipponbare
cgtccgcggacgcgtgggtttccatggcgctcgccgccgccgccaccaccttccgccctcgcctcgtcgtcaccgccaaagccgacaacaccgacactcgccgtcgccactggaaggccggtgagttccccttccccacctcttccgacactccccgccggagcgcccgcaccgccgagcgtgcgggggataagccgagggatgaagatggggatagcagcaggaggactgggcgcaggcactggaaggcaggcgaattcccgggcacgcaggaggactccaggcgacctcggaggagccccatcaagaacgtcaagaagcggtttgacgcgcgcgcccaggccaaggcgtgggcctgcaccgtcacc

SEQ ID NO: 424487 - DNA, 184 bp, Oryza sativa nipponbare
actagctctagatcagatagagggtgctggggggggatatacaaaaaaccccatatacttatgtacacatagtgcgtagacctcttgtgcgatgtgcttataccccatcatatatgacagcgcagcagtaaatgacggcgtactcgtcgaggaggaactccatttttttcaagagggggggggg

SEQ ID NO: 424488 - DNA, 346 bp, Oryza sativa nipponbare
  unsure (1)..(346): unsure at all n locations
aaaaaaaaaaacctaaattggggccaatgaatcatccaattacatactgatatattggtacaatcaaaccaatattagtgctcattcaacaccaaaaatttgcaatttgctatcttttttagatatctttccaactatttctcacatcacagtttacaactaaaaaaataacattctgttacactgaagttatatactggctacaagtgagaggaaaagacaaacaaatcaataaagggccatgtgcagttgttaaatattttgacgggatagcttctaattgtttctgatggataaaaacacttgccaaataacgaaaattttnngacatgtttttaatccaaaa

SEQ ID NO: 424489 - DNA, 180 bp, Oryza sativa nipponbare
  unsure (1)..(180): unsure at all n locations
cgtccgaatcccggtcgccccgcgtccgaggtggcttcggggaggcaagggtggaggcttcggtggtggcttcggagaggcaaaggcggaggagttgcggcgggcggcggaggattcggtggcggcggtggcgctggacaggaggcggttcggcggaggcaagggaggtggtttnngtgg

SEQ ID NO: 424490 - DNA, 304 bp, Oryza sativa nipponbare
  unsure (1)..(304): unsure at all n locations
gccgcgtaccgtccgtatcccggtcgccccgcgtccgcccgcgtccgcaaggtcgtcttcttcgcgggggctcatggcggcatggtggccatctcggcgcgcactgacgagtcggagatgaggtcagggcaggcagtgccagcgggagggcaggacagcccgtggcgcgtgccggaggtgctcgaccggactcaccggggggagaggtcaccgatgtccgccgccgggcgcgctcggcctgggatgcatgctgccacactgaggactgagcccgatgccgttgcccgctccgngatggtaggag

SEQ ID NO: 424491 - DNA, 274 bp, Oryza sativa nipponbare
  unsure (1)..(274): unsure at all n locations
gggctacatactgctaatagtgtttaccttcttgtttttgctgcaggctgcaaccacagctgatattctttgtttcttctgaatgaaaacacatatgcattgattgcttaacatccaatcctccatctgtagttttgtcagatcatgcactgtataccctctattttatttacctatggggtgtgtttgattaagtccatgcgggtgaacggaccccctnattnagggagctgaatgaaatccttctaggacaggancaatntaaagaaagcaa

SEQ ID NO: 424492 - DNA, 230 bp, Oryza sativa nipponbare
  unsure (1)..(230): unsure at all n locations
cgtccggatcccggtcgaccagcgtcggcagccggcggcgaagcggtcgtcgaggcgacgaagcgggaccgaccggctcgcgtgaggcagggcgtcaccgagctgagatattcaaccggcggggaggccgcggcggagggggacgtgtgctggaccgacccctacccgtagcccgccggcgacggcgaccgagctcgtngccggcgatggcggngggaccgggcgtccgg

SEQ ID NO: 424493 - DNA, 185 bp, Oryza sativa nipponbare
  unsure (1)..(185): unsure at all n locations
aaagggcaataataatttttaacatccaattttaaaccaaacaaaaaataaatttttaaataactgacataatgcaaaaaaccagcaaatattaacactcaatccaacaactaaaataacctttctaaaaacttatcaaataataaaaaaactataattttcaaatccaaatctanaaacccccc

SEQ ID NO: 424494 - DNA, 135 bp, Oryza sativa nipponbare
cgtccgattccggcgccccgcgccgtcctctgcctcatcgctcgctcggttcgctcgtcgccctcgcacaccacacgcaggcgcggcgacacccaacacgcagagaggccagcccctctgcacgggggggggggg

SEQ ID NO: 424495 - DNA, 157 bp, Oryza sativa nipponbare
  unsure (1)..(157): unsure at all n locations
ttttttttttttttttttttttttttttttttttttttttataatataaattattttaataaaaaaaaaaaaaaaaaaaaaaaaaaaaataattttaaaaaaaaaaaaaaaaaaaaaaaaaaaannnaaaaaaaaaaaaaaaaaatatnattnnnna

SEQ ID NO: 424496 - DNA, 196 bp, Oryza sativa nipponbare
  unsure (1)..(196): unsure at all n locations
cgtccgnactcctggtcgaccccgcgtccgctcgcctcgcctcttctcgcggccaacgagagagggagagggagagctaggaccaccgccactgcctcgggaagtaggtggctcccctgctttccctcctctcctccgccgncgccgaggcagccagccaagtcgncccagcagggggnaggctactagttttttt

SEQ ID NO: 424497 - DNA, 191 bp, Oryza sativa nipponbare
cttccggcttttatacatttaattacatgttgggagaacttaatggtatggccttggatattggcaccaaaattgaaaggcaaaataaatcacttggatgcttttcgggtgatgaatgtagatgaactcgaacttttagagttaaacggggcataaccaaacggggcacgcgcggttatatgggcaaaatg

SEQ ID NO: 424498 - DNA, 134 bp, Oryza sativa nipponbare
gttcaagattccatgggataccagactacgaaatgctgatgagcaggtgacacttgtgcacgttgaacagctcgatatatgggttctgcaggcctgcgagcctgctagttattgctgatggctccaaagtatga

SEQ ID NO: 424499 - DNA, 179 bp, Oryza sativa nipponbare
  unsure (1)..(179): unsure at all n locations
gcagccagacgtaacgatatttacagaggattaactgttccattgcttcagcatgtcgatcgatcgatcgatcattttcagtctacgccgggatgatgaaggaacaaggcgtanaatcccccaagaacagttgaggcggccatcacccaaataatcgcctccaccggccacgggggggg

SEQ ID NO: 424500 - DNA, 61 bp, Oryza sativa nipponbare
agcctccggctatgtgcattggcatcatacaagttcgtgctctccgcatcgtgctcgtcgt

SEQ ID NO: 424501 - DNA, 118 bp, Oryza sativa nipponbare
cccacgcttcggcacgcgtccgcggagacatgggaacacataaaatcccctatggtttcttccgacattggcttgctccctctggggtaagggtccgtagcccaaccttcttacccaa

SEQ ID NO: 424502 - DNA, 313 bp, Oryza sativa nipponbare
  unsure (1)..(313): unsure at all n locations
agagcaagaatctagcatcatattgtcacaaaaccgaaattgtggatgttacattagagatcgacatcgatggcaacataacacataatctagagtaccagggacaagttttcctgaaccactccagcaaaattattcatcccccgcagaacaaaaatagtaaatcaagaaaagcctcaccacggcacgacggatcggtgaggtcaggcggccatggggtggttggcgacntactcnatggcgagcgggagggagtcnatcttgtcggcctcctggncggggatctcgagcttgaactcctcctcnatcgccc

SEQ ID NO: 424503 - DNA, 148 bp, Oryza sativa nipponbare
  unsure (1)..(148): unsure at all n locations
cccacgcgtccggtgagcttggaaagattacgctagacaagacttttgaggagagggatacactaaatgagcaaattgtgaggtagagaggaaagggagaggagggcggaggaagatgagcgggaacggngtgaagaagggggnggag

SEQ ID NO: 424504 - DNA, 85 bp, Oryza sativa nipponbare
atcactatagggcgtgctttgcggggagggggagccatgacaacttaaataatgtgatcgttgctctccgacagatatttctcta

SEQ ID NO: 424505 - DNA, 174 bp, Oryza sativa nipponbare
ccggtcgaccacgcgtccgggaattgcacgtctgaagattggaattagcgctttggcagatgccaagaagtggcaggggagttgtgcccattttgatttgtaataactggagagaatatgaagacaattggaagggctatgaaagagaatgacgtgttatctgatgaggttccg

SEQ ID NO: 424506 - DNA, 61 bp, Oryza sativa nipponbare
gtccgccactttccgccacctatccggggtaggccacacactatgctttgctggcgcagag

SEQ ID NO: 424507 - DNA, 239 bp, Oryza sativa nipponbare
caaccatggcctcctccatggccatgtccctccgctccctggccgccaccgacgccttcctccccagagccctccccctcctccgcccaattcctccttctgctctccgcgtgcaccccgcgcctccgactacacctccacctgcgctacacgcgccgactcccggtggcgccgatcgccgcgtacgactccttagaatgcgcttcgacctcctccgccgacgcgccagacttgactga

SEQ ID NO: 424508 - DNA, 133 bp, Oryza sativa nipponbare
  unsure (1)..(133): unsure at all n locations
gccgcggtccgtccgaatcccggtcgccccgcgtccgcccgcgtccgggatcagcctcctctcttctttcacgcgggagagaagagagtagctgctggagggtctacagcgcgactggcgnngggcganagga

SEQ ID NO: 424509 - DNA, 226 bp, Oryza sativa nipponbare
gcggtccggctatggcattgccatcaaacaggttcgtcccttccgccatcggcgctggccgccctacaccgtcggacaccggcggcggccatacggcgctactacgcgacacctgcgagaactcgtggcgcggggagagggccgtgtcccaacaccggcccaccatcgcgccgcaactacatccggcggtgctgcgccgtcagcggccgcccggacggaccgcggc

SEQ ID NO: 424510 - DNA, 263 bp, Oryza sativa nipponbare
gctacaaaacccctcataagtattaggtatcggtttatttaaaactggtacataagatctttttctacttccgtagaatgaaaatgtacagaatcggcacctttgagcaacttgtagtcggtaagtacacggtaactgcaactaattcagatcgtgggcaagaacttgtagtcgatcttctacacggtgaggtacatgtcgatctgcaggacggcgttgttggtggtggcgttgaaggagtgcgtcctgaggaggccgtaccc

SEQ ID NO: 424511 - DNA, 127 bp, Oryza sativa nipponbare
tccgatcccggtcgcccccgtccccacctcgtcgactccttggttcgaacacggcgcgcgcgcagcagagcggcccacacaccggaccacaaaaccccaaagcaaggccaagccgcgaacaggaaga

SEQ ID NO: 424512 - DNA, 163 bp, Oryza sativa nipponbare
  unsure (1)..(163): unsure at all n locations
gcgtccgatccggccaaagaaggtgatagccctggtcatccgctccgacgcgcgcaaccaccagncgaagatatgggcggcgtgctcacccgcccgccttcaggcacggaccggtgctttggccgcaagaagacggttgtcggccgtatactactgctagcct

SEQ ID NO: 424513 - DNA, 105 bp, Oryza sativa nipponbare
  unsure (1)..(105): unsure at all n locations
cggacgcgtgggcggacgcgtgggcggacgcgtgggcggacgcgtgggcggacgcgtgggcggacgcgtgggcggnaaaatagncnngnaacttngggagaaggg

SEQ ID NO: 424514 - DNA, 493 bp, Oryza sativa nipponbare
gaagcctgcagcagcaagacttctcttccagttattcctgggaggagcagaacaagattaaaggaaatatctagctacagtttgactgcaactaatggagtaataggcactaataagaacaagcatagtggaaaatacagttcaacttctgtgtggcaaaaagtagaaaaacttaatgtggagaacacatctagagcaggatgtatggttgattcagctattcagaacaaggatgtactggaaaacattaacaaggttgcacaacataatctaacaaggtcaatgaaaataaatcagaggagaaaagcatgtaatcagcattcaccagacgagagaattgaaatggagcatgccaaagaaaatgatgcactaaactcatgtcaagcattttccagatataagtacaagaagcaaacatcaatactgtaccaacaaacaagtttatcttctgaccagggtacttctcagtcataagggaactaccatgctccta

SEQ ID NO: 424515 - DNA, 213 bp, Oryza sativa nipponbare
cgtccgaatcccggtcgccccgcgtcgcgacctggcggacctggcggaccgtgggattaatgtgccttaccaaatgccataagatgatgggctctcaacaggcccaagacaaaagccactcactggaagcaaactgtctgtacctggaggatgtactgaccatctgtgagggggaaaccatcacaggcggggtgagtgttacaccgaataaaa

SEQ ID NO: 424516 - DNA, 346 bp, Oryza sativa nipponbare
  unsure (1)..(346): unsure at all n locations
ctggaacgtatttggggctcctgaagcacccaagactgcaaccaagggttcccacactgggatgttcaacaattccaaccacattcacatccgttgaggaacacaatacccttggttctgtgatccagtcataacttacaaagaagcagacttggtgtgaagggtcatttgcaggagggggggtgttacattattagcagaagagttagattttgacatgttgtatataaggttttgtgctatgttgataacaattttatgtacatnaagaacggnttgatgtattgattggnnganaaaaaatgtaaaaaaaattgtttttttgnnnnaatatanattnnnatat

SEQ ID NO: 424517 - DNA, 68 bp, Oryza sativa nipponbare
cccactgcgtccgaagacgcgtggggggtggtggtgtgcgaaccctgaattgcattgcagttgagtcc

SEQ ID NO: 424518 - DNA, 244 bp, Oryza sativa nipponbare
  unsure (1)..(244): unsure at all n locations
tttttttttttttttttttttttttnnnaantaanaaaatatanaaaaaaaanaanatnaaanaaanaaaanaattataanaaataaaaataataaaaaaaaannaaaaaaaaaaaaanaanaaaaattttttttttttanannnnggggggggggaaaaaaanaaaaaaaanngttttttataaaaaaaaaannagattattaatannaatatatttaaaaaataaaatttaaaanatatttt

SEQ ID NO: 424519 - DNA, 72 bp, Oryza sativa nipponbare
gcagttttggctatgcaggataatcgcgttatggagaaataggaaaatgcctcgaatatgagtgcttagatg

SEQ ID NO: 424520 - DNA, 211 bp, Oryza sativa nipponbare
  unsure (1)..(211): unsure at all n locations
attcttgttgcccatggaggagacgctgcagccggcgcctatatggtcatagcaaccagcaccatgaaaccgaaaactttctgctccggccacaaggttgctccaggggacgtgccgtcgccgaacagcacttgggcaccgttgcatcacctgtatgggccatgctcgccggcgccgtcgncggccaacagcaccgccgccgacgncgccg

SEQ ID NO: 424521 - DNA, 109 bp, Oryza sativa nipponbare
tccgaacgccaccgaagaaatgctctcaccaatccaactgtgctcgatccatccatccatccaatccgcctcgctccatccatggcgtctgcggatgcggtctcgccgg

SEQ ID NO: 424522 - DNA, 257 bp, Oryza sativa nipponbare
aacatgcaaccaccatagttcattcataacataatatttgtaatatgtcgtagttattacagctcacaaaacatcaaaaaaaatcaaatatactacttattacagcccactaattcctatgctatcgatagtcattccacatttgatgtgctatcgtgtccctcaaaaggttcccttgattagtgctctgatcattgccttcatcaccatctggcaggtcaacataattgcttggatggatattatgtggttggtta

SEQ ID NO: 424523 - DNA, 109 bp, Oryza sativa nipponbare
  unsure (1)..(109): unsure at all n locations
cccacgcgtccgcggacgcttgggtgcgcagaacaggaagctcttgtncatagaatntntnggaagcntntgagnattgngagtgggaggnaanngagatgtttgggag

SEQ ID NO: 424524 - DNA, 72 bp, Oryza sativa nipponbare
  unsure (1)..(72): unsure at all n locations
cctctctctcctctccacgtcgcgccctctccgcgcgcgcccgcgcttctatataaggaggggggaggnggg

SEQ ID NO: 424525 - DNA, 485 bp, Oryza sativa nipponbare
  unsure (1)..(485): unsure at all n locations
cccacgcgtccgctcgtttcttgttttcaaagttgtgtttgagtctgttcaagacgaagatgaagtgcaggtatgtaaaaccagaaagtcgttagcgtatgattaattgggttataattattacaaacttggaaaacatatttatttgatatttctaaaaacaacttccatataaaaatttccgcataaaatgtaccgtttatcagtttaaaaaacgtgctaacaaaaaccaagataaattttgtatcttaatcaagttagaacgtatacccaccaatgtttgatccgtcaatttcatattgtattgctgattaagtttggtataatttgccattctatttgctcttaaggctatggtaaccactgtacatctctttgcatgtttaatcactaaattcatgattttatttgctgatcttgcgcatattactgtgttgtagttgatattntatttggattcatttgctcctgtttggatccaagag

SEQ ID NO: 424526 - DNA, 88 bp, Oryza sativa nipponbare
agcaagcggtgacagagcagatcacgcgagcttgtcgccaagggggggaggaagagaagtgagaaatccgcgccaagaagcgagagag

SEQ ID NO: 424527 - DNA, 335 bp, Oryza sativa nipponbare
cagaagctaaggaacgaagcttacaaggccgcgaagaagaaaggaacatatgatgacaagttcaatgatgatcccttgtcaaagaaatctatactctcacaatatgatgacccaatggaagatgagggagtgacacttgatgaaggtggacgcttcagtggtgaagctgaaaagaaactggaagagctccgcaaaagaattgaaggtggttttgtgcagaaaaagacagaagatcttacttccgcagcaaagatgtcatcagactattatactccagatgaaatgctccagtttaagaaaccaaagaaaaagaaatcccttaggaagaaagaaaa

SEQ ID NO: 424528 - DNA, 387 bp, Oryza sativa nipponbare
  unsure (1)..(387): unsure at all n locations
gcctcctccaccgcccgtgtcgccgccgcgcgcgtctatcccctcgccgccgccgccgtctacgccgcgtgaggtccggattggttgaaaggctgatcgagtgtagagactctgaagctcatatggttggcattggttgatatgataacgtgtcacgttgtgagatgcagacccccggtgtgggggttgattgaatgaagtggatagcactcttataactttcttgctcgaagtttcttgataccaaggcaagtagcttataagaagatttggactttggtggcataaatggatgaactaactggcggctttaacgtggtggtgattacaggctcttgagctaccaagtatgtnaggttcaaatgagaagtggattgatgggtttca

SEQ ID NO: 424529 - DNA, 269 bp, Oryza sativa nipponbare
  unsure (1)..(269): unsure at all n locations
aaaaaaaaataaaaatattaaaaaaaaaaaaaaaaaaaaaaaaaaaggggttaaaaaaaaaaaaaaaaaaaaaattttnnnaaaaaaggggagggataaaaaaaaaatattttttatgggggtgaaaagaaagggggaaaaggggaaaaaaaaaaaaaattttattaaatnntatggggggggggggggggggaaaaaattaaattttggaaaaaaannaaaaaagagggnngngnaaaaggggggggggnaaaaaaagnnaatggggg

SEQ ID NO: 424530 - DNA, 279 bp, Oryza sativa nipponbare
cgagctcgcacggctgccgccgccgagctccgcccgccgccatggcgtccgcctccctgtcgctccgcctccccacgccctccactgcaccttcctccggggcctcctcctcgttcctctccctgcctccgaccttgctccgccaggcgcggggtggcgcggctgcggcttccgcgctggtggcgctgcctgatcgtgctctactaccagccggccaagatgtccaagaagtcggacgtaaataagaaggaagaggtgatcactctgctgaatgagaag

SEQ ID NO: 424531 - DNA, 334 bp, Oryza sativa nipponbare
  unsure (1)..(334): unsure at all n locations
cgcatagtacagtggttgctgatgcctgctggcatcagacatcctgcttcaatgtcttctagtggagttggtattatctacccactgtttgccagaattcaacaaagagcatacactaacgctcaagttgcccatagtgctaatcagataccgaatccacagacatctcagtatcatgaagcaggtactctaggatctcctgttgatatcaatgcggaaaacggcactcagacttcccctggggagcagaatggccaggggcctttttctcagttgatggatagtatccnttggattgcataantctttnntggngaaaattntngngtaaatg

SEQ ID NO: 424532 - DNA, 704 bp, Oryza sativa nipponbare
  unsure (1)..(704): unsure at all n locations
ccccgcgtccgcccgtttctcctaaaccctagcgcctacgcgcccaatccaccggagaggggagtgcggggaagcggccattgcggatcacgacctgactggcggattgtggttttctttttttttttttttttttttttttttttttttttttttcttctttttttttttttttnttggtggggggtttgttcctttttttttttttttttttttttttttttttttttttttttttctcttttttttttttttttttcctttttttttcttttttcttttttttttttttttttttttttttctttatttttttatttttttattgccttttcttttcatatttcctttcctttattttttttttttttgttttttgagtttttttttttttttttttctttctttctcttttttatctttcgtttttttttttttttgttttttttttttttcttttgtttcttcgtttgttttttttttttttttttctgtttttttttttcttttttgtttttttttttttttttcattttttttttttttttctttttttttttcatttttctttttttcttttttctttttttttttttctttttttttttttttgtttttgtttcgttttcttttttttattttttttcgttttttttagctttttttttcttttttattttttttttcttttttttttttttttt

SEQ ID NO: 424533 - DNA, 66 bp, Oryza sativa nipponbare
cccacgcgtccgcggacgcgtgggctctgatctctccgaaccctgaattgcattgcagttgagtcc

SEQ ID NO: 424534 - DNA, 77 bp, Oryza sativa nipponbare
cccacgcgtccgcccacgcgtccggttctagatcgcgagcggccgctcgccggacgcgtgggctagttctagatcgc

SEQ ID NO: 424535 - DNA, 107 bp, Oryza sativa nipponbare
ccacgcgtccgatcatcatcatcatcatgtctccgatgccgtcgctgctactcgtgttcctggtcgcctcgtcggcggctggtgttgcggccggcggcggcggcggg

SEQ ID NO: 424536 - DNA, 273 bp, Oryza sativa nipponbare
gactgcttgatctcggactgtgaagtgcattcatcttctggtgaatgttgcttctttgtgaaacatctcagggaagcctccccatccactcttaccgaagaaacgagcgatatccgtgctgctctccgccttctctattcgcttgagacgcgtggtcttgtttcatctgattcggtcagcagctccaataggatcggcgggctttctgcaagtggtattagggaggttctggaggagggtggggagattgccgagggggtgctggaggtgagt

SEQ ID NO: 424537 - DNA, 128 bp, Oryza sativa nipponbare
cggacgcgtgggcggacgcgtgggcacggagccgtcgccaactgaggggatgatggccggacggcgaactcaccgaggcacggctgttggagcgaactaatccggagggggtcaggactattttgcgc

SEQ ID NO: 424538 - DNA, 150 bp, Oryza sativa nipponbare
  unsure (1)..(150): unsure at all n locations
ttttttttttttttttttttttttttttttcaaaaaaaaaaggaaaccttttaaattttaaagctaggaagttacaaaaaattttggcatatcaaaaaatgacccaaatgtatttnanttgggggggggggggaactaaaattnatatta

SEQ ID NO: 424539 - DNA, 255 bp, Oryza sativa nipponbare
cccacgctgtccgcccacgctgtccgcccacgcgtccgcccacgcgtccgctagctagtacggcgggcgacctgagggggtagctgcctacctctatacctgctatctccgttcgatccgggtcgggctcgtgctgctgggggcgggggcaatcaatcggcgagctcggtgatccatggccgtggctgtggggtggctgtgagggtgcccccggcggcgctcccctttgcgcctgccggcaagggggctcggact

SEQ ID NO: 424540 - DNA, 170 bp, Oryza sativa nipponbare
  unsure (1)..(170): unsure at all n locations
ccggtcgacccgcgtccgaaaaaaagaaaaaaacacaccatcactctctcgctccccatcgatcggagaaaatggcaaccgccgccgccgcctcacgcgccgccctctcaaggcctcacgccgccgccgccgcggcgcgcgcgagccccgccgngggggcgcgggngacg

SEQ ID NO: 424541 - DNA, 297 bp, Oryza sativa nipponbare
  unsure (1)..(297): unsure at all n locations
cccacgcgtccgcatcaccatcgcgtgcactctccttcctcgtcctccttgtcctagccactttcacaacaaccaccgtcttagctacgaacaacctaccaccatcttcggcaccggctctatcgccggcctcctccgccgcggcaaaggagttcctccgtgcgacctgcacttcgaaggcggaactaccggaactctgcttcgacattctcctcccgtacgccagctccttnaatggcagncaaggaaaagttgctcgagctagcgcggccatcgntatcgagcgacaccggggcc

SEQ ID NO: 424542 - DNA, 120 bp, Oryza sativa nipponbare
gtccgattcccggtcgccccgcgtcgcccgctccgggggcggcgtccggtggcgtggcggcgaagctaccacgacggtggggaccactacaaaccgggacgtgggcgttcaaacacaccc

SEQ ID NO: 424543 - DNA, 292 bp, Oryza sativa nipponbare
  unsure (1)..(292): unsure at all n locations
aagaaaaatgtgatttgcaaatatgcaaatatatatatcacaaacacaattctacaacgccaaacatgcaatgttacaagttcccaaaaaaattacactttcaccttttttcctaactaagctgagtatgaacttctcaacccaggagcattgctgctgggcaaagatgggcgccacaatgagcctcgccacagtaataatcggtcggcgtgcaacaccttgcaaaaccggncttccnatnttttaaaacttnctgccanttggcgtggggcaaaactccatgtgatgcacc

SEQ ID NO: 424544 - DNA, 182 bp, Oryza sativa nipponbare
  unsure (1)..(182): unsure at all n locations
ttggggtaatcgaacatctttggtgtgtaatgcctatgcaaattgttacaaacccaaaatggacaacccaaccaattaccaatatgcgaaaagcttccaccgcctcgccaacaactgatgggtctcctccggttaatatcatcatgaggggggggggagcancannacaatatactaatatc

SEQ ID NO: 424545 - DNA, 246 bp, Oryza sativa nipponbare
  unsure (1)..(246): unsure at all n locations
atgggctgtgggcgtgtccgtggcggagtccaccatcccggcgtcgaagggcggccggttcgcgatcgacctgacggcaacgcaacagttcgggcggagcgggtcgccggcgtgcagcccgtgcgggagcggcgactacgggatgtggccgttcggcagctgccgcgggttcgtgagggggggggcggnncannnngaggggaaatgcanccnnccgnnngtggaggtgggcgggcnnaacgtctt

SEQ ID NO: 424546 - DNA, 274 bp, Oryza sativa nipponbare
  unsure (1)..(274): unsure at all n locations
gtcgacccgcgtcggctgacagaggatcggggcggcggttcaggcacccgagtcggtgatcgcggcttgaccccaagacgctcgttatcggtcaacaccactttcgaggatttggatcaaacattactggtggataccgggcgggggcctatcatgtactacaccacggagcccgtgatgagcggcggccaaggcggcgtgggagtcggatacagcggagcacggcgcggcgcggcggccgggcagnggaggccagngggcaaaggcaaagagg

SEQ ID NO: 424547 - DNA, 454 bp, Oryza sativa nipponbare
  unsure (1)..(454): unsure at all n locations
ccagcgtccgcaatatgttcagtgtgatatctgtgggngaaaaaccacctgaagaagaacattaaaaggcacctacgagcccatgaggaggtgccatctactgaaaggataaaatgcagttttgagggctgtgaatgctctttttccaatgtaagtctattatccccaaatgttctgatgcattgtttgttgtcttcctcttgaactgtagctttagtcgtatctggtgtggattgaaacttgttacctgtccctcctattgcagaaatcaaatttaaccaaacatataaaggcgtcccatgatcaagtaaaacctttcgcatgtcgattcacggggtgtgaaaaggtgtttccatacaagcatgtcagggacaaccatgagaaatccagcgcttatgtatacactcaggcaaactttacggggatggaccagcagttactctcgtgttccaga

SEQ ID NO: 424548 - DNA, 662 bp, Oryza sativa nipponbare
  unsure (1)..(662): unsure at all n locations
ccagcgtccggcggcagcggcggcgggctacggcggctacggcgacgtcggcgagtactgccgcgtggggaaggcggtgtcccggaacccggtcccatcgtgccggaactacatcgcgcggtggtgcgccgtcgccgggggccgcctggactccggcaagcagtccgccgcggcagctcctggaggggtgctgcctgtgagctcgtccgcattgcctcttgctgttgctcgtgtgcttctcctttttcggcgtttctctttttttctctttttttttttttttttctttcttcttttgtgctcttttttctctttttctttcttctctcttttttttttttctttttctttttttctttttttttttttttttttttgtttttttttttttttttttttttttttttttctttctttttttttttttcttttctttttttttctcttttctttttttgttttttcttcttttttctttctttntttttttttttttttttttttttctttttctgttttttcctcttttcgttctcttttttttttttctttttctttccgttttttttttttttttcttttttttttttttttttttttttttttttttttttttttttttttttttttgttcttttggtttttctttttttttttttttt

SEQ ID NO: 424549 - DNA, 77 bp, Oryza sativa nipponbare
cccgcgtccgccccgcgtccgcccacgcgtgccggaaaaaaaaaaaaaaaaaaaaaaaaaaaaaaaaaaaataaaaa

SEQ ID NO: 424550 - DNA, 194 bp, Oryza sativa nipponbare
  unsure (1)..(194): unsure at all n locations
ccagcgtccnggncactcatgttcctactcatacatgaaaaaggattacctcacatgcagctaagtacaattgaagaggaggtanaaaaaacaaatttgtgatcaaacatcacttttgttgcttcggttaataaatttcatcgtatgaaaaatgtcattgtttgctgaatataataaaacagacatttcctaag

SEQ ID NO: 424551 - DNA, 634 bp, Oryza sativa nipponbare
  unsure (1)..(634): unsure at all n locations
ccagcgtccgcccagcgtccgcccacgcgtccgtaaaaaaaaaaaaaaaaaaaaaaaaaaaaaaaaaaaaaaaaaaaaaaaaaaaaaaaaaaaaaaaaaaaaaaaaaaaaaaaaaaaaaaaaaaaaaaaaaaaaaaaaatatatataaaaaaaaaaaaaaaaaaaaaaaaaaaaagtgttttttttaaaaaatttggggggggggggggtgttnttttntttttttttttttttttttttttttnntttnttttttttttttttttttttttttttttttttncnttttttttntttttttttcttcttttcttttcctttttttttttttgttttgttttttcttttttttttgttttttttttttttttttttgtttggttttttttttcttttttttttcttttttttttgtttttttctttttgtgggtctcttcttctttttttttntctttttttttttttgtgtttttttgtttttttttctttctttttttttttttttgttttttgtgtttttttgttcggcttttttttttttttttttttctttttttttttttttttttttttttttttttatttttttttttttttttttttgttttttttttttgttttttgtttttttt

SEQ ID NO: 424552 - DNA, 61 bp, Oryza sativa nipponbare
cccgggtcgacccagcgtccgcccacgccgtccggtctggccttctcgctctcccctactt

SEQ ID NO: 424553 - DNA, 689 bp, Oryza sativa nipponbare
  unsure (1)..(689): unsure at all n locations
cgggtcgacccatcgtccgcccacgcgttccgaaaaaaaaaaaaaaaaaaaaaaaaaaaaaaaaaaaaaaaaaaaaaaaaaaaaaaaaaaaaaaaaaaaaaaaaaaaaaaaaaaaaaaaaaaaaaaaaaaaaaaaaaaaaaaaaaaaaaaaaaaaaaaaaaaaaaaaaaaataaaaaaaaaaaaaaaaaaaaaaaaaaattattggtgtntgtttgtgtggnttatcaatttttaattacctttttttttccttttttttatttttttttttatgcccccttttttttattttaatttgccctncttttttaaatttttttttttgaaaaaacttttgttttttaaaattaatttctttgtgccatttttctttttttccaagttgcttttttcttaaattccccccccctttctctttttctaatttttctttttctttttttttttggccctcttttttttttttttttttttctttttcgttttttttttttctcctttctttactttttttgtccggcccttttgtttcctttttttttttttttcttttctttttggcccctctgctggttttttctttgggttttttattgggggcttcttttttggtttcgtttttttttttttctcttttttttctctattttttgtttgggttttgtttcttttttgggctttttttaat

SEQ ID NO: 424554 - DNA, 614 bp, Oryza sativa nipponbare
  unsure (1)..(614): unsure at all n locations
cccgcgtccgcccacgcgttccgtaaataaaaaaaaaggaaaaaaaaaaaaaaaaaaaaaaaaaaaaaaaaaaaaaaaaaaaaaaaaaaaaaaaaaaaaaaaaaaaaaaaaaaaaaaaaaaaaaggaaaaaaaatataaaaaaagggggggccgtttttggggtttccggtttccttccccttctttgccccgtcttgggtgttttttggtgccccttattttccattttttggccgtggttttccatggcgttgcctgggtaacccttgtttttccccattttatttgctttgggtgctttcctctttttgccggttggcttgtttgcttttgggcccctctggttggcctttttggnctttgggcccccctatttggctnttggttccccccctnttttggctttttttccccggtggtttcggttgtttttcgccgtgttcttgttcccttttccggggcctttttccccgtttgttttgttttttggcttttttttttccccctgttttctgtttttccccttttttttttttttcgggttttttctttttgggttcccttttctttgttttcctggccttgggccccggttactttttttggggctttt

SEQ ID NO: 424555 - DNA, 218 bp, Oryza sativa nipponbare
  unsure (1)..(218): unsure at all n locations
ccagcgtccgccccgcgtccggccaggcttccgttgttctattatttatttggccggtcggccaatggtaactaagtagatgtagtttataatcgctttcatcttatttgtgtttgctatgtataatcatgcttgagatgaaaaaaaaaaaaaaaaaaaaaaaaaaaaaaaaaaaaaaaaaagggggggggggggggggnaaaaaaaaaaaaaacaaa

SEQ ID NO: 424556 - DNA, 655 bp, Oryza sativa nipponbare
cccggtgtcgacccacgcgtccggcgagagcgagcgtaccgttcgttcgttcgtccggtgtacgtctcgccatggccatggtgcagccggtggacatggccgtgtaggccaacgagttcatggcgaggttcaggcccatcgcgcccaagcccgtgctgccggcggcggcggcgggggcgtctggttcttttttcgggggggtgggggttttttttttttttttttttttttttttttttttttttttttttttttctttttttttttttttttttttttttttttctcctttttttttttttttttttcttcttttctttttttttcttttttttttctttttttcttttttttttttttttttctcttttcttttttttttttttttttttcttttttttttcttcctttttttcttctttttttgttttttttttttttttttttttttttctctttcctcttttttttgttttttccttttattttttttttttttttttttgtttttgtttttccttcttttttccttttttctttgtttttctttttggtctgtttcttttttttttttctgttcttttcttttttctctttctttctttctttttttttttttttttttttttttttttttttttttttttttttttct

SEQ ID NO: 424557 - DNA, 65 bp, Oryza sativa nipponbare
  unsure (1)..(65): unsure at all n locations
ccagcgtccgcaattttatctgcttgtcataacctgtatgaccggctagntggtgatagtgaggt

SEQ ID NO: 424558 - DNA, 87 bp, Oryza sativa nipponbare
  unsure (1)..(87): unsure at all n locations
gtccgcggnacgcgtgnnggttgggaaatgcctacacagagagttgaactgattcanttatgtgcagactgatagcttggacatatt

SEQ ID NO: 424559 - DNA, 360 bp, Oryza sativa nipponbare
  unsure (1)..(360): unsure at all n locations
cgacacatcacgggcatacatatacacattctttgcgtgcacacggtgggctcgtacatgtacagagtaccaatgtggtagatgtggggtaggtcggtggcgcgtagccacccacctgatacagtgcacgccactgcaacgggggtgggatacgcatacgtacacacatgtacaccacacttggggtcctcgtacctgctcacatgacacgcgtaattatactgcttaattactgatttgtgacaggtcaaataagactgatgaatttttcatttcttnaaaaaccnnncttntnncnncccttttcttcttaaaaaaaaaaaaaaaaaaaaaaaaggggggccgttttaaaggatacaa

SEQ ID NO: 424560 - DNA, 329 bp, Oryza sativa nipponbare
ccagcgtccgcccactcctacggaggacgagagcggtcgcccgcgaactagtactacagaaaaggggtcaaaaagaagagggctacatggggggagcatctagaggatccaaggttaaccacgctggaggttcaacagggtaagtcatttctaggggcacctaaattcaatttactggcctgagctctaaagggcaggattttgcaaaaccctgcagttctacaattaaatggcttggctgataattagtatgatcacacctgggctgatatgcatgaggccagatatgatcgaataaataacgaatgatcaaactgaatggcgactgg

SEQ ID NO: 424561 - DNA, 336 bp, Oryza sativa nipponbare
  unsure (1)..(336): unsure at all n locations
cccgggtcgncccagcgtccgccccgcgtccgcccagcgtccgccccgcgtccgtttctcctanactttatctcttattagttattttaaatttaatccagttctctttttcgctaaattgtatttttccatgggttattttttccttttttaattaatgcgggaggccgtgagagttaatacagggggtgtgttttatattactttattaaaagattgatagtgtctcttaatgtaaaatccaatcattaccttttcaaagtaatatttctatgattgtaatagtttggaaaaaataaataaaaaaaataaaaaaaaattgagaataagagatat

SEQ ID NO: 424562 - DNA, 56 bp, Oryza sativa nipponbare
tccgcccagcgtccgcgtcgcgttggcgggcgcgtgggccgttccgttgctgctgt

SEQ ID NO: 424563 - DNA, 656 bp, Oryza sativa nipponbare
ccagcgtccggaaaactgaaaaggtcagaatgttggtgattctaccagtgactctccaatggtgaagctgccaaaagcctgttgactcacagcacgaaaaaggaaagacaatcgaaaagcctgctaatcctaaagtaagtcgtggacagaagggcaagcttaagaagataaagagaagtatggagagcaggatgaagaagaaagagaaatccggatggctttacttgcgttctctggaagggcctcacaaaaggataaaccttcataagatgtagatggagccactgcagcttaatcaaaaccatcgactggtgaagatgacagatcaaaaatttgttataaatgcaaaaaatctggacatctttctcgtgattgccctgaaagtacatctgaggtggatcctgctgatgtcaatgttggtagagccaaagatggtatggatagaagcagcgcccctgctggtagcagcgttaccatggatgaagatgacatccatgagctcggtgatgaagagaaagagaagttaattgatttggactacctaactggaaatccactgccaagtgatattttgctatatgctgtaccagtttgtgccccttacaacgcattgcaggcatacatatatcgtgtgaagattacccgggaactgcaaa

SEQ ID NO: 424564 - DNA, 128 bp, Oryza sativa nipponbare
  unsure (1)..(128): unsure at all n locations
tttttatttttttttttttttttgtttttttttttttttttgggggggggtggnnngannngtgggtggnngggtgggtngnnnngggaattnnggntgggtnnntggaggggttttagttttttttt

SEQ ID NO: 424565 - DNA, 122 bp, Oryza sativa nipponbare
  unsure (1)..(122): unsure at all n locations
acgtaagcttggactcnctggggcggccacgcagttttttttttttttttttttttttttttttttttgtttttttttttnnnnnnnngtttgggttttttttttttttttttttttttggg

SEQ ID NO: 424566 - DNA, 464 bp, Oryza sativa nipponbare
ttttttttttttttttttttttttttttttttttttttttttttttttttttttttttttttttttttttttttttttttttttttttttttttttttttttttttttttttaaaaaatttaaaggttaatttttttggggggaaaattttttttttcaaagaaaaaggaaaaattttttttttggggcccaaaaaaaaaaaaaaagggggtttttttttagggggaagggggggggttaaaaggaaaaattaagcggggaaaaaaaaaaaaaagggcaaggggaatgtttaaattgaaaaaaggggggggggttgccccaaccgttttaattgtgttttttggggaggaagggaaaaacttggcaagggggggcctttaagggggggaaacaggttttttgtaaattaaaaaaaaaatggggttaaagggggggaacataaaaaaattttttttattgggggg

SEQ ID NO: 424567 - DNA, 116 bp, Oryza sativa nipponbare
  unsure (1)..(116): unsure at all n locations
ccctggagttgggggggtttnngtttggttttgggaggtttttttttggggggtttgttttntttttttgggtttntttttggtggggggtttttggggggaatttttttttgttt

SEQ ID NO: 424568 - DNA, 252 bp, Oryza sativa nipponbare
  unsure (1)..(252): unsure at all n locations
aaaaaaggaaannggggncaaaaaaaancaaaaaacaaaaaaggggggggaaaaaaaaccggggggggggaaaaaaaaaaaggggggaacccaaaagcaaagagggaaggcaggcaagcccaggaccggggggggggaaaaaagccgaaacggggggggcaaaaccgggaaaaagaagggagggggggcggagaagggcccggccggggaaggccaaaggggggaaacccggggggggggggggggncgccg

SEQ ID NO: 424569 - DNA, 81 bp, Oryza sativa nipponbare
tttttttttttttttttttttttttttttttttttttttttttggggggtttttttttttttttttttttttttttttttt

SEQ ID NO: 424570 - DNA, 160 bp, Oryza sativa nipponbare
  unsure (1)..(160): unsure at all n locations
tggggggggggggnnggggggtnggtnngtgggggnnnnngggggtgttggggggggntttgggggnnggtttgttgggggggttttgttttgggtgttggggggggggtttgtgggtggtttttttgtggttgggggtgttttgggggggggttttttt

SEQ ID NO: 424571 - DNA, 323 bp, Oryza sativa nipponbare
  unsure (1)..(323): unsure at all n locations
tttggagatgaatgtacaagataaatgataacatgactcgcacaagtacgattacaatagacgatcctaggtagtgggtacatctcccatttttcttttggtcctaccactaaccacaaacttagcatgacaaaagttggaccatgcatgccatgtataatacagcagccaccggacaaatgcataccaagagttcagaaggtgcataatattcagccatgaaacaaatccaacaacattctgataggacaccaacaatctaaaagggggagagtntgatgagtnngggtncagcaattgttcaaccggaagggcttntaagc

SEQ ID NO: 424572 - DNA, 174 bp, Oryza sativa nipponbare
aaaaaaaataaaaatttttggttttttttttaattttgaaccccttttttttttaaaatttttgaaaatccccccccggggggggtttttttttttgggccctttttttccctggggggaatccctttttttgttggggagttaaaaccaaaaaagtttttttttttttttttc

SEQ ID NO: 424573 - DNA, 287 bp, Oryza sativa nipponbare
tttaaagcaaaagttacaattttcccttgcattctccggtcaacatcatatatactttagaacctggccttgcatcctataagcttcgcaaaagaggaagcagccgatctagtttgctactactagtaacattgcaccttaacacgattacatctatgcactactaaagtttgctccggcttgatgcatcacgtcgtcacgcgtcgccggcggcgcggcggtgggtgttgcattcgtcgccggcggcgcggaacctccaggcgaagacgtagtccctcgactcgcac

SEQ ID NO: 424574 - DNA, 387 bp, Oryza sativa nipponbare
aaaaggactttaaaaaaaggttttttgttttaaaaaaatttaatttttaatttttgggtgggaaaaaaatttggggggatgaaaaaaaaaaagggggggatctttttttttttgggggaaggcagttaaacctttttttggggggggggaaaaaattttcattggtgggggtaaaaccggaaaattgaggggaggtgggccgggtattgtcttcccctgggaaaactaaagggggttattcccggtttttttttttttttcccaaaataaccctttttagaaaaccccttgggggaatacccttgtttaaaaaaaaaccccttgggggggtaatattttaaaaaaaaaaaaaaaaaaatttgttttagggggataggaattcttttt

SEQ ID NO: 424575 - DNA, 296 bp, Oryza sativa nipponbare
aaaaaaaaaaaaggaaaaacccgccccaaaaaaaatttttttaaataccaggttcaaaaaaaaagagaagggggctccaaaaaagaaaccggtgggtggggccagcaaaaattgttatttaaataaaaaaagggccaattaattaattaatccccaaggaaaaaattaatttaatcccggccccccccaaaaaagaggggggcaaaagaaccccccctgtgtttaaagtttaaccccccgtagtccctaagggcgctccccatcccggggaatggggggggggggaacccccgggc

SEQ ID NO: 424576 - DNA, 67 bp, Oryza sativa nipponbare
accccaatataaccatttagccgggcatacagggtttgacaaggagataaaatttgcggacccctgg

SEQ ID NO: 424577 - DNA, 65 bp, Oryza sativa nipponbare
tttagaatttaggcattattttttccccttgcttccaaaaaaaatagtaaagaaacactaatgac

SEQ ID NO: 424578 - DNA, 475 bp, Oryza sativa nipponbare
ttttcgtcgatgataatttatagaaccggttgccagtccatagcaaaatgtacaatttctcaaaaataaaggataaatgtacaattagctcatcttatctactattactggttcaaacctttaattctgaactaatcttgcacatgccagcaacgtacgtcagactagcttcttccaaacgaggattttataagcgttgctactccagtgatcttcactttattcatgctatcgtcctgtcctgcatcttttacagtttgtagattctttttggataaatattgatactggatggtccttgagacttcaaggaacagcatctggcagtcgaatgtcaactgaatctaacaattcccgactattttaattgtttgtcagaatatacacttggcatcgcaaggaagtcccatgcattgatttgctttgcagcaggaagtcccatgcactgatttgctttgctgcactgacaacatgc

SEQ ID NO: 424579 - DNA, 375 bp, Oryza sativa nipponbare
ggaaaaaaaaattttttttggttttttttacccaaaaggttaaaagggaaaaaagggggattttggggctttttttaaacccccaaaccctttttttggaaaaacttttaaaaaaaaccccccagggggggaaagggtccgggggccccaaaaaacccgggggggaaacccatttttaggggggccgtaaaaaacaaaaaaagttggggtttggcccaatttccccaaaaaggggaaacccccaacccgggggggttgaaccttcgccccttgggccaaaaaaaattaaaagcccaaaaaggaaaaaggggggcccccaaggggggggtgtggaaaaatttggttttttttcccaaccgctcccgggaccggggg

SEQ ID NO: 424580 - DNA, 326 bp, Oryza sativa nipponbare
aaaaaaaagaaaaaataaaaagttttttttgacctggtttttaggaggaaaaaaggggaaaaaattcgggtaaatggggggacggacgcgtttccaaaggggggggtatacccgggtactgttttggggggggcccaagggggaggggcctgaaaaaaaaaaaaaaaagggggctaactccctagggggggaccaataccacctaatatacgggttatgggggccacaacgggggaaaaaaagtttttatgttttttttgccgggttggggagggggcggaccctgggggggacccggggattgccccctgggccccacgggggaa

SEQ ID NO: 424581 - DNA, 247 bp, Oryza sativa nipponbare
taagcttggattctctagagagggagccctgttttttttttttttttttttttttttttttttttttttggtgggtgtttttttttgggggggttgttgggtggttggtttttttggggggggggggggggggtttttttttttgggggggggaaaaaaaaaaatgagaaaataaaaaggggggggggggggtttaaaaaaaaaagaattagggttaaaattaagaggggaagggggggaggggggg

SEQ ID NO: 424582 - DNA, 417 bp, Oryza sativa nipponbare
gggaaccaaaattttgggaaccttgggctctaaaaaaaaacagagagcttttttttttttaaaacagaatccacagggccaaaacccgccacttttggggggcaaataaaaataaactacacgcataacaacagcccgggggggaacataccgggtccccaaatcctaaaattggggaccatgcacactacaacacagggaagcaaggaatcattttagaaccattcctttatttaaagctttcactttttgcaagggatggggcaataagggtttaggggactcccaaaacaatgcaaaacagcagggaacaggccaaggtcagggtcaaacagcaaatcgctggacgggtggataccttccttacaaattttatatggggaaacacaaaaaaagcggacccgtgggtcgacccgg

SEQ ID NO: 424583 - DNA, 470 bp, Oryza sativa nipponbare
tttttgttttttttttttttttttttttttttttttttttttttttttttttttttttttttttttttaaaaaaaaaaaaaaaaattttttttttttttttttacccaaaattttaaaatttaaaatttaataattttgggcttttttttaaactcccaacccatttttttttaaaaactatttaaaaaaaccccccaaggggggaaatgttcctggggccccaaaataccctagggtaaaacccatttttaaatggcccttaaaaaccaaaaaaactttaactttaacccaatttcccttaaaagtgaaatcccccaaactcttgaattttaactttttcccttttgccctaaaaaatttaaattccctaaaagaaaaatttttcccccacaacccaaagttttttcaaaggaacccttggttcaccccgaaatttccgacccgttccctgaaggcttccaaattttcc

SEQ ID NO: 424584 - DNA, 410 bp, Oryza sativa nipponbare
tttttttatttctttttttttttttttttttttttttttttttttttttttttttttttttttttttttaaaaaaaaaattttgaatgttaaggaaaatcttaaaaaaaaaaaaaaaaaaaaggggggcccccctttgggggtgtattttttttttacataaggaaaaaggtttttaaaaaaaatggggaattattataaaaaaaacattgtttaagggaaaaaaaaaaacttttttggaaaaaaaaaaagggtttccaacaaaaaggatttcggttttattgaaacaacacaaaaattgggcgaaacaaaaaaatgtttggaaattaaaaaaaagctgttataaaaataaaaggggggtttttgggaaaaaaaaaaccctaaaaatttagccaacctaatatttcccgg

SEQ ID NO: 424585 - DNA, 299 bp, Oryza sativa nipponbare
aaactattaaaaatataaaaatattatttttaaaaggaaattattaaattttaaattaaaaaaaaatattaatttttaaataaaaaaaaataaaaaaaaatcaatgaattaactttaaaaggctaaaaaattaattaaaaaaaaaaaaaataattaatttaaaaaaaaaatttagtaaaaaaaaaaacttgaattaaaatttaaaaataactaattttgaaaaaaaaaagaaagtagaaatcggtcgaaaattccggtctcttaaaaaaaaactttgggtaaaaattgaaattaacccg

SEQ ID NO: 424586 - DNA, 69 bp, Oryza sativa nipponbare
  unsure (1)..(69): unsure at all n locations
tgttttttttttttttttttttgtttttttttttnttttggggggggggggggnttttntggggttttt

SEQ ID NO: 424587 - DNA, 593 bp, Oryza sativa nipponbare
tttttgctaaagtgaaatctatgattttttttttgtagctttcatacatcacaagacacaccaaaaggggactcagcgtccctttgtaagcgtatgaagcttgtcaatcggttccaatgttctgccgtatctgtttacattatatcctgtcctatggctatgaatgccaaagagatgtttaaactttacaagaatgagggccaatccatgtgacacctccatccaaatgcgcctgacaacataccaaaacatttgcattgtttctgcagagaaaaatacttttcttgacaaaacggggtggtctctgatagctttgaactagttttcttttgcagattttttccccttctgtttctgcttctgcttcagttgagtgaggccaggtgcggtgatcttggcattccctacaatggcagcaaccaattcagggtccgtgcatgccttcattagctccttctcacggtttgtggcgtcagcagtgtgcaggaacaaactcattgcagttttggcagcttttcctttctttgcagttcccggggtaatcttcacacgatatttgtatgcctgcaatgcgttggaaggggcacaaactg

SEQ ID NO: 424588 - DNA, 248 bp, Oryza sativa nipponbare
  unsure (1)..(248): unsure at all n locations
atgaaacatggggaattgtccacatatncngacttattctctgaatgcatcacanagacggattcagtgctacgtaggtgtcccggatcgtacccaaccgctcttctggctctatnnagagaggtaagtatgataaacacncataaaacatcactatcaaaacacacaacacacactcacaaatcncatatcacaacaannnttaatttntcttctttatccatccatcnatcnaactcaaatttcca

SEQ ID NO: 424589 - DNA, 320 bp, Oryza sativa nipponbare
  unsure (1)..(320): unsure at all n locations
aaaaacgaaccaaagcagagagggganncncacagcacaaangnangnangacanncagaancaangncnnnnnngcncancaagncaagaaagcaaacnaancacaaccacacnnggcccaacaaagagagnacgagacngcncngnngngagncaagagacaccaancaannganacanganangnncacanncaagaangggcaggaagaacaangaggngncaccagncagcgagcggcagaagaagcagagaaccaccgcgaccannangaacaggaggaggagcggcagcgagaggaacaacacgaaccgcaag

SEQ ID NO: 424590 - DNA, 176 bp, Oryza sativa nipponbare
  unsure (1)..(176): unsure at all n locations
cacaaaaaagggggggnnnaagagaaagccaccggcngnacaggganacaaangaannanangnanaaaaaaaaacccaacataaaaattcaacacggggggggttagacaaccccctcannncacccacttataaaaccccacccaacaaccacaacaacccccaacacttacac

SEQ ID NO: 424591 - DNA, 76 bp, Oryza sativa nipponbare
ttttttttttttttttttttgtgtgttttttttttttttttttttgtgtttttttggttttttttttttttttttt

SEQ ID NO: 424592 - DNA, 569 bp, Oryza sativa nipponbare
tttgccaataatggtaaaaatctacctttggtcactatcggcattgcgggtaacctcaccggcagaatccgccttattaccaccattgacaactttcccctccgatggagagccgcagctcgccatcagttgcccaggtgacaatgtacagtggatattggcaagttaagagaacttgattgattgacgtctaaagaacgagttcgatcaatgctatctatgcttactagagctaggcggtgactcgacgattgtggtggcaccgggttggccggaggtgaaggcattggtgatcggagtgggcagagacattgttgtcgtctccgccgcatggacagcggcagaagacttgaggtcgagcagctggaggccaatgaggcggcggctatggagatcaatagcctgctgcagctccgccgcctgttgctgctcctcgagcttccgccgcagcattagctcgttcgcgctgttggagtgctgcagcatccttgcaccgagctggtgaaaatcaaaggggtccctggcgtctaaccccgtgggcgacatgcagcagaaatcgccttgctgct

SEQ ID NO: 424593 - DNA, 305 bp, Oryza sativa nipponbare
  unsure (1)..(305): unsure at all n locations
cttaaccttgttccttgcaggcccccaagccccccccagaaaaacccgaccgaaaccctgacccaaacaaggggatgtggggaccctccataaaaaaacaaacccaaaacaatcccaaacaacaaaccatcccaaaacataaatcctaaacccataccacccaaaaaaaaaaccaaacccaaaaaaaacaaacccccccaaccgcaaactttcaactaacaaaacctaatttcccacccccaaaaaccaattttccaacccccaaaccatacctnccaacttaaaaaaaaaacaccccaaccccc

SEQ ID NO: 424594 - DNA, 558 bp, Oryza sativa nipponbare
caaacaagagtgtatgtatagctaattaagtgaaggtttcaccaagtatgaacagccagaaactgggtgcggcagcatagtggagtaatcgggtaggtagctttatgtggtactgaaggaatgcactgatcaggcatgtacagaagcagcagcagctgggattgggctggtaaaatttaggcgaatggtcgtgaaagtaaatgaatcagaaggttcctagccttgttaagcaaggcttccccacctaaattttaaaacgacatggcagctaaaaacccaacaccgcccattccctcctatctagccagtgcgccattataagcattcgttacctccgtatttccatgcactgcactgcactctcaccagctcttagttctccttcccctgccgctggtcacgcagcaaacatggccgtcctgccggagtcacgccggctctccctgctcctcatggccgcctgcttcctgcttcaggctctcagcgcccacgccatcacccggcattacaagttcaatgtgaggatatatcgtcatcaaactttgccgcatgataaca

SEQ ID NO: 424595 - DNA, 185 bp, Oryza sativa nipponbare
  unsure (1)..(185): unsure at all n locations
gggaaaaanaaaatttataaaaaaataaaaattttattttaatttaataaaaaaattaattaaaaaaaaaaaaaaaatttttttttttttttaaaaaaaaaaattttaaaaaaaaaaaaaaannaaataattttttttaatttaaaaaaaatttaaattttttaaaaaaaaaaaaattattttat

SEQ ID NO: 424596 - DNA, 444 bp, Oryza sativa nipponbare
  unsure (1)..(444): unsure at all n locations
gggttgttgggttttattannaccccaaaaatttttttttttaanccccaaaaaaaattttcaaaaatttttttttttcccccccaaaaaaaaaattttttttttttaaaaaaaaacaaaaattttttaaaaacatttttttaattttctaattttttttttttaagcccccacccccttattttaaaaaatttttaccccccccccaaatttaaaacccctttttnttaaaccccaattttattttttcttaaattttttcctccaaaaattttattttaaaatttttttttttcaaataaccacactccttttatcccccttttttttntaaaaatttttttcaatcccaaattttttttattataaaaccctataaaaaaatattaaaaaattaanctccattttttttttcttaaaaaattttttcccctaaaaattccc

SEQ ID NO: 424597 - DNA, 523 bp, Oryza sativa nipponbare
tttttttttttttttttttttgggttttttttttttttttttttttttttttttttttttttttttttttttttttttttttttttttttttttttttttttttttttttaacaaaaattcaaaaaccaaatgggggtgttggggtttttcccaaatccaaccccaaaaataaaaccctttaaaaatttttttaaaaaatggttttttttttttcaaaatacactttcttaaaaaaaaaaaacattccccggaaaaagttaaaaaaaaaatttttttttgttaaaaacccccctttggttcaccccgaaattttcgacccgtccctttaggggtaccaatttttttttttttgagggcttttaaaacttggggaaaaaaaagaaaaaatttttttttttttaaaaatttttttccctcaaaattcccaaaaaaaaaaaaacccgaaaaaaaaaataaaaaaccccgggtgtcttaaaaggggacccacccacaataatttcgggtgccttacatccccttttt

SEQ ID NO: 424598 - DNA, 487 bp, Oryza sativa nipponbare
  unsure (1)..(487): unsure at all n locations
aaaaaaaaaaaaaaaaaaaaaanaaaaaannaaaaanaanaaaaaaannaaaaaanaaaaaaaaaaaaaaaaaaaaaaaaaaanaaaaaaaaaaaaaaaaaaaaaaaaaaaaaaaaaaaaaaaaaaaaaanaaaaaaaaaaaaaaaaaananaaaaanaaaaaaaaaaaaaanaaaaaaannanaaanaanaaaaaaaaaaaanaaaaaaaaaaaaaaaanaanaaaaaaaaaaaaaaanaaaaaaaaannaaaaaaaaaaaaaaaaaaaaaaaaaaaaaaaaaaaaaanaaaaaaaanaaaaaaaaaaaaaaaaaaaaaaaanaaaaaaaaaaaaaaaaaaaaaaaaaaaaaaaaaaaaaaaaaaaaaaaaaanaaaanaaaaaaanaaaaaaaaaaaaaaaaaaaaaaaaaaaaaaaaaaaaaaanaaaaaaaaaaaaaaaaannannaaaaaaanaaaaaaaaaaaaaaaaaaaaaaaaaaaaa

SEQ ID NO: 424599 - DNA, 162 bp, Oryza sativa nipponbare
  unsure (1)..(162): unsure at all n locations
accctgttttttggttttaaaaaatttttttttttttttttgtgttttttttttttttttttttttttttttttttttttttttttttttttttttttttttttttttttttttttttttttttttttttttttttttttttttttttnnnnggtaagattg

SEQ ID NO: 424600 - DNA, 540 bp, Oryza sativa nipponbare
ttttttttttttttttttttttttttttttttttttttttttttttttttttttttccaatttttttttcccacccgggccgggacccggggggggaccccagggtcgaaccgggaaattcgggccgggacattgaggggataccaaattttcctaaaaggggggggattaaaagttgggggaaataagggcaaaaaaggtttctgggggaaaaagttttcccctcaaaaaaccccaaaaaaaaaaaggcggaaacataaaggggaaaagcgggggggcccaaagagggaggtgactcacattaattgggggggggtcaatgggcaatttttaagggggaaaactttaagggcaactggaataaataaatggccaacccccggggagaggggggctggggattgggccccccggggggttttttttttaccaaggggaaggggcaaaaatgattggccttcaacgacttgccctagaagaaaacactaagggggccaacctgggttgtcccccgaggggaaaaatctttttgaggggggg

SEQ ID NO: 424601 - DNA, 591 bp, Oryza sativa
gggtggaaacgatcgcactaatcctgtgcgtcgccttcgtgttaatatatatgtgatgggaacagcccccatcgtggcgatacagagttcggcgcagctgagaacaaccgaagccgagattgatgaaacgactgcatgcagtaacagaaaacagaaaacaaactctaacaaacatctgttatcgcatgtggaggaaaggctaacctgatccgcatggatagactaacctaatccaaactaacctcaacaactacatgcatgcaagctgtcaggtcgtcatcacatgatccgaacctttcatgctaactaacacggtcgccttcgcacgtgccacgacaagagcctccacggtggcgccatgcccgtgcctcgctgccatgtgtagggccgtgtccccggccgcgttctggcatcccaggatattctcctcgcagtcctgggccagatttacaaggatcgtcacggtgccggcgtgccctgccctcgccgcgcagtgcagaggtgtgtccatcgccgagttccggcgagagaggagactattgtccctgatgaacctatggtagagctcctggatcagctcgccatgccctt

SEQ ID NO: 424602 - DNA, 51 bp, Oryza sativa nipponbare
gagaaacccccgagccagacccttttattcattctcgatgtttgcacatgc

SEQ ID NO: 424603 - DNA, 554 bp, Oryza sativa nipponbare
ccaccgaaaaactgaacaacacatcattttcttatcttattcctatctttggttcccattttgacgccgtctcattttttgatctctaccgcgtactgtaaatcgtgtgtgtgtgtgtgtgtgtgtaatagtgcgtaatacgatgatttggacaggagaagtaaaagtatttgctagtacctgtacttcaaatttcagttttgtttcgtcagggggttggggttgggcttctctttttcatattatgtttttgcagacgtggagtaattcaaacaatggtacgctcgtcaacgctgaaacctgactgcaaaatagtttgattgtcttctgtactgaacttgttccaaatggcaaggagacaacatagttcatcagcagggggaaatcgttttcctttgagtaatgcaggcacatggatttgattatctttttctttaagaaaacattttctagcaggggtcctactatgagagtaatagaagatcctaataaggaaattcaaataatccaccccgccaacacttattttaggccaataatcagacttatgtttt

SEQ ID NO: 424604 - DNA, 770 bp, Oryza sativa nipponbare
ttttttttttttttttttttttttttttttttttttttttttttttttttttttttttttttttttttttttttttttttttttttttttttttttttttttttttttttttttttttttttaaaaaaaaaggggaggggaaaaaaaaaaaaaaaaaaagggggtttttttggcgggcccccccggaaaaaaaaaaaaaaattaaaaattttggggggggggggcaaaattgaaaaaaaaaacccaaaaccaacgggggggggaaaaaaattttttttaaaaaaaaaaaaccaaagccccccaggggtttttttccccacggggttttaaaaaaaaaaggggggaaaaaaaattttttttaaaaaaaaaaaaaaaggggttttttttttaaccccccttttaattttgggggggaaaccctttccaaaaagggggggggaattattttttttttcacccccctttgggggaaaaaaaccctgggaaattttgggaaaaaagggggggaaaaagccccccaacttttttttttttttttgaaaattttaaaaccaaggggggggggtgtgttaaaacaaaaaaatttctttttaaacaccctttaaatttttttttttttttccccgggggaaaataaaaaaaaatttttttgggggggagaggggcccccaggtgggaaaaacaatttttttcaagagaaaattttgggggaaaaaattttttttggggggtctaaaaacccggggaagttttttttttttgggggggcg

SEQ ID NO: 424605 - DNA, 559 bp, Oryza sativa nipponbare
aagtctagaaccgactagtttcaatatgtaacaccagtgtgatagtacaaaagttccatataacaacagtaactcattgatacatttgagtatacatatccagggaaaaaattgctttatactagtatcgtatctggggattcatgtggaatttgcctatccaaaaaatgttgtgccacactcgttaggccacagctgacaaccctccctatcacaaaagataataaaaatgacaaaggggaaaaatacatcgatgtttctttctttgcctttacagtgtacaatagtttatttcactcgccacgctatataaactctgctgcctccaagttggatggcaaaaagaattgtcctctacactacctcaaaaaaatacttcatgttggcaatagtggttgcctctcatcagttccaatcctatggctggcctgaaatgataatgtgcaactaataatgtaattgttctaacacaaattaatctttttttctttagaaataaatgagtcacatacatttttagcagggccagcagtcatatttacaaaagaagattcagatg

SEQ ID NO: 424606 - DNA, 633 bp, Oryza sativa nipponbare
ggataaaaaacccccattttttttattaatttttattatttttgttttttggggttctattttacattgcttaggggaagaacgacccccttttttctaaaggacccgtttaaaaatgggtggagggggggaaaactgaactgcaaggggacccccccctttttttttttgggaaggccccggggcccaaggccaggggtgaattccgaccgggggatcccccgcccgccccgggttgtttttggttggaaggatggttgcccccccccaacgataaaaccgccccccgggaaaaaccccggcggggccggggggggcaccgggggggggggggggacccggtcggagaaaatgagcgcgtcctgggaaaaaaaggggggggcccacagcgccggcagggttttcctgggggaggggggggggtaaaaaggggggccccccccctttaccgggtgcggcgagcccaccagaaacgggtggagagggatgttgttacccccccggggggggcgccccccccctaaccaaaaaaggggcttcccaaggaccccgggggggcccccgccggccccccccgggggggtcaccccgggcttgcaaaaaaaaaaagccccggggagggtttacgggggg

SEQ ID NO: 424607 - DNA, 745 bp, Oryza sativa nipponbare
  unsure (1)..(745): unsure at all n locations
atataaaaaaattaatttttttatagaaaaaaaaatatgtaagataaaaaaaattttttttatttaaaaaaaaaaaatattattttttgatttaaaaaaaaaaaaattaattttttttggggaagaatttttttttttttaaaaaaaaaagagaataaaaaaaaaataggaagttatatttattaaaaaaaaaaaaattgatgtaattttttttttttggtaaaatcagattaaaaaaaaaaatatattttttttttgaaaataagggatggtgatttaatatttattgttggtgggtgggtaatttttttttttttaaaaaaaaatatatttaaagantttttatttgatttaataaaagggattttggatttttttttttttaaaaataaaaaaagtattttttctcccacaaaaaaacactgaggaagggtaggattaatacatttatttatcgaatataatatataaaataataggggggggaaaaaaattttttagcataactttacgtttgtgagaagctaaattaaatatatatcaataaaaacaacacctcttctattaaataaaatatttatttttccatgtcaaaagaaaaaataaaattttttttttttttaataaaaaaaattaaggttttttaaaataaaaaaaaaaaaatctttttttaacttaaaaaaattttttttttttaaaaaaaaaaaaattacgcgcctaaaatttttaaaaaatttatgattaa

SEQ ID NO: 424608 - DNA, 524 bp, Oryza sativa nipponbare
aaactgaatagaagtttcgaatcttctgaggtgagggcaatacagttgatatagatcatatttcgtacgcattagttacaaataggaatgtgctgtctataaataacatctagagatcctacaacatacatccgaaacttctcgatgtttttttacagacaaacgtattctgaagcccccgttaataacagtttgtggtcatccacaaagaggtatgaaaaaattcctacaatgtttgtcagcctccaagttcataatcattagccaaaatcagccaagaggtcaagcttcccgtattgtgctgtgtccaactcagtatgtgtgccgagatctaaaattaattatctcgggattcttttggtagtatctcacgtctccgtaaccttaaagggaatctccgacctcgggagcttcttgagaaaaacttcaatacctcatcaatcaaaattacaggaaaggagagataaagaacgactttccactcagcccaagataatggagacactgagaaaagagctgataga

SEQ ID NO: 424609 - DNA, 406 bp, Oryza sativa nipponbare
ctacccccataaaatctggggggagtagaactcgatctcaaccatttgattaaataccatcaacggttcaaattaatttcagcttgaagtaaacacagagtgattaatcgccaacggaaagaggtcagcgtaaacgaggtcaacataaacctttacaacccgggcctttttttgaaaagcatggctgatccacctattcgcgactgcattttgcgggtcagtgtcatcgtcgttgtcataagatatggaataccggagacagaacttgtccaaagaggcgactgggtcgcggagttccagcagccggttgacaaattttttgaacagggccggggccttaccgttttccgtttaaaaatgcgtcacctcgaactgcttgtaatcggcgttgatgcagggcacggag

SEQ ID NO: 424610 - DNA, 224 bp, Oryza sativa nipponbare
  unsure (1)..(224): unsure at all n locations
aaaaaaaaaaaatttttttgtaaaatattgattaaaaaatattaaagaatggatattgtgtggtaaaaaataaatatattttttttattttaaaaaaaggaaaatttttttttttataaaagagattggttttgtgagttttaaaaaaaaaaaaaaatttttttaatagaaataaaaaaaaatgggttntgttttaaaatttgtaaaataaaaatgtttttttt

SEQ ID NO: 424611 - DNA, 565 bp, Oryza sativa nipponbare
gtatcaccggaagatgatgaaaagaataatattatgtttttttctctaaacaatcaattggcactaaattctaattcaatatagtccaacaatctaatcatccacagaaaacaatattctttgagcatgaattagtacaggtgagccttgtttagttctctctataatctgttggatgagcatcttactatcctggtcatcatcttcaaattcatcttcatcatctccgtcactctcctgagttctgttaggctctctgctctttaaaattcgctcccaagtgggcacttttttcagcttccttgcactgccatcctccaagccccagatcaagctgcggtccaccgagtaatcttcatgaacttgaggcttcccgttggtacttgtggtgcaaggggagtccgcaattctcatgaattcctcataagcttcatcgtaagcctctagcgcgtctccagctaggtttagacagaacggttctaccaaggagttagtttcttgtatatacactggactttcctggttgggagaaccagaatcactgtctgagcaggttctttcacac

SEQ ID NO: 424612 - DNA, 575 bp, Oryza sativa nipponbare
ggacaaaaatgtaacccctgatttagccatataagggtttccttttttttttaaatggggacaaaaaaaagcagtataaattttttttcactgatttcaggacccttttaatttggatttgcccatgcttcacgggggggttacaaagttgcaccccccccttttcctactttttttttaaaccggggtccaaaacgggtttttatgtcccccggggatacaaaaaaaggggcctaaactacaacattgttttggggggggtccatttttgaactacatgctgggggctacttcttaaagggggggtcccccccacggccctgggccttggataactgaataaaggggtaaggggccccctccattggaatgccccgttgcacaaagggtttgccaaaataaagggggattttcccaggggcccccccaacggtttcgaaaaaaggattgggcatttcccctgggccattggaaatgccaccccatataacaataaaaacccctgggaaaaaaaagggttttcttttaatttgggccctgtctttttggggggaaaaaaaggtccccccacaaaa

SEQ ID NO: 424613 - DNA, 554 bp, Oryza sativa nipponbare
ggggggggggaaaaaaaaatttccctttacattttgtttaaaaaaaacggggggttttaaaatattttgggggggaaattttttacaaatttcccccttttttaacaagggggggaaaaaaaaagggggggttttttccaaaaaaaaaacttaaaaccggtttttcttttaaatcccctcaaaaaaagggggccccacggttttttatttttttaagttttccaaaaaaaaaaggggaaaaaaaaaacccttttttttttaaataggcccctttggggggggtccccggtggttcataaaaaaggggggggggggaagtaaaagggggggcccaaaaaactttttttttccctttttttgccttcccccttaaaaaaaaaaaaggaaggggggggggggggggccccccccccttatttccaaaaaggggcccccccggggaaaaaccgtaaaaaaaacaagggcaaaaaaaaaagcgcgggggccccacaaaggggcggtttggttttttttcccccaattcaacaaaaaaattttttttttttttttttttt

SEQ ID NO: 424614 - DNA, 562 bp, Oryza sativa nipponbare
acagcaaaaacgtggtcttttaaggtctcaaaaattactttttatcaaacggggttaaacattttttgggactacaagggcccggggggcccagttaaataacagatgttgccttttgaaattacaacagtggtttttgcccctttacccctaaaaaaaggcttttttgttcatgacatcccctttgtttgaaaaagaatccttccccaccctaaactagcccggaaatgctaaagttgggattggcaaattacaattcccccgggggaggctttacaaacttttggtggaaaaaacggtaacttccttgtccggggcataaagggcattgtaacttcccaaacggggaggtttttgacaaaaagatgggggcttggtttttattggggcaggaccccccattattggtccaagccctcctgggttggcatgagggggtccctttggttaaaaggggggggggggcccttgctttttaagaatatgcatgggtttttttgggggggcgggaacaaatggccccaagggacccccccccggaatagggtttaaaattgggggg

SEQ ID NO: 424615 - DNA, 418 bp, Oryza sativa nipponbare
ataaagggattttttaaaatttttttttgtacactttaattattattttttttttttttttttttttaaaccaggcaaaataacccaaaaaaatttaaaaacggaagtacacaaattcaccaaaaaaaaaaaaaaaacgggttaaatttccaaaaaaaaaatgttaaaaaaaaccgaaaaaaaaaaaggtaaaataacaaaccctaattttaaataaaaaacgggtaaaaaaaaccccttttttttggaaattaaaaggccctttttttccccaaaccccgggaaaatttacaacccccccccccccacaaaaaatggggaattcacaagctccaatttgaaacaaaaggaaaaatcccccttgaaaaaactcctctgtctccaaaaaaaaaaaaataaaaaaaaccccccccaaaaa

SEQ ID NO: 424616 - DNA, 610 bp, Oryza sativa nipponbare
gtccatgaaatgattactcttaatttgttttatgccaaagctatcccatccataaatgtttctaaatctttgaacctaaataattcaacacaaaaaccttcagttcagaggaggatatatccagagaggcacagaggatagcaggtgcagggtcatcagggcatcaggcaagatggaaatggtaacttgccaccaggattctgttgaagtaaacttgatggatgtaatgcttgatgcgtcgacgcaaaagtaagaacctcccaaatcaattgagtcctcttttcacagggctctaatacagcacactatgggtcaaagaagaccagaactagctgcacactgttcatcaacttgagaaaagtttgagccataaccattgattgggacaaaatataatcccaatgattcatctgatgggctacaaattagacctttctatgacttttagtctgaccagacaaaatatttccaccccttcttataacgaaaaacgggacacatgaatacataggtggataattgccatcatctgtgtcttgtctcggctccaaaacatgcttcgccccggggcggaactttaccggaccagaccttgaaaaaaaccctgaca

SEQ ID NO: 424617 - DNA, 540 bp, Oryza sativa nipponbare
gtgctaatctcataatcatattcatttcatgtaaacacgacacatagaggagctcatattagtagcatagactcattgttcaatagccaggccgtctatctgaaaaaacggtgtcgagaggcttacatgactaggttctttcccactttaacacagaatttaaagcttactgatacggcctacaaccatcaatcaatagctcaggagagataatgcgacgaggccttctggctgcaggcctcccgctattcatatatttctttgggttcccaaagaatttagagagccgcacaggtacttcctcctcactatcactgcccctgtgcttggatcttgacctgtacttcttatccttttttgacctcttcgatctggaccgagacctggactttctcgaatccctatcctcatcatcactgcttgatgattccgacgatgaactggaacttgactctgatgaacttctatgctttctcctctttttactccgtttctttgcatctttatccttcttctctttcttagaaaatgatgactttg

SEQ ID NO: 424618 - DNA, 536 bp, Oryza sativa nipponbare
ggggcgggggggtgacccaaaaaaaaaggggggaccaaaagggaacttggtcctcgtttaaaaaaatgggaactggaacaaaaccctggaacaaagggggaaaactgaaaaaaaaaaaaattttcataccctggtacgtacaaaaaatgtacatccgggtggttactaaaggcctatttttttttggccagggggggagttttgttcatttgaagcctggccaaactagtaaaagctaaaaagctaattcccagctatttggacaaccatacataaaaggggaccgaaaaaaagggaaggatgggtttcaccactttagggggaaaaaaaaaaggccaaaaatcctcccagcgggggtgccacggggggggcccaaaaaaacggccccacggggggggggataaagccccggaactttcaaccaaaaatgggggggaaaaaccttaaaaggccccaccccccgcccttggggggggcccttgggggggacccggggggggccccccttaagggggggagggaggaaaaaagggggg

SEQ ID NO: 424619 - DNA, 375 bp, Oryza sativa nipponbare
aacactgaatagaagactagaaagacaatgtttaaaatcatggactggtacacttgaatcatcatcattttcaacagccatgctacctattatgacttctaaaccgctaaccataatctatctactaacaaagctcatccttcattcctcttcttcttaagatttgacatttaaattactacatctttccacccccatttataatataatattaagttacaaaacgggggtatcattcatcatatctcatcgttcttccatccatccaacaaaatctacggcttttcaccagcgctactccacttaaagcttcagacctttcacccttttacgcatactggataatccagaacttccattgtctacaaaatcgct

SEQ ID NO: 424620 - DNA, 899 bp, Oryza sativa nipponbare
  unsure (1)..(899): unsure at all n locations
tttttttttttttttttttttttttttttttttttttttttttttttttttttttttttttttttttttttttttttttttttttttttttttttttttttttttttttttttttttttttttttttttttttttttttttttttttttttttttttggggaaaaaaaaaagaaagcccttttttaaaaaaaaacggagatatttttttttatcttgggactgatttttaaaaaacaaacgaggaaaaaccccaaaattttaagagggggcccgtctccttccagggggggttttaaaaaaaaaaaaccatgggggtggaaaattatttaaaaacgttccagcgaaaaaaaaaaaaaaaaaaaaccctttatataaaaaagccccttttttttggggggggccggctcccccaaaaaggtgttttttagaagaaaaaaaagataattaggagaatttttttttagggggaaaagaagggtggttctagaaaaaaaaaaattttttttttttaatttataaaaaaaaaaataattttttttatggaggaaaacctcaaaaaacaaaacaaaaaaattatttttttgtgnggggggggccccccttaaattatttatattgggggggcgcgccccccttgtagaaagaaatttataacaaggggctttaaaaataggggggggatattctttttaaacgaaaaacaccctttttgttttaattttccagaaaaatttataaaaaaaaagggggaagatgtgtgccccacaaaaaaaaaaaaaaaatggctatttttgaaccactttaattgaaaaaagattcttctcccgccaaatataaatggggggggggggggcccattatgaaagaggtgaaaaaaaaaatattttttgtgagggag

SEQ ID NO: 424621 - DNA, 553 bp, Oryza sativa nipponbare
aaaaaaaaaaaaaggggaaaaaaaattttttagggggtcccgtttattttaaaaaaaaaaaaaaaaaaaaaacccccggggggaacccaattttcccttttaggggggcgggttccaaaaaaggggaaaggggggccccatggaaattggaaatccaaaaacagggtttcccccccctaaacctttaaaccctaaaaaaaaaaaaaccccttttggggggaatttttttttaattttttaccccttttttgaaaaaacttaaagggggggggcccaaggttttttttttggattttacccccctttttttgcacacaaataaaaaaatttttgggtttttttttaaaaaaccgggggaaaaaatttttttaaaaaaagggggggggggccctttttttttggggatccccattgggaaattccattttttttttccaataaaggggagaaaaattttttggggggggcccccaaaaaaaaaaggaatttttttttggggggttttttttttaaaaaaacgggtttttgaaaaagggaaaaattttggggcccc

SEQ ID NO: 424622 - DNA, 212 bp, Oryza sativa nipponbare
gatcccttaaaacgggcagacgttcgtttttttttttggacaccaaaaattttttctttttccccacggaaaggtagtgaacaaacctctctcctcacttggttcttaattctaaggtccaagagggaagaacataaggccccccacagggcggccacggaatttttttaacaaacaaactcaatggatcggatttggatcccctagggatt

SEQ ID NO: 424623 - DNA, 139 bp, Oryza sativa nipponbare
actgattccacgttctttttacatgttttttttattgttttttatattttttttttttttttttttttttttttttttttttttatatttttttttgtttttaaaaaaaagaagagaggaacggggccaggacgccgat

SEQ ID NO: 424624 - DNA, 750 bp, Oryza sativa nipponbare
  unsure (1)..(750): unsure at all n locations
tttttttttttttttttttttttttttttttntttttttttttttttttggggttggtggttttttttttgtttttttgtttgttcgttcgtgccttgttttttttgctgtttgttgnaaaaaaaaaaaagggggaaaaaaaggggggccccccccccccgggggaggcccttgaaaaggggaaaaaaaaaagggaacaaaaagggggcaaaaaaaatggggggaaacaaaaaaggggggggtttacaaaaggggggcccccccccccccaaaaaaagggggttttaaaaaaaaagggggcccctccccccggcccaaaaaaaaaaaaaaatccgggccgagaggaggggttacaaaaaaaaaaaaacagggggggggaaacccccccctttaaaaaaggggggggaaaaaactttttttttggccccccaaaaggggggccccggaaaaaacaaagggtttttacaaaaaaaaaaaaagggggggggggccccccccacgagggaaaaaaaaaaaaaaaaaaaatgggggttaacacccgggggttaaaaaaaaaacagggggggggggggggaaaggctaaaaattctaggccccccacaaaaaaaaaaaattttcccggggggaaaaaaaggattaacccacaaaacccccccaaaaaggggggaaatctgagcccccgggggggttaaataaaacacaaaaaacaggccccttttttttggaaaaaaaggaacacggacccccccc

SEQ ID NO: 424625 - DNA, 396 bp, Oryza sativa
  unsure (1)..(396): unsure at all n locations
aaatangcacatgtccgtttattatattttactgggtgatagttcacagtcacaaccatgatgaaacatatcaagttaatagaggcagaaactgattagaaagagtatttctaacgccagttgaaacagcgatctcagcagtttctactactttgcagggggtgacggtgcagttgctgtgtagagggacttcaactgcctgtatataagcttgctgtcatacactgctagctgcagctccatgccatccgaccaccattgctccagcccatgcgcttcaagaaacttctgtgggcctttcgatgtcacaaaaagcttcgcgaccacatcaccagcgatctcacttgcctttcgttgctgctgctgctcatctgaagcaccatcagtggtggtagt

SEQ ID NO: 424626 - DNA, 419 bp, Oryza sativa
ttttaataaatttccccttttttttttttttttcttgttgtttttttttttgggactggggggcccccccccccggcattttcagaggggatgcattcatatccggttacattcaggggaacatcaagaaacggggtccacctgcccggagaagggacaaaaagcaagtactatgcaaaagaggctatatttggctattggccattgcttatgggctctatttcggttgttgcagggcaggcgccttcaaaccttggcccttgcaggtgccttttcaccaaggccacgaaaatgccggcgcgggtgaagagcttgttgggcgggccgttttccaatatttgggcgagggaaatgacgggaaccgtgtcggcgctcttgaccggggatagccagtgagacattaaaagcacgggcctccc

SEQ ID NO: 424627 - DNA, 476 bp, Oryza sativa
aaataaattgaaaacgaaatctttattccttgggggaaggtaaaatggtggatacaaggtaaataaaagaaaagatttcatccacaattctacataattttgggatgagcctaaatatgatcaaggttacaaggaaacatggtgtatatgttctattacagtaacaactctaagttacctactgatgcctcctccttgtcctccttgcaggggtggattcagaaactcttgacctcctaccttgtgctggccctcccgctataacacccacggtgctagaagtcgacgcttgctccacagatgatgactgttggggagcgacagcagcagccggtgcagcaccattagcatcaggaggtggcaaaggagcctgattgccactcccagcatcagcattgaccacctgctgctgtgttgctggtgcaaaaggcgcatcttgtcttgcctgccttcgacccctaccccttggccggggt

SEQ ID NO: 424628 - DNA, 453 bp, Oryza sativa
ttaaataaatttttttttttttttttttttttttttgtggttttttttaaaatttttttttttttccccccttttttttttttttttaaaaatccccaacccttaaaaaaaacccccccaaaaaaacggaccccagaaaaatttcttccccccaaaaagcaaacaaaaccccccccccccggggcaaggaaaaggcttaaaaaaaaaccctaaaaaaaaaccaaagctaaaacaaaaaaggggaacaaaccaaacccccaaaaaaaaaacacaagggaaaatccacatttttttttttcccccaacccccccctgaaacccccacattttgggaaatttttttaaccccgttataatcctcaaagggtccccaaaccccccctttttccttaaccccaaaaacaactcccggtggcccccccccctctacatttttttaaaactcccccaaaa

SEQ ID NO: 424629 - DNA, 465 bp, Oryza sativa
tttttaaataaatttttttttttttttttttttttttggtggtttttttttaaatttttggggggttccccccctttttttttttttttttttttttttttttttaaaaaaaaaggggtatccccccacaagggggcccccccccaaaaatttaaaaaaaaacggggccccaacaacaggaaattcttggaacaggcccacccaaaaaaaaagggggggttaaaaaaggcccaaaccggggggaaaaaaaaaaaaaagggaaaaaaaagtttatatggggggcaagggggggaaccaaaaagggaaacaaaccaagggggggaaaaaaacattctctttggcacaaaaaagggaaaccaaaagggccctcgaataaaaaaggggaaccaaaagccccccctaatgggggggggaggggaagagaaacataccataaataaaatacccccggtataatactaactc

SEQ ID NO: 424630 - DNA, 464 bp, Oryza sativa
ttaaaataaattatcttttttttttttttttttttggtggtttttttttaatttttttttttttttttcccttttttttttttttaaacgggaatcaaaaggaaaggaaaaaaaaaagggaaaaaaaaacattttaaaatccaaaaaaggcatgttttggaaaaaaaaaaaaccaaaccccttgaaaaaaaaaaaaaaaaaaaacccggccggggggggcaacccggaaaatccggaccggaccccggaggggaaccaattttcccaaaaggggggccaataaaagctgggggaaaaaaaggaaaaaggggtttcctggggaaaaatgttatccgctaaaaattccaaaaaaaaaacgggccggaaaaaaaaaaggaaaaaccgggggggccaaaagggggagccaacccaaaaaaaatgggtaagccaaaatggccgttttaaaaaggaaaaactctctggcc

SEQ ID NO: 424631 - DNA, 219 bp, Oryza sativa
ctttttaaataaattctccttttttttttttttttttttgttggttttttttaaaattttttttggttcccctcccaaaaaaaaaaacccctcttattttttgcccccaccagggcacccaaacgcacaaaaaaaaaaaagggaccgtaactcttgaattctacaacacacacaaacaaactaccaactggggcgcaccaataaacccgcaacaacaga

SEQ ID NO: 424632 - DNA, 358 bp, Oryza sativa
  unsure (1)..(358): unsure at all n locations
ccttcccaccttttagtaaccgccccaagggcagcaaagcacagggggagcaagtgacaanaaagagggggaggccccccagcaacccgaacaggaacagaagcgcggcaaccagcccaagaacacccaccccccagccggcacanaaacaaacacgacaaaaacaagacaaccaaaacacccacaagaccaggccacaacacagcagccaagcggccgcccagcagaagaacaaggagccccggacccngcaacgcaggcaaggcagcccgggcaccggagcgctccccgcccaggcagggacaccacggccagacgacgccaccgacaccgcggcgaacccgacgaacgggccgac

SEQ ID NO: 424633 - DNA, 691 bp, Oryza sativa
accacctcaaataaatcaccccctttttttaaaataacaagggggtgaaaaaaaaaaaaaaaaggggggaccccccccacaacaaaaaaaaaaaaaaaaaaaacacaaaaaaaacaaaaccacaaatacaaaacaaaaaacacaatcacaaaacacccaaaaaaaaaccaacaaaagcacaaacacaaaaaagaaagaaacaaaaaaccaaaaaaagaacaaataaaatagcaccaaaaaaaaaacagaacacacacacaacacaaaaaaaaaacaaaaaacaaacacaaaagaacaacaaccaacaaaaaaaaacacacaaaaaagacacaaaaaaacaaaacaaaaaaaacaaaaaacacatacaaaaaaaaaaaaaaagaaaaaaaaacaaaactgaaaaacaaaaaccaaaaaaacaaaaaacaaaacaaacaaacaaccaaaaacaaaaaacacacaacaaaaaaaatctaacaaaaaaaaaacataaacaacccccaaaaacaaacccacaaaagaccccaaaccacaaaacaaaaaaacaaaaaaaaacacaaaacaaaaatcacacaaaaaaaaaaaaacaactacaaaacaaaaccaaaacaaaaaaaaaacaacccaaaaaaaaaaaaaaaaaaaaaaaaactccacaaaagaaaaacgaaacacaaaacaaaaataaaaa

SEQ ID NO: 424634 - DNA, 343 bp, Oryza sativa
tttttaaaataaatttttttttttttttttttttttagggggggttttttaaaaaaaaaaaaaggggaccacccaaaaaaaaaaaaaaatataaaaatcttaaattttaaaaatattaaaacaaattcattttaaaatagaaaaaaataataaatgtaaaaactacaaaaaaataaatattttataaacctccaaacgaaacaatttttgtatttctccatgggaccctttttaacaaaaaaaaataaataatattaaaaaaccatatataaataatattctatataattccaaaaaacatctaataaaaaattaaaaaaaaatgaaaaaaattcacatataa

SEQ ID NO: 424635 - DNA, 350 bp, Oryza sativa
ccccctaaactaagcaacaccccaagccaatctcattggtatgactaactataaactcaaaatgcatgccccccgaatccaggcaagcattccatcaaacccaaccaatttccatccttttttttgttcttgctggtaaagactggagtttctagccattcccagcatttcttttgctctacttcttctacatctacctctctactcttagtttcactatggagaacacaaccacaattacaaccatggtggggatggctagattcactcaatggccggcttccattcctaatgctttagctctccttgcctccaagagcttgtctttaagatggagggaagaaccggtt

SEQ ID NO: 424636 - DNA, 439 bp, Oryza sativa
ttaaataaatttttcctttttttttttttttttttggggggggacctggacctctatataaaaaggggcaatttaatacacttttatttgccagccaaattgagttggcaacgaattcttaacaagaatgacaaaaaaaaaagggaaaatgaaaagagaaaatatcatcgagcttttggtcgctgttaaaaaaaactcgacacgacattacttgcaaaattaagcctagtaattagcggtaggagtatgctcgtcccttttacaaacaggcgaaagagagagtgagaaaatcaaaaacgataaatggcaatgcgcgctcgatcaggccgccgtgcgaacggctcaactagcaacgcgggaacttcttcttcttcttcttcttcttcttcttcttcggctactggtgcggctggccccccatgcttaaagaatgggtttt

SEQ ID NO: 424637 - DNA, 337 bp, Oryza sativa
ttaaataaattttctttttttttttttttttttttgttggttttttttaaatttttttttgttttcttcccctttttttaaaaaaaaaaaaagcccttcccgtttaacaaaaaaaagcaaaattgcaaaagcatttcaacttcacttgaaattaacgcctcaaggaggggggtcaaccaacccataacccccaagaacaaggaaaaaaggggaaaacctaccataccatgcgaccatgcccaaaaactacccactactacttaacccgttaaccaaaaagacccccttgccccccaataaaaaccggtttacttaaacttttcaaaaaggggggggc

SEQ ID NO: 424638 - DNA, 655 bp, Oryza sativa
  unsure (1)..(655): unsure at all n locations
ttttttaataaattttttttttttttttttttttttttggtgttttttttttttttttttttttttttttttctttttttttttttttttttttttttttttttttttttttttttttttnaaagatagagtgggatatattaaaaaaaaaaaaaaagttaaaaaaaaaataaaaaaaaaaataaaaaaaaaataaaaaaaattttttaaaaaaaaaaaaaaaattttttttggggaaaaaaaaaaaaaaaaacaaaaaaaaatataatatatgtgggggattttaaaaaaaagaaaccactttattttaaaaaaaaaaaaaaaatattaaaaaaaaaaattttttaaggtgtaaaaaaaaaaaaaaaaacttccccccaaaaaaaaagtggttttatgggttaaatttatataaaaaaaaccaaattatttgttatttttataaaaattttatgataaaaaaaaaagaaaatacccctcctcttctttttaaaaaaaaaattaaaatgtttttttttctacccaccaatttttaaaacacccaccaaaaaatatttttaaaaaaaaaaatttctgggtccggggtaatattaaaaaaatctttattttttatttggggggaaaaaaaaaaaatataaaaacgtttttttttctt

SEQ ID NO: 424639 - DNA, 104 bp, Oryza sativa
  unsure (1)..(104): unsure at all n locations
tttctcctaaataacctaccctccccattttattttgnttgtttttttttaaagggaatgggcaacccaccccatttaaaaaaaaaaaactgatggaatctcca

SEQ ID NO: 424640 - DNA, 389 bp, Oryza sativa
  unsure (1)..(389): unsure at all n locations
ttaaataatcgatgcgcattgtttgatatttctgcgtgggaaaattgaaatgctcctgtgtgtgcgatactggacgcagaaacagtttcttttcttcctgaaggctttagctattgctgacatagataaacaagagaaaattttgaccctcgcttgcctcgccgacttaccaaaaaaaaaaaaaagtctccggccagccacctcgccgccggccgtttcacgacgagtagtcgttgctacctcgccgggacgaccgctcgccgacgcttgtgatccgttgcatggacccgtctcgcacgtactgggcgtgcgacgagcttctgctgctctcgccaccggccgcttgatgcctctccctcaccgtcgccatggcccgggngaccaccttc

SEQ ID NO: 424641 - DNA, 524 bp, Oryza sativa
  unsure (1)..(524): unsure at all n locations
tttttaaaataaattgagaggaaaccaattatacttttggcggtctggttgtaccgctgctgcagcaatttcttatttactttacatgttgaggtaccaccatgccaggagattatcatacaatccgtgcagaatactggacagattcaagcagtggcacatgaacaaaatgcaagacgatcatcacaaattcacaagtagttcatccgattgggtaggttgatgccagctcgcgcaagaaggncgcttgctattttttcagctgaagcaattacctcctcctcattcaaattcacgatcttcttttccctcataatccatcgaccgttgcacattacagattcaatattttttgttctcatgcagtaaactatgttggcaatgctgcataacgggaaggtgagtcaagtattatggcatgaccaaaagtgtgtcccaagtcactacttgacaagctagaatcatcaatgaacaatcagatcccagtatcatggccatagaaagctgctaattggttggctgat

SEQ ID NO: 424642 - DNA, 257 bp, Oryza sativa
  unsure (1)..(257): unsure at all n locations
cacaattaaccaacaatagtttgtatgcaatgtacgttgatgcatcacaagttacagttttcacacacacacagacgtgatacgtttatattcgtaccgggaccaaatnanatggatcaacaacaaacattccaaacaatgatatttctggattattacagagctggaccaaacaaaacaaaacatttagttagggccagctgagcgaacacacctgtcgtccccttcattgatcaaaggcttcttttattattcca

SEQ ID NO: 424643 - DNA, 125 bp, Oryza sativa
  unsure (1)..(125): unsure at all n locations
tcgtaatccccccctcaaataagctcgccattccggcgggtttgactnntggttgtttagttcacaaggggggtcgtgccccccccccttcgagcaccaaagaggggcaaagttcatagatcatc

SEQ ID NO: 424644 - DNA, 473 bp, Oryza sativa
  unsure (1)..(473): unsure at all n locations
cctaaataaaatcactcactttcaatncactttaaggtggcatcattttacagttagcgaaaagagccccccagagaggccgtaagacaggtgctgacatgaatagctcccttcaatgggaagtaatacacacatttttacagcgttatctatgatcaaacggaaaacacgatttccccgattgccacccgccaaaggccatcacaatgtcattgttttcttacatcagagattgcaggaaccttggctgggtagttagacaaatccacatcaagcaagtctgtcaggtcgtaaagccctacattatcaactctgtccttgattggggtgctcattgtttctttcctgatctgcctggcttgacaatacgcttgatgtcaccgcactgttcgcaggcattacagagatgccagacaattttacttccgcccggatggcacggtccttactgaaggatactttctttgagtgct

SEQ ID NO: 424645 - DNA, 449 bp, Oryza sativa
ttaaataaatttacccataccatatttatttttttgttgtttttttttaaaatttttgaaaggcacaaaccaccaaaaccattgatgtataaactcaaattatttacttatgaacaacaagcattaaaaaaacgatcgaggccggctaaacctgaaaccaaaaaaacattaaacggatggttttggcctgaactttttccccctgtaatgcaatcgaggaaaaaaagggaaaaaaaccttgaaaaggccaggggaaatcaacacatacatatacaagtaagaccaaacaaatcatgttggaaagcaaatagcaccaaactttatttatttatgaaatgcaacactttcacagggcatccggggaacgaatctatatcaaccaccacataattaacctgaccgaaatacaacctgaagccataaaaacagtagacccaatggagcaaaaa

SEQ ID NO: 424646 - DNA, 427 bp, Oryza sativa
aacgactccgccattcttccctgacgtggttcttccacatatttacaggaattgtccatgacaagaacataaaatataatcctcactttatctgtactaatacaagctagaccaggttaccgtcacagacacgtccatatcttcaagattgtgtgacattttcttataggttccaaactgtggtatgaaattcaaaacgtcgtaataaacatcctcgcttgcggagaagaacccatcattgtcgtaatcactaacaacaccatctggagagcaatcgccatgtccaatctgactactggagtagccgtacacgaacagcttcagatgcatctctctgttgatgcacaccgcgaaaggcagtagcttgcctacgctaaccttgccatcgaaaaccaaaaacatacccttgattatcgataatgcgaca

SEQ ID NO: 424647 - DNA, 424 bp, Oryza sativa
aaataagacagcctcaaagccattttcatttgggtgggcctgttcaacgttggcaagggccatacggcagtttccaacgtgcttacactactgcaacttacaaccatatccatcacgctggtgcaaccacatcccctacacacaagctcacaaatcacaatgtttgtctgcggccttattctatcaactcattcatttggttttgggtaatctatcaattcattcatttggttttgggtaatcaatggtgtatgatcgggtcgccattttgggtagcaaatgatgtagcttatcacgaattcacgatagggcatggctgctatagtgccatctactccctggacatatagtactacgaatctggactagtcccatgtccaaattcataatactatatacgcagtatcatctacgacgggcgtac

SEQ ID NO: 424648 - DNA, 342 bp, Oryza sativa
ggtggcggcggggaggagtcactgcgtgcacttctcggcgtcgagcttgatgcaggcgccgctctccgcgctgctcgagtactccgggatcctccgcgcggaccccggcggcgggccgcatcaggttgggggtgggggcggagcaagaataacccccattggcatgcctacagggccgggtgacactggaaaagaaacccacttctggagcgcccgagcattccaaactgttttgcgagatttatggcctacaggaagtatttcatgtcaactatcctgacagcagggaaatcctcccccttgaactcttcaccttttagcacacttctcattgttccacca

SEQ ID NO: 424649 - DNA, 416 bp, Oryza sativa
  unsure (1)..(416): unsure at all n locations
tttttnaataagtactcctttggatcattcatcttataggagggtcgtataccatctacgtgcgttggaggatttcgacttacgtgcggccgaaacgggattacaacttgtatgcggcccatattttttgtgccgttatgggctttctctttcctgcggtccaagaacggggcgcaggggatctcagcttacatgaggcccactattgttgggccggaagggaagtggactcgcgtgcggctcatgttggttaggctcatgggctctccggtcatccagccgccgacgccgacgccgacgccgaagccgacgggcgcctcggcgacgttgaagacaagcctcgccatggccctcctccccgaggagccgtcgccgccgccattgacgcatgagtggccgtacgtggtcgtcccaaa

SEQ ID NO: 424650 - DNA, 99 bp, Oryza sativa
  unsure (1)..(99): unsure at all n locations
ctaaaataaatcaccacccaacccacctccaccgngggtgatttattgaaataaattgacgggaccccccaacaaaacaaaaagctcacttgcttatta

SEQ ID NO: 424651 - DNA, 756 bp, Oryza sativa
ttaaataaaattatcttttttttttttttttttttggtggtttttttttaaattttttgttggtttttaaaattttttgggggaaggggtaaaaaaaaattatttaaaaaaaaaccctttttaaaaatcaaaaaaaccccttctgatggattggttccaaaaaagaataaaaagaggattttatttgcccaaaaaagggccccaaaaaaataaaaaatggaaaaagttcaaaaaaaaaaacaaacgccgaacaaaaaaaaaaaaatttacattggagaaatagggaaaaaagaacataaaatggtcgacgggcccctaaactaaagaaaagaaaaaggaaactctacaaaaattttccttggtttttactggattttaaaatacaaaaaattaaccttggtaaataaaaattaaaagaaaaaacactttaataaaataaataaaagaaaacaatatgaaaaaaaaaaaacaaaataaaattaacaaatttttacaataagaaaaatccaatatcaactaaaaaattttacaaaaaaataaataaaaagaaaataaaaaaattaaatcaatatttaaaaaattgaaaaaaatttttaaaaaaaaacgccaaataaaaaagaaatatttgaagcaataaattatggaaaaaaaaaaataaaaaattgacaaaattaaatttaacccacataattgaaaaaatttatataaaaaaaaaaaaaaacgttaaaattaaattattaaattaaaaaatcaata

SEQ ID NO: 424652 - DNA, 234 bp, Oryza sativa
ggggaaacccacccaattttttaggggaaaagggggggggaacccaaaaaaacccgtccagggcccgaaaaacccgccgggggggacccctggggaccccaggggcaaaagctttcggcaaagggggcccaaaaggggggggggcaaaacccctgggaaaagggggggtttcaaccccgggggggggccccctaaagggggcgaaaaaatccccttgacccccggaaagggacc

SEQ ID NO: 424653 - DNA, 270 bp, Oryza sativa
ggaccaaaacacggaataaaaacctatagccaagaggttacagactttacaatcagttatcgggcatatgcaaaggggaaagccgtacttttttgctcagggcaaaaacagataaaccccactttaacttgggaaaaaagaaggggttgctaaattgggggcccacagaggtttattaacaggagaccaaaaggtttttgggggaaatcaagccaaaataattccacttaaaaaggattgggggttcccaacttaaaacccctgaaatat

SEQ ID NO: 424654 - DNA, 261 bp, Oryza sativa
cgggggggaaaaacctatttatctcccggggaaaaaaaaaaaacccccccccccgggtataccccccaaagggttaaaaaccccctgcgggcccaaaactggaccgggcaaaaaaaacccccttttcaggattttgtttaaccccaaacccccccccgcgatttttcgccccccccaacagaaaacaagggggggggaaaaacccccgggcccggaacctggccccaaaagcaaagcgggcaccccttaggcccccccccc

SEQ ID NO: 424655 - DNA, 222 bp, Oryza sativa
aaaacaaaaaatgggggggcaaaaaaaaagccaggggcaaaaggagaccacaaaatcctttcggagggaaaaacagtctcaacccccacaggaaggccccaacaaataggaccattcccccccaaaactttgctaagcagggggctcattgcccaaggcataaaaaaacgggaacattcccgctcaaaactttgctcagcaaggggctcattcacttccccg

SEQ ID NO: 424656 - DNA, 323 bp, Oryza sativa
gattaaatcttatcttaaaagaatatatttcaccatgcactctgtcatcgtttttcagaattgctccgtaacaatctgatttgaatttgagaaaccccatataataaacttttcactcgtcatcaccgcgtgtcgtcgtctgaaatttgagaaccgccaaaatttttacttggcctccctctcgtcgtttctccagctgcccttcatcctcggccccgtcgggccctcgccgacgaagacgctatcgacgagcttccgcagccgctccctcgtcgaccgcggcagcagcttcgccacgcggttgatctcgcggccgatgtcgt

SEQ ID NO: 424657 - DNA, 272 bp, Oryza sativa
ataaattatattattaattttttttataaattatatttaaaaattaataattaaatttaaaaattttttttaaaaaaaaaaaaatgggttttgaaattaaaaaaccaaaaaaaaaacaaaacccccttaaaggggaaattggcaaaaaaaaaggggggtaaaaaaagggaaaaaagaatgaaaactttttgcaaaaagggagggggtaaaaaaaaaaaaaaatcccgaggcaaaaaacccaaaaaattttaaaaggaaagggggttttttaa

SEQ ID NO: 424658 - DNA, 327 bp, Oryza sativa
ctgaaagtatgtgcattcatgttactcaagacatcaaatgtaaatggacatcaatttttacagtcaggtgagcccaagagctaaatttcttgttcattattttcgaatcatatcaacatcaaggacaaagtacttgatcaggaaaatttcctttggaagccaaaaaaatatggaccaacattgcgtccacaagcctagtccatgtaatatctttcatagctcatgaccttgggtagagacatatataggtactggtaagaaaggaaaaggggccacagaagcataggcaaccggagggcgcgagtgaatacgagaaggttttcggtc

SEQ ID NO: 424659 - DNA, 95 bp, Oryza sativa
accataattaatatattttatttaaaaaaaatatttatttttttttcattttttatatattttaatttttttaaaattgggggggggggaaatta

SEQ ID NO: 424660 - DNA, 127 bp, Oryza sativa
atgtggtgaattaaaagacaatcggggaataccagcagtggcagggaagcaaagggatatgacaaaaaacactggcccgttctacacggaaaggcactgacctggtcaagcccggcacacactcaca

SEQ ID NO: 424661 - DNA, 247 bp, Oryza sativa
gggaaaaggaagcttttccccgacccttttctaatttttttcccagattttgggtccagaatttacccccggggtccagccctaattttttcccccccaaagaaaaggccaaaggaagggggggggggaaaaaaaaggaggaccgttttcccaacagagggcccccttttaaagacaccctttcccattttttaaaacttgggcccttttaacggggtgccatggggggaacaccctttagaaaaac

SEQ ID NO: 424662 - DNA, 323 bp, Oryza sativa
aagaacaactgaaagaaacaaaactcttcttgattttgatccaacgtgagtacgaacaaatcaaaaattggatatttggacatccaaagaatccttttgattgctattctgattagcagcttgtggatatagattccagacatctcagccttccatcctctcgtagaaaagaaggtaagcctcgcacttgagaacttcttctaaagagacttctctgatgtcggtatcacttgcacaaaaccatgaggaagaaccattggtctgctgccgaggacttggtctcacataagcaacaaagtgccctgaatctttgccgcggccat

SEQ ID NO: 424663 - DNA, 324 bp, Oryza sativa
aatatataaattttcatttatagaatgaaaagtatatataatttcacaaaaattgctcgaacttttttttatcgatgtggaaatgaaaataaaatttcgaaatttttggatgaactaaccgaagatgaagtcccatctcccgccataatgcgggtcctcttctcccggaggatactgcgaggtgacgtcactgtcgctggcgcctccgccgccgccgccgccatggagcacgtggcttgagctaggctcgcggtacatcagctcgggcatggagcccaccctgagcatggcggggttgggccgcggcaggagggtggtcgtcgc

SEQ ID NO: 424664 - DNA, 119 bp, Oryza sativa
aaaaattgttttattttttttttattttttttgaaattaaaataaaattttttaatttttggatgaaataaccgaagatgaaattccaattttccaacaaaaaagaaaggggctctttt

SEQ ID NO: 424665 - DNA, 103 bp, Oryza sativa
ggtggttctttaagtgtttcggggctttccccaagcccacaagagcgcgcaaatcccatggcacaagaagattgatgatacccttgcacttaaaacacaatgt

SEQ ID NO: 424666 - DNA, 330 bp, Oryza sativa
ggataagagcaattcgaatcggccttagcaccaaacaactcaagtagctctcacatcagaccttgataaagtgcacacaggcacgcagttggcttaacagaattctagccatgtactgaagacttaacctaacccaaaacataggtagcatatactacttaactaggttaatgaccagggtgatgatctgctaatgataactaggaaaaatgccatttgcggagccgttcacaggtgtcccagcacattctgcaaaaacagcttcacttcctgtggactcatctgatgatcttgcagcatccttttgtggcattcatccttaagaacttc

SEQ ID NO: 424667 - DNA, 284 bp, Oryza sativa
ggaccaaatctatgcttggatatatacgaaacttaaaaagggtttcataaatctaccatgtaggggatacgggcatatccttcataaggacatttgaatttttgggaactgggatgatccgtatacaagcattatgtctgaagtcacaaacatttcggaccttctcttcttcttctctatctgcagcagcagcagttcagggggggagctggtcctttgcggcggcggcggcgggggaccccggccccggcaacaaggcgtcctttggggggggcgcgttgacg

SEQ ID NO: 424668 - DNA, 66 bp, Oryza sativa
accgttcatcatcaaaaagggcgaaaccgaaagcaaaaccggcacacaaaaggggggcggaccccc

SEQ ID NO: 424669 - DNA, 325 bp, Oryza sativa
ggaccaacacgattcataggtacaccaatcaaaaacacaaagttgttactattacatagtcttagttacaccttacaagtactacaacactaaacaaatagtaaaactctatatgtacggttccctcctctcagacacatatttgtacttctaccaactggtctcatctctcatgagatggtcagttgagcctgcatatctatatggccaagaaaagctgcgatgaatgcaaagcaaatttcttgaaatattggatagatcatcacagtccaaggctgccaatatatccatgaacgatatctcaggtgaaaatgttgccaatgac

SEQ ID NO: 424670 - DNA, 217 bp, Oryza sativa
ggggaaaaaaagggaggggggaacaaattttctaccaagttggggcttatttcccacgggagggagcaaaccccccttaaaaaagggggggggggaaccccaccggggggggtttataaattttttggacccaacattttaaaaggggaaaaactggtggaccaaaaaaatttttttggacaagccggtttcaggggaacctcccccggggtttggg

SEQ ID NO: 424671 - DNA, 334 bp, Oryza sativa
agatgaaaaagaaaagaaggaaacatgtatgatgcgcatgtttcgaattagataatgctttcaactctaataacaaagttcattctgcatatctatctatatcttgcaatccgcatcctttccaggtaacatggtaaacgataagacttacaaaaggtagatgagtggttactgatcaattatactgcttgtcatctatatgtgtatatcagatgtatcaacgttgcaggcctacgaccatccaaacttgtagtcaaggatgtagaccatgatcagcgacaacgggtagagaaggaaggcgacgaatcatgtccagagtgggaaatcagtccgt

SEQ ID NO: 424672 - DNA, 192 bp, Oryza sativa
gggtcattccccttttctttttgatttttgtatgaaaacttgtttggggggggaataccaccaaaaaaagaccaggctctatcccctcttagtcgtcgtactccaacacgtacgaacggtactccactataacgtactaaaccactttagaagagggaaacccggaccatatattttggtagcacttttaca

SEQ ID NO: 424673 - DNA, 299 bp, Oryza sativa
gggccgtattaccgttcctttacagaacgagtaaataaaattttcatttaacatttttaaagggctaatatgtatcatcaccgtttcttcattacattgcaacttcagaatccagacgggaatagacaggatacaattccggaagggctgtcatgccattggggctgcctttgatttgaccgtaaccacgccgccgccctgggcgacgtcgtccatggggacgttaacgtcgatggtctccggggactctacgcggtccgagtacttgcagctgagcacgactaacgccaaccggttcg

SEQ ID NO: 424674 - DNA, 118 bp, Oryza sativa
agaccgacagaagaaggcaccggaagaacaccgggaagaggaagccgaaactgaccaagacgaagaagcagacgcgcaacagggacaacccggagccagaccaaggacagacccaaaa

SEQ ID NO: 424675 - DNA, 327 bp, Oryza sativa
aaagatgaaaaacatatattcaaataaatgtgtactttaacatagcaaaacatggatattttgctagtggacagtaaaacctactatttttccccctttctgcgcgagcaccctacaccttgcgactaccaatctgtagttttgcataggggatggcattgttcatgcataacaatatatatagataacacaagcatgccactgttatatcttgtacagcggcagcaaacttgttagcctggttaggtccaggcaacaagaataaaaggacatgtcaggaaatagaacgagcttaaaaagaaatgcttggaactgcaaatgtgttac

SEQ ID NO: 424676 - DNA, 314 bp, Oryza sativa
cggctgccatagtatgttcgttggattgaaatctcaactgtttgaaaagcacaaaaagtccattgctctacatgaaaagatcagttctatcactaaataatctacaggtgttggaagaaaaagaacggaataaacaattgtgcccacttcttcctcgatcaagaattcaggatcatccagctttagccttactcgccaagaaagcgtccagcttgtcgttctgcacccggccgaggaacctgatgcagatgggcggcgtgacgtcgtacctcgcgagcagcgcgtacggtatggagaagaggccgtcgccgcag

SEQ ID NO: 424677 - DNA, 326 bp, Oryza sativa
ggtaactgtccaggtgaaacagcatccttggaggaaggcaacatcaatatctacatagatcatggtaaatgaaactatgaacaaaccagggttttaccggtgacactaaaaggcaggaagtcacgaggaagcacaaaatgaaaataatgattctgggcccaaggcaacatgcactgactttaccctactacggacaaggaattgtttataactgacagccgaagccctgataccacagaacataaaaatgttaagagaaaagctgacatacaacaatgcaagggcaggttagtttgcaggcttagtcagctgggactcgccatcta

SEQ ID NO: 424678 - DNA, 253 bp, Oryza sativa
atgaaaggtatttaggagaataaattttgggtgagagaagggcaacaaagggacataatatgaccgaactccccaaaaaagaaaaatggggggccaaaacccaaaaaaaaaactccggagcttaatccaaggggggaaaacttgatcaaaaataaagggaggtgctcccacaaaaaaacgggggggaaaaaggaaaatgtgtgttgcccccccaggaaaacaagggttcgcacaatgcctttccagcacactt

SEQ ID NO: 424679 - DNA, 316 bp, Oryza sativa
aaaaaccaaccaacgaatagaacttttattgccgggaacttgaaacatcaccaatgcttatgtacacggattaaaagaataagattacaaaccgtaatgctggtgaccacagtgcttccatcagggcagcttgagccaaaacaaagcagctttactttcactgcttccaaccgggcagtttgaaaccaaaacaaagcagctttacttaactatacaggtttcattctattgacaaaacgatttcaacttcgcttggacagtaaaaaaggcaagtttccaacatacaggctgaaattgcccatgacctaaaatcatt

SEQ ID NO: 424680 - DNA, 209 bp, Oryza sativa
attaaatatatttaatatattaaatattttttaaaaaaaatgaaaaaaaaagaaaaaaaaaaaaaaaaaaaaaaagttaaaaaaaaaaagggaaaaaaaaacgagaaaaaaaaaaaaaaaaaaaaaacaagaggaaaaaaaaaaaaaaaaaagacaaaaaaagccaaaaaaaaaaaaaaagggggagggccgtaaaaactcaaaaccaa

SEQ ID NO: 424681 - DNA, 336 bp, Oryza sativa
gagtggattgacataatgaattcgtgccattctctatagggccttgaattcaaacaagtttagtggtggaataccgtcttcgattggcgtactcacaaacctcttatggctagacctggctgataatcaactcactggatctgtccccatctcaacatcaacatcaccaggcctggaccaaaattgattgttttgctccaaacttcaaattgatgaacagccatttcaacaagaaccagttaactggaacgcttactggacttttcaactccaatatgactctcatacacatgtaagggatcgacaaattttcatgtctaatatgaatactgaata

SEQ ID NO: 424682 - DNA, 215 bp, Oryza sativa
aagccaaaaaaaaaaaggtaaaaaaggccccgggaaaaaaaagggaagggtttaaaaaaacaaaagggcaagggagggaaaggccccccccccgaaaattgggggggaacaaaatttttaaaaaaaatttgaaaaacttgaaaaaaggtaaagggaaaaaaaagggttggactaaaacaatgaaaaacaaaatccaaaacttggaaaaataaggg

SEQ ID NO: 424683 - DNA, 371 bp, Oryza sativa
  unsure (1)..(371): unsure at all n locations
ttttntttttttttttttttttttttttttttttttgggggttttttatattttttttggggttttacacccaatcttattttttttggaaaaaaaaaacccagagggaaaaaagggggcgtcccaacaaacaatagaaaaaacctcaaaggtttttttagacagcccggcctgaaccaggccaaaaaaaaaaaaccaaacccccgagaagaacccctggaaaagaatgctgttcaaaccaaacccggaaatataaataaccccaaaaccaaggaaaatgcacaaaaaaaacctttaaaaaaaaacttaaccgattccccaaccaaaaacggggaaacccggggccggggggggggttcctttcaaaccga

SEQ ID NO: 424684 - DNA, 57 bp, Oryza sativa
  unsure (1)..(57): unsure at all n locations
tttttnttttttttttttttttttttttttttttttttgtgttttttttttttttag

SEQ ID NO: 424685 - DNA, 289 bp, Oryza sativa
  unsure (1)..(289): unsure at all n locations
cttttnntttttttttttttttttttttttttattttatgggtaaattttaaaaaaaaaaattggcgggttaaacaaaatattatataattttaatgctttataaaaaacttaaaaaaatttagcttnccgaaaaaaattcttgtaaaaaaaaaataatcaacctttttttataggaaaaaaaaacccttttttgccaaaaaaaaataccaaaacaaatataattcgttttaaaaaggaaaaaaaatccaattttttccccaaaaaaagacataaaaaaaaaaaattag

SEQ ID NO: 424686 - DNA, 362 bp, Oryza sativa
cttcaaaaaatgggccatatgaaaatgggacgaaaaaactagggcatcgccaaaggggggggggaaaaggaaagaaccccccccaggaaattccgggaaaaaagggggggaacaaaccccaaaaaggaagaaacattacgatcctgacggcaaaagaaaggggccctgtcgaacttggcacaaaaagggagttaagagggaaaaaaaaaacttaaaaaaggccactggtcccctgggaaagggggaatgtaccctaggccagaaagggcacaggggggggtcacacacaagattgggaataggacccgaggaacttgaagggggactttttcccaagggaccggggggggggaacaacaaaa

SEQ ID NO: 424687 - DNA, 455 bp, Oryza sativa
  unsure (1)..(455): unsure at all n locations
ttnttttttttttttttttttttttttttttttttggggtttttttttttttttttttggttttttcaaaaaacagagctggggggggttccggttttcacacagcccacaaacggtttatttaaattggtatggaaatggttgggtataaggggcttgctccccaccccactttttgtttttccaggcagaaaatttttggggtaaaaagaattcgggattttaacatacagggggggattttttcctgtcctaaacccgattggttggtaccttaacaacccagttttttccaggccgtttttagagggcgggcattctgcaaagtttggttggttttgcccacatggaaaagaaccccccagggggaagatttgtcccagttaggggttttttggccgtgcctttttccagggtttttttaggaagctaaaaggccccagcacaggcttttt

SEQ ID NO: 424688 - DNA, 446 bp, Oryza sativa
ttttacctatttttttttctttgggggttttataattattgggccattcatatctttcacaacatacgtacacaatccgccccacaaggccaaaaaaaaaaagaggggcgaaaaattcaccccccggcgggggaaaaatgggccccaaggaacaagaaataacaaaaaaaagccgcccaaacaaaattccacaaaaaaaaaaaaagcgtgctaaaaaaaaaaaaaggaccaggggggaagaaaaaaacaggaaaaaaacaccggggggcacccaaagaccccccccaagacaaagctcccccaaaaaaaccgccagcttcggggtttgggcaaaaaaaaaacgggaaaatgcggcccaaaaaaatttccccccccatccaacacaaatgggcaagggccgggcaaaaaaaaatatgcccccaaaaaggaacccttttttcctctgc

SEQ ID NO: 424689 - DNA, 448 bp, Oryza sativa
atgcttcacacgtaaagtacatacagacgttgtaattagatttgaagatgtgtttattgacaaggtattggcaaaacggccgcagaacaccaatgtctaggtcggcttgaccaactatgaacaatgttgaaaataaccaatcatggcaccctacgccagggcaagaaccatagccacactcatcaatcttcaactcgcaattgcagcatagggcagctagtagttcggaatgagaatggacaattgccgaatggccacgagaagttagaatccggcccaccctgatggttgctccactttcttcgctgctcctgagctgaatctctgggaggaactcccctgagcagtgggcctgttgatctgagcggcagtactccctggtgatgtcctgaaactatctggcccgaaaccccaaccatctggtgattgcttgagtttgcgttccttg

SEQ ID NO: 424690 - DNA, 497 bp, Oryza sativa
tttgttcttacttttttttttttttttttttatcgggggatttacctggtttacacgcagtgaaacaaaagggtatcatgactatgaatacaccagagagccatgtaatcagcccttagcctgactggaacaacacattaggagcatattcaattagtccagctatcggggcacatttcacaatgtacctggcaaaaatgcatgatggatcaaaatcagccctaccaccaaaaggtgttgaaaggcttatctttgaactccaaggaagcattctattgtctgaggagagagggaaaacccatactctgctggaggactcttatgcctatcatcctgcaaacatgaaacactccgcggtctcagaagaagtaactaccccttgaatctttgagaggaggaacacaaccattgagggttaccatcctgatctcatgttggatcaactgataagcaaccccctcctgaaacccaagaaaggaatttgagtcgaggaagct

SEQ ID NO: 424691 - DNA, 382 bp, Oryza sativa
gggggattaatacaaaaaagttttgacgtattcattcatgggcagcaggaaccaacgcgcaagggcacaagaatgaaacataacaatatcaaacaaaaaccggactacactgcctcccacaaaaaaaaaacaaacccaagttaggacgatgccctacacaactaacggagagtaacacatatccccgggcttttcttgtgataagaaaatccgggaatgcaggaaacttggaaaacaaaaccagagactataattccactattcaaaaacttgggtcccctctttgcaagaaaaatcaacggaatcatacattaaaacacggctggagtataacaaaaggggcacacaaacgaaatgctacgctaaaagcaaaatcctttgc

SEQ ID NO: 424692 - DNA, 413 bp, Oryza sativa
gggttagctccttcaaaaagactttttattcaaaaaagaatcacaaatttcagatgtgcatattcatattggccactaaattttttgcttacaactatgattcttccgtcaccatcgcattggagcagaaaagaaagggcagcatatgcctaaaaccttgttgtactacttcatcaaaagttattggtggggacttcgataattcaaaggtcccatcttctccccttcttggattgcattgcataatctcgcatatactataggaaatatgttccgtcttcttccattcttgggccaactcctaaattttcaacaaaccttggtgtaacactttgccttagaagtccttttaaagactcatcttttttggcactgggaacccacaacagctttttgattggcacacttttata

SEQ ID NO: 424693 - DNA, 392 bp, Oryza sativa
  unsure (1)..(392): unsure at all n locations
aaaattgtatagggacagttcttgacgtgatatcgataaggttccgtaaaccagcacaatactcaactggtcccaacacagtaggaaaataggactggagagacgtacacagccaaaactcaaagatgatacgtgcataaccagcactaatccacagcatacatcctcccagaggggcatcatccatctacctatacctaccaatgcagagccaatcagccaagcagatccagaaacatcagtacaaatcacaacagcctgntaggtcggtgtcatgtatcaatgtagtaggatcacatctccttctagctggaaggctccacatggcttttgtagttttacaaatcctctccctatcgccatgtgccacattgcatctaagatttgccgac

SEQ ID NO: 424694 - DNA, 202 bp, Oryza sativa
aattgattcctaacaaagtatggaaaaaaaaaaagggacagaccgtaaacaaacaaaacccaaagaaaaaacgcgcataaacaaaactaatccacaacatacaggctaccaaaggggggagaacaaaaaaaaaatgcgggccaatgcaaagccaattatacaaggggggccacaaacaacatttctaagggcaaacaaacaa

SEQ ID NO: 424695 - DNA, 453 bp, Oryza sativa
gggcaggccaaggtgatcggcacggtggtctgcgtcggcggctggatgatcatgccgatctacaagggcccgctcctcaggctctgggcgtcgcccatccactggcggttcgcggagagcgccgcgtagggcgcggaagtctaagaccatgaacatgtttcagggagtcatctacttctcgtgatgctactgtaagggtcacaagaataaaccccgcttggtaaaacagacaaaaaaataggataggtgacacacgagtataacgctctcggtgaaaaaccggagcacagtagtagtagtaatacagcaagcgtgattttatttagaagactaagtatatcaattaagagggtagttaaccttaaaccccgcaagaaacccgcgccaccctcactttggcttgccgatgacggcggtcttcttgacgttggccgctgctgcggcggaggggac

SEQ ID NO: 424696 - DNA, 485 bp, Oryza sativa
  unsure (1)..(485): unsure at all n locations
ttnttttttttttttttttttttttttttttttttgggtttttttttttttttttttggggggaagaactttgcttaggggatagttaaattgggaaagagaggccaaaatataccggtggacacaaccatcaatgggtaagctgcctaaatcagatgaaaaccatcatgaaccaagttcgaagctcttggtatatggccttttgcctcttaccaggaaccagacagacaaccaggcacaaacaactaaacaagacaccagagccagctaaacactatttacaggaaactttcagccgattactggtcgtttgactacccagggtctttgccactagtaactgagggcatggattccaaaacggacatttggcgatcttaagttatatcttccaatcagggattaaaagggtatctaggcactacagaggctccaccatgttgtggacatccaatattttctcgaacacttgccaaaggtttttc

SEQ ID NO: 424697 - DNA, 473 bp, Oryza sativa
ttttatattttttttttttttttttttttttttttgggttttttttttttttttccacccccaaatttggaaaaccaaggggccaattttaggccaaattccgcccatataaaaaaggaaggggcctaataaaggatgagccaaccgttggtttccagagaaaaccccagtgggggttccaggcctatgggaaaatcacttacccctgcagccggcccataaggggcccatgctctccaatcttaaacaagggaaaggttaaaggatcttatccatccctgcggccctgaaaagggcccaatgggggtcggggcccccgctgcccccccataagtttttttttttttcccagacctttaagcgtaggcgaccgggaggattcaaaccatttttgaaataaaaaaggcccctgctgaaaatttggatattgctaatggaccctgcccccaagaccccggaaccccctggggggg

SEQ ID NO: 424698 - DNA, 466 bp, Oryza sativa
  unsure (1)..(466): unsure at all n locations
ttttnttaattttttttttttttttttcttttttttgggggttttttaaatttttgatgggggtttcctcaatttatttacatgataagcaccaaattcaggaaggaaggaaaaagagagccgggggaaacaaaaattgggggcggccaaaaatggaaaaacgggcccaaagaccacaaaaaattgggtcttaaggtggaaaaacaaaggccgaaccgaagatcaaaccaaaatgggaattgccaaagggggagggggggcaagcacaaaaaaacgcgcaggggggcttgcgcaaacccggccggacttgcgggacacccaaaaacgccggggaaggagaagcggatgtaccgcggcgaaacgacgacagggaagagggggaagacgaggaggaatggactttcgccccgactggtctcacacccaaggcgacgttgcagaacgccgacacggacacccgcgccgc

SEQ ID NO: 424699 - DNA, 318 bp, Oryza sativa
ccaaaaaaaggggggcttttttatgcccccaacgtcacaaacagaacccaaacaaaaggggaaaaaaccccgggggaacccagggctaaaaccccccggaccaactaaaaataataagccctaccccccccagctcaaggccctatggggggggggccagggcccacccaacaccccaaaatattggtgaaagggggatacggggggggtaaaactatcttgggccccttaaacagggggggcagcggaaacaggagccccctttcaattaacttcccccaggccaacccccctcgggtttctaagggtgggggcccc

SEQ ID NO: 424700 - DNA, 425 bp, Oryza sativa
  unsure (1)..(425): unsure at all n locations
tttnttttttttctttttttttttttttttttttttgggtttttttttgtttttttttgttttttttttttttttttttttttttttttttaaaaaaaaagggctggggacccggaaataaaaatagggtcctttaaacacaacccgggttgttaaaggtcccaaaaacatattttccaaaacttttaaccgggggttttaaaggcccaaatattttcccaagggaacccgggggaattttggggggcccgggaaaaaaaaggccaaaaaaaaccccctttggggccagaaaaaaggccggggtccccccaaaagggtcattttttggggggtaaaaacacaaggaccaataaagggggggaaaaaaaaaaagaaaaagtggcgcgttccaaaaaaaaataacccccccccccccctgtgggttt

SEQ ID NO: 424701 - DNA, 449 bp, Oryza sativa
  unsure (1)..(449): unsure at all n locations
ctgccttaactccaaatccgatgtaaatttgccaaatttggtcgttaacagttgtaacataacatatgtttcatatcatgactgtcgtccagttacacaaggtaagcattcctcagaatgccattcacttggctggctacaaacattgttgcatacatcaagagatatgtcgacaagctacagtggtatctccagattagccacgattcaaaatacagaaaaaaagagcttctgagattgtattttagcaagtcgtaaacatatatacaatatacatggcaggcacttagactatgctactaactgtagtctgtatgtctggtcagatgttcttaaagggacatcagaatttttcctgtactcatgactaaccgtctggatgcaccccgaaccagccgncgacgttatccacaacatcatccgtctcactgggtcttcgtcatcatttc

SEQ ID NO: 424702 - DNA, 407 bp, Oryza sativa
tgtatatttttattttactttttttttttttgttcgggcaagttttgaagcgcttgccatgagggtcggtatagcgactgtacaatatcaatatggcagggtcttaatctcacccacatgatatgatggcatcgctctcacatgaagtagctcagtgcttaaaaattcctccaaccgaacttgtcatataggggggggccattgaagaagtttaaacaagcccacagggggagaggaaacgctaagcgcaaacctgctcatgggggggggagaaaaaatataatgtcagaggacgaatgtactcactaccatacaatgcagggttgaggcctgcctcccggctaagccacaggtctctcctgcgtttcctcctcaaggatttctcgaatggggtaatgagctgcggt

SEQ ID NO: 424703 - DNA, 441 bp, Oryza sativa
  unsure (1)..(441): unsure at all n locations
ttttnttttttttttttttttttttttttttttttttgggggtttttttttttttttttttgtttttttttttttttttttttttttttggggaaaaaaaaggaaaggggggcccttaaaaaggaaacagtggttccaattaacaaattattttgggggaatcgccccccgaaaaatttggaaggggaaataagaaaaaacggttaaaaaggggggggggaaaaattttagggaaagaaaaaaaaaaggctggggggggggaaaaaaaaaagggccggggggggcaaaataggaaacaaaaactgcccgggaacgggggtttcccgggttggaaactaaaagaattttaagttggaatggggaaacaaaactggggtaggaaaaaatcctcccaaaccggaaaaagggggggggcttttggaaaaaaagccccctttgggg

SEQ ID NO: 424704 - DNA, 367 bp, Oryza sativa
  unsure (1)..(367): unsure at all n locations
ttttntttttttcttttttttttttttttttttttttggtttttttttttttttttttttgtttttttaagcatcacagcctgaaaggttattccaccattcttcacatgcccattcatttgacatagttgcagagggcttaaaagggcccgaaaaccccacccaacgataaactgggggcttggctgcaaactggaaaaagctccattgcagcccaaagcaaacatttgtccatttttgacacaggagacgacaacctttcttcacaaaccatacacgatttaacatagttaacggggagcaacaacaggcgtacttaattactaggagcatctaccttatatcacaatagtagaggtaagatagg

SEQ ID NO: 424705 - DNA, 443 bp, Oryza sativa
  unsure (1)..(443): unsure at all n locations
agaataaacttgctactaaattaaagcggatcgtactacactactaatgagaccaaaaaccctgtccagtcttgagcacatgccaacaacaaaaaacaatgccttgcatgtggagatgtagatacacctatcctgcaaacataacactaacaactttcagagaaactgagcttggatggatcacatatgtaggcacctctggttcctagtacacaaaagggtcacggatagaataatctgatcctctctgaaagctccaaatcagaccaccttctgagtcatcgctcctatagacctgcattgaaagagatcttactggcccatctcacagatttgagggactntcgctgtccagagcgtatcaatggagtatgaagtgaatttgtggattggccaacaccacagccacattcttcaccatctgcgcattctgancgaagtac

SEQ ID NO: 424706 - DNA, 299 bp, Oryza sativa
aaaaatattaaggggggacatggctacaactgttgaaaaccaccgccctgctaaggtgctttttatgggatggtaactttgaaggggctaattaacaaatacaatcacttgtttgaagcaaatgatctgcaaactgaatcatgtcctcctgaaaaaataaaagggataaaaatgtccagttggtttcgaccctttttttatttattccaccctgtaatttaaacgggaaacacatttctccaaatccaaatttggaattaaggtaccgaacaatgaactgagaaaagtaaaatcgatca

SEQ ID NO: 424707 - DNA, 304 bp, Oryza sativa
actcacaaaagctgacaatttattaatagacaggaattcttggtagagtttatttacgtatatacaaaacatgtggaacaacaactgaataacacatttaaagaaactcagcttggtgtgatacatatcatgcattgttgcttctcagctttttcttaatcagtcttgcacctagcaatagtatatatgaactctgaagttcttaagccacagaatgtactggtgactttattctatgtctgaatgatatagctgccatcagagttcactgaaggacatcactgccccatctgttggccttggg

SEQ ID NO: 424708 - DNA, 381 bp, Oryza sativa
ggagataaatattcttccttgaagtatattggatcaaacaacaaagtttatgattgacaatcccataaataaacttacatggtgttctgaaatctactctaatcagagtaaatttcacaaaaaaccacattttgcggtcaaagttgcataaacctccggatattatgactcgaggcacataaccctatgctctataacctagaagtatcataaaatccatcctagttcaaatttcagctaattttaccatccttgacataataatgttcaaaacgttgactgattaaactggtcatcctgatcaagtaaccaacatttgaacaatcactagtggttatggcatgaaaaatgaagtgaatatgtgtaacaggttggtttttt

SEQ ID NO: 424709 - DNA, 339 bp, Oryza sativa
tttttttgcaggcaaaattgatctgatatacaatggagatggttgttttctatacaagggagcagatacaaaggggaggggattttttcctaaacaaggagataattacattgaacctccccggttgaaggttaacctcaacaacctaatatgctcaactcaggtgatcatcatgataactattccaacaccatctataatctgttacagccttacaggcaacttcagttcagaacaaactgcaggcagcaactcatagccatagcctcagcctataaggagtttctggggttaacaccagagagcagtgtaggcaaatgctctattaaagtctgtctg

SEQ ID NO: 424710 - DNA, 466 bp, Oryza sativa
  unsure (1)..(466): unsure at all n locations
tttntatantttcataatttattttatatatattttgggttttttttttttttttattgttgtttaatcaatgtgaaggggatttttttttaaaaaaaaaaataaaggacattgaaaaaaacgggataaggcaaaaaaaaaaaaaccaaataggcacaactaagaagaaaataataaaatctaaaagaacacaaaaaataaattgttaaaggaaaaaacgaaaattaaaaaaaaaacaaactaaaagaaccaacatgtaaccatagcctaacacaaataggaaataatgccttaacaccatatagcagagatgacaaatgatctaaataaggctttgctaaaaaaaacgggaacttacaagtgtatataccaagttgtaaaatgacaaaaaaaataggcaatacttaaaaaaatgaaaaaagtaaagataacaatttttttggtaagaaaaaaaaaaagataatta

SEQ ID NO: 424711 - DNA, 379 bp, Oryza sativa
caggcaatgatcattagctcgatttctcagttatttatcaccattcaataatcggcaataagcgggtaaccctgaaatcacaagcttacaggtaggtgcaaacctgccatcggaccaaaaactcatatatgaatagccacaacactctcatatctgagcagctcctctcgaacaccaacagctggggagtcaggggactagcagctcgttcgtcagaagtccaccaggaccaccgctgtggacgtcgccgccacctccgcctccacaggcggcggcgccggggcattggcgacacggcagttgcgtcgtatctctcccttctggggttctgcagctccccatcttgatcatcccttcgacgaaggccctgaagaaggcg

SEQ ID NO: 424712 - DNA, 473 bp, Oryza sativa
acccatagactcacccttggcaggtgatgcatcacagttttctttatgttacaccatatggaatgaggggatatacccaacttacatagtgatatgcacactgtaataatataatggtagagaaattttcccacgaacactgacaccacctgaaggtcgtcatttacaagcaggtgaagggtaagggaatagagagaaaaataatacaaaggataaatagccagagagatcccagagatctctgttattaactgtcaagtatctcaaactctgaatcctcaatgacatcccatgattccttcttggatagtgaagcaggtggagttggttgtggaggccggaggctatagtcagtagaagatgcaggtcttcttattactgaatcccgccggactgaggagctagcatagtggaggctccttcgatctgacagaagagaatccatgtatttgtccatgacaacaatatgggca

SEQ ID NO: 424713 - DNA, 285 bp, Oryza sativa
acaaaaagaattgcttctatttcctcctgccattggcattgatgttggtaagagtgggcaatacatagttcaaaaagaaaaaaaaaagaaagaatggataatacatcggtgatctacgagactacatacaacaacaaagggctcttctatattgttctacgatgggcccaagctttgcttcctaccaggggaaagctttcaacactaaattgatttgagggcatgtataaacaaaaacctatgctcccgtgagatcatgcctgcaggactgcaacaatcgccatt

SEQ ID NO: 424714 - DNA, 413 bp, Oryza sativa
  unsure (1)..(413): unsure at all n locations
ttnatanttttctttttttttttttttttttttttggggttttttttttttttttgggcggaaaacctccattttgtttttatcttttttgccccccaatgaaaaaaaaagggggccggggcaataggccaaaaacccggccaaaaaaaacaccacgcggggggggcacaaaaaaccggccctaaagggaaccaaaccccaccggggggcacaaaaaatggggggaaaaaaggccccaaaaaccggggctggggacaatccccccaaattctggctaaaaaaaaccagggtaaaaaaaaggggggggggggcaaaacaccccaagaaaccctttggggacccgaggaagatggggggtaaaaccccggaacaaacctccccaaccaaggggccaaaacaaagaacaaaagggg

SEQ ID NO: 424715 - DNA, 339 bp, Oryza sativa
acggccagaaactgaaacaattcattggatcacacatatgtaccaaaatgtagtagctaggggcggcagcccacaatagtgccaggcgtcaaggtatcaagctgaacatccatccccaagaatacagcaaaagaaaaaaaaagaagagaaaagaatggctacgtaggagtggtaaaataaaaagaataactatccgtagctcaacacaaattctcaaaagctctagccccgccatgcttctgctacacaggagaggtgaagactacacttagatcatatgatcagagaagcgcatagcaccagcagcgcgacgatgatcgaggcgtcggtccgcatttt

SEQ ID NO: 424716 - DNA, 392 bp, Oryza sativa
  unsure (1)..(392): unsure at all n locations
ttnttttttacacaaagtttcttttttaattttttggggtttttttattttttttttgggggtaacccaaaaacaaaattacaacactagtacaaaacaaaaagcncccccgcggcaaaggggcaagcacacaagaatccaccaacacgcaaaccaggggggggagcaaagatcagggggggggggggggggaaccaccacgaaaaggggtagacggcgggggcagggaaacaaaagacggagcccccccgggaccgaaaccagcgggacagggggagccaaaggcgggaccccccccaacaggagagcacaccgcccgccaaaacaaaaacaaaggggggcaggaacggcagccgccccacaaggaaacacaagggacgaccccaaggccc

SEQ ID NO: 424717 - DNA, 460 bp, Oryza sativa
attatccttattttttttatttatttctggggtttttttaaattactgtggggggccaaaccaatttgacgcgagaaaacttacctactggcaacaacagaagctccattttggttcctccaaacaaaatggaccccaaaaacaaactagccttgctaaaaaaaaattcaaaaaaggggactgcccccggaaaatccgaaaaacaaacagatgggtttttttggaagtgaggtcaaaactgattcccccctgtttaaaccccgcaaaaaaagctcgcccaatttataggaaaggatgcttcccagttaaagaaagatcccccaccccccccccaaacaattaatgttatgtatggaccacctttaaattataaccataaggggatgtcttgcattcgccttcaagagcttttttccatattaccccagcaaaaaaaaaaaattgaggcccactggataaa

SEQ ID NO: 424718 - DNA, 478 bp, Oryza sativa
tttttcttctttttttttttttttgtattttttcctgtgtttatttttttttactgtaagggtacataccattacggagagttaatactcactcacgggggacaggaggagccacactctaaaaacaggggacaaaattgctccgcagaacaaactcagggtacaaaaaaaacatccaacacacaagcacggacgaacgcatgtggattctacaaacgccgtagaggctcggaagggaggtgcaaaacttatctctcaactgccttatgggctgagattaacagaatgccacgaacaaccagcgggtgcagcacaactattgctagaccccttaccttggaattgcgcgattcaaggaatgctgcgaccacctagcaactgagcccatcagcccatgtcttgcattggccttcaagagctaaattccatccgctggcaccaaatgctggaaacccaaggataagtctcctgaccagac

SEQ ID NO: 424719 - DNA, 698 bp, Oryza sativa
aaccaaacactatccaaaaacccccaaaaaaacacaaaccacaaacacaacacacaacccaaccaaacacagaccccaaaagacaaccacaaaaaaccaccaaaccccaacacaactaacgacacccccccctgcaaacaccaaaaatccccaccatcaccaaaaagtactcccccccaccaacagcccaaataaacccccaccccaattcccccccactccacacacaaaaaacaccccaacctaaccccaaaccctccccccccccaaaaactcccaacatccccccaaaaaaccccacacaccaaacaaagccaaaacccccccaaaaaacacctcccaagaaaacacccccaaaaaaccccaccaacccccccaaaaaaaaccaccccaacaaacctaaaacccccttacccctaacaaaaaaccaacccaaaaacccaacacccctaccacccaaaaaaaaaccaaaaacccacccaacaccccaacaacaaaaccccaacaggccccccaacaaaccccaactaaaccaaacccaccccaaaccccaaaacacacaccaacccccacaaaacaaaccaaacaaaccccccaataccaaaaacccaacccccccccaccaccccgacacacaaacaaccaacaaaacccacacacctcgtccacaaccccacccttaacaaaccccccccccc

SEQ ID NO: 424720 - DNA, 393 bp, Oryza sativa
  unsure (1)..(393): unsure at all n locations
aaacngaaatgaagctgaaatcatataggacagatgttatttcatatttcctgcaagacgcatctcccattggcaaaatgcttcttgcagcaacgccactctgtcacgtacaaaatgcatggggattccagcgaacgcaagaacaacgagagggcctacatgtccttactacacagagcacgcggccaccgggtcaaaccatcgccgtcaccggctgcgccggcggatggtttcgaggagcctgcttgaacgcctctgttgtgccaatacaggagcccctgctgccatgctcgtggaccagctcggcgggaatgagtccatcctcatccgggtagggtgctcgccgacacgccttcgttggaacagcacctactccacgttacggtgcttcag

SEQ ID NO: 424721 - DNA, 472 bp, Oryza sativa
cttatccctttttttttttttttttttttggggttttttttaatttttttttggttttttccccttttttttttttttttttttttttttttttttttttctcttttttttttggggggtgggggggaaaaccctttttttttttttagggcccccctaaaaccccctttttccagggcccggccccccggaccatttaaaaaaacccttggggaaaaaaaatttgacctggggaaaaaggggctttaaaaaaaaaattcccccttttggggggaaaccccttcaccctttttttttacccccctccccggggggggtaaaaaccccccccccctaaaattttccccggggggggccccccgggggggaaccccccttttaaacacgcccccctttttggggaaaaaacccaccccccccggggcctaaaaaaaaggggggtttttcggggaattcccccctcccaaaaggg

SEQ ID NO: 424722 - DNA, 360 bp, Oryza sativa
ctagccataacggacgcaccacaccaatggctacgtcggttcgaccaactatgcacaatgtcaaaaacaaccaatcatggcaccctacgccagggcaagaaccatagccacactcatcaaccttcaactcacaattgcatcatagggcacctagcaggccggaatgagaagggtcatttgccaaatggccaccacaagtgagaatccggcccaccctgatggttgccccactttcttcgctgctacagacctgaacctctgggcggaactcccctgagcagtgggcctgtcgatctgcgcggcaaaactccctggagatgtcctgaaaccatctggccccaaaccccaaccatctggtga

SEQ ID NO: 424723 - DNA, 391 bp, Oryza sativa
ggggccccccaaaaaaaaaattaaaccttggggggggaaaatttcccccggggaaaaaaaaatttccctaagggggggcccccctagggaacaaccgggggtccccccaagggggggggggttttcccgggtaatttaataaactggggggtccaccaaagcccgccccccttttaagttaacgggagcccctccctagggaaaaaagggggggaatggtccaaaaaaaccggttgggggggtttttgttaacagcaaaacacaccttgccctaaaaaagggggcccaataaaaaaaaaacccgggccggggaaacccccgtaggattcccctgaacttgggttttttggggggcccccccttaaagctctcgccccccggggggggcggg

SEQ ID NO: 424724 - DNA, 207 bp, Oryza sativa
tttttctccttacccattttttttttttttttttttgggttttttttttattttttttttgggttttccaaagggggaaaggggggggcaaaccaaacggaggagggacagcggggccaacaggcccggcaaccacaaattcatagacatgcgccctcaaaccaccaaaacaaaaagggcgggcccggaaacaggagcgacaagaca

SEQ ID NO: 424725 - DNA, 369 bp, Oryza sativa
  unsure (1)..(369): unsure at all n locations
ccatttcctcntaaccccggcaaacaaaaaccanagagtgtggacttttaaagaaaacgacggggaaccccccacaccacccaaaaaaaagccaccaacaaacgacaggaaaacaccaacaacaaaacgaaacacaagcaacaaaaaaaccacccgccggggaaagagaaaaccaagaacaccagacccccaaccacaagaattttttagagttttaaaaaaaacatttaaaaaatccctttttttttgataatggggaaacaactttccttaattgattacccaacctttacccaccgcaaatttttttaaaacattccaactctttatctaacccctgatacatccctcttatacaccaaactccac

SEQ ID NO: 424726 - DNA, 490 bp, Oryza sativa
  unsure (1)..(490): unsure at all n locations
aagcnccntaaagttaaatttcttcctgatagatagcattgtacatactgtacgtaatatcatttacatattgagagtatacagagtggcaacacaaagcaaatggaaactcgagcgacagaagctggcaagctgcccttgtccctgcggaggaagagcgcctcataaaccggagaattgatggctactatcagtacacacagaacagcctggagaaacaaagtttccaaaccccctgggccttcttgtaacaaaactctactaattcctaacaccatgcatgccaagttgagcagcgcaactgtcgtaaggattacaaacatcgccgagaaggatccgaattccatcatccccttcttgtacctctccaaggcctgcaagatcagtgaccttcactgtcaggttgaatccagactcagagatgcccaatattcttgcgaatgtgtcgatggttgccaggaggtatgaggtggatccttctaatgagcca

SEQ ID NO: 424727 - DNA, 391 bp, Oryza sativa
ttttcctccttttcttttttttttttttctttttttggtgactttttaataaaatttacgggtttttcccaatatttttttcttggtgggaccaacccacacaaacacatattgagggttgcaaaaaacaaacatgccatctgcaagattggaagggaaaaggaacacaggggaagaccaaccacaatactctcccaagggctgtcctaacaaccaaaaaaaggcccaaagaaagctgctatcatgcgggaccaaccaactaaatggaaaacgcaaacgcaccatatcttaaaaccttgccacacccgcacgaacaaaaagctaggctgcgagtaaaactcacactgtgttctaaagcatacaccaaccaggtttaacctgaaaatggaac

SEQ ID NO: 424728 - DNA, 340 bp, Oryza sativa
ggggggaaaaaaaacccccccttttggttttttttttcaaaaaaaaaaacttgtggttgtgcaaaatttacccaaaaaaaccaaattccgggggaattttttggggggggttttaaaaaaggaagcccaaaaacccctttttttttggggtttggggaaaaaatttttaaaaatttttttccaacaacaaaagggcgatgggttttttgggaaatgggattttctggcgggccctctttttgaaaacgcggggggggacccccggggcggggaaaatttttctgggggcaccaaagagctccctttaagggggagttcccccgcaaacccggaagaaggg

SEQ ID NO: 424729 - DNA, 272 bp, Oryza sativa
  unsure (1)..(272): unsure at all n locations
aaaaaaaaaaaaaacanggaaacctttaaaaaaaaattggggaaaaacccccccacncacaaattcattttaacaccaaccaaacacaccaaagaacccccccaaaccaaacccacacaccaaaccacaacccaaaaaagccaacgcacccccacaaaccgaagaacccacacaccccaaaataacccacaaaacaacccgaagaaacaaagttcccacaaccctacaacccccgtggaaacaaaactctaccaattcctaacaccatgcat

SEQ ID NO: 424730 - DNA, 235 bp, Oryza sativa
  unsure (1)..(235): unsure at all n locations
gggggnnnnttnnnnnnnnnnnnnggggaataaatatacactttttttagggggacgcatgatttacattactcctaggtgacagagatggccccctaattgaagaaacccatttcggtggaaacaaatccaatggaacatttcccttgtttatttggggggttttagactttgtttacaagggccttgaaccagggggataaacatttttttttcgagtttcccaggttggttg

SEQ ID NO: 424731 - DNA, 449 bp, Oryza sativa
  unsure (1)..(449): unsure at all n locations
ttttttttttttttgggtttttttttttttttttttgggnaaaaacaaaacaaggcggccattaaataatcccgccacatgctttttaagggtttacatctggggtaatcgtagggtttcacaaacaggcctgatcctccatggactagtttttttatgaacaactttttgccttttaaagagggaaaacaggcggttggttgcccaagaccagccttttttagattttgaacagtggcaggttccgaagtttttttcccttattccgagggcaacttcaacagggccgggttgtttgttttacatgccgggggtggccactttgggtgcaaacacaactgggggggaagcctttgggccctccgttaattttttgaatgcatttccataggggccatggttttaataactgtaaacaaaagggccgccaaatgtttgaagagatctcg

SEQ ID NO: 424732 - DNA, 458 bp, Oryza sativa
tttattttttttttttctttaccatttttatttttttttttttttggggtttttttcagacacaatgggggttaaaccggggattgggcaaacagcttaccagaggggaaaacagggcacagggatatagcgcaatatcccatgtagtaaaaaagaaacatttgagcaatggaatccccatggggctacaagtttggggggctacaactacccagtggtcaaccaagttcattagaacaaatggccaaccactttagcagaagcccttaggggccaaaatgttgggaccgcattagggattctaaatcaggccctggagctgcaaatcagggtagggcttctgggtgaagatatttccctcctgatcttcggactttttttctaggactggccgccacttgttcagcccttgtggttgttgaattttttcccaaagttcttttgcctcctggatggat

SEQ ID NO: 424733 - DNA, 508 bp, Oryza sativa
  unsure (1)..(508): unsure at all n locations
agtatcgaaatatcttttcagcatgaatgaagaaataaatgtgacaaacagtaagatggaatacatgagagatcgtgcatgaaacccagcaggtttccccacactatgtgctgcagagctttgttttactatggcgtcctccctgatggataggaaactaaaggaaagggaaggaaaaggggatttacaaatgccagtcatccatccattggttagcaagccatgttcatttgctgctgttcccgttgcactggtgtaccacaccattgctgggtgtattaccatttgcatagatcccattgctgctgccaacatccttgcgcttcagattggccttctttaaaccccatatacaattgtgtgatcatcacttgcagatgcagncatgtgcggattcgcaggattccagctcacacagttgaccgtgccggtgtgaccaggcagagtttcaatagatctccagtagctctatgccatatatagatctgaagtaggaaaattattccag

SEQ ID NO: 424734 - DNA, 417 bp, Oryza sativa
ggcagcaaaaaaatagaaaactcttttttttttcaatttagcattgttcaggttgcctcaacttattccttattccttgtcctggttctacagtgaaactctcatcaggtcagtattcacctttccaatttatgaaagctgttaagaaaaaaagtttattcaagggaaaactacctatacttgcttataattaaaatttgccttccttattttagcacaacaaatcatatccctaatttttttttctggcatggataattgcaatcataccatagttctaactctccttgtcctcttccttcgctactcgaatcatgctcaacgccgatatatttgtcccgaacaacttatcccttacagccatgtactccggccatgtcacggcctgatacacggccttgctctccggcgaccccg

SEQ ID NO: 424735 - DNA, 423 bp, Oryza sativa
  unsure (1)..(423): unsure at all n locations
aaaaaaaaaaaaaaaaaanatgggacctttaaaaaaatttggggaaaaccccccaaaantaaacaaacatttaaccccaaaaaattacacccaaaatatccccttttcccaaccccccaacaaaaattcctctcccaaaaaaccataaaccaatcccattcaaaacaccccccccaaaacaaattcttaatttacccaacccccctaacaaccggcccacaaggcccacatgacggggtagctcggcagaaacccaaacccaaacagcccggacgccaacccgccgacgtcgcgctgcaaaaaaaaaaagccgaggtaaccccactccgccccccacgagttctaaaaaatccaatcctttttgccgcctttcgccgagccgccgccctcccgaaataaaaaaaaactcgccgtagcccacca

SEQ ID NO: 424736 - DNA, 272 bp, Oryza sativa
ccaggaaaacttccccgtttataacggggggggggaaaaaaattgggggccatcccgccaccaaaacccaattttggccaaaaaatttgggggggtggcccctaaaaaaacatcctgggggggcgggggggcccacccccaccctttttttttgacccaaccccccccaaaggccgggcaaaaacaaccccctaaaaaaaccttgggtttatgtaagctggggttcccatttttttaaaggggccgttttttgacccctttaaaaaaaggaa

SEQ ID NO: 424737 - DNA, 420 bp, Oryza sativa
tttttatcttttttttttttttttttttttttttttttggttttttttttttttggggggctttttttttttttttttttttttatatttttttttttaggagaccaaaccgagtttatagaccgaactgaaacttgaatatacaatttgccacaacccccaactcaagcccctatgacggggatccatatgtccaaaaattttgccccccgaaaaaacgacccaatctccctacaaggaaagccagctagccgctaactcaagtcatggagagctgccaaaaaagcggccaacctaacatggcaacccccagacaagaacttgataccaatgggccccctggcacccatgagcctcaccaaggaccgccagaaccagccgaagccggaagcccaaaaaaaccccgaatccagccccagc

SEQ ID NO: 424738 - DNA, 555 bp, Oryza sativa
  unsure (1)..(555): unsure at all n locations
ttttttttattatcctttttttttttttttttttttttgtgtttttttttttttattttggggtatttacattattttttgtttaaaaaatatgtatcaagatttttaataaaaaaaccaaggggaaccatggtcccagccccagnccaaaaaaaaaaaagggggaaaaaaaaaaaaaaaaaaaagcgggaaaaaaaaacaagagggggaaaaaaaccccggggcaaaaaaaaaaaaaaaaggggaaaaaaaaaaacggggtgtcaaaaaagggggggggggatcggcccccacaaaaaaaaaaaaaaaaggggggcgggaaaacgggggaagagaggcagccccccccggggcaaaaaaaaaaaaaaaaagccccccaaagggggggcccaaaaaaaaaacgaggggagggacaaaaaacccagacaaaagaaggagggggaaaaaaaaaaaaaacccccattttagctcaagccaccgccggctgaaaaaaaaagtgttggaagggcgggggggggggcccaagatttaagaaaaagagctttcccacccccc

SEQ ID NO: 424739 - DNA, 350 bp, Oryza sativa
  unsure (1)..(350): unsure at all n locations
annngnnnnnnaagagctcacacattggagggattcattcagtcatcgggtggaaaaaggaagcataatattacatctcccatcttacatgtcctcaccaaaagagagaaaagaagaagaagaagaagaagaagaagaagaagacgaagaagaagaagaagaagagagagaacaagcgagacatcggttgacgcgacgcgtgccgcgcttaaccacgaaaattaaccggccatacacatgacgatttagccggaagtactaagcacggcgcccctgtgtgtgcgatcgatgctgcatcaggcgccgatcttgtagctgcccatgtcctccttgatcatctccagctcctg

SEQ ID NO: 424740 - DNA, 276 bp, Oryza sativa
ggcggaaagcatagggggaaggtaaaacacatatggggggagaccctatcaactcagaataatgcataggaacacttgatcaaacctgtaaccagcgcactgcggttcgaacgtcctatgataccggatcagaagagcaccaccactcgcggctacgtggagggctacaaaatatcaatttccagggccccggtgggctgcaccacataggcgaaagcgagttctgaaaccgcgtagggcacccaggcaagaggcaaacttgggacttatcacgtc

SEQ ID NO: 424741 - DNA, 404 bp, Oryza sativa
gaccctatagagcgcgcgcccttactttttttttctcctaaattcaaaacccacgatttatcagggggggaattttaagaccacaaacgggggagaccccaaaaggcaagaaaagagaaagggcccagccgaaacaaccttgcgccagttacgcccatgctagggcactagaataccccggcagagagcccacccacgcgcgtgccccggaagggaaacgggttgagaaggaccgatcatcctctacggggggctgtacaggcaacagaacatcttaagaactcgcgcggtgcccccgcatgagctatgttaccaactcaacggaacaacaattgtggaatcgaaagaagcggcggtcttttaaacaaggccgctggaccccattccacgctgcaagaatgtgg

SEQ ID NO: 424742 - DNA, 400 bp, Oryza sativa
tttttctccttttccttttttttttttttttttttttgggtttttttttaatttttttttgggtttaccccccccttttgcttgttcaaaaaaaaaacacaacacccttttttattgatccggtttaaaacccgcccaaaaatacaccctcccggaaaaaatctaaccttttttccaatattaggtcaaccaaacacgggggcccaaccaaaccctaccttttttcgggaccaggaccgccctttacaggcccggggacacacagacacactttttgggaaagacccccatccttataaacccaggcagcttaacctaaagcccaaaccccccatgggaactcgggcggggcgggcatcacttgccggggacaaaggtccaggctactgcccacatcctg

SEQ ID NO: 424743 - DNA, 355 bp, Oryza sativa
caaccaactttttttttgcttatgggggttttttttccatttacctttgtttttttttttttttttttttccctttcctgccgccccaaagggggggcttaaaataaatgggttggcacactgcctccctttttttcccaaggaccccatctttcaaccttttaaaaaccccgcgccctttttttcgcgggcccgccctttacccctcctccccccccgttaccccaaatataaaaggtcccccagcaaggaatcgccctgtctcccacggggtcattaggagcccccacaactgatgttcccgggggagggggccccaaaacatctctgcccaataatcactcgggatccccca

SEQ ID NO: 424744 - DNA, 405 bp, Oryza sativa
  unsure (1)..(405): unsure at all n locations
ctaannnacacagcacaatacttttattatatatgagctatcaaggaacagttacaatcctagatggtttcaaacttccatccttatctatgatcccatttacatgaagagtgccacaaaagcatcaacatcaaaacagaagagggtaaacatatttacaaaaacgcacagctggtcaagttgatagggcttgcatgcttttagtttacttatttatgtccaccaaactgacctggaggcgaaatacctcatgaacagcaccacgcttaagaatggctagaattgttgccccctctgacatggtgagctcactcaatgaaatttcatgagactcggattcatcaggcaaccggaaaccgtagaaccatctaccaggcttgtataagctcacacacacttttcttt

SEQ ID NO: 424745 - DNA, 339 bp, Oryza sativa
  unsure (1)..(339): unsure at all n locations
ttttntttatatatattttattcattttaccaatcagggggttttttaagttttttataagggaaacccacattttttttggtcaccggccagtgaaacctccaaaacaccccacaagaaaaagagaaaacccacagagacaacaacctaaacctggaggcctaagtgagaaaaactaaaactacggggcggggggggaaaacgcctaggccaccactgaggggggggaaagatagaagagatgcacccgcagcaaaaaaagggctccccaaggaccaatggaaacggaaactccaaacgacgccaccaaaaaaagaaaaccgccaggccgcccttaaa

SEQ ID NO: 424746 - DNA, 149 bp, Oryza sativa
caagcaaaaaatctaacaggtgtatttaggcagatccacctctctacatcatcatagtcatagtacaagaactcgacgaattcagaagaaacattggcagctacacctagagaaaaaaaaaaaaaaaaaaaaggggcgccgctcgcgat

SEQ ID NO: 424747 - DNA, 378 bp, Oryza sativa
ggcaaccaagggcacattttggttaaacaaatggcaaggttaaatccacccttttcttgtctgcgcaaagtaacagaagaaactaggcatggggatttttttacaacactccgcccggtcactggagcaactacaagattgggagagtttaaaataaaacttttctaaagaaacaatcaccccccaccatatataggcatttggttatgagatggcccggcggaacattttagaacatagcccaccaactttttttggtccccacatgtacttcaggggcacttggggatctacagaacaggtgccttctaccactcctagcagggtttgtaaaggctaaaactagggggaaaccggtaaggcttacgactggggcag

SEQ ID NO: 424748 - DNA, 386 bp, Oryza sativa
ctggggttccccccagccccccaggagtcccacaccaaagagacagccaccaggaaaaaaacccccaagccccggcgagggcccccaaaaagaccccccacagccccccccaaaaccccccaaccggaaacaacccccgggaaaaaaacaaaaaccccgccgggaaaaggggccagaaaaacaacccccaaaaaacctggggggggggcggggaaaaacccccccgggggaaagggcaaaaccaccccaaaaaaaaaagcccccccggggagccccccaggaagaccccccagcgctcctttccccaaaagggggggaaaaaccgcccccccccgcctgggcgcggggggggggacaccccccagggggacaaacaacgggagacc

SEQ ID NO: 424749 - DNA, 458 bp, Oryza sativa
aaacaagccaatatccttgtattaattatggagagtacttccaatgtccaaacaggtaaaatctaacttataaggtaaaacaaaatgggccagctataacaactagatgcccacttacaagtaatcctcgtgaaatccaaccaccatcacccaagaactgatcctcacaaaggaatgtcgaagaactatcaaaaagtaatcgcccagacaacagaccacttttaagcgacaagcttcagtataattggcaggagggaacacaagaagcaagatagcactactgtgcagacaaaccctcataaggtgctaacactaacaacttttgtaagaagtcaaaaggtgtgtgtatacagaactagctgcaaaacgcggcactcgtttacattctgaaattctgcctcgtcttgatcatacgcttcaatgcggcaagccagaagttgcactcgtcccagtcgctc

SEQ ID NO: 424750 - DNA, 338 bp, Oryza sativa
  unsure (1)..(338): unsure at all n locations
cgttaatagaacgtttggaatttcactgaaaatttaccaggaaacaaatgatagagcaaagaaaaggagttgcaaacctgcaattcgacgaaatttcataccgaaaaccatctataacaaaacaatccctaaaatagcagctaaaaaaagaaagagtaggtgcaatttaccacctgaattacctcagctttgctcgcgcgagctctgtggccaggcggtggccggtgcgccggtgcgccggtgctcaccggcggcggcgatgagagagacaaggcggttgggnctgtccaccgccagagggaggagacgccacgtgggcggagacagtggaaatgggc

SEQ ID NO: 424751 - DNA, 377 bp, Oryza sativa
  unsure (1)..(377): unsure at all n locations
ccttttcctccaaaaccgncaacatttgatcaattttttggtgattttttaaatacattgccggattaccacccttttattataatagttaatataagcagccaaaacatccaggcaggaaaaaaaaaaggagataaatctcatatatgaacccaatagggcaataacacatttatcaaaactactacacgctgatgaaaaacgcatgtgccccccccgatgacttttaacctcgtacagaagcaccacctgcaataagagattctttgttaggggggaaaaaaacggacttccgagagcaaagacaccatcaataattaccaccaggcggggaccaaccccccctggggatcatacaattgaccttaccgataaac

SEQ ID NO: 424752 - DNA, 417 bp, Oryza sativa
atcaaatatctcctccatttgaccaatcagtggacgagtcaagctatacataaccccaccacactcttttttttctctctgttcatttcagtttccattacatccaaaaagaaaaagaaaaactctctgaatctcatatctgaacctgtaagcttcaatttacatctatcagaactactatacggtggtgtaaaacgcatgtgcctctcctgatatcttttttcgctcggagagttgcacctgctgcaataagagaatctcgcaaaggaggaatggaaatggagtcggtgatcgatgccaccatcagtccatcaccaccaggctgccattattcttttcttgtgatcttcaccattgccctttctgtataaacttgtggcaatggccgaggaagatgatgcatgacggcctggctta

SEQ ID NO: 424753 - DNA, 83 bp, Oryza sativa
tttttaaggacagagagagagctaaagagggggagcttaaggactcagcagggcgggaggctgttttataccaccaacttctt

SEQ ID NO: 424754 - DNA, 246 bp, Oryza sativa
tatgaaatcaagcaagcaagaagagacgagacgagggagagaaggagaagagggggccggccgcgggcgtcgtcgtgttcctccccccctctctctcctctcctctcctctcgatctgcatccttccttccatccattcctccccgcacccttcgcattgctctcgtcgtctcgattcggtcgaggatctccaggaaaagaggaggaagcgatatgggttgcttttcatgctgcggagcggctgat

SEQ ID NO: 424755 - DNA, 490 bp, Oryza sativa
ttcttcaacctccccttccccttctccttcaccttcccgccgtcttcgccgccctcgttcctctcttctaccaccacctcctcctccgccgtcaacgccgctgagatgggtcgcagtatgcttcccgagcagcaggaggacgtatcgaggaagagcaagaaggcgaagaagagcaagaaagacaagaagcggaagctggaggcggaggccgaggtggtggtggtggaggcggctgcggccacgtccacggatgaagcgacgaagagcagcaagaagaagagggccaagggcgatctgggccaaggagaggaggcggagaacggcggtgggaaggtcgtggccgtgaccgggaagggctccgcggacgccaagtacgccccgctgtcatctttcgccgccaccgcgcttcctccccaggtgctcgactgctgcaaggggttcgagcgtccgtcgcccatccaagcgtacgcctggccttaccttctcgacg

SEQ ID NO: 424756 - DNA, 313 bp, Oryza sativa
ttcttcgcttcgccgctgctgctgctgggggctctcttgggatgagagccccctcctctccatggcctcctccctgctcctgactggcgctaccttcggcgccaccaccaagcacatcgccgtcctccacccgcccgtcgcatccgcctgcaggccccacccgcccaggctgatcaggtgcggcgccgccgccgtcccggacgacaagctcttccgttggttctacctggggcaggccgccgccgggtcgccgggggggcccgcggacacggccaatgatggatgggcccctttccttgacgagatcaggggc

SEQ ID NO: 424757 - DNA, 257 bp, Oryza sativa
ttgtcggggttttagcgagcgcgtgggaggccggaggcgacgacgacgaccgcgccgccgtcggagaagaaggccgcggaagcaccagtaccagcacccgtatatgtcttctagccccttctccgatctggtggtagtcgtgctcctcgtctgcgccgtcgtcgccgcagccgtcctcctccccctcgtctgcgcccgccgatctatgcaccagaggctccacggttggaacaagtccacgtcgattctcagggacg

SEQ ID NO: 424758 - DNA, 253 bp, Oryza sativa
tttgaaaggagagagagagagtgagagagggagagagaatggccgcggcggcgcgggaggaggaggaggcgtcgacggcggcgaggagccggcaggagagcgagggggaggaggaggaggtgatggcggtgctggacttcgacatgctgtgcgcctcggtggcgctggcggcggataggaggaaggattcggccgcggtggcggcggctcacggtggaggccggtggtggaggaggtggacgaggaggtggca

SEQ ID NO: 424759 - DNA, 494 bp, Oryza sativa
ttgtcatcttccatataattcagtatcttgccttgctgccttttcaatggcaaaatttattccatgtccatgaattttaaggtttttgcattgtcttaaattacaaatgatgcatatgtttagtttcccatgaaaatgttgttcattcatggattaacaatatggaacatggtgtgcatgatcatcaatgttaactatgaatgaagttagaataaatgatttgactctgcaatggatagcttttgaggatttgtgagatatattcacgttgacataaaaagatagtttagtctcggtggcttgatagttcttcatagttcgtctagaagcagaacttacctttgtgtatgaagtgtgggttggactttagtacttgatcggtaaaccttggtgctgcacatgatcaatgaacaatactgtggtactagtttcatctttagtcggtagtctttgagttttggtactgttactgttgatgagatctgatatgtttc

SEQ ID NO: 424760 - DNA, 222 bp, Oryza sativa
atctcttgtgctgaaaagcttgatggtttaatggttgttttttgtgagcacctcaagtcatgtcaaactcctgggggtactaatttcattacagtgttgcttctcagcttgattagcaaaaggagttcaatttgaggaagggcaaataattacattatgatttgtttcttctgtgtttcctgtcattattgtatggccttatggctatctattcgtataatg

SEQ ID NO: 424761 - DNA, 429 bp, Oryza sativa
tgttttggcgagcccgcagtgctgcgcgaacccaccgacgctgaacccggccggcggggaggggaaggtggtggagagcttcggcgggatcaaggcgtacgtcgccggcgccgcggagtccaaggccgccgtcgtcctcatctccgatgtcttcgggtttgaagcgccgaacctgaggtacagatctttgtgttatctgatagtactagtttttcgattccacctgtacaggatatgccactgttctgatatattttgggggaaatggattatcgattcccacctatacaggatatgccactgttcctatatagtttgggaaatgaattattcattattgcgtttgttagaaacttcgaaggtcttccgggcactttggggctgactgatgccataccgtgtgctgggatttttacatggttaataagt

SEQ ID NO: 424762 - DNA, 410 bp, Oryza sativa
aatcggccacctcatcgtagacccaatcggcggcgccgatggcgcctccgactactccctcccgcgccgccgccctccggttgtcttcctcgcggttgcggcttggcggctacatggggaagaagcgcggtggcacatggccatgggctcgcaggcgccgcccagggccgggaaccaggccgtgtcgctccgagaggagagctccgggaagacgcgcgccgactagtacttcatgcagagggagcgcaccctcgcacgtgacgcggcgtgggcgggcggggaggccagggctgggccccctcggcgccctggtggggcgacgcctgattggccctcccaaggtggccgtaattgcttacacgggagggttccttcaatggctctacttccaagattcctggaccacaggc

SEQ ID NO: 424763 - DNA, 464 bp, Oryza sativa
ccatgtgattttgctaaaattatgcttctttacttggatattttaatctttgcagttttggtgtgttttatgaagcaaggtcgaatacaagaatcaataggatgaaaattatcaatgcagtatccaaatctgttcctcaacctcacaaggttgaccttaacagtccaaacaggattattattgtgcagattgagaagaacctattggaacaggtgtttattcaaatgaatacaacatgtttggaatttagagtttgatttctggcaaacaatttatatagctccaaggcctgatccatgactcaagcacatgggcggttaaagctttgtaacttcagaatttaatgctattatatgtatggttggagtgatcgagaggtacacagtgctcgcaaagttcaatctaaagcagctgacctcaccaccgcagaagcagctaatgggccaacttgaattagattcggc

SEQ ID NO: 424764 - DNA, 493 bp, Oryza sativa
tgcccacagcgacccagacccactcgccgtcgccgccgccgcctccgcctactccctcccgcgccgccgccctccggttgtcttcctcgcggttgcggcttggcggctacatggggaagaagcgcggtggccatggccatgccccggcggcgccgcccagggccgggaaccaggccgtgtcgctccgcgaggagagctccgggaagacgcgcgccgacgcggcctccctgctgagggtccagcacctgcagcggctggcggcgtgggcgggcggggaggccagggtgggccccctcggcgccctgctggggcgacgcctcgccgccaacgccgaggcggccgggatacctctggccgcctccaccttcctatgccagaggtgtgaaacagtcttacagccaggcttcaactgcaccatccgcataaagaacaacacaagaaatgccaagcgacgcaagatgttaaacacttgccagaacagcatttcctacct

SEQ ID NO: 424765 - DNA, 431 bp, Oryza sativa
tctcttagaaaatgtcatttgctagggaacaggcctcttctgaaaattatctttcaaggaatgaagctgaagctgcatttgttaaacagcatggaacatcaaatgtgcaaggtgataatactgtcaggacagagcaaaatggaggtgaaaattctcaatcaggatacagccaacaggatgataatgttggatttcaaacagcgacaaccagtaatctttattcttcaaacttatgccaaaaccagaaagcaaattctgaagtactacacggagtttcttccaacttgatagagaattctaaagatgacaaaaagacttcccccaaagttccagtcgatggatcaaaagcaaagaggccaagagttggggctggtaaaaagaaaacatatgattgggatatgttgagaaaagaagttctttacagtcatggt

SEQ ID NO: 424766 - DNA, 215 bp, Oryza sativa
ttcttcgacgatgtatttgtccttagtcattccgctggatctctgataacttggtactaaagtgcgaagacttctttagggcactggattgatttatgcggaaatgtagaatccgaactctgtactcccgccaacctctagaggaaaacttgatttcggcatattgcttgttcacattactccttgctgagtagattgcatatgaattatcgtgt

SEQ ID NO: 424767 - DNA, 339 bp, Oryza sativa
tttttcgacgccggcgatactggacctgccgggggcgctgatgctgcacatcctgagcttcctgacggacgtgaggtctcggcacagggtggcgctggcgtgcgggaggatgcgggcggtggaccggccaacaaggcccgagctctcggtgtggggcgacccgaggacgacgggggtactgttactcgcgcacgcgtttcgcttcccggcgctggaacacctcgacctctcgctcgtatagccgtgggggcatccgttaatcttctccgtgccgccctgcggcggcggcggtggcggcgcgccctcggtgtcgtcgtcgtcggggatgaacgtgtacca

SEQ ID NO: 424768 - DNA, 70 bp, Oryza sativa
tctttttgtaccagtatctaattgtttaattaaaagccttaccaaatgttcatttggtagtgtttttgag

SEQ ID NO: 424769 - DNA, 499 bp, Oryza sativa
tctgcgacgacgaccggtcgcggcggcgatgggctcaggagcgtccggtcgcggcggtgatgggctcaggagcgtccggtcagggagacggcggtgggttcgggagaagtggcagcggcaggcgcggcggcgagcagctcggcgaacggtgacggccttctggcgcgtgtgggctggcatggctgccggtgagtgggctcggacggcgacggggacgagagtgggcggacccgacgacggcgacaacgacgaccacgaggagggcggcggtggcggcttctcgggttagggtttcggattttttggattttatttttttctcagttttttatttttgcgtgcgggcgacataagcactcacacgcgataaatgtatcttcctgtgcaggctagttaagtggcccgcatgggataatagatcttcccatgtgggctagttaagtggcccacatgcgaaatgcaaagacttattttcgcgtgcagttgggtcgcccgcatg

SEQ ID NO: 424770 - DNA, 322 bp, Oryza sativa
atcgaaatttcccctccctcccccacgagctggcgagcgggcgggctgctcgccgtcgcaccacccacctccgtcgtttcaaatttcaaatcctccccgacgcgcccccacacccccccgtgcccccgatctatgtaatccaatccatcgccgtcccgatcccccatgtctcttcttctgtgactgtgagtaggcgcgagcggtgaggcgtcttcctcgagcacatggagggcggcggccgaggcggtacggacatgaacgccgtgccggagggcgctcgtgcagcacgtcctgtcgatgcttatcaacgtcccgtgacatg

SEQ ID NO: 424771 - DNA, 57 bp, Oryza sativa
tttgggtccccccacccttcttaaaaaagtccaaccaccccaacttatgggggggtt

SEQ ID NO: 424772 - DNA, 278 bp, Oryza sativa
ttttcttcttctccctccaataattctctcccctctcctcctcttcaccaccaccaccaccaccagcagcagcagagagcaccatctccatccaataatccccatgcttgcgcaccactcccggccacatcccgcgcgaggaggaggaggaggaggagggtgtgcttgatccgcgctcccgcctggttggtggtggtggggtgagggggggaggtatggtaggggaggctcttgtttgacatacaaccattgttgaggtatactttcgttgtgcctct

SEQ ID NO: 424773 - DNA, 323 bp, Oryza sativa
atgatttcttgcctgatcagctcctccgggagctctatgatttggctccgttcttgcacaaatcatgaatgaaatcagaaaattgaagcgcgggatcagcaccaaacgaggggatcaccctgtacaaaatggacaaagttcataccatgactgtgaggatccgcaaagggtcggtccagtggctggggatgaaccaggaagagtacgtggagaagaaggcgctgcaacaccatggccaccgcggaggagctcggcgggaagaagctggacgcgaacctgacggcggcggaggagggcaaggtgacctggggtgatcgaccccc

SEQ ID NO: 424774 - DNA, 450 bp, Oryza sativa
tttttccaaaccctagtcccccattgatgacctccgccgccaccgccgtagatgcacaggctctccttcctccaggccaccatcattgacgcgccgctgctcctctcctccgcctccatggccaccgtgccggcgcggagggggatggcgtgctccgtggaggccttggcgaggcgcggtgggggcggcgagtcggagtcggagaatgaggaggaggaggagaagcgtaagggcagggcggcggagaggaggctcataggcggcgggagcgccgcggcggcggcggcggcggcggggagcggggagctcctcttcatccccggcgtgggggctcgcaaccagaggaagctcgtggacaacggattcgagggcgtcgcgcatcttaagcagctctattgggataagttctttggaaaatatagcgagaagatggttgagtttttacagagc

SEQ ID NO: 424775 - DNA, 460 bp, Oryza sativa
actgctgagatggatgaagtgccgggtaatcaagaagatcccagacttggggcctatgccgacaagatcactgatgcgatgtttgcggaccatgtggagttggggtctcattatgcaggtgattcttcttcagaggcaggatgggctccaatgatcgcgagaatgcagtcgcagtcgcagctggggagtaaccagcttggtgtctcctttgagaatggcagtttgccagatgacccggcgtcgttggcatcggcattcaagaacatgagcttgggattcagggattttactgttggcactcctgctaatcctgtcagtgttgcacccctaggtggacattatcctgcaagtcatgtgatttcatctggtgagaccacaatgaactcatttcatcagcaggagtttgcttaagatggtttcaggcctttatctctgaatcccaatgttgctgaatacatga

SEQ ID NO: 424776 - DNA, 522 bp, Oryza sativa
gttttccctctacagggcagcatttgatcaacacctaggtgtatcccctcgtgtttctacccaggtggatcaagaaatacaccatcagaaaagcagaaagaaagctgatgaaggtgccctccgattgagaaatatcaaggagtcagcatcctacaacttgccaacagtatcaacagtttcagattctaaacatgggctgtcgagatcatcttcaggacattctagccttgcaaatttcttgagtgcttcaatcgctgaatatgtgccaaagatctcttgcaaactttcggaggacatcgtaagatgcatttctgcagtatactgcaaacttgcaagccagccatcacaaaatttggcggattttgagactttatcaactccttcattctcctcttcatcaagtacattttctttaaagcaccgtgttgatagttggagtccccgatgccattacaatgtcaacacaagctctgacaaatatgattcattgaatgagaaaagtgaacaatacaatgggatgat

SEQ ID NO: 424777 - DNA, 450 bp, Oryza sativa
tctctctccactccactcgctctccgttcaccactccaaacgcgtagcgctagcgccgcccgccgcacgatgagcgcggtgcccgtcgtgtcctccgcgctggccggaccagcggtcgcggtcgcggtcgccaggcccgcttccgggtccgtcactcgcctccgtgcgccggcgccccacggcgtgccggccggctccgtgcccctcgcgtccggacttgccaactgctaccgccggtccgccgccgccgcccggaggcttccgatcccgtctgcagcggggggcggcacagttggggatgcttttgttatagaagacacaacaaatgtgaaatttcctcgagagatagctgttccgggctacaccgagcctttggttattcttggaacaggtacattttcttgtccgtttccctacgggattaaatcggcttgactatgctacttcgca

SEQ ID NO: 424778 - DNA, 467 bp, Oryza sativa
gagttttctacggcgcgtccgaggaggcagcggcggtatccggcaacagtgctgaaggtgtggacaggtttggggacacggacaacaacgataatgcggttccggaggagccgaataacacggtcccttctgaagaagagaagttcagtgagaacacagtggagaagccagtggagagcagtgaagagaaggcgccaccgaaagaaaaggaggagagtaaggatacatttgatgatgcaaatgggaaaacagaacactcgagcgccaaggaggatggggattctgaatcaggatctgggcagtcggatggttcaaagaatggcgacgaggaggagaagagtgaggagaagaaagatgatgagcaatctgatggtgagaggaaagatgatcaagaagagaaggctgaaggcagtggctcaaaggacacgactgaccagccacatattgaggagacagtggatgaaagt

SEQ ID NO: 424779 - DNA, 282 bp, Oryza sativa
cgccgccgtcgcgcgcaatggcggccccggcgctcctctccgccccgcccccgccccctccgatggacgaggacgccagcgcgggcgcgcaccacgcgttcccgggccccgcccctccgccgtccccggagggagcccctccgccgccgcggcggaggcggccggctgtccgcgtcacctcggagttcgacagcgacgcccggctcttctcccaccgcctctcctgccgcgtcatggacggcctcgccaagctccgggtccgggtccaccacggggtcggcg

SEQ ID NO: 424780 - DNA, 529 bp, Oryza sativa
  unsure (1)..(529): unsure at all n locations
gattgtttgaagttggcttgcattgctgtatttgattcttgaggctgattgtgtgctatttcaaatcataaacaggcatacacaaacctagatggggagaaatcacatatagtcaatactgcatgggcaatgttggcactcatgaaagctggacaggtattacttctctcagtaagaatttgaaatggtcaaattgcaaagaacggcaatagtaatgtgcagtcaatgtatgtttagcccagaataattcaaccaattgtgtagcttaaagactcatattatattggagtataattcaatgcatttaagtatttaaccaacttttcttctgagttcaggtagagagagaccccgctcctctgcacaaagcagcaagacttatcatgagcatgcagctcagtgatggtgactttccacangaggtgactgctacatgacatttgtattatacaatttgatgttaactcttgactttccatcgtataagaaatttaagcataatggaacaantattaaagagatctgagtg

SEQ ID NO: 424781 - DNA, 522 bp, Oryza sativa
caattgcaaagttagttctgccacagcttatgcaatgtctccatcttcattgaaagaggctgatgaggagtcatcagctgatcttggcctgaattttgagctttgccttggcaatgatatggtacattgtcaaaagaaatcccctgttggtgctgagaattcaccattgacaaactctcataaattggatcttcagctgagtttgtctactggatcacctgaatcagctgtcaccaacacaaatatggtgtcaccgattattcacggtggcttggagatacctgttaccaactgttcaccagctattataggggaaggatctgtaccctgtacttgggttttcgagaagtcagtgatttcatcttcgtatgcctctgaagcaacatataccttcccattttcgaaggtacccaaaacaggggatgctgctatgtcttctccagtcatatcgtcaaccttggtaacaagtatgaaaagcccagttgcctgtacttctgggtcaattaatccccaacaacgcaa

SEQ ID NO: 424782 - DNA, 504 bp, Oryza sativa
ggatattattacctgatcaggtaggcatatttttttcatttcattttttgggacaaaactgaatgtcttttgtacttgtaagataataaagattacaatttagattagcgcaatgcttttactctgttttataggaattcgaatcaatagcaatgtgtagggataaatacatataggaaaaatcacataacactaaataggcataaatacatatgaagtcagaaaaggatctttccataacacatttctgtcctctttctacattttttctctaaagaaagctgatccatgcccattggaaaggtgcaagaacaatagtccattaactttgcctagtaaccggtacatccattggtccatagtattttcttggttcttttaacttgcatgcatggtgcgctctgcatttgtcagtatgttgctagcaatacgcagtattaatagtatgtaactaatttcttttctgaatgtgatgggacaaatagctttcaagaatacaaatta

SEQ ID NO: 424783 - DNA, 511 bp, Oryza sativa
tttggtccggccatatgatgcatgcgttgcatggtatgtacctggtacctgccgaagatcggcccctggggatgatagccccccacaagctgctacagtggggagcaactttgccaacgaccactctgtcatacttcaccaggctgtatgttccagaattgtgtatagtttatgattttttctgtgtgacgtttgctatcttatttacactttttgcagtatgatggtttccgggcaatagctgcggagacaggctcattgtatgagcatctaaggcaaaaagaccatcagacaagtgatgatatcatgattaccttggacaaacttcagcagattgctttgcatcatatgaaggatattgcctgccatcaagccaacaatgtagttcaaccatctgatcagagtaattctagggctccagtgccagacacagatgctgctccaccatagttaacggtgctaccaagcaattgatggagcgcgaggatgtaatcaagaatcctgtacaaat

SEQ ID NO: 424784 - DNA, 501 bp, Oryza sativa
  unsure (1)..(501): unsure at all n locations
tttctgccttcttattttcttttttgttgtgctttcttttgttacattatttgtttatatgtgtcagcatacattgctagggttttctgactgtcggcaataaacacaattttcgcttgcactaacaagtaccttatattttactaatgagttgagtagttcaaatccttagctatattttgtaggtctaccaaggaaatacctatctcatttatattgttagatgcgactcttgtcatcaacaaaacttgaaagcatggattacttaacactggagactactaaatgatactacaatacaacatgacagtaattctttcttgaataatcatgttttgtcttgtgccacatttgtttgcatgcccttgtccgtcagtcacacaatatcgttgatctttaaactaaatcttgcttgaatggcattagggggaggcaagtgacagtgggagcatacaacagatttnggaaaagtggtcaaccgatggcacagaaaagcaagta

SEQ ID NO: 424785 - DNA, 252 bp, Oryza sativa
tcttcctctctcctcctcgtcttcctcacttccacttagatagatgaatttatattttatttttttacgcgctaaatccacccgcgaaatctacccgcggatgcgagcgagcgggcgccgctgaggtggtggtggtggtggaggtggctccaatggcggaatcgtgagggggttgaggaaggaggagggaggaggagggagagagaagggatcatccttataaaatggttttcttgaaccagaccttttttt

SEQ ID NO: 424786 - DNA, 483 bp, Oryza sativa
gtttgattcaagccgtgaccgtgggacacccttcaagtttaagttgggacaaggtacaattccttctccattctgccttcttactttttgatggcacatctcatagccaatgtgatcgcaacttgtgccaatcaccattttgtgcaaatttttgggcatggtttcagtcatctattcatatttctgtttacatgctactagttttgatgtttactaatcttttgatatgttattcttctcaaatagaaatgactgtattacagatacctctgagataagggctcttaatacctagttcgtttttcactgggaagtaaaaccgtgattgtttccagtcccggagcatgtttaatggccctgtggctgatatcacccagtgatgctcaactgtaacactgcactgatcactttagtctgtcaattgctggtgctattacaattttggggatcagctttttcttaggtagagaatgtaacagcagt

SEQ ID NO: 424787 - DNA, 487 bp, Oryza sativa
tgttgagcaaatcttgggttatattggacgatccactgagcttatggatagatctccttctatattatcaggtgttcttgatctactgaaggcattatgggaaagtggtgctcaatttatatacattttagagaaactgagaagttctagaacattctgggagaacttatcatgctgtattcgtgctgcttttgctagttaccctatcgacagcgttgagactgttgatgaaaaaaaaatctttgaggagcaaaaagaaccttctgttgcaccttgtccaagtgacatagtgctcaaatggtttgatagcacgactatggaggatttggtaaatcatctatcaagtaatgggtaccaaaatgatcttcttcatcgtgctaaggtagcatcctgcctttgcattatccgtctattaacaaagctgtccagtggtgatactggaagcttgtcattctcgctagtgaagaagattcagctcatatctagt

SEQ ID NO: 424788 - DNA, 465 bp, Oryza sativa
aactgtggtcgcggcgcgtcgccaccatgctgccatggctggtgctcccgctcattctcctctgggcgcccgccgctccgcccgccttcgcgaggagcgccgcgcccacgccctccagctccacaagctccgcaagaccgccacccgtcgctgccgcaactgcaacaacccctaccgcgaccagaaccccggcggcggcaagttcatgtgctcctactgcggccatgactccaagcgccccgtcctagacctcggccctgccgggaccctccccaccggctggccctgctccctggattggcccaatgctgccggtgaccctgcctactggctcgaccttcgctgctcctccgataacctggtctcggggttctcggggagcttgttctacttcttctgcgtcagcatgaggcggttctggagggaagcgctcagatttggctccttgggggacggcgatggctt

SEQ ID NO: 424789 - DNA, 524 bp, Oryza sativa
gcctttgcggaggcgagaggcggaacacgaggaggccaccagaaaattcctccctcccccagggaggcgaggcgaagcggagctctcctcccaaattccccaaccctccaccgcctccaccgccaccgccatgcgcatccgccgctacgccgcgcgcctcctcgcctcctccaccgccaccgccccctcctccctcccgccgccccccgccgcctccgcggcctggtgccacgccgccgcggacgattgcgccatctgcgacctcacccgctccgcctccccgcaggtggtggcgccggacgcaatcaagcagaaggggcacattgccggccgggcgctggaacccgagctcaggagcgatccgcgcgtcggactagccgaacgaactcctgttccggaagatcaagggcgcgatatagatgacggtcctcccgcgaaaagatctctcacgtttactgatgctgcggcgaggctagaaggttcgggaaatgttggtgctggagttgctactgaaccagcagcta

SEQ ID NO: 424790 - DNA, 525 bp, Oryza sativa
ttctccgtcgccgtcgccgtcgactcctcgtcgccggcgtccccaaaccaagcaaaatgccatctccgtctctcctcctccaccaccaccaccaccgcctctcccctcgcttcgccccctcccgctccccctccccccgaaccctatcgctgcatcctgctcctcgcctccgcctccgcctccggcttcgcgccagcgcccgcggcggcgggggcagcacacgggaccacgatgacggcgcgcggtccatcccgatagcgcggtgctacgaggcagccctcgcgcgcctcgacctctcgggaaccgcgcggcgggagcaggcggtcgcggcggcggcggcggccgatggaggcgcggctgccgaggctcacctcgccgctgtcgccgacgccatggtcatggaggccttcctccctggacccgacggcgcccggcgcagcgccatgtccacacggctgattttgcaagcaaatgaagttacagagaaggccagtaagctaaagaaagaccttggcactgaatttt

SEQ ID NO: 424791 - DNA, 505 bp, Oryza sativa
gttcttgttcttgttcttgttcttgttgcaaagattcgagagagagggagagagagttttgtttgttgttgttgttgtacatggggctggacgtgggggagatcgggatggggctggatttgagcctggacctgaagatgttcgcggcgaggagcgccgtgaggatggcggcggcggcggccaaggaggcgacgggggtggaggcgtgcatcaggagcctcgaggaggagcgccgcaagatcgagatgttcaggcgcgagctcccgctctgcgcccgcctcctcgccgacgtgatcgagctgatgaaggaggaggccgggaagaggaggaaggacggcgacgacgcggaggcgaaggcggaggacggcgacaagacgaaatggatgagcaccgcgcagctctgggtggacagccgcggcagcgacgccgattccgagaatgaccgacggagcgggagcacctcgccggcgtcgaggttgctcggcggcgcggaggagtcgtcgtc

SEQ ID NO: 424792 - DNA, 54 bp, Oryza sativa
gggtcttgtgggctgaagctgaacctgcgttcttggaagcaacagaaaaggagg

SEQ ID NO: 424793 - DNA, 346 bp, Oryza sativa
gcggtctgcttcgcgctctaacccacactgttggtgcatggcgtgcgacacactggtgggagtgggaggcctatcggctgccctcttctcccgctcccgacccctgtggtgctgcaggtgcacctcctgctcgggcccgttgatactccgagccggtggcagatgcaacagcccggcgggatggacttcgacgcctctgtaccccactgagagggagcacctgcaggggagagagtacgaactcacgtgtacttcagtgtgccgatgacgctaatgcggtgaccgatgatgacatcgtgaacgatggtatccatcatcaaacccctttcgatgctgaaatggatga

SEQ ID NO: 424794 - DNA, 255 bp, Oryza sativa
tgttgataactggtacctcatctgatgatcgacaatcattcaggcagtaccttgagcactcagcgcatactcaccaggaggacaccatccagatgagcgggagcattcataccatcaaggagaaaagatcaccttcctatgggcggttcaccgttaaggcggatgcatactacatgtactatgaagactgctaactttggcaacacgtcggagcttgaggacaagataaagacgggagaccatgttcaagcttgt

SEQ ID NO: 424795 - DNA, 211 bp, Oryza sativa
tttgtttcggtggctaaccaacaggttgggtgcttgtgatgggtcaacttatcggctgcgggatagcacgggaccacaaacgggctgtgagtgtgccttgctaaagctcgcgagttatcttggtgagagcgggacattggactgaagctacgagtgtggactattgttgaggagtcatgaaaacctactgtctatcttgtcaaaggtgctc

SEQ ID NO: 424796 - DNA, 417 bp, Oryza sativa
gcttgttcttcctctcccccccggttgctgctgctgcagctgagcctccgttcttggaagcgagagagagggagggaggagggaggcaattggtgaggcttttggaggaggaaagggaagcttcgggccccatcatcctactcctactcttgctcactcaccacgctatcctatcaccaaactctctcttatctgcttccaagatcccaaccccttttcttctttttttttgttcgcacttgataggatcatttttttgacctttcaagctcaactccagcactccccccgtccgtttcagctgacacagagatctaggttagttggatttatagcttccgagtattttgagcgagttctcggctaaatgctccaatccgagataaatcaccaagtgccctttgcttgcctccttcc

SEQ ID NO: 424797 - DNA, 297 bp, Oryza sativa
gaccggccggatctcgggcgcccacgcgtcggtcgttcggcccggtggtccgcatgaaccggcagaagaagatggacgtgagcgcgctgaccctcgccggcccgaccagaaccggaaagacggacctcgcacacggcaacttgccaccatgctaggtaggaaggacccactttgatctatggagggaacagaagagcattccacagaggccacgaaaacaagaggagctgatggaaaatataccatacaagctatccgtcttgcgaataaaacgaaaataaacgtcggcaccatgaa

SEQ ID NO: 424798 - DNA, 500 bp, Oryza sativa
  unsure (1)..(500): unsure at all n locations
ccatgcgttttttttggcatgggcgcgagcgccgcgccaccgtgacactcacagccacgatgtgaggatgggctgagcgccaagtccagaggactggaagaaagcctaggagcctaacgaagcgcgatggctgttcgctatggtggcgacaatcgcggtactgacgtgcattgcttaccggaggatgcatgggatccatagggaagacaccttcgtggaggaccattcgacagcatgggcgtcgagcgacttggacacctcctcgccggacatcatgtctgcgctcgccaccacagttcgccgacgacagtcgccgcccagaccgctgcctcgtcgncgccttctcttgtgctcagcccgacggcttcacccaggatcctgtcactcaggtgtacacatcggcgcgcggcgcgaaaggaaatgagacgaancacggattctggggagtgttggcacagcaagccatagtgatgctcgacgaaaacggtggcacggatgat

SEQ ID NO: 424799 - DNA, 355 bp, Oryza sativa
gttatttttacatgcaacagagcaagtataaggaggctaacatggccaacgccaccatcagtcctcttgtatccccaccctattcatcaaggacacaatgaaagaggacaagaggggctcaaagcaaacgcaagtaaaagatcatcactattcacagcaaaccactgagattataaccttgttcgctccttctgcagtataataggccgatgtcttgtctgtctgctggatacctgtccgaataatatcactgaggctacggatgagacaccgatgcaatttcaaaacatccggcgaacaaatctgataacaactacatggacgggacacagtcaaggccggcaacacttgagac

SEQ ID NO: 424800 - DNA, 525 bp, Oryza sativa
tgtggatactaaaacgtgtacttgaggaagtggaaaaggtaatgcaggaattcagaggcatgctttacaagtcaatggaggatcctcatcttgacctcgctgagcttgagaacattgttcggctactgttggagttggaacctgagaccgatccagtgtggcattatcttaacattcagaatagcaggatccatggattgtttgaaaaatgcaccttagatcatgaagcacgaatggaggttctacagaataaaattcgtgagaaaatactatctgatgcaaaatggaggcaattgcaacaagattcaaataaatcattggaagttgattctgctaccggtgactcttttcaagatgatcaactgtcaacaaatattatggctgatgaagctgatagcttaagggcagcctacattcgtaggttaactgctgtacttatccagcatgttcctgcattctggagattagctttatctgtcttcagtggaaaatttgcaaggcagcttgcgggaattactttctgat

SEQ ID NO: 424801 - DNA, 304 bp, Oryza sativa
actggagggcaagaggagaggcaaccaccgctagtaatgaacggtcaaagcactccacagctccctatgcgtcagatgcttaagaaagtttttacaagagaacgagagcatgatcaagaagaagacactgactttatggcgccaggttgtcatgttaagagcgcggcagctgacaaagcaagacaagatcatacaaagcataagcttagtgagcaggaaccagaggatgaagtggaagaggaagatgaggatgaatatgaagatgatgttgaggatgaagatgaataagtagaaaaggatgacg

SEQ ID NO: 424802 - DNA, 518 bp, Oryza sativa
gttgtttatagcgtagtttctccatttctcattttttttctataatttttttcgctattctaaaaaaaagaagtttcttcgtttctcgttattcttaaaaacattttcttcatttctcatctcattattatagagaaagtttcttcatttctaatccaacaaccaccatctccgataataaaagccaatccttgtgtctctctgtctgcaccactctcctctctcttggttccatgcctcgccgtttatctatctaatttactagcagtatttatttttctttcctgcccttgatattatttattatctctgtttctattgacgttgttcccttcttctactggtaacaaggaatccaatcaatcccagtactgggagggagggagtctgcctcaacctgcatttgctctgttccaaaattctcttctgtctttgttctttcctccgctggtccatagcatctgttgatcccatcatactccaagatctgaagagaaggagggattgcgaagaatcgc

SEQ ID NO: 424803 - DNA, 523 bp, Oryza sativa
tttatgttctcacttctcacacaactcgcaaccctaataaagcgcaaaaaaggaaaaagaaaaatcgccacggaaaaatcctcgctgccccccatcgggcaggagcaaccgccgcatcggcccccgatccggtcgccgccgcctctcgcccggttcatccgccgcttgccaacccctccgctcccagcaaccctagtcccccaccccaacgccgccgccagctcagctcgcctcgcgcggggcgcagccgactctctacttgtggcctcggcggctcgggccctctccggattccacgatgtctgaagatgcgtctgtcggggccagcagttcaacagtaaaagctggcgatgatccagaggctaccattgagatcaacatcaaaaccctggattcacaagttcataagctccgtgttaagaagaatgtacctgttctggtccttaaagagaagatagtagaggcaaccggggttcctgtggaccaacagcggttgatttttagaggaagagtcttaaaggac

SEQ ID NO: 424804 - DNA, 91 bp, Oryza sativa
gtccgcacccgcacacacatcgctcggtcgaaggaggaggttctagaaacttctggaagcggcggaggtgtggggagagagagagagagag

SEQ ID NO: 424805 - DNA, 504 bp, Oryza sativa
gtttatcaagaatattcaaatgcaattgttgttgctcaagccacttctaatcaaatgtcaaagcgtgaccttttgaggccttatatggatattattgacaaaatgttggctcagatgctgcgggaggatccatcttttaagccttctggtggaagattaggtgaaaatgatatggactatgatacagatgataaaacaatggccacacttcgacgtcaacttaggagggctcacgaggagtactacaggtgtaaaagtgaatatatgacttatgtcatggaagcccttgaactagaagacaccattaaaaattatgaacgacgtgacgcaaatggatggaaatttgtgtcaagttttagggaaagtcgaccgggcacactgggttcccttttggacacaatggagttcatttggcgctgtgttctgaggaagcagcttcagaaaggatttgctattgttcttggctgtatgtcaactgctatactgctggctgaagccactctg

SEQ ID NO: 424806 - DNA, 489 bp, Oryza sativa
tattgaaggagagtctcctacgaagcagcaaatactctaatcgacgatgattcaaggacatgcacgggtactaaagaaactgaaagtattgttcagttgatggcttgtgtggagcaaactaacccatgcagttcatctaggatcactgtgggttacagtgaagtctgccaaggtgatatcgagaagatggacaaagacattgtttatgctaatgaacaggaagagtctggtgatctctgctcttctaaagtattatcaagtagcaaagctgaagataactatgaacatgagacttgtcagtttcatgctaacatgaacaacccagtaaaagcagattctcctgttcgagaaaatgaaactgcagaagttgtcttgaaattgaacaaggagatgctggggcaaaactctgttgataatgaatctagattctcctctgctgagatttgtatggaaggaggattatcaacaataaaagatcaactatctggg

SEQ ID NO: 424807 - DNA, 380 bp, Oryza sativa
gaggtcttttgaaagcatcatcctctctctctcctcccccatcgacttccccccacacccaacggaagccgtaggagagagaggggaaaagcttgctcttttataccctcatctagggttccgagcccaccggctctctccccccttgctggcttcgcgccatctctcccgccaccgcctccccccctccccccctccgcctccgatagattcgcgctcgccctcctgacccacggattcggttcccacgaaaccgctcgatctgggggatctgctagattcgtaaggcggcgtttcgatcgatctgttcgggggtttctgccgtggggaattttgatctataaagataggtttttgattttgttcttttttgctttttg

SEQ ID NO: 424808 - DNA, 66 bp, Oryza sativa
actacctcccctgctccccgcgccgcctcccccgcccaagttaaataatttaaccttgcctccttc

SEQ ID NO: 424809 - DNA, 480 bp, Oryza sativa
tctctgatcaagctctctaagcatcgatcacttggttcttgctcatcatctttcgcttgctcgtcagctaggaattcgtagtcttgagccgaggttgggtgattcgatggacatgagcgagagcagtgagaaaggaatggagagcaatgcgtcgtctggccctggcaatggcatcccggtggagtggcagagccaattcagcagcgccttcgcgtgccagccgtcggtggcggcgcagcaccagcagcacgccatgatggactccttcgcggcggcgtccgccggcctgtgggcgtcctccgacgtcgtcagcgccatgtcatcggccgcgccgccgcggggcgcggggttcttggcgccggtgcccgggttcctccagcaggggctcggccatttcccggtggactccggcttcatcgagcgcgcagcgcggtcgacgtgctttggcggcgggatgatggccggcggcccataccgcgc

SEQ ID NO: 424810 - DNA, 496 bp, Oryza sativa
tgtcaccgtgtagcgcctagggttttcttcgcccgcgcgcgtcgatccccttttcccctggtcattttctggtcctcttcaccgccgccgtgctccaccgtatccttcggcgaccgccgcgggcagcgcgagagggggggaggagagctcgcccgccgcgggcagcgcgagaggggaggaggagagttcgcccgagggcggaagccaacgaggggatgatggccggacggcgagctcgccgaggcacggctgttggagcgaactaatccggagggggtcgggccccttggtgtcttggtgctgctccgccccggatctgcctgccccattacttcactttctccttgcaatcacgtcggcggggaaggtcgtcgtcccacgagcagacgagctcatgtcggctcgacatggtctcccgagctcagcgggcatggggtagcttctttcctccatcctccatttggtctctattcagatttggttgtcttatgttgta

SEQ ID NO: 424811 - DNA, 280 bp, Oryza sativa
ggtgtttatcgtggtggaggtgatgcagttccctctgcaaatgatgactgcttcaaatgtggccgtgcgggacattgggctcgtgaatgtccttattccagtggaggtgggggtggtagaactggaaggtactcatccacttacagatatggcagtggaactggtggctgacgtggtgaccgtttcggagggtcagaccgagtcgctaaccggtatgtagatgacccatatgatggtgggcgctatgttgatgatcgctttggtggaggtggacgagatc

SEQ ID NO: 424812 - DNA, 509 bp, Oryza sativa
cttgatatggcacatatattgcatctgcttcaacatcaagacagatggagtgagaaatggcaaacttcccatgctttggactcttccttcatcaattgcaggccatcttctcgtttgctgtttcttatagctaagaggtgagattttccagataaactggaagaaataccctgaattccagatgaaggaacagcctcaatcagattctggagtaaagtttgtgaatccatatgacaaaggcgtgctctgtaacattatagaatttctgaagcccgaataacacgagctgatcctaagtacagacgttaaaaacatgggaaatcattgcatcaagtgatctggaattctgaaagattgttttgcttcttacagcccaattgatgggaattttgtgtgagcatcatttgggcactagtagctagttagatcaacacgcaattgacactctttgaaaactttctttgtgagcgggaactgtattgcaatggaagctgcatccgacgtgaatt

SEQ ID NO: 424813 - DNA, 120 bp, Oryza sativa
ctcactctggtcggccagtgtcaccaccacaccaactcgtcgaggagagagaaggaggaggcggaggaggaggaggaggggaggagagctcgtcgccgattcgggcgtgggggggggggg

SEQ ID NO: 424814 - DNA, 512 bp, Oryza sativa
tatttcgccctccccggccgtccccgtcgatatcacccgagccctaactcccgactccttcctcgccgcgccgccatggcgccccctcggcccgcttcaccacagagcttgccgcccgtggctgccacccgatcccgcggtcgcccgtacgagggctggactctcaaggagctgattggggaggtgcgccgtctacgacgagccgcctcctcggcgccgccccggccggcgggcgtcctcgacctcgaccagggggacgcgcgcgcctcggacacggtcgccccctcgccgccctcaccgtgtgaatcccaggagcaaccccaccatcttggcacgaggctggaggatgtgcttattttcctacgggatgtcgccttccaggtcatcaagaacggtcgacaagacgaggtgcgttaaatcgtgaatgtagcacacgatattgtggttaacctctgcaatgccattagagcgcccgaagccgtcaaaatagtggctgctgctgagaatgtgaa

SEQ ID NO: 424815 - DNA, 344 bp, Oryza sativa
cgttgctccaagacgagtcgcggctgaacaggggaggggaggtgacgagcagagcagagcaggggaggggaggggatcctggctgactattcaatatccatggcgcggtgcatctccttcctgtctacctcctcgtccttgccatgtgccacaaaaccgccctgctgatcagtgttctctgtcttaccctcgtctacgtactctcatcaatgccgaggtacgaaaacgagatcgcgggtcaattagggcgctgcgggaggattggagggagagaaccaaggccatgcctcatggtggggtctaccccaccaaggaccactgctgccaatgagggctttgtgaca

SEQ ID NO: 424816 - DNA, 187 bp, Oryza sativa
gaccggcccggactgactggctggaccgacgcacgcgtctgtttctctgatcgcactctatttaactgctcacggctcacgtctatcgtgtcctggcacacgcagccgagagcgagatgggccatgcacaggtggtagcggccgcttcttgccgttcttctcctatgtggccctcacaccaccatgg

SEQ ID NO: 424817 - DNA, 257 bp, Oryza sativa
gcgtccttttttgcaaacacgcgtcacacacacacgtgaagctttcacgtctagcgctcacgccattaatcctcctatatcgatacggctcgtgtacagctagcgttggtcgccgtcgtggcagctatgcttctggcgctgccatacaacatcatgggcgccatcagctgtggccagggcaacttcgtccggtggccgtggctgaaggacgcgggccgggtgtccggaccctagggtgcctgttgcagtgggggtag

SEQ ID NO: 424818 - DNA, 497 bp, Oryza sativa
gtcgaggacgccctccccagtggcggcgagcgcccgctccctcctatctcgaccaccgaggatgaacaataggaggaggaaggttttgcgcgccgttcgcggattcctgtccgttctcacgccccggattcgcttcgtcccgccgtcccgactgaagaatgaggatggacaggaatgaggaagagatggccacgaatgactcggaccctcttcttaagagggaaaacaaggaggcatagtcattgtggtatctgacaccggttaagcccatttccttgagcgcgctggagattgacgatcacgaaaatccccgtttttttgcttgctgctgactcattttttttgacacatgattcttaactatggtcatgaactgttttacctttccctgttcaagggaacttatcaatttgctcaccagttattcctttgccattggtgaactgtttaagaaggatttggctttcacattgtcaacatgcatgcttaatttcatt

SEQ ID NO: 424819 - DNA, 141 bp, Oryza sativa
tactggctctacaggcatccgcgcggattcaaatcaaatccctcgtcgttacccattccagccttcccctctcaccttccccaatctccctgcggtagaaccctagaggaaccttctagaacccccgagtcctccccctct

SEQ ID NO: 424820 - DNA, 178 bp, Oryza sativa
gtgctggccaaaacattttgtgaatgtgatgatgatgatgatgatgatttcaccaaacaatttttcaccccaactgaaaaggaaacgtcgatgaccagttttcttattttaaattgcccactaaactctttggatatttattggccactagctggcctgtttttgccaccacccaaac

SEQ ID NO: 424821 - DNA, 63 bp, Oryza sativa
attattctttttttttggtttttttgatattttccgtcttttacctctttcccttttttcttt

SEQ ID NO: 424822 - DNA, 447 bp, Oryza sativa
gtggaaaaccccaaataatcttccaagatctacccgttgggcttcaatattaaaaataagacaagtcccttctaatgcttcagcctggcaactgacaataggtgatgtttctatctgaaatcagccattgtgctcagtttgggacaacatacaaaatgatcatcttaatggtatctttcttccatctcaaatgtcagacaatggggggatctttgggatcataataaaaacagggatgaacaaaaaaattctttcaattttgaacagtgcccctgtgcaagctattatgcaggaacaaatagttcagtaagacactgaagacaagctttgcttgaaacattcctttttaccaaactgcatccacgacaaacccaggtaaatactttaactgttaatattctgatttagcttggaaacacaaatttgttttttctagggtgcacacat

SEQ ID NO: 424823 - DNA, 411 bp, Oryza sativa
aaggggggcctagcccaatttttttaacccttttggctttggcttactggagggaaacatttatttttaccccaggtcctaatttttttgggaggtgggcactgaaaagatggggcagttacatgcattctggcattttgatgattctggggaactgggttggtaccaagcagcacattttgctttgaaactgggacagagatagacattcaccttatccatatatatgccttgaaacgggagggttggataaggttctggtaatcctaggggaaatttttcctttttaatggcacatgatcacccgggggaatttggtggtgcactggcattggggggttttttagaaaccatattttggttcaggacaaaccttagggtggaacctttttaaagctcccattggtttgg

SEQ ID NO: 424824 - DNA, 108 bp, Oryza sativa
ggggatagaaccttaggtattgacagcaaggacttggtaatcagttaatgcgaattacatttcaaacccattataatggaatgcaaatccacatggagaaacgaaacc

SEQ ID NO: 424825 - DNA, 102 bp, Oryza sativa
acccaaattggcccaggttaacaaccttttttcggggaggggcaaaagaataattttcttacatggttccacttttctatttcaaatcctaatcactaacgg

SEQ ID NO: 424826 - DNA, 351 bp, Oryza sativa
gaaatacgtattattcatcatattttcaacgagcaaaacctcacttgtaccggcacatacacacaaaaaaaaaccccaaatttacacgcacgcctcccattttttttaaacaaaatggaaaaaaaaatcaaacgtacaaaaataattccatctggagattacaccaatcaacggccgaaaacgcacgcacacggccgtgcaatctcccgaagccacgtggacctcacgtgagcgcgccttccccggcttcacttcactcctgcggcagcggctggtgggccccaccggcgtcctccacgtccatgaacaggagttcgtaggccaccaccgcgaggggcccacctgccagcg

SEQ ID NO: 424827 - DNA, 407 bp, Oryza sativa
cacaaaaggagcccccacacacatgcaagatggaaacagggggcaccctccaaatcccaaagggtgttcccatttttttaaaaaggcacaaaaacaagtttatatcttttcagtattatttttaccgataggaacattttcctcaaaaatgctacttctggttcacaacataaaagtatactggaggatgcttgcttccaatgaaccgacacttagacaatatgaaccctcattggatgtaacaagaaaaaaaaattaccgaactacaacctggaggggattgtccagaaaagaaaataaaaaagggtcaagacgcactgtcgcgcaaccacactactgagaaaagggctagtatagtaacaaaccggctaccgttaagaataggttggtcatgcttgaccaacaag

SEQ ID NO: 424828 - DNA, 128 bp, Oryza sativa
ttttttattgttttatttggttttttttttttttttttttttatttatttttaaattttttttttttccatggaaccatagaggaaacattaatattgagttcttcttaaaaaacaaaaatattattt

SEQ ID NO: 424829 - DNA, 351 bp, Oryza sativa
ggggaaaaaagggtagggggaaccatttttttcccaatttgggggttttttaccaaagaaagggccaaaaacccccaaaaaaaagggggggggttttttaactggggggggtttttttgttttttaaaaccaaaatttaaaagggggaaaaaatgtttgaacaaaaaaattttttttaaaaaacccttttcgggggaatttcccccggggttttgccccgggggaaaaaaaaggggtgggtgcccaaacccccaaaaaaaaagccccccggcctgtttttggggggaaaggggaaaaaaaattggggaaaaaaggaggctcctcaattaaaccccccccccctgggggggg

SEQ ID NO: 424830 - DNA, 480 bp, Oryza sativa
gaatgaaagttgcaagttggtattccaatatggacagtaacgcgccgtttcagatgactcattacacatgcaagatgcaaagatgttccataagaaacgaactgtatatatatgcaacacattatcatggctaactattcgaagtctatatctttgaagtcttatttgtactgataggaacattttcctcagttttgctactcctatttcacaacataaaagtatacttgatgatgttttcttccaatgaaccgacacttagacaatatgaagtttcattggatgtaacaagaaaaaaaaattacagaactacaactaggaggttatagtccagaaaagaaaaaaaaacacctccactacgcactgacgccttcccacactactgagaaaagggcttgtatagtaacaaaccgactaccgttaagaatggttgatcaatgctagaccaacaagaagctacagctgtaccccataacgcct

SEQ ID NO: 424831 - DNA, 175 bp, Oryza sativa
aaaaaaaaaaaaaaataaaaaaaaaaaaaaaaaaaaaaaaaaaaaaaaaaaaaaaaaaaaaaaataaaaaaaaaaaaaaaaaaaaaaataaataaaaaaaaataaaatataaaaaaaaaaaaataatataataaaccataaaaataataaaaaaaaataaaaaaaaaaaattaaa

SEQ ID NO: 424832 - DNA, 110 bp, Oryza sativa
ttttggccgcgttttcgcgagcgaccgaaggggacgttcgggccagattcgagcgcatgcctgccccaccgtcgacgaccgcggcagtgccccgcccggagggtttctac

SEQ ID NO: 424833 - DNA, 147 bp, Oryza sativa
ttttttttggttttttttttttttttgttttttttttttttttttttttttttttttgatgattttttttttttttttataacgtacattcacatttttttctctaaaaaaaaaccattaataaaaaaagaacaccgaattatcccg

SEQ ID NO: 424834 - DNA, 159 bp, Oryza sativa
ggcacaagcaacgaattatgtatgtatatagacagcatctgatactccaaaacaacgaagatcatatgttattacaaaagagacgaaaaagaaagagccctgccgtgacaatgttctagtcgatggaacacgaagaaaagaatcactttctaggacagt

SEQ ID NO: 424835 - DNA, 296 bp, Oryza sativa
accggtatcggaaattttagcagcacatgacaaagttcgcccatatacaacaattttcagttccaaatctaagttaagacctttaacaaaagttggtcatgcaggcagctaggcatcagagtttcatatagctctgaggtctatgtctatttataacttacaaatttcatgggacttacctattgaagacaaggatttttgcgtaaaggcaataaaaatggatacattttaacacaaagcgaaaactagcacctacaaaggtccaattttaatttcaagatgttgctttcagagac

SEQ ID NO: 424836 - DNA, 472 bp, Oryza sativa
gctagtatgcatatatatttatactttggggtacacatatgcgtctgacttttacatgctctttccgactagggtgtattcttatgccgaatgagaattcaccctttctcttatttgtcactcgttatcctattgactggtgtgaattaagcaagacaagaaaccatatggatttactatcggcatacgaagaactattatatctaggagcctccagctcaccttcaggatcatcaacattgatctgtagcttggaatgacaacgtcatgctgtcgaggtcatgaagaaagacggaagttggcctgcatgatgttgccgatgatcgacacgtccgacgagctcattatcgccatgcagaccaaaccctcgttggggaaggtcgtgaggtagttgcctccgttcaggctcatgtccgccccgtcatcgaagtgcagcacgagcggcggcatctgcgccaccgcctgttgattt

SEQ ID NO: 424837 - DNA, 237 bp, Oryza sativa
gtgtaaattggtagtattaggtaactatattttgagacggaagtagtaccatgcaagctaaatatagttgcattaatccgatcctgctatcacaaatggagtagagctaggaaaaatattatacaagagagtatgacctattgtttgtaggaatacacattagcaagttagcatcatttttcccttatagtttcaaaaagattcactcaagtttcaccaaaaagtgtgaaaagaaaa

SEQ ID NO: 424838 - DNA, 400 bp, Oryza sativa
ggcaagcagttgttctaggctgtatactgcatataacgtgtagaatataccatatttatagaccttcagaagaacactcacttgattttatggtttactgtttaggtatccaggtgtttacactagctaaatcatgccttttttttttgaagtaaaaggtagagagtctctaccttatggcattagaggaacacatctatgtcattagaggaacacatctatgtcaaaagggattttttttaaagataatggatagaaaaactggtggatatagatggccaactgaaagcaacacatacagtatcagagacggggaaggcagaagtctcttatcctgatatggcttcaagctctttaattggaggacactatcttccatctttacgtcaaaaaagccctt

SEQ ID NO: 424839 - DNA, 104 bp, Oryza sativa
ctccctttttgggtgattttggttttttggggtttttactgagcacaacccaagggttttctcagtaaatatcttttgttaatttacagcttccagtcaaagcc

SEQ ID NO: 424840 - DNA, 142 bp, Oryza sativa
aaaaggaaaaggaatggacatatgtaacagacagcaagttacaattaaactggagtgcaaacttggtaaaatctggatctacatactataagccagcacagaaaactagagaattgccatttatggacgcttacaaaacagc

SEQ ID NO: 424841 - DNA, 267 bp, Oryza sativa
gcacgcgtttttaagcttgtattctctaccatttgccgcccttttttttgttttttttgattttttgagggtgttatccgcacacaaaccaagggtttttacaagaaaatattattcttgtaaaattacatatcttccaatcaaaggctaccactcctttttatacatatccactttcttggcaaattatttaccaccttctattaatttatcttatttttataatctcctctatatttcattccttattacaaattcttttcttat

SEQ ID NO: 424842 - DNA, 115 bp, Oryza sativa
gcaatccaatacattaaagtgaagggatgaacataatatattgcaatgattttatttccctacatagccttttatttttatttaccactctatgaccttcctatcccgtttgctc

SEQ ID NO: 424843 - DNA, 190 bp, Oryza sativa
ctgggcaggaacgtattacagacaatttgcaggtcctacaatgactcagccaaagcaaacaaaattggacttgatcacgacgtctactgaatggatccttgtccatccaaagaatgcttgctaatctaacaaaatttactttcctttcgaacgtttaggccttccaaattcttcttcattagaaagaaaa

SEQ ID NO: 424844 - DNA, 188 bp, Oryza sativa
agtgttgaaattatctgattattttaatacggcgagacaatgaaaaaataaaacaaaaaaataacatgagaacagaaacctttaagacctacataaagtttataaagctgggtataaaaaagaaaacggcaaaaacatcaggctatattgatgggtctgaaaggatgcaacacagtgtacagcggcga

SEQ ID NO: 424845 - DNA, 166 bp, Oryza sativa
ataggattagagaaaaaacagaatacattgacgtgggacaatatttaaatttcaaaaatttaaaaacgacggtcaaaagttttgaattatttagggaagctaaatttaaaagcattgtttatataacggggaccacgatatcaatcttaggaaaaaattaaagttg

SEQ ID NO: 424846 - DNA, 136 bp, Oryza sativa
  unsure (1)..(136): unsure at all n locations
aattaatgggaaatcctttattaatccagataagggagagaacaataccagcntacatttaacccaaaacagtttgatgcagggcccccaccaacatggcttttcttaattaaacccataaaacaatgcaatccta

SEQ ID NO: 424847 - DNA, 325 bp, Oryza sativa
aagccggaatgcattccaagagatttacatggtacctgataaaacagggggtttctcaacagaaggtgaatattcaggtatataaaggaggatctaaactttggacaagtgactgactacctagagctccgtactatgctgactttcgctgtacacgaaactggaatcacaggagaagggcaatttttaccctcaaaatgtcggaaaacacgattagggtttgtttccttgcatggcacaaaattgttagaactgatgagatgggacaagcactgtacttgtaacacgcttaaacgacagcagcagacgcgaagcacctcacccc

SEQ ID NO: 424848 - DNA, 360 bp, Oryza sativa
aaaagcctatttccaagcgtggataagactccttgtttacgaatcctggaactcaatttatagacgtatggtactattctatagatacgggcctatgtaaaccgcagcacgtgcattttttttctccagaaacatgaaatatttaataaaacggaatccttacacaaatggaagggacggagcccgccaatgcaatccatatagtatgtataaacgggccaaagcccattgggccgggggttactagaccttgaaggagatggctctgttgggcgggttgaagaactgcaccgagcggtcgttgagctgttgaggagggctctcaccgcctgggggaagaagctcatggaggagggcaac

SEQ ID NO: 424849 - DNA, 384 bp, Oryza sativa
aagcaaaaaatgacattgaagcttggcccagtaatttgaagaacttgaatgaacagattctatctactgctataattttgtcactaattattacaggccattctctgactggactgcaatgttggaagaaacttttccaagagcaagaatgcgacaggattattaggtggttcttaacccaagctgaagcccaaagaaattgaggtgcccgccagttaacccttttaaagctaaagcttctctccgcgtatgcaacaaaaattagggggaaggaaaacaatcaagaggacgggaatacattggacgatcagatatgatcacagactgccttcgggaagtctgaagtcaaccctttccgccgagatcagcagtcctgaaattccc

SEQ ID NO: 424850 - DNA, 501 bp, Oryza sativa
caagtgaaactacattttttataactgagatatacgtgtaagaaatgttagttctccttttatttattacagtagtcgatgttcgaaatcggtacttaagaactgtcaacaataccacataggtgattagatgatgagatggagataagtagagagatgatgaatctattgtgtatgttacctcttaatttgttgatatataatatgtatgaaaatagagataatagtcgcctctgctataaaaagtttgctcttggacagtaccagaataaattagaggtggaccatgctttaaaatgcgtggcaaatattggcaagaatcaagatggggcctcgggaggttggcttcaaggccctgtcccatagattttttttttcccgctgagacctgattaatgatccgatcatattcagatacgctgctgctcaaatccgccagttcgagaggactgattggccggtttgaaatgatcaagtgatcgttaaaacccccaaaacttt

SEQ ID NO: 424851 - DNA, 89 bp, Oryza sativa
ttttttttttttttttttttttttttttttttttttttttttttttttttttttttttttttttttttttttttttttttttttttttt

SEQ ID NO: 424852 - DNA, 380 bp, Oryza sativa
aacagaaccggtttttaaaactcacttcaattaaaggggaaccccaaatggcaggtctaaggttttgggcaaaaaaaaggccaatacaagggccaaaaaatcaacttaagttaaaaaaagctcacagggatagggaaaaaaaaattccatacccccaacccagcaacacaacttctgggtagcggggtcccccaagaaaattttccctagattttgggaaaagaaacatttttaaatggaccaaatttcccgtttttgggccaatttagggggaaaagcccccccaaaattttaaaaaggatgatcccccccaggacccaaaatcccaaaggccccctgaaaaaatggttggcacagctttggaagaaattttgggttgg

SEQ ID NO: 424853 - DNA, 131 bp, Oryza sativa
ggggaattgaaaacatgtttggcattgcactagttttccagtaattcaatcttagttcacataaaccaagactttggggtcaattaaatatttgagtcacccattggccaacagttaaacctaaggatcct

SEQ ID NO: 424854 - DNA, 64 bp, Oryza sativa
tttttttttttttttttttttttttttttttttttttttttttttttttttttttttttttttt

SEQ ID NO: 424855 - DNA, 79 bp, Oryza sativa
ttggggctgctaacaaaaacacggcttcatacccacaacttacaaattaaccatatactatataacccaagtgagagag

SEQ ID NO: 424856 - DNA, 106 bp, Oryza sativa
tttgtgtttttagactaaaatgttactcgctcgctcacgaaaagattacaccgagcttgggccaattatccaaaataccaaaagccactccaactcagaaaaattg

SEQ ID NO: 424857 - DNA, 479 bp, Oryza sativa
ggaagaatcatcaatttatagtccaaaaagaagaaaatttacatgctgtttaggtccttttggtgctgctctgtattcacaggttacatactcacatctatacatccagtactaaggatactaagttttcctactgccgtacctgacgtgtgtggaacatggtctgtgcaaaaaggtagtaaaaccactcaactggtaagatcatacaagtgaggaaacacagacctgaactacacaacgatcagagaagcaacagtagcagatgacaaaaaaatggttaagtggtaactaaaactggaatcagtgcagtggacggaacagtggatcgtaagatgctttgacttcggcataatcccactccaacgcatcccaccactcccttgtgcattgtaccgaattcagattaccgacagggagctcgagcttcttaagctttgggcagtcgacaatcttcaggttccccagcaaggggaaccgca

SEQ ID NO: 424858 - DNA, 395 bp, Oryza sativa
aagcaagaaatctgctaaagtaaagaaaaaggatggctgaatgactgaatgatattatgataatgttaaatgaacttgaactgttcaagataggatagataggaggaggggagccggccggagggtggaaggcggcggcccaccaaaccctaaattcctttcattttccttttttttttcccgcatccgacgcattgaggcaggggatattcttttcttatacttataagttttcgtgctggcattcaacttgaagcttgccattaggataatggcttgcttttcaacaacgagctaagacactgttgtcgacggacaacgtcaccacctgcgcccactgtttcagcctcatttttaccgtcttcggcgtgttttctggagagagtatggacatg

SEQ ID NO: 424859 - DNA, 439 bp, Oryza sativa
tttttggggttttttttttttttttttttttatatttttttatttttttatttatttttattaaatttttttttaaaaactttttcgatttgaggggggaaacccaccgggaaaaaaacaagggggattgggaaaaaaaaaaataaagggttattcctcgggcaaaaaaaatggaaacaaaaaacggataaaaaaaattgagaaaataaaaaaaagggaaaatataaaacgaagggggaaagataaaaaggtaaccaacctaaaaaatggggggggggaaaaaacttataatctgggggagtaaaaccaaacaaaataaaaaacgattaaggaacaagggaaaaaacgaggggggtcaacaaggaaaaaatcaatatataaagaaactttttttttaaaaaaagggggttatatttaaaaaaggaaaaaaaaagggaaa

SEQ ID NO: 424860 - DNA, 57 bp, Oryza sativa
ccttaccactatgccaatataataaagcatccaaggggggccaagccccgaattaac

SEQ ID NO: 424861 - DNA, 411 bp, Oryza sativa
gatcccctcccccttccccggggaatcttttgatttagtactttaattacgtgcattacagtaccaaaaagggaatcccttgggcttggttttgccactagtatgctttactacagcagcggtagtagtactagtttgacaattcgcttcctggaagggacctcattgtcgcccgccacagcaaagcattttcgggccagggttcacagagagatgcatgcttgctggctgccaacatgaaacttcccctttgcatgcttgcttccttcacaaaaaatcacaattccattgctttcgtcttgggatagcacatgctactttaatctttcttcttttataaggggaacctccgaaaagggcaggaagttcctgtaatttcacagatatttactcaggccattttttcggagc

SEQ ID NO: 424862 - DNA, 423 bp, Oryza sativa
caaattgaaaatttctgctccttttacagcaacattatcaaggcatattatacatcaataacaataaatacaataactagaatatgaatgacgatcaaacatgcacaaggaataaacaaacggttgtaaatacaatcgaccatttgtattctcttaaaacacccaacatttttttttaccatgatgaggcaatacccagaagctagatgaccagtcaaagaaagagatgccatatagcacaaaacaaagaaatgtcatcagaatttatgctaaggttgggttttcttcttcagcagaccaccaaatttctttagcaagggcttcttcttttgcggctgctgcttgggcggtgatgcgttgccattgctcgccgtcgtggagtgcaaaccattggcatcaacaatggaatctcccgtgttggac

SEQ ID NO: 424863 - DNA, 379 bp, Oryza sativa
cccacaaaaagggttttttttagaggcaacaaactaattccacaaccccttatggaagcctcccatacgggataaaatattatcagcacccatcccgttttttcccctttatacaccttaccaaatggggtcaactggcaggggtaatttttcacataataagggttaaatctctaacccaaaaattccccaaatcccagagtttccaagggtggctttttgctttaacaaataaggggggttaaccgatggtatttttacgggttaatggggcccttttgaggccccgccattttttttccaaaaggggggccccaatttggaaaggcacggcacccgggtttccacagacccgttggtttttttacccttgcctgaa

SEQ ID NO: 424864 - DNA, 144 bp, Oryza sativa
tttttgggggattttaacggttttatttccataatacatatgcaacccagagcaatgaaggcagatctagcatcctaggaaagtagaatgcacccactaccagaagatgtacaccacaacacccaagtgtcaccaacaaatatc

SEQ ID NO: 424865 - DNA, 150 bp, Oryza sativa
ggggtcgatgaagaaaaaaaaacattcgaatgtagtaacccgaatttaataaggaagaacattatatataccgttctgggcgaacaaccctcccatgccacctggaggacaaatagaaggcccggaaccaaacaaacaaacacgacaacc

SEQ ID NO: 424866 - DNA, 88 bp, Oryza sativa
tttgttttttttatctatttccttctgaggacaaataacttcacgaaaaaccaataaagccaacagtctgcctatacagtagcaacca

SEQ ID NO: 424867 - DNA, 137 bp, Oryza sativa
ggtcgatgaagaaaaaaaaacatttgtatgtagtaacttgtatttaataaggaagaacattatatataccttactggggggaacaacctcccatgcaactggatgcacaaaaaatatcccggactcaactaaccaac

SEQ ID NO: 424868 - DNA, 294 bp, Oryza sativa
cacacaaataaagaattcaattatattcagatgcatgactggacaattcagaattgcaaacttaacaaagggataataaagcaaacatccaccctgcaaaccatactacacacttaaagacctttttatggttttgataataaggcaagctccagcgatatatgaacaaatgaggggaaaaaacaagcaccacacactctacttcatatccagcgataaaaagatttgaatctgaagtcggtttggttgttctagatttcttgggctatgccaagatccattggcatttcactg

SEQ ID NO: 424869 - DNA, 114 bp, Oryza sativa
acatgaaaaaggcaggtatcaaatattcaaattggaccgttttcttttgaaaggatatgtacatggggcacgcatgcaggggcccgggtgtctgaaaaaaaatttttaacgccc

SEQ ID NO: 424870 - DNA, 136 bp, Oryza sativa
cccgatgcacgctacgaagcttgatgcctcctagtggccgccctccttttttttttggtggttaagagaagttattagtattccccaaccaacaaacccgtccttccaggaagtagaatgggagaactcaactctc

SEQ ID NO: 424871 - DNA, 81 bp, Oryza sativa
tttttgtttgtccaaaaatcaaactgcattaaatattcaaaaaaacgggagggtgtacatgtcaataaggactttatacat

SEQ ID NO: 424872 - DNA, 243 bp, Oryza sativa
actaataatcaaaccatattatcactcatatcagggtctaaaatacaaactagaggagcaaactaagtagaaaaaactatatacacatatcgaggttatagtagtttaataaaaccaactcatgatcatgttatcactagcactgatggaacacgccgtgcaaaacgatatggagatcaccatgaatggtggccatggtacttcgggagtggccaccgaagccgtggtgacacggcaaacaag

SEQ ID NO: 424873 - DNA, 433 bp, Oryza sativa
gccgcgaccctagagggggcgcctcgcttctgcttaccgaggatcgttagggtggatgaaaggtagcccggattcttcatcgacgagagaggagcagaggattgctgcttggctgctactcgtttcctgcgtcctcctatggctatggccattcctgctgctgctgctgctgctctgtgggtgttgccatgccacagatagttgcgtcgctagattccttttgccctctaagttatcttccttaatactgtatggaacaggccgtttccatgcgacagaccggagaggtgatatgccgcctgcacatgtggaaccgggatggactgtcaacagctgccaacagtcactacgaatgcatcaaccgaccccccctttcgatccggacaaatccaacccacttttgctcctgcccatgcgactcattagaaaggag

SEQ ID NO: 424874 - DNA, 437 bp, Oryza sativa
aataaaactattcatttgacaactttgtcacgtgattgctcaatatttcgtcattgcaaagataatatatatactgtccaatcattaatgatgaacaaactttttttaacatcgtattggagttggccgagataatgcaaactttataatttaatccttgcacccatgttcaatgtaaaccagtttttctgcaattcgaggcaggttctacagcaccaggtcagcagcagtccgagctatccttattagagtattagaatatcccgtggttaggttcttatggtaatgacagattgatactggacagatcatgaagttccaacgtctcaatctccagatgcaggagctgcccacactgggtgatggctcgagaccagagaccttcagagtgccttttaagtcacacatgcctaccattccaagaaggtatatgcaag

SEQ ID NO: 424875 - DNA, 94 bp, Oryza sativa
ctattgaaagagctatgcacgctcgcatggcaacgtgtacgtaaaggcttggtatcctactattagtctgagccgcaccttttttatttatttt

SEQ ID NO: 424876 - DNA, 666 bp, Oryza sativa
cgcatgcacgcggacgaaagcagggagccacctgattagcaacccgaaaaaaaaaaaaaggggggaaaaaaaaaacaacacccaaaacaacaaaagaaaaaaaaaaaaaaacaaacaaaaagagaaaacaaaaaacaacaaaaaaccagaacaaacaaaaaaaaacaaaaaaaaaaagaaaaaaaacaaaaaaaaaaaagacgaacaacaacaacaaaagaacagaccaacaaaaaaaaaaaaaaaaaaaacaaacaaaaacgaaaaccaccaaaaaaaacggacaccccacagaaaaaaaaacgacaaaacgaacaagaaaaaaacaccaaagacgaaccccgaaacaaaaaaaacaaacaaaaaaacacaacaaaaaacacaaagaaaagcaaaaacaaaaaaaaagacacaccacaaaccagacaaaacacacaaaacaaagaaaaaaacaagaaaaaaaaagaacaacaaaaaagccacaaaaaacacaaacaacaaaaaacaaacacacgaaacaaaaacaacacacaaaaaaaaaaacaaacaaaagagaaaaaaaaaacacaacaaaacaaaaaaagaaaaaaaaacaaccacaccaacacacacaaaaaaacaacaagagcaaaaaaaaaaaaacaaaaaacaaaacaaaccacacaa

SEQ ID NO: 424877 - DNA, 294 bp, Oryza sativa
cagggcaaaatttttttggaaccaaaagggggccatcatcctcctttataatttccctccttaattaaatcatcccagaataatcatttatttcctccgggaggcagttgtttagggggggaccaaaggggggggccgtaaataaataaacccaaaggggcgaatttacaaagccaggcacgcttttaggggttattaaatctccttaaattaggggcctcctcctctttaatcaacggccaaggggggtagggcttgcggcttggcggtggcccccgtcgccggggggtcttg

SEQ ID NO: 424878 - DNA, 128 bp, Oryza sativa
tttttggtggttttttttttttctctctttctttcatattttttttattataactttttttttagtattgattcaactaccaaccgagggacaccaacacacaaaccccccaaaaaaaagcaaacaaa

SEQ ID NO: 424879 - DNA, 124 bp, Oryza sativa
ggggctaaagaagagtgtatttttataaaaaggggtgatacagctgtttttcattgcaacagcagcaacaggttcggatttttggtccatttgaacactgtattctaccaagttcatatatggg

SEQ ID NO: 424880 - DNA, 60 bp, Oryza sativa
attaaaaattattaactttcaacaaaaaaagtgacaagcccccggggacgggcaaaacca

SEQ ID NO: 424881 - DNA, 495 bp, Oryza sativa
aaatagttatatcattcaaatgagacatttcaaatggcaggctatataccattagaggagctcttacagacaatgcacagacaatatagtatttcaagcatcaggtaggctttcagtcatttacgaattagcatttttctttgtgtgtttgctctcagtacccacttggttcttcatgtagattctagacgatttaggtttggcactaatagaactagactttcagttaaatggatgatttatatgcaggaagatccaatttgcttgataccctattatctgtgtaccattttcagtacttttgttgtacgactgttatacctatcctgacaatgttatacatcattggatcaaatggactagatccttctttacacttttaattctcttagctggtagatcattgaatggttaatatggtcaattataggttgcatgctaacatggtgtatatttgtctgcaggattttttttcttccctttacccatcatcat

SEQ ID NO: 424882 - DNA, 477 bp, Oryza sativa
ttgctttccaccgctgtcgccgcaccatcatagggggggcgccatcctcctctgggtgcggtcgatgcatccgccaacgaggagggcgggaccgtcagatccggtgaccccggcctcattggcggtggatccggccgcccggaggcgaggggagaccggctatcaccctctctactcttctccttctacgtccggcaccgctacaacgacggccgcgcggatcgcgtgaggcaacgggtggctgctcccttctcttctcccttctatctccactattcctttgcagatcggcggaggcctgcaacaacaacgggcgcgcgggcgagcaatcgaggaggccgggaatcaccagatccggaaggacggcggcccgattcggagagggagcaacccgatctgtgtcattgaggctcattgtaagggtctaccgcggccgttccttcacagtgatccagggtcgttgggtctggtgagctc

SEQ ID NO: 424883 - DNA, 488 bp, Oryza sativa
gattgttttagaaaaatttgagaacataattgccggcagtttattcatcttggggcaggtgaaaaggcaaccacagggtccatctggagatcctgaaaaggacaagatcattagcgaactggggaaattcatgaatgctagggtacaatgggcgaaggctatgcctcactggataactcaaagttctaattatcaagcaccaaccacagaaactgggttatctttcattgatggactaagagacctatttgagcatgaaaacgagtatattccacaaaaggttaaacaatcccaatcgaaaatccaattagttggtcgggatccagatctggaatgtcagcttcgtttaaatttggaaaagatttttctccaagctcaaaattttgttcttgaactggatattgaatattgagagcgcattgcagtgcaaggaggctaagcagtcacggttatggcgagcttgatgttttggctagggactaatgcaa

SEQ ID NO: 424884 - DNA, 348 bp, Oryza sativa
gactacttttactgggtggcgcacaaggagatatggaaggagctatttaaggtgctgcaggcacaaacccagtggcagataagacaagagggcattcctttgacttcattcggcccaccaaatggggctcataaacctggggtgcacctatatgcgtatgatttacctcgtatggctttccattcatttgctggtggtaattctcaaccctatgctattacaacccggggatcattgcactgaccggtgggagctgttccacctgtgcctcaacctgtaatcagacactttggaccttgtggacatactggcggccctattggtgggcacctttatcaccaacagagt

SEQ ID NO: 424885 - DNA, 474 bp, Oryza sativa
  unsure (1)..(474): unsure at all n locations
tttatttcgttgatgagcctctaccttctcagtgtcagtttagagcattccttggggcaagatccatcatgctcgacgacgtcgacgacgagcctttcgccgatggcatctcgagcccgatagcgcagcacatctatgacttctgcgacgacggcaacggcggcgacctcttcgcggcggtgaacgcggcggcggcggcagggtcggacatgttcacggcctcctcggaggacgcgtccgcctcgtcgtcgtcgacggccaccgcgccctcgngggcgggcggcgacaccctgtcgccgccgctgccgtcgctggactccacgctctcggctctcctcgagcaagacgagccgcccggcgccgacggcgagctcctcctccccatcgacgactacgcgttctccgccgtcgacgagacgcagccaccaccaccaccggagcatcaacagcagcagcaattcacccagatgcctc

SEQ ID NO: 424886 - DNA, 378 bp, Oryza sativa
aactaggtcaactcatacacctgagacgaggccgggcaaccttggtggaactggaggcaatgattaggaaacattagtattccggaaactttaagaggctcagaaaaggaagctaagcggctagttaggcggttagttgaagcgtaagcaggacgtttgctgcttaagaacaactgagaatagctgggagacttacgtcagaaatttgaacaattttgtagttgggggcgatcttgttgataatatttctcatgctgatggtgatgccagttttcaggcattcactaccatgtatgttattccaatagactatgacgtaagatttttaactgtatacttcaatatttggtttgggataaaagtgatatactaacatgt

SEQ ID NO: 424887 - DNA, 248 bp, Oryza sativa
ttaattttcttacccgcgttccaagagactagagtggggccagattaactatatggggccacatttgcaaggaactacatattataatgctttttgtgtgcactcatatcctatcgatgttcataactctttagatcgaattcttgaaaaccttcatgattgctattttcttctacatctatatgattatcttgaataaaatcatgattattagataattcttattgtttatgatgacaatcacttta

SEQ ID NO: 424888 - DNA, 305 bp, Oryza sativa
atgccctatggaacaaccaaccaaggaaggctacagtaagaacgggagcttgatacgtcgagcacacatggcatgagctcaaatccattcttccccggcatgacctatccttgtcacactgtagggactacacaatatgagatctcccaaactttcacaggccggactagggatctacagtacatcaagcgaagtacttacaacctgcagcccaagtaacacgtcatacatagggcagtcgaggaccaattttcattctttgaaatacagctgacccttatcaaaacgacaattctgaggacctc

SEQ ID NO: 424889 - DNA, 503 bp, Oryza sativa
ccatcgcctcctcctcctcctccgccttccgcctgtcaccaccacggcttccagctctggccgtagcagcagcagcgcgcgcgcgggtgcctgtgcccgccgctgctcacggctcctcgccgccggcttgtgcctccgatacgtgagctccccacgggggtgcgagggggtctggaaaccggcggatctcggccgctcgccgccggagtccggcacgggtggaggagtacggcgacccgcttttttcttagcgattttctttcctcttctctcaggctgagctccccaagcgccgtgaattggtaggacttttgtgggaggcgctggtttctgctctactcacagcaagtttctaaagactcggaagcaattgatgtgaagtattcttttcagttcggcttgaagtagtcctctcagaccattgccgcatataagagtagcttattaccttgtataggaaaaagtagaaagcttattcgagcatgtctggttcataatagact

SEQ ID NO: 424890 - DNA, 88 bp, Oryza sativa
ttgcttagagatcttctcatcaatatcccggcattggtgggtatcaatcacctgcgtggtggttcaatccgcggaggtgatgggtacc

SEQ ID NO: 424891 - DNA, 249 bp, Oryza sativa
tcttttttatctcctcctgctacgcagccttgggggtgtcatcacctagggacgggaggtataagagggcgaactaaaacaggctggctcctgctatgtgcacatctgtgggtacgggtactggactacctaacggggcttcgatacatgagctcaccactggggtgcgaggagcattgtaaaccggaagattttgactgattgtaaggattacacgagactgttgcaggagaactgagacccactaca

SEQ ID NO: 424892 - DNA, 213 bp, Oryza sativa
ttttatgatcgcctcggagaaggcaacgtcgcgctcgtcgccgggtaggtagaatccagctgatggcgaactcaaaccggctgccgtactgcacatggtcatgtcggaggtggaggaggaggaggaggggggttgctcattcataggctcatacaatgatttggtgtacaggtcggttaagggcaaggtggtgcaagattggaggctgcattg

SEQ ID NO: 424893 - DNA, 326 bp, Oryza sativa
tgctttgttggcccccatacttcccccacacggtcgtgctgcggtcgatcgctcgcatgtgcgccttaaactcctatggacttgaggacgtcggtgaacttgacataccccaccaagatgctggccatgcattccgcttgcaggtcgtaaaagactacgtcggcgtacacggatatcattggccacgtcgtccacaactaggagccaaccttcttggtctggagcaactctccaaagctcacgaccagctggcgcacgatcaccaaccagtgcaggtccactgctgtacacaaccagaacgggcgcattatggatcgatactatat

SEQ ID NO: 424894 - DNA, 248 bp, Oryza sativa
ttttcatattacccaaggagaacccatctatggggacggctcatataaagtggggggcacccaagccacaactcaaattggctccctacgtgctaactaccgcatggaaatatcagaaaactgctactccatgaacatcaattacctcctcataacttaatcctgcacatacattactttgctacagataactcacaaaaatgaaatcttcttggaaatcttgcaatatttaacaacaacaacagtcg

SEQ ID NO: 424895 - DNA, 294 bp, Oryza sativa
tgttttttttgaccttatagttactcgaggggggcggtttagttgagagatgggacaggcaatgccttacataaacgggctggcgcaaggctggcaatctcctgtcactcctactacacgctggtcataggaacagtcatgcacgttgatgaagccgacgccggcgtatacgacattcatacccgtcgacgtgacgagctagaactcttcttgaatggcatggaccgtctcgccatagctcatgtcgcgcttgctctggttgacacgcatatgcagctcgaccatttgatcacc

SEQ ID NO: 424896 - DNA, 365 bp, Oryza sativa
tgtttttgtgggtgctggtggttcttgggaaggcagggcaactaatgatgagagagcggataaacattctaaagacgaaattgaggaaagtagagatactatggacactgatgcgacagctgatgatgacatagatcatgtaaatgaagacaatgatagtgatgtgccaaaatgcatacctatgcataatatgagagtgaagactatcttgaattgtcaggatctatctaaggcatactatcttaccgatttgcctattaacacagaatctgaagctagaagaactatatccaggcacaagcaagctcgtgaaaacaatggaacttggaaatgcacacttcaacttctgggcaaaattcatcact

SEQ ID NO: 424897 - DNA, 211 bp, Oryza sativa
ccggagaggccgggcagcttctcaccgggggggttccctaaggacaggcggggccgcaacctctctctccgagcaatgaggatcagcctgcctgcgcccgttgtgcgcggccaggatgccgccgacgatggtcatagctgcgatcccaatgcctcgctccagctggggctacggtgctgacgcctagtagtctggccacgccgaggaggcc

SEQ ID NO: 424898 - DNA, 198 bp, Oryza sativa
ccgcaagcaaacccatggcctcctcggggtggtagttctaacccgcggggggggcgacaacagtgcggtcgtatgcagtgacaccaacgctgcgggccttgatgaaagacagcctagctatgtccgtcatgctacgtaacaaagacgactgtattgaaattggcaagataacccacagcaccgccagacgcctccgtg

SEQ ID NO: 424899 - DNA, 303 bp, Oryza sativa
cagtgatgagctagctagcgaaataggcgtgttcggggcgtggctggcaacgcaggtgcgaccatttccgtagcggcgggagctactgggcgagatcaaccctggcctccaggtggacgccaccaccggtgacgtcgttggccgcgccgactggcataacgggcgccggtcgcccctgggcaatgctgtgaacgacaggcgcgagccctacgatgacgtgcgggtggccggccaccaaaactacgtgtgctgggcccgcagggggcatggcgcctcccgtactcccctggtcccgacgtacaa

SEQ ID NO: 424900 - DNA, 122 bp, Oryza sativa
ggattctgccgcagaagtcaagcagcttctcaccgggggcgttcccgaaagacaggctgggccggaacctctccctccgcgccatgaagatcagccagcctgcccccgctgtgcgcgtcaag

SEQ ID NO: 424901 - DNA, 220 bp, Oryza sativa
gtctttttttccacagtgcatctagtgtcaaactcgggggggactgttattaacccgctggtcccacataccgtgtccctcgtaatgtctatgaaccaacctccggaacctgtatctagacagagagcctccacagtaaatactacgtaacaaaaaagtatctagtacatctagtgctacagtactgagatatcctacacgccttttcttcctgagtgca

SEQ ID NO: 424902 - DNA, 349 bp, Oryza sativa
gtccttgcttctacttgggctctcctggtcacctgggggaggctctacctactcacgggggcccacatacgatgcgccttgcatgtactgtgtgccaatcaccgggcatatatacagggatgtgcctgtgccgacgacctatgacggatcgagagacatggtagcggcggacgtgcgagcttacaggcaggacccggaccacgcccccacctaggaggtggatccgcagcgcaaggtgggctcctcccgcgggtgctaagccaagatccggctgtctcacagatgtgctgggctacccgatcttgcgcactcgcaactcgccaggctacctcatgctgggagcggtgac

SEQ ID NO: 424903 - DNA, 266 bp, Oryza sativa
ctctttccgagtaccatcaacgcagtggcaaggtgacaggtgtctgctgttggtgcatgtgccctctcacttgtgcaattgcaatgtctctgttcacacttaactctaggattggtacttgtaactttcataatcttaattaggcagctgaaacttatgtgatgatcaaatacaaaaaagataaaagaaaaaaaaaataaaaaaaacaataatatgaactacagaaatatggctaaaataaaacaaaataagctcaaacactgggc

SEQ ID NO: 424904 - DNA, 461 bp, Oryza sativa
ccacgcgtccggttgttttcgttgcggggaagcaaccaaccaatcgggagagttagcgagagaagaggggaggaggaaagtctcaggaccgacagtgataggcgaaatccctctgatcgagttcgcgttcttgggaaattcttctgggagttcttcgaagaatccgcctctgaccactacgacggattggaggcgtggagtgccaaagattcgctagatcggggggcctcttcctagcaggccttggttcaagatcgagaggaagcactttgtgagggtttccagtgcccgatacttttttttttccagaatcttaagcggccgcggcagtggtgttgatgcgctgcgtctccagatccactgctgcagtcggcagcgccagtggagattgcagcgactcattatcggggggtgccctgccctggtttcagtatcatctactttggctgtggttggggatc

SEQ ID NO: 424905 - DNA, 462 bp, Oryza sativa
gtattttttagtgtcttactgccctctcgaatggggcagcagaatgcttaaactggaccttttagaacatttactctgaaaaatcttctttttttttccaggaaatgcgctctctcagtttggaccattgctagcaaagttctttagtaggtcttgtgcttcccatggttcacatgatgaacaggcagttctacttgatctcagtccactacaggaagagagactgaggttcttgagacaaagattaaatgtgccatttgacagttcctctgtcaagcatcaggttccgcttctgtacctaactacctataggcctttggtattcttgttctattgctctcaccaatgggacaccaattttcttgctcagaagaaatgataaactgaacaattcatatactaacattcatgatagtaaaatattgcattttttctatgacaggatgctctgaaagaactttg

SEQ ID NO: 424906 - DNA, 471 bp, Oryza sativa
cggtctcttgggcgaagcttcctcccccccaaaccgggtgcgctcctcctcctcctgggggggcaccacggcgacgccgccgcctcagagcccctagctcccggaggtccctcgcccccggcagctccgacggcctcacggaaggaggagtaacgtgggcgttgattggatttttttggtttccccccaccttgagtgagtctgtgccgtttccccggcggcgagggagggcagagggctgatcatggtcgtgcgccgccggtgccttgccgagatttcccccaaccgccaccgacgatcgttcacttggcacaaaggggagtagcactgtccaagctgttgtgggccgtcagggagattgggcaacctgtgggggttcagatcgacataagtacgtcagtatttcagccatcgatcaatctggcggttcatatggctgtgcttgcaacctttctggcagataggagagag

SEQ ID NO: 424907 - DNA, 394 bp, Oryza sativa
agtgcatgtattataacaacttaaagggtggaaatcatcataaagtgagggcctgtagaggcccatgtcatacaaaattaccgaattgtccccatctgggctcagaaatatgtcaccctggtcagtgcccatcagttgatcagtgcatgaaaaaggtcaatgtccgttgtgcatgcaacaaccttaaaaaagagtggatatgtcaagatgttctgaaggaataccgtcagtctggtcttgacccaaaacaaatacctaaaaatcaatatgcagttagcctacttgcctgtggtgaagattgtgtcaaaaaggttaaagctgcagattctgagttgcatctccggaaaattcaggagatcaatgacccctgctgtggaagctgaaaatgtgccca

SEQ ID NO: 424908 - DNA, 272 bp, Oryza sativa
attccatcctttcttctcttcaccatcttattggtgttattcacatttggctcagcgagggatccattacatatatgatgacaaatcatcgagctctatatatactccattaatctaagctggacgatccatggacagtaccaaattaaaacgcgactgtaaataactctatctatagagcggtacatatagactagttccacattaccgccacactcatgcttgtcatagctttacctactcgtatatcacgataccatagatgccacaat

SEQ ID NO: 424909 - DNA, 478 bp, Oryza sativa
ggattgctccccacgctgtcggcgatggccactatcacggtgaagccgccggcgacgggggcggcggcgggaggggaggtgtccgaggtggagctctcggaggcgggatcgccggatgtcggcagccagagcatcgggagcggtgggagcgggcggagcacggcggggtcctccgggtgggtgtaccacctcggcgtgaactccatcggccacgagtaccgccacctccggttcctcgtcatccgcggcaagacggtggccatgtacaagcgcgacccgagcaagaaccccggaatccaacctatccgaaagggtgttggaagtcacactcttatggtggaggagcttggtcgccggattactagccatggggaactgtatgtcttgcggttttacaatcggttggatcaaacaaagaaaggagagattgcatgtggggacccccgggaagctaggaaatgggttgaagcatttgagc

SEQ ID NO: 424910 - DNA, 381 bp, Oryza sativa
attgtatcaccttcaaagtttggtgccattatggagtgcactccagaaacaccgggggcgatcctaagcactgagcctgtgcctactgttgcttccaccctgagtgaagatgagccagttctgtgtgaagatcatgtatcatgttcaactccacaaattgatactacaatcacctcaaatccaccgaaagttggtaaaactgttacccttacttcaagcatgctgattgctagtcactctattcaagcaccgtctatatcaccggcaccacagggtgatagggtctctaaaggtattggtgctcccaccaaatcacctgctacacagggtgataaggtctctatagctgttccgactccctcaaaatcaccttgtacacat

SEQ ID NO: 424911 - DNA, 408 bp, Oryza sativa
  unsure (1)..(408): unsure at all n locations
ttcttttcgaagatttctttgatgcgtactgggggtggcatttggatcttggtggggccatgagtccaccggggaggaaggcccctgccggtgcgggcgggatccgtcggtggctctccaccgtcgtcatgtcggtggtggctcttgtgctaaccctagtagtgatatcgctatcggtgggctcgtctctgaccggggcatctctacacgagtacctctttgtcagacctagtgattcatccaagcttactgatgggaacatgaatggtactgccgttggtgttccattacatgaagaattgttgcagggtggcaaggaagtacccgttgtgcacggtgttcanagtggccgcgtgaattcgagcgagacaggtgaaatctataccaaagtacaagatccagttgtta

SEQ ID NO: 424912 - DNA, 418 bp, Oryza sativa
  unsure (1)..(418): unsure at all n locations
gattttggcagtgcgattcagggtgttgacacagggggtgccttttgttctgatacgtgggtgtaaactagtgtagtagtgttctaatataatgtggattatgtgtacaatgctttgtaggtgcagcagaaaactagctaaatacccatgcacagattttctaataaatatatcatcagttcgaaactcaaaaagtgagcatatttatcctgagaatcatatgtaatttgcaagacgcataaccataaagaagtggcggtgggatttcagactcaccataaccaccattcctaggttcttttgtattagtagaaataaacatgacattaaccttcatgactagtgcaatatnccgtcttaattgtattttatatgcaaattttgggatgggaacttccacacgcccgtatgggacact

SEQ ID NO: 424913 - DNA, 373 bp, Oryza sativa
gtcttctgccggtgcggcggccacggcgacctgggggggatctggtgacgggcgaggggagggacaaggcggtctcgccgcggtcggaaaccctaaccctagctgctgcggcggcggcggcggcggtggcgtcggagacggagtcgagcagcagctgcgaggcgtccacgtgctcgtcgtcgtcgtcggctttcaaccccgggtcgtcgggggcggcctcgacctactacctctccgccttctcgtcgtaggcctccaccgcgtcgtcgtctgccgccggcgactagcggcgcgacatggcgtggctgctggacgccttctgcaccgtcacgatcgaccaggtggactccgcctaccgcgaggccggcggcga

SEQ ID NO: 424914 - DNA, 427 bp, Oryza sativa
ttcttttcatcggcagctgcagctaacttcacggagggctacaaaatcagtggttgaattgctgacagagagggtcaatcagttgtctattaaaacagataatgacttggattttcttttggatgaaaatcataacctcactgagatggacactcacactgctgagtctcatttagaggataaatctcacaggcaaaatgaggagtgctgctcatacacaagttcaaaccgagagagctggggaagatgttcttccttgggggcagcgagtgatggatcatccctaggcgagcgccctgaaattcctagtcataagcataagagcatgacgctacgggccttggcaacaccactgagacggatacgaaggaaaccgctcgctataccaaaggagaagaagaatcgatctctatggaagaggctcaaa

SEQ ID NO: 424915 - DNA, 274 bp, Oryza sativa
ctcgacccacccatccagaattttttctccaaacgtcaacaacacccatcccaaggggggaccatatataaaataacacggcagcgcacctcacaccaccaccgttccgacctcccccagagaccggatccctttcctgtcattataaaatgaaacccacctcacaccgtactttcgttaaagacaactcccaaaatctaccttagcccctaaacaccttcccaccgtcgcccttctttttcccccacaccggtcgcttcaaaaccaacttccc

SEQ ID NO: 424916 - DNA, 504 bp, Oryza sativa
gtactattcaacaaataaaaaaagacccaccacggctgccgccggcctctccctgcggccgacgacggctctcctcctccatccgccgctgccccacatgcatcggcgccgtcgtcgtcgtcgcgtcatggtcgtggtagtcatcgtcgtcgtcgcgtcggcgctgtcggtggggaggagggaggagggagccaacagcaaagaggggatcgagccggcggcggaggcggggaggaggggagctggtggatccgcagcttggcgacgttgcgaaggtcgtcgtcgtcgtcgaggaggaagacggcggcgaggagggagctaacggcggaggcggggaggaggggagccggtggatccgtagcttcgcggcgtcgcgaaggtcatcgtcgtcacggcccgagggagtcggcggcgtcgcggtcgtcgtcgtcgtcgaggagggagccggctgcggaggcggaggatttctcctaagagtgtgcgtgtgtgtgagagagagagaga

SEQ ID NO: 424917 - DNA, 433 bp, Oryza sativa
tactcatttacctagtaatggaaatctctctgtggagatatctttagacagagggggtcaaaaaataaatcttcctcctactattgttccttggcgatactctccttctgttcctgcgctgactctctgtttctccggttctgttcatcccgcgcacacgggtgatctgaacgagcaagtgcctccgaaactccgtacgcttgagaacctgcacaggcaggcaaacgaacaagtttttgggtagcgcttcaagcgcgactgctttgcatcatcttcaccaacatgtcgacaaccgatgacaacaacaacaccggagacaaggagatggagcctctcgtcaacaccaacgaaggcaatactgtctcaaactccatcggagggtcattctcggggtataacgattcactattaccgttcgttcttcatttactac

SEQ ID NO: 424918 - DNA, 202 bp, Oryza sativa
gagttttctccccccgtctcgtcgtctcctccgctgggtgcgcctacccaacacgaggggcggctgaacagaagagggggagtaggcggtgatctccatctggcgactcgcgagcatagcaagggaggggatcctgatctggatgaagctctcctcttaacttcagcgccttaaccttaatacatgtaccagtttgagtttg

SEQ ID NO: 424919 - DNA, 334 bp, Oryza sativa
tttaaccacacgtgcgagattcctccccccgtctcgtcatcctctccgctggttgctcctacaagagacggggggtagcttaagttcttgatcgttggtgattgcttggagcctttgagccaccaggaagaaagaagaggaggaggatgcggaggagagatagatgagaggctgcggccgacgttgactggggcactgttccaagagagagtagcctccaaagatgtgaagctaacaagctgcacaagtaggagaggtgactgctcctaaactgactgataaggaactacacacaaggtaagtacatgatgatgacaaggaaaatctagtgaat

SEQ ID NO: 424920 - DNA, 352 bp, Oryza sativa
  unsure (1)..(352): unsure at all n locations
cccacccactcctctctnctcttttacttccactattcattttcttctnttggttcccttttactatccctggggtttttaaaaaaacataatttttattaaattccccctaccattgtttcttgctattctctactctaacactctaaanataaacataacactatacttctgctaattataacacacttccttctgacaaattcatatccattttaaccactctctccccatatattcttcacaatcatctatacttcttacatattacatatactttgataatatcccaaaatattcctatattctctattcaaacttcattatgcttcatttcacatttgaataacct

SEQ ID NO: 424921 - DNA, 86 bp, Oryza sativa
cgctacttcttcctccaaaaaacccaacagtggggtgtgagttcagaggaaagggcatagaaacctagggagaaaaagactgcgat

SEQ ID NO: 424922 - DNA, 183 bp, Oryza sativa
ggttctggcccgcgagctgatatctgcagtttggagccgagtagagaaaaaaaacgaaccgggtttttttttaggtcggcgggcggctcaagaaagaagggagctttttgggtaaaaatttagtcttgtttttttttccttcgctggttggggttggggttttcagggatggggggaacggag

SEQ ID NO: 424923 - DNA, 251 bp, Oryza sativa
ggtttaggtcacgcgagcttgtctccacaacctggtgcccctataagaaaatactgcgaactccgaacatctcttcaagtggacggccacttacagtccgcaacacgactaatgatatactctacacccaccattcctgtggctaccatcggcaattgaggttgagtcctcggataccatagccattatcccggccaagatccattacaggagctcctctccaccggacccagatcgttccagtacctctc

SEQ ID NO: 424924 - DNA, 513 bp, Oryza sativa
  unsure (1)..(513): unsure at all n locations
ngcttatgatggaaatgtgttccaccacctggaaatttgattttctcacctgcatcaatcatccaattctggtctgacttctcatgtgcaagccaccgacacgcagcagtgtgatggtcgacggtgaagtccatagattcccacggagacgtaaaagtcccccatatgccaatgccgcccagagacagggacacgtgggcccgcccagttttctttggcacgattagatccaaggagttaaggcgcattcataaagacaaaccaattttggttcacaaggatgcagatctttcagcagtgatagggctcatcatttcagctgcgccgtgtttagccaaaggctacttcggaatcctagatgatctcacatcattacagcaagaaacctgaagctttgtgtgctctctctctctctcaccaatgcagagagaggataatgggttcaagtacagtatgatgggtaccgttgacaccagcacgtggatgcttaagggttaagcgactcctatcttt

SEQ ID NO: 424925 - DNA, 401 bp, Oryza sativa
gtgtagagcgagagagggtactacaccgctgtgtctcactgggggagggaatgatgtgacgaaggcgaggagcacggctcgctgctggagaagatcatcgacaagatccatgagctcaagacgggatcgtctccatccttgccctgggactccaacgacgacaggaagcaccacctcaagtacaggcacaagaagaagcggttcttcttccggacgaacccgcttcatgacgggctagcgatgaagtaaaagtggtgcccttgggctgtggaggaacaagcctgcgaactggagcatcttgaatttagtgagcaaaacatgcttggcattagaagggtacactgctgaatctcacgctcctgaagatggtttcctctgaaataagctatgttacaacaacc

SEQ ID NO: 424926 - DNA, 238 bp, Oryza sativa
gagtggacaaccaccagaaagggcctgagatggagaatgagaacaagcattgaagaatctagggctgaacctcggctagtgaggccgaaagatgcaacatactggcaggcattctaagctagcaagctttacattgagcagatcgggaagaggattaactgcatgaaagcaagctgtaattgaaaagagtgaaaccctaacagccaaaaagaaagtggtggcatacaatttatataac

SEQ ID NO: 424927 - DNA, 409 bp, Oryza sativa
gcttctcgtctccgtcgagggccgcaccaccctcgcctctgtctcctcctcttctctgtctagcctagctcaggtctctcaacgtctctctctccagctgcaccttctgcgaggccgccattcccaaggctaccaccaccaccaccaccacgcagcagcggcctaggagtacttgcggcggctgcttgatcggctttcttggctcgtcagttgcagtattccctcctcaaaatatataaaaaggaaggagctccctgaggctagctggattggatgacgtctcgtgaaagttgcaagcgatggtgctctgactggtcttttgcctctgatgtctctgctggcgatgggataagttggcgcactatctatcttggctgtgtgtcctgttgaaccttgcctagctgtgggt

SEQ ID NO: 424928 - DNA, 98 bp, Oryza sativa
actccccacccatgtcggacgcctacaagaaagcgaagcccggccgcctcgtcttcaaggtcgcgaggagcacggctcgctgctggagacagatcaac

SEQ ID NO: 424929 - DNA, 492 bp, Oryza sativa
gaaaagaatgctttggtacttatcttatgaagtagcaacttaatcaggaaaaatagcatttgaatggtccttctctatatgcacaaattgcacttttatatacatggtccgttcttgtcattactgaaaggtttataaaacaccccagtgatagtgctggcagccttgatatgtccacatggacggaaaaagaaaaaaaaattgcagtggtttagaacccaaagctaaaatatcgattaggtgtagagtcagtttcagacttgtgaacttgaaatgttaaccaatcttgtaaaaagtagatgatcatttagaggttttacatatgtcttttttaacctagaaagagatactttggcatatcttttcaaattttgtgaatactaatttacagttcatcattgaaatatttattgttacaaagaactaaggtctcaattcaaagtatcaagtcattcattgcattgcaatgatacggtactttgcatatgtcat

SEQ ID NO: 424930 - DNA, 563 bp, Oryza sativa
gattatttcattgaggatgcttcatatcagtaaggagccatggtttggaaggcctttcatcaaatcattccaaagtctgctacggtaactcagaatttcatagtttgttgcgggatccacatacttgttacctccttgttacaatcccttttctggtttttaggaatactgttattgggaagctgttcttcagcgctgttgctacaccagaatctgtgaaaaatattctctgtcaggtgtatatttatttaatcctctcatcttggaaaataatcaaagcataagcagattattgggcatatacaaaaatctatggtaacacaacattcaggcttaacgtcccaaattaagtaaaagccacatgaccttgctccaatggctgcattctgtgaaaagaaaatctttaattcatcatcttaagtatagaacctgttcttttccctttatttagtttgtaacataactgtaacctttgttccacaatgttgtttctcctagttctgatggaattcatttcagtgctaccatgacacatccgcagtgacagatgagcctagtcagtt

SEQ ID NO: 424931 - DNA, 270 bp, Oryza sativa
gtctcatgagacgcactcctcacgcacgggagcaggagcgatgggttctcctcctgcccatcgcctgctcctcctcctcgcgggcgacggcgtgctccaccgctcggcggcggcggcggagggggtcatacggctgccgagggggagggcgggtgccgtttaccaagaaccacgtcaacttggaccaggcaaaggcacttatggatgcttaggttaagagggatgagacaaagcgggtccgcatggaatgtgcggttcaccctagacgca

SEQ ID NO: 424932 - DNA, 372 bp, Oryza sativa
atttctttcagcttcccatgctcctgcttcactgtccgcgttgtcgccgggcgcgtttattcatatgcctcaatcgaagcatccagcgcgtacaccgagagaggagcggggaggaggaaaggctcacattgcgccatgactctaaaggtcataatgttggcattggttgatatgataacgtgcgatgccgcgagatgcaaacccccgttatgggggatgaacgaatgaagtaccaagctgatcaataacccactcggtgccatcatcgacaatggacggaagatcaccgatgccatgatttacacgtgcgcggggacctgggatgatgtaacggggggttacaagaagatgttgaacacactgagtaagctt

SEQ ID NO: 424933 - DNA, 93 bp, Oryza sativa
cgctgcgagcgtgagctctcccctctcctctctggcaatccaagaagccaagaaaccccaatgcatctccgcctcctcctcctcctcgtcggc

SEQ ID NO: 424934 - DNA, 265 bp, Oryza sativa
gttcctgtgatatgtatgatctgacccaattatgaaccaggaattgatttcaaagcggttggtggaaattaagagattacatgaagagagaattgaaattttgaacaaaatagcaacttttcagaatatcttgatggatttcaagagcattcgttcttcaaaagcttttcagcttgttaatgatcgacttcagaagtctcaagcagaattggatcactaccagacattattagagaaattacaggttgataaggataagtctgtg

SEQ ID NO: 424935 - DNA, 157 bp, Oryza sativa
gatcaaaggagcaaaagccatagccatggcggcggcggcgtcgtctgttctggcctacctgctcgtcgttgctctccttgccatcgtgcctctcgtctacttcggctgggtggcgcgctttctctgtctttgactttccttctttatcttttactct

SEQ ID NO: 424936 - DNA, 101 bp, Oryza sativa
taacaaaccaatgacaaaggatcaatgggatcatgtaaaaaattcaatgggttctgcgctcgaaagaaatcctagcgtggatgtaatgataactatattat

SEQ ID NO: 424937 - DNA, 229 bp, Oryza sativa
cgtcccattcgcagtagctgcgagctctgagcgacggctaggtgtccgacatggcgtctgggcagaaggtggtgaagccgatggaggtgactttgtaattttgacaaaaaaacaaatttatagaattttttgatggatttaaagagcatttgttctttaaaagctttttagcttggttaatgttctactttagaagtcacaagcagaattggatcacttcccattattt

SEQ ID NO: 424938 - DNA, 460 bp, Oryza sativa
ccctcgcgtccgcccgattccccaatctgcggtgtggtgtggtgcggtgcgagccggacgcaggcgtcgcctcgcctcgtcgcgcgcgcggctgtagagagagaagcctcgtagacaccctagcctcctccaccggccttgccctcctcgcgcgcacggcctcctccaccggccttggcctcctcgcgcgcacggcgggcggggcgtgcaggtttgggggagtagcgacggcgacgcgcccgacctccgtccacctgcctccatatcgggctgcagcatgtatgaggaagacaacattcagggagaattgttactcgttcaggcagaacttgatgacatccaagggcaaattagtgcactgatcgatcgtcaagaggagctggatgagcgtgaatcacagctgaaagctatgctcgaagtatctaaagcatccaacaacacaatcaataataccccttta

SEQ ID NO: 424939 - DNA, 207 bp, Oryza sativa
cattactcctcctcccctgcacagaccactcgtttcctccacaaagagggagggaacaagggaagggtgtcgcccgccccccaccccgatctgcctccgccgctccgctcctccgcgcctgcgaaatctaccaacactaactcagcaagatgggtgccggcggcaggatgacggagaaggagcgggaggagcagcagaagctgctcg

SEQ ID NO: 424940 - DNA, 507 bp, Oryza sativa
gttaagtccatcttactctccaaatatggcaaaggcaaagaaaaagaagaagaaaaaaaaccccaaagcttacttttgaataattggattggacagtcataggaaagaaaaaataaatgagaacatgagcacttctgaaagatcatatggttctaaggatggctactacagtgaggaggaggactcctttctggacatgttggttgcggctttgaaggcaaagctatgtgtgagggcagcacgttgggtatcgcaacaatctggaatggaatgggtgatggagacaatggaaaacccatctcaatgccaagcaattttccgtctgatgccagatcaaatccatgctctgtttgggttacttactaatcgatacaatcttcatggatcaattgaggtatgcccaatggaagcacttggaatatttttgtacatcatggcggtgggcaattcaaatagggccactaataataggatgaatgatgaagaatttcagtcatttgctggtgc

SEQ ID NO: 424941 - DNA, 144 bp, Oryza sativa
gctgcagctgctgtgctgcgcgggttaaaaagagagagatctattaactggccctcctctcccacagcaaacacactcgtgtcgtactgagcatctgagctcggtggttgccgaggaggattcgccggcggcggcggcgggggg

SEQ ID NO: 424942 - DNA, 310 bp, Oryza sativa
catggcttacgccgttgtccgcaggccgatgcccgatggcgagcgagttcatcgccgtgtacgcccatccggacaccgtttgacttccacctcatgtattgctgccacaatcagggtaaggtgatcttccagatcatcaaggctgtagactcgcaatggcgtgagattgctgcagatcgcctcgtgatatctgggatcgattttgataagcatgggattaggtctgtactgctacacggccgacctccgtcgtatttgctaaaaaatttagtacaactgtttagggtgacaacatttattgagaattgtt

SEQ ID NO: 424943 - DNA, 561 bp, Oryza sativa
  unsure (1)..(561): unsure at all n locations
aataaattcgaagccatccaccaacgaagaaaaaaaaaagggagaaaaaaaaatccacgcacactttgcgtgcgaggcgaggcggttcgattcgagaggagagagagagagagagagagagagagagatggacnccttctactcgacctcgtcggcgtacggagcggcggcgagcggttggaggtacgactcgctgaagaactttcgacagatctgccgcgccgtccagtcccacctcaagctcgtttacctgacactatgtggtngccctggctgcttctgtggaggttgcatacctgttcgtctacttgtttatatagatacttgttttaattttctgtttgctttctattctattttctttttgctttgaaaactgtgaaaaaatcacttcttcatatatctatctatttcttttatgattatctttgtccttttggattgtaaaacctaattgcgaggtgaatgatggcgtgtcaaatatgatcttttctttttctttctaatattgtatggcccttgccttactatttatgagaattgaaaagaactttaggaaat

SEQ ID NO: 424944 - DNA, 100 bp, Oryza sativa
gcctatcaaagatagaaaggcatccaatgcacatgagttcatatcgagccttacccaaggatatcataccaccgtgggggagagagatactactctatac

SEQ ID NO: 424945 - DNA, 354 bp, Oryza sativa
atctatcttgaattcttgatcagttgagttgcattgcatgcagaaagctcatcacaagttcacaaccaatagcaatcaccaagttttttttttttttttgacactgtgacagcatccaccatgcaagccatgcagagacttgtgctgtgtcttgttgtgtccatggccatcgcggcgtcggctcagggcccgacgtcggcgccggccgcgccggcgccggcgacaccggcggcaccggcgacgccagcagcgcccgcgccggcgtcgacgaagacgacgaacatcacgggggtggtcgccaaggccgggcagttcaacacgctcataaggctgatgcggttcaccggcgcggcg

SEQ ID NO: 424946 - DNA, 234 bp, Oryza sativa
ggtaatcatgagtacctgaccagacttattgaggggctgctttaggggtcatccggggttccctaccaattcctgctacagagtcgtccagtatgttcaagagactgtgcgacagtagaccatgttattgaccttaagaccggagatgagtcattctaagctgatgttgctaactgcattaacttagggcctgtccatacattacatgaatcttataatattgatgatagattt

SEQ ID NO: 424947 - DNA, 296 bp, Oryza sativa
cttcccccgagatagagagagagagagagagagagatccacagcctcacagcatcaaatcacctcccctttctcccagatccaagccgccgccaccaccccctcgccgtcgccgtcgccccctccggccgatctgatgcccgcgcacgcggcggtggtggtcagcgccgatgcggtggaagcttaagtcgtcggcgtacaagcgcgtgccgtccagggacgccgccatggatctcgacgtcgagacgccagcgtaaatggcggacggcggggccccgtcgtgccgcatgttgctgt

SEQ ID NO: 424948 - DNA, 426 bp, Oryza sativa
tttataatgaacgaagaacttccttctgtatctgaggcatcagataaacagcaagaggagcaagtcctagttaatttaatgtcatcagctaaattgcatgacttcaacgggcaagttcaattgccaatagaaatgccgcctcatttttcggtggcaccctcccctttacttgcaccagcagcttttcccccaaaacattttgctggaattccaccaactagcttaattggggctccatggtccaatatgcatttgatccatggatatgtttcaccacccatggcccattatgtccaaaaccatactttcgcaccaaacatcgaagaaggtaacgagagtgagaaacctattacaccagatgcgagtcgtgatgatggcaacaattggcatgagtatggtgttgggatttcctagatattttaatca

SEQ ID NO: 424949 - DNA, 431 bp, Oryza sativa
cactcagcaacaggcctaccatatcgcgagaaggcccccagcgtcgcggagccgaaggatcaggattcactccgccctcgccgacctcgtcgccggccgccgcatcaccaccgacacctccccccatcgccgccggcgagagttgggtggtggagcgagcgtggccgcgaggggacgcggaggggcggcggcggcggcgattgttcgcgggatgagcagcttcggcggcaccagctccgtcgcctccggtggtacgtttcgttccattgatcggtgttgaatgcgttgaggagggggggattgattcgcgaaatgggatgggattgatgctgtgatttgattgcgttcgtgatgctcctgattttgattcgaatgcgttgggggatttgggatcgaatcgtaaaatgggggtgggattggatggttggatg

SEQ ID NO: 424950 - DNA, 184 bp, Oryza sativa
ccggacccgaattacccgtaccaacccacccccccgaataaaacacaacccaaacacatacggagaaggggaacattgaaaaaaacccgccggatcaaccccccacaccacccacaacgaccaagacaccaaccgacacatcaccaccaacaccacccgcaaacaacaccaacaagagaacgca

SEQ ID NO: 424951 - DNA, 260 bp, Oryza sativa
  unsure (1)..(260): unsure at all n locations
atctagcacacgcacgcacgcacacgcgcgcgccgaccgagcggatagccatgtcgacggaggcgctcctcgccggcggaggcggcggtggcggtagaggcaaggtgaatatgacaagtgagcactgatgactacggtcangttgagacgtcgacacatttttagctgagatactcagaagatacaataagagtgcccagataagagttttggtgatcatctggtacaaaatatataggacattaatcatggggaaacat

SEQ ID NO: 424952 - DNA, 202 bp, Oryza sativa
ccctcgcgtccgtcgcaattcatgtatagcccttgcaaatgtaattgttcctgaccatgctacttcacttcagtctatagcagaagccgtctcgatgatgaaatcatgtctgatttttcgtttggtttgtactctgtctttaacttattcttttacatatattttttcgtttttactctatttttttacgttttttcttttt

SEQ ID NO: 424953 - DNA, 196 bp, Oryza sativa
cgataccgcccccaaattcctccgcttcccgcgcggatttcgccgccgggcggcgagatccgcacgattcgcgccccgatctgctctgacccggcgctcgcctcgccggattcggcccccgttttgcagggtttccgccgccggggtcgcgcgggcgttcgagcggagcggaaggggaggagacaggatagggatg

SEQ ID NO: 424954 - DNA, 156 bp, Oryza sativa
gagtacccaaaaacgcctagcgccgccgacgcgcgcacgatggaagaagcgtggccgcctctcgcccccgccccggaagctgcggctcctcccggaggaggaggaggctcccgaactttatccgcgaggggctcatcaccatgggcaagacgatta

SEQ ID NO: 424955 - DNA, 156 bp, Oryza sativa
cacgcaccgaccctgcagctgcagcgccagcagggcatctttgtatggaccccgacggtgcatgactcactccgccctcgccgacctcgtcgccggccgccgcatcaccaccgacacctccccccatcgccgccggctagagttgcccggcttacc

SEQ ID NO: 424956 - DNA, 145 bp, Oryza sativa
cggtgagtggggagctcgtcggggcgaggtgggagaggacatccggcggaccggcgatgtgaccaccacagcagttatagatacgactgtgaaaaaggtaaagctacacaatctaaccgacagtgtaaccaagatttcaagtatt

SEQ ID NO: 424957 - DNA, 369 bp, Oryza sativa
gaatgattgcatcttcactcaatacgttcgtatacagtactttcattcagaatggtggaagcagcagcaaaccacttatagatgtgactgtgagatgtcttaatctactgtatgaaagggacagcagacacaagttttgtcctatttctctgtggctggcacctgctaggaatggccgaattccaatcgcagcggctgccagagcccatgatgcagcatttgctacattgccaggaaatcagttttttggaattcctatccggagctctgtacttactacaataccacatgtatatccatttgaggaaagagtgcagatgtttagagaatttattgagttggacaaagcatcccgaagagttactggag

SEQ ID NO: 424958 - DNA, 53 bp, Oryza sativa
ggttaccacaccactcctcccgccatggccgaggtggcccttaaaaaccaaaa

SEQ ID NO: 424959 - DNA, 102 bp, Oryza sativa
cgtaaaatttctccccaatctcgcgaggctctgggggtcttttagaatcctctcgcgttctcaagacgcagatctttgtgaagacattgacccgcaagacta

SEQ ID NO: 424960 - DNA, 412 bp, Oryza sativa
agcagtcatacaatccctggtgacctaatttgtatggagacggtgagtctgaggctgtgattggttcccacagcttagctcgaccggtgtgagccacagttcgcagtgagcccgagcaacaatcagcaggcaggccgcagacccagtcactgatctccctccagcgcacccatgccacgccgccgacattgcatgccgccgccagtaaccccatggttgtacataggctatattttcccttgattaaccaactagttcacatatccctgcactttttaaacttccattgtattccctcatgcgtcccaaccaaagctttatcccctggggccttggaattttaggttttcctgggaaatttttgctttccaagattccccttaaaacaatgttccatatttttttccttttc

SEQ ID NO: 424961 - DNA, 304 bp, Oryza sativa
ggctaccggggttcctgtggaccaacagcggttgatttttagaggaagagtcttaaaggacgatcacctgctatcagaatatcatttggaagatgggtacacattgcatttggttgctcggcgtgcagctgctgaaggccaacattcttctggtacttctgatgaaaacacccatgctaatgttaatgttgctggaaatggactgttaggagatatctccaggagtgttcggtatatccttgtctccctaggtcttgtgacgcctggaggcatgtaccacactacattttcggtgccttttacc

SEQ ID NO: 424962 - DNA, 328 bp, Oryza sativa
tgctaaaagtggttggatattccaaagttataatggctacaaatggagtgctctctattctattaggatgaagtctaattttgatgacctttgaagatctgtgaggatatgctatggacgctaggactcggttaaacactttacataatacaacagatgtgatgtgggctttcttgcggaacaatcatgtcgtattaggctgtatagaaaacatattgaaattacggtgctagaataacgggctttcattgaggcgcctgatgcctattaagcagcatgggatttactgaagggtgccaatggtgttttagtacctggtggcttcgga

SEQ ID NO: 424963 - DNA, 376 bp, Oryza sativa
ataaagtgacggtagatgatgtgtcaatttttagagctagctatttgactatactattaaacttgctctttggctgagttcatttgtgcaagtgcaaaactttctctcgtttttgttgacttttctcaaactattaaatggtgtttttttcgtaaaaaaaatctatagaaaagttgtttgaaaaaaaatcacattaaccgattttccaagtttttcttagttaatacttaattaattgcgtgttaatctgttactccttttttacgtgcatgcttcccgaagtattttaaaacgttgtgttttctatactcctttaaaagaagataatggttgttgtagccattttaccatctccacctattgttttgtttatttt

SEQ ID NO: 424964 - DNA, 251 bp, Oryza sativa
gtttgattgtgtattcaagaacttggacgatggtacagtgtttgtcgtcgacgagatgggaaaagatgggagtttcaggagcctcagggacaggcgatccaaccggacagttactgcagcggaattcgaacggacctacggctcgtccccattcatctgtgagctgatgcggcgggtggatgattcggatgagtcctctgctgtggagaaggctctggtcaggggaaggagaaggaggaggagatttggtc

SEQ ID NO: 424965 - DNA, 534 bp, Oryza sativa
  unsure (1)..(534): unsure at all n locations
gcgtatttttaccatattgcagctaccaaaatatgtgcttgacattgacttgggcagtttgaccaatccactaaagaaatctgtggctgatcactctgctctggacatagggcttggtacacttctgcagcagcttggtccttccgatataacccagtatattgagtttatgattcaatatatacggatggcagaagcagcatttaatcccacacctgttacaaacaagggatctgctcattcctctgaggcaccaaaggcgttatattnggtgatgtccttctgcaagtacatggatatctccatggatttagtcgagtcatgcttaccatcttcctctctggctatcctgcaatcctgacccttctgttgtagttatacataggtttacaaaatcggttaagccttagaactgttagcttttgagctttttttctccattccatgatccagggtttataacttacgaagtcgcaatggtgctagttgacacttgacagtgccctgaccctgaatgctgaagtgcagagctct

SEQ ID NO: 424966 - DNA, 287 bp, Oryza sativa
ggtgggagggagtacgattaacttcgacttctcgacagcttggtaataggtgtcggaataatcctccaaaactactttctatgatgcactataggataccgtgacaattactcaagctgctaatgacactggtctatccgatttatacctttttgagttcaaggcactcttgcatgcttctgttgattgccgcaggaagcttcttgataattaggttgcttatactgatctctaagacttcactgtcattgaggctcctaatgcttataaagcatcatgtaatttac

SEQ ID NO: 424967 - DNA, 343 bp, Oryza sativa
  unsure (1)..(343): unsure at all n locations
accttccactagcaataagcttgcctacttccgcgccggtgggtgggtggatagagaagatnttcttaaaaaaacatgaataaaagagaaaaagaaaataaaaaaaaaaaataataaaataaaaaaatgaatggaagtaatagttaaaaataaattaattatataaaaaaaantatttaataaaaaaaaatataaaaaaataaaaaataatattaaaaaaaaaaatagatataaaaaaatatataataaatanaattataataaaaaaaaatttataaaatataaataaaaatatataataaaataaaaaaaaaaataaaaaaaataaataaaaatatttaat

SEQ ID NO: 424968 - DNA, 64 bp, Oryza sativa
  unsure (1)..(64): unsure at all n locations
cccttcgaaccacaaaccccacccttctaaaaacaacaccgnaaccaaaaacgaagggagattc

SEQ ID NO: 424969 - DNA, 208 bp, Oryza sativa
gaagtaagcaaaagggggagagagacaagtctgacagggagatgaaagaaatcagacggcaaccttcttagcctcctcctctccactagcttcttttcccttgccatgagttccctagtagaccaggactagcaggcaagagcaagcagctggaagagtattagcagcatgcagctctagagaccacaggcacagaggaggggagagc

SEQ ID NO: 424970 - DNA, 426 bp, Oryza sativa
ttttgctgcacattactatacgactacatcaggtgtgtgactatacacgatgcgatgcacagagcatgcataaacacgtatgtataagacactgagctatattgagggttcttagaggtactggagatgcgcgcctgccatattctcttctatactcgaccttaattcactgtatataagcagcatgagcgtacttcttattaacttctaggatgaagatatttaagatagaaaatagttaataaggactaaactcctcaagggtggacaagctatgcatcgagagcattgaaacaattgtagcccaattgcaggaggttgctatcatgagttgccgatgcttatgttccctggatgacagctttcttgagcagaagcagcccatggtagctctaagaaacttgcacattcacaactttttttatt

SEQ ID NO: 424971 - DNA, 443 bp, Oryza sativa
  unsure (1)..(443): unsure at all n locations
gaaagattaacttgatgttgtaatttactaagcatgagccggaatttccgtaacaaaagattttatgaaattatgctgcaattctgtatgtctgaaataacaatatatctaagctttttgcttctgggcatatgcaggcccaagatttcaggcaggcaggaacacaggtaaggagaaagatgtggctgcaaaacatgaagatcaagctgattgttcttggcataataattgcgctcatccttatcataatcctgtccgtgtgccatggattcaaatgcaagtaggcataaattgactcattcaactgcacttacagtactgcttgcttggggcaaaaagggggggaaattgggaggtgttgnggttctttctagtttgtgctctggctggttacggcgcctgagtgtttacgctgtcgtgtctgttgaatgctggttggtgac

SEQ ID NO: 424972 - DNA, 583 bp, Oryza sativa
gtgatgggttcatgtcgtacctggcgatgaagacggacgctgctttaggggaggcggcgctatactacccttttcgactcctttctatcagtgctggtcgtgttttcttttttttttttcttctttttttttacagttttttttttatatttttttttttttttatttttatcttttttctttattttttatttttattcttttttttttttttcttatttattttccctttcgtttctattattatttttttttttactattttacttttatttttttcttttcttttttaatattattttttttttttttctttctttttttctttttttttttttttcttttcttctttttttttccttttatcctattttaatttttatctttttacttctttttatttttttcttctttattatttttcttttttcatatatttttcttctttttctttttataatcttttttttttttaaatttaatatctttttttcttttaactttatatttttcttatttccctattttttttttctttctttttttacaattttcctttttctttatttttttttctcttttt

SEQ ID NO: 424973 - DNA, 316 bp, Oryza sativa
gtaagtccactgcgctgcaccaccagccaacccaagatgaactggaaccagagagagagatgaacgccgcacttcggcgcgcccaaggacctcgcggtgggcctccagcagcgtaggtttttttttccagtcatacttttcctttttgtctccagtcttcttcgtttctttttctttttttatttttttcttcttaggttttttttttctcttcttttgttctgctttttatctcttttctttctctttttttttttttctctatttgtttttttttttttttcttattttttttttttttttttatttttctttt

SEQ ID NO: 424974 - DNA, 120 bp, Oryza sativa
gactccgccccttgtctttccctgtctctttttcgcggtcttcgtctgtctgactcggtgaggcgccaccggcagcaactgcaccaccgtcaagatggctcggtcggcgctcgacgaggt

SEQ ID NO: 424975 - DNA, 481 bp, Oryza sativa
ttctcgcggtccgctcgcctcctcacggcgccaaagcagccaggaagaagaagaaccacgctgtttctaggacgattcctggaacagccaacttctgaacctctatctgcaagactgcagacagtataatacttcttcctggttgcagccgcctcagcggaaaaaccaaattcagcttcattcatgggttccccaagcaaaacacgtcggatgaagccattggggattcagtttctattgagtgttcccggcggtgttcttttttattgtttatttcacttattccttattttctttttcttttttatctttttttcttctattcaattcttttattcttccttttatattctcactattctctttttctcattatttacttttttttcttctttttatttttatataatattcttacttttttctctctatctcttttttcccttttttattattttttttttttctctatctatttttt

SEQ ID NO: 424976 - DNA, 74 bp, Oryza sativa
atagaaaataaaaataaaggcgaggaggtctcgcgagctaccaaaccctagggctcgattcggtggcggtggcg

SEQ ID NO: 424977 - DNA, 284 bp, Oryza sativa
cgaatcgctacaaaccctatccactgccgctggactcgtcgccgtgattcacctcgtgccgccgctcgcgcagtgccgacccgccccgccccgccccgccccggcgtagtaggagatgaagcggcgaaaaatcgccaaatcgacagcaagccgggggagcaggtccggtgtgaaatccccaaatccacggagcagagcagcgaatccgagccggaccggcggcttcttttctgatgaactccgattgggcagatggacttgttaccacggggaggaggaggagg

SEQ ID NO: 424978 - DNA, 150 bp, Oryza sativa
gtaaaaccattctccaaatggacactttggtttccagcttgtgtcagcagtaaagcttcatgatggaaagaactacatttctcttttgagtgctaccattggtctaaagaactatggccctttgtttgagaagatgcctgctgtcattgt

SEQ ID NO: 424979 - DNA, 276 bp, Oryza sativa
ctgactctcttcgccgcagcgcacaccaccccaactagctcctagccattagagccggattcttttctggacggacaaggcggagagggaagaagaaggattgtgccaaccatatgcatccttctggaattatctagttccttaatctttcgtccagcctggcagatatcaagaggtcaggcacatctcgcacctctaagtgggtgtgggtttgcaactactctgtaaccaacttaacctcgcctctggggaaaagcccgtcttacatctggagac

SEQ ID NO: 424980 - DNA, 157 bp, Oryza sativa
atcgagagcgtccgcccttactattttcattgcgggttgctgtcatccattcacggggtacgctattgcaaacggacagagatgacagggcagaagagagcttgaacaaggcatttctctccccttggaattatgtaatagatgaatctttcgtata

SEQ ID NO: 424981 - DNA, 514 bp, Oryza sativa
ttttattagcattggccaaagccgtcgccttactggttgttgccatcgcgccatggggcgtgttagtgcaattggaatgcgacgcccccgacaagaagagcttgaccaaggtcctcctctcccctgtagataagcgcttggatgaggcagctcaagccatcaacaagggcgccgactacgatgcggctgctgccccaccagccaaaaaggatgaagaggaacctgacacgattgagctgccaatctctcacatacctgatctatgaatggaccaacgatatgagaggaaagacaactgaacctcactagcctactaggccgcaggctatgctgacctctgtgacatcccagcttacaagtataaggtgactagcgaacacttgaacgcgtgtagtttacaagacatcacgttatgagcgagacgccaaccataaagtaatggctactactacatctccggaattggtcgactatcggacacgtaccgagtatcaacggttatttatgaataaat

SEQ ID NO: 424982 - DNA, 151 bp, Oryza sativa
gaggatggggcgtgtctccgtcaactgccaccaggggaggggtgattcctgctcccctaccctaaatagcatgttgcgaaccttctgaaagcttcgggaggcggcggcgccgatcacctcccagaggaacctgaggcggcgactaggaagg

SEQ ID NO: 424983 - DNA, 561 bp, Oryza sativa
atgatccgagagaggcatggtgcttgcgaagcctgcttgcattattccacacaccatgtttgatgcggttgtgtatgtactgaagatggacgagggtggtcgaggactcaccgtttttgcctggttatccgcctcagttttacatgcagtctaccgttgtgacggtgaatgttacaaagattatgaacgacatggactagtaggttatgatgtgtttgccttgttgacctgtttaagatggttgtattatttattcattttgtctccttgttttcatatgattttatttttttctttcagttattttttgttttgttcttttctttttttttttttttaaattattatttttttttttacttttattttttttttttacttttttttttttatattttctttttttttttttttatcttattttattttgtaaatttttatttttttttttttctaccttttcttcttttttctcttattttctttttttctttttttatttttaattaatagttttttttttagcctctcttcttttttttattttctaattattttttt

SEQ ID NO: 424984 - DNA, 139 bp, Oryza sativa
atccctcctaatgtggaggcactactgcatcatctgggttttttttatataccagacaggggtcatccacaattacacccaccaaaatatacacaagttgggatgcccagcattgtgaaccccactgatgcatttgtaa

SEQ ID NO: 424985 - DNA, 435 bp, Oryza sativa
  unsure (1)..(435): unsure at all n locations
cgcttttctcctgtcccactcctctccttctccttgtgcttcttcttcctccattggcatctccaagaaacccaagcctttctacgtgcttcgagctcggccaccggccggcggacgcgcgcgcgccagccaccagtgtccggattnatgctnnattangaactaacagtgtattcaaagaacctaaacatcagatgcccaacaatttgaatggagagttccaggacgtcattgagatgccttttactcatgaccatcatggatcaaatgatcaaccctgagattgattccacaactgatgcatgagatcaatatgtgccacgggccttcatgcatatctgagttccatgagcatgttgtcatcatgtttcttagcttccatcttgaccctgaatcctttgtattcaatacctcttttttattatttttctcttc

SEQ ID NO: 424986 - DNA, 105 bp, Oryza sativa
gcgataaaccgggccggggtgatcgagcgcagctagggcgctttgccatggaccgctgggcgtacgaacgcctcaccgtggtccaggctctgctcaagctgccct

SEQ ID NO: 424987 - DNA, 487 bp, Oryza sativa
tgtatcttgagacatgtacaaagtacaaacgccttttcctcaagcactgtaacaaaatcatcttcaatcaagttgccaagttctaattctaatcatgaactgagctcattgagctctccaactgaacatgtgattgctgatggaagtaaatcacttcagctcgtccctgcaagcaagattaatgaaagcgttctatttcagatttatttctgaacctcccttcattgcaaggattgaaacccagtagcccaaggaagcgaagaagaatatcagaatcaatggagagttggtctcctttgcaagcatattcatcagactcacaatcaagaacaagcctcacctacggaaatattctggctgaaagaaataattgtgtcccagcaactacatatgctttggtgctactacatgtcataagacactgttcattgtccattaaacatgctcaaataactgcccagatggattcttttgccattccatatgt

SEQ ID NO: 424988 - DNA, 312 bp, Oryza sativa
ggtagccgtgagccccacaatgcatggacgtggagtgctctttcactgtgaccatgctttctcccgtcaaggagggaagttataattctaatctgaaactgagctgattgaactctccaactgaacatgtaagtgctagtagaagttaaatacttcaacttagcccctgcaaagcaagattaatgaaagcgttctatttaagatttatctctgaacctcccttcattgtaaggattgaaacccatcttcccaaggaagcgaagaagaatatcagaattcaatggagagtcagtcctctttgcatgcttttta

SEQ ID NO: 424989 - DNA, 161 bp, Oryza sativa
ctgcttccacgcacgattaaaagctgcccctgtgggtgctgcagactgcagccctggaagaccagcgcctgaagcaagaagcgaagaatcaaacgagagcctagcagcgtagcagatcgatcgatcgatcgatatcatggaggcgcgaggaagcagaggaa

SEQ ID NO: 424990 - DNA, 253 bp, Oryza sativa
ttctagctgagctacccgtacgaggtgcgacgatccatgaagccaaccagacacctgctccacgcgcgcgcgccgtaagcagttacaaggcccaagatagagcacccactctcccgcgggctggacctactcatagcacgacacgcgcacgcacgctatgtcacgggcggtgagcactgtccgaggcagcgacatccatacagaaagtgactgaggttgcaaacatcctctacagaacaagcttctactacac

SEQ ID NO: 424991 - DNA, 203 bp, Oryza sativa
ctcgattctgatgggccatacccttcgcgatacgggttcttgtccatgtgctagtgcgtcgcgcaatccaatgcgtaatcactagcctcccctacggggcgttcaccaaccactgtccctgcaccctcacctagtggtttggtaattgggctgaccgcttgaacgattccatccaccgatccaccttcccgttgctgcggaga

SEQ ID NO: 424992 - DNA, 69 bp, Oryza sativa
ccgtccagattcccgatcagacccacagcagtccagagcctccatgaccaacaagaaaaaaccgcaaaa

SEQ ID NO: 424993 - DNA, 60 bp, Oryza sativa
aatctacactccgactgtcacgttcgtatgcgtgattcacagcaacttggtcaccccccc

SEQ ID NO: 424994 - DNA, 90 bp, Oryza sativa
ttcccggacccacccacccgtccggtcagttataaccaaaaaaattgcaaaaccggggggctttattaaaaaaaaccgggggaccccccc

SEQ ID NO: 424995 - DNA, 213 bp, Oryza sativa
ataaattccagcaccatggccctgtgactatgaccgatatgttgtcaacgaccttcgtcctacccaatccggacggaacgtatcaaacattaccgagaaaggtgatcaataaaccaacggattgtattatctggtccagcaggctcggagatttatcaaggaaacatcgataaaggcaccttgcaaaacatatcggggctaggctacttgctg

SEQ ID NO: 424996 - DNA, 94 bp, Oryza sativa
gatagtgctacgcagcatacctacctagctgtatcagcagtagtgtcctcggctccagttctagccatcgtctagctagacatcaacctttaca

SEQ ID NO: 424997 - DNA, 53 bp, Oryza sativa
aataaaccgaaggagaggaacgacgtacctcgaggggtttttttaaactattc

SEQ ID NO: 424998 - DNA, 155 bp, Oryza sativa
cgcgtccggagcgtccgagtccttttacacctgtccccaccctcgctctccgctccttcgactccgactccgcctccgagtgctcccgtaaccgtgccgtcgcagcctccgtctccgagcggttcctcccgcaagcggcttctccgccgcgcgcg

SEQ ID NO: 424999 - DNA, 71 bp, Oryza sativa
  unsure (1)..(71): unsure at all n locations
atngtggtgctctgatctggttgatcgatctcgtcgtcggcgatggagaagttgctttcctgctccggcgc

SEQ ID NO: 425000 - DNA, 136 bp, Oryza sativa
cccgtagccatccatggccaccaccgccctctgatccgatcgatactgatcagccagtagctatgctgggttcggaccagctcgagcaccgcccggcgccgtcggctccccgcgccgagccggacgatgtcgccga

SEQ ID NO: 425001 - DNA, 608 bp, Oryza sativa
  unsure (1)..(608): unsure at all n locations
ggtagcatctcccacatagctttgttagttagttggatttttttatccttttctggggttttacccattttctctttatttattatctcttttattaattattttttttttttttttttattttttatttttattttttctctatttttcttttttttttatctttttatttctttttttttttttttttttatttttttctttntatttttttattttttttttcttttctattttcttttttcttttttttttttttctttttttattttttttttttattttttttttttttttttttttttttttttttttttttctatttatttatttttttttttttttattttctttttattttttttttctttatttttttctaatttttttatttattttttttttcttatttatttttttctttttattctatttttttctttatttattttattattttttttttttcttttttcttcttttttttatctttttgtattttttcttatttttcttatttcattttttatatttcattttatttttttcatactttcatcttattttttttattattatatttttttttttcttccatttattttttt

SEQ ID NO: 425002 - DNA, 273 bp, Oryza sativa
attttctttaccgtcggagctttttttgctcgatcggaggatgcagcaactcatcgagcggcgcggtgccaccacgctactacgactatatcaatcacctatcgtcagcggaagatcgaccgatcattcaagccagccatcgatccattacaataagcagctagcttggagaccgatcgatcgatcgatcatatgtcgattcgattcgatccgatggagagcataaacagcagcatgcagcagaagcgtggtgatgatgtgcctgcgagctga

SEQ ID NO: 425003 - DNA, 121 bp, Oryza sativa
ctctctccctactgcacctttcgcctgccaggtagtgggctagggttacgcactcccagtgtgcctgactcctgcggaacaggaaccctaacgctaacctggcctagtgctgccaccatgg

SEQ ID NO: 425004 - DNA, 420 bp, Oryza sativa
ctcctattgtactctgctgcctacgtctttcttgagctaatactatatatccatctggcggggacggcgacgatcatggagaccggggacgacgtggaccacgcctggggactgcgctactcctactcgccgctcgccgccggggacggcgactccgacgacctcggcgccgtccgtcgatccgggaggcgcccgctctgcggcaacctgttacttggctccgactcagtgatcgacagcttcatcgagcagttcatcttcgatctgtcaccgaggctgccactggcgtctaccatcggaggtctattcataatcggtagcggttccttgaatggaggagctgcatatctgtttgaagctgactgtgccaatgaggagctcactgaagctgataagaagggatcatggccgctgagcgcc

SEQ ID NO: 425005 - DNA, 291 bp, Oryza sativa
  unsure (1)..(291): unsure at all n locations
taacacgaaggccaactcgaggctgctgctggaggagagagagaggatctggctagtgcgggcgacacaagcgagggcggccgctgttctggaacaggaggaggggctgccgctggcacgcgcttatctgtcgggctgatgcgagcattagggggatcgtgcggatgcacgagctcccagagatcgatgagcaggagagcagaggctgagacgattgaacctttnactattagaccaactgcttcacgaaaattcaatcaactgagaacaataatgatgatatgaccaact

SEQ ID NO: 425006 - DNA, 242 bp, Oryza sativa
ctaagagtgtggacgcctgtcgatgtgagtatctgtagccttaaaaggcctttttattgctttcccctttgcttgtttgagcagctcatagtgggcttgatttgctgacagcgtgtggcgttcgtgttgcccggttttgtgttctgcttatcttgagacctaccattctttctggcgcatgtggtaaatagccaagacttgttaacactaataaaatttgccttcaggtctaaaaaaatcat

SEQ ID NO: 425007 - DNA, 150 bp, Oryza sativa
ttgaaagaaaagaaacaaaaaaggaaaatcgtgtatcgtctcgtatcgtcttcgtctcccccgattcccgagcagcttctcgaaaccctcgcggcctcgattccggcgatggcggagcccaacccgcaagtggagagggaggtggaggtt

SEQ ID NO: 425008 - DNA, 249 bp, Oryza sativa
accgcaccaaccccaaccccgcgcgcgctctcccctctcccctcccaccaaccccaccccatcctcccgacctccacgccgccggcaatggcggcgaccatggcgtccaacgccgcggctgcggcggcggtgtccctggaccaggccgtggcggcgtcggcggcgttctcgtcgcggaagcagctgcggctgcccgccgcggcgcgcggggggatgcgggtgcgggtgcgggcgcgggggcggcgggag

SEQ ID NO: 425009 - DNA, 518 bp, Oryza sativa
ctccttccctcctctcctctccattccgccgccatgggcgccgccgccgccgccgccaccacccccaactccctcctcctccgccgcccggcggcacccaagccggcctccgcggcggcctcgccgctccgtctccccacgcgggcagccaggatctcctgcgcggccgtgaccacgcccgagcaggccttcttctaccacgtcgtcctggtcgacgaccgagcggcccgctaggtcgacgtgacaccgaatgcgttcaccctggactggctggtttggacgggaggctgaagaattaattcatggcggaaccaggtggaccgaatgggctctgattgccctgcgtctagagcagagatctctgacgttactgaccccaagattaaactcattgattttttcttatgcttatgtacgcatttattgaattcggaacagctcgcgcctatagaagaagccgtgccgggctctacaaattcttgaacgagtcctctcatcttttcctttttgtgcagctc

SEQ ID NO: 425010 - DNA, 459 bp, Oryza sativa
cgtcgtctggtggttgcattgtgttgcaatgagcaaaggcgcgatcatcggcgcgtcgaccgtgctggtggtggcggtggtggcggcggtgtgcgtggtgtcgttcaagaacgggtcgagcaatgccaaggaggacggcgagctgtcgacgtcggtgaagtcgatcaagtcgttctgccagccggtggactaccgggagacgtgcgagaccacgctggagcagacggcgggcaacgcgacgaacccgacggacctcgccaaggccatcttcaaggcgacgtcggagcggatcgagaaggcggtgagggagtccgccgtgctcaacgacctcaagaacgacccgcgcacgttcgacgcgctcaaggactgcgaggagctgctcgactacgccatcgacgaccttaagacgacgtttcgacaagctcggcggttttcaaaccagcaactttaagcgcgccg

SEQ ID NO: 425011 - DNA, 448 bp, Oryza sativa
gtttcttctcttcttccatcttcgtcatcttcaacctcctcctcctcgttatattaggtatataaaatagcctttcttttcttatcctttttaattttacagagtaattgatttgcaactcttcacctggaactctcttgagaaatgggattttgatactggtagtactagtaaatggaattgaattctttgttagtactactactggtagtactttgtactgctcgcttggtagtagtaacagccaatccatccgccatggattggctggcttgaacgggaagctgaagaattaattcatggcggaatcatgtctaccgaatgggttttgattgctctgcgtttagagaagagatctctgacgttactgaccccaagattaaactcattgatttttttttatgtttatgtacgcatttattgaattcgtaacagctcgcgcctatag

SEQ ID NO: 425012 - DNA, 379 bp, Oryza sativa
ctttgactgatcgtcttcctcctcttgtttcgcgagaaaaaaagaaaataaaaatataggcgaggaggtctctcgagctaccaaaccctaggggtcgattcggtggcgggggggagggggctggatctgcgcgatcgcgcggtcagcatccaccgcagggagggtattacaatagagaaggtgcgactgatccttgaatgtcttgcagctcgaagagagcggcgcccggtctgagtacatcatccagaatgggttcaccttgcaatgagtgattaatgtcaggggcggcatgctaatgttcatgtagaccttgagtggcacgaccatcagcctagaggtcgaggcttctgacaccattgacagtgacgagggctagatc

SEQ ID NO: 425013 - DNA, 363 bp, Oryza sativa
tgcttcgcgtgtgcccgcgcccgcccccgccctccctcccgcggcggcccccgcggcgcgggggccgccgcgccgctctccctctagcttccctccatgtcctcctctttccttctcttcttcccgctcacccagcttctcctcccccctcctccttcttcccctcttcttcctccctcctttccccctcttccccctttccctcttctccccccctactttcttctttctctccccccctcctcccccctcctctccctctccccttccctcttctcccccctcctccccctccctcccttccctttccgtctcttcctttccccctcccctcttttcttctttcctctcttttctctctcc

SEQ ID NO: 425014 - DNA, 275 bp, Oryza sativa
tacttcggcggctcatgctcgatccgcggccgaaaccctaggtggcggcggtgggattaggacctcctacactatacactccaccctatgtatcacctaaccccaccacactcgcctcttcatatcaacacaaatactcgcaaccactcatctcaaccccatttcctcctcttgcacgacatccccctctccccacctgccgcaatacccaagaagccctcaccccacctcctcgccaacaatttcgcatccctaacgcctacagcaacaccccc

SEQ ID NO: 425015 - DNA, 418 bp, Oryza sativa
tctagatcgcgacggacgcccttcatcttaccgtgtggttgagctccccatgacggacatgagcaaagctaggatattccatcatcaaataaatggaataggcaaatgggcaaatgctgtacaagtcctgtacatacacacatgctatccttgatctctcctgtaaggctgccacccagctcttaaaaaggagaaagaattcaaagaattgaactcgtacactatggtccacataacaaacatctattcctggagctatatatgggagtcctctgcacaaaggccagcgtcagctgatgcgtgagattatgtaccggcctttctccaagccggatatgaacttcgtcttgggcttcctccattttgccaagcaaagtgctccacctagaagaaacacccccagcagcacagcaagcaa

SEQ ID NO: 425016 - DNA, 384 bp, Oryza sativa
catataaccccctctcccccacttctcccccacaaactagggtttcactcgccgccgccgcccccgccgacgtcatggccgccgacacctccaagcccttcttcccggcggcgccgaaccccgccctcctcccctccggccgcaagccctcccgcctctccccggaggcctcctactggcgctccttccgcgcctcctagctcacccccgtcaacgagttcaacgtcacccacctcgccttctccccctcgtcggcccccaccctcgccgcctcgttgtccacctccgtgctcctcttctccggcgacccgctctccccgctcccccgcatccccgcctcccaggacgtcgccttctccccgtccttccgctccgacggctccc

SEQ ID NO: 425017 - DNA, 206 bp, Oryza sativa
gctttttggaccaaacttgaaggtcgcgaccacgaggagcccaacctatacactggtagatggaagaggattgttctctattgattgttgaagctctgagatggaccgtcacgaggtttcaccggacgactgagcggatggacagacgccagagctcttgcaatgtgtctcatgcctcgcgcatggtggaggggcttgaccaggac

SEQ ID NO: 425018 - DNA, 139 bp, Oryza sativa
gaaggaaatgggcttttcaattccacagatgcagtgctttataaaaaggcagctagttgagtagcaaccttgtaagaatatcagtatataactcttagcatcatattcagactgtatcaatcagagtaacttacattcc

SEQ ID NO: 425019 - DNA, 301 bp, Oryza sativa
  unsure (1)..(301): unsure at all n locations
ctgcgcccatctgctcctctcctctcctctcctccgctctcgcgaagctcccaagtttgactccctcgagacccaccaccaccaccacgccgcgagcacgcgagcgaacgcgcggcggcgggggggatgggaggggttntatacncttgatcgttctctgggggatgtgctctggccggaccagcgggcggcgcccatggcccatggcgctctcggcggctacgtcagcctggatgggtttctctgcaaggacccaattcctactggccaagattttgcttataatgatgccttggccgct

SEQ ID NO: 425020 - DNA, 336 bp, Oryza sativa
cggacgcgtgggtggatggatggtggggttaggattattaagcgcaagatcctgtgcaaggcattccttttttgaaaatcatcctatacctgttaacatcatatacacacagtttccttcggagtaactgaatttctaaaatataatgaaaaatactcaacccaattatgatgatccaattctacaacacatgtccatattacagatattctgttacttgagcagactgtacattgttaccatgtagtttttatttatggatgtttgtacccttaacaggatagtgactatatcgaattgaatatccgggctgttattatttccatgcatgatcat

SEQ ID NO: 425021 - DNA, 349 bp, Oryza sativa
actacattgacgaagcttgccggtccagagcatgagaagtttacctgaaatgctagtgaagcaacatgtttgcatgctatgaatgatccaagtgccttgacccaccatatcggagttgtacctgatgctgatcccaaacagaggaagcctgtgggatatgaaactgtcacaagctaagcgcatgaaggaggggctacagcactgcaggactgtggggatattacagaggatagattgaatttccttccagagctggctgcatgtgttaagaaggctggattagaagattctgaccagaaagacaagggtcaacacgaggctggtaccactattttgcctacttgtgatg

SEQ ID NO: 425022 - DNA, 132 bp, Oryza sativa
gccatgttgctctacactgtcaaccacgccgccgccggggtcgccgccgcagcggggccggggaaatccttctccgcggatgcgcctgcggagccatcggtgcgcctgccaaggacacgggctcctgctgcc

SEQ ID NO: 425023 - DNA, 192 bp, Oryza sativa
tttttgtgtgattctgattattctcagactatgtacagtgtcccgagcgtggtatcgacccggagtacgctgtggatggatcgctgattccaggctatttcctgacaagggcgatgagagcagggtatagggctgggacacatgaacatgcactagaagttatactcatgcctggacgttgatggtccatgt

SEQ ID NO: 425024 - DNA, 270 bp, Oryza sativa
cgcgcgtctccgataaagacgacgtggttatcgcgttggagagctagctacttactgtgcttatttcgaacttaggcaagcttgtgtttttgctgcctacttcactcatatatgtcgacgcaagccataaatggcggctcaggggatcgcggaggcggcgcaggcctacacgggcctctccccggcgtgagccgtcaccatactgggcctgatgctcgccacctacctgctcgtgtcctccctgttcgtcgccccggacgccgtggcccc

SEQ ID NO: 425025 - DNA, 354 bp, Oryza sativa
ctgcgttctaactgggggccactggtagcgccggcggggttgtgtcgcgtcgcctccggctaagtatctaagaagacttacaaaccaaccttgggatcacacaacggcggaacaagatgacgaccacgcaagatcctgctgcgggcgagcgaggtctgacgagggaacgactaggagcaggactggcgcccggccgtcggacaatgacacggtagtgtaggactacaccaagaacatgaacggatccgcggcgcatctggaggaggaggtagcaacccagatcgcgaggcaccctgacgtggagacggtgatggcgagcacgatgctgacgctgcccacgacgaggtcatggca

SEQ ID NO: 425026 - DNA, 478 bp, Oryza sativa
gcgctcagctccggcgacgacgacgaccacccgcacgcgcgccgccggtcctccccggtcggcgaggtccccgtcgcgcagtcgatcatcaaggcggcgagcaacgtctgcttctcgctcttcgtactcgccgtactcgtcgtcaccgtcgacggcgtcacctaccagccgaccgacccctggctacagtcctccgtcgacatcaccacctacctgtacacgagtactacccaactacaccttgctcctccccgacgactacctgctgcgcaccggcgaggactacaactccttctcctcgaccccctccgtcccgcgccgcgacgacccagaccaggccaccgtcaccgccaccgtcgccgaggataacggcacctgcgacccggacgcgccgctcaactgctccgacccacgcgtcctcgccgccgtcatggcgttcaatgccaaagccttcttccgcaagtccatcagcttcctc

SEQ ID NO: 425027 - DNA, 371 bp, Oryza sativa
  unsure (1)..(371): unsure at all n locations
caaaatcatcccagttattaacaggccgtagaagagtatccatttacttctgttcttacattgtggactttatactgttactgttcttctaccaaacaaaaaaaaaaaaaaaaaaaaaaaaaagaagaaaaaaaaaaaaaaaaaaaaaaaaaaaaaaaaaaaaaaaaaagggggggcccgacctcaaaaaaaaaacaaaaaaaacaaatgcatgccactgagatcaaaaacaaaaaaaaaaacaaaatggggggctctgatcaggggtcaaaaaccaactgcactggaaaaaaacaggccaaaacccaactaaagggcccggaaanaaaaacacctttcgccagctaataaaagatggaaaggggaaaacc

SEQ ID NO: 425028 - DNA, 364 bp, Oryza sativa
catgctactactcctactagccatctcccacccacttatcacgaggctaacccgcatgggcgcgcgccaaggaggcgggaggagtagcacaccgccaccatcaccagcagcagcatggtgcagctgagccgccgccggcaccgcgagcacgctccatagccctctgccatggcggcagcttccgtactcctcctcctcccttcccccttgctccgtgcgtcgggcccggcgcaccgcgcgcgctgtggcattgccaccacgacaacaaccagcacgagcgggaggagggggctgtctctgttgggacatggctgtcgtatcagctgacagaagcgcacgcacatgcttattctgccaccacatc

SEQ ID NO: 425029 - DNA, 468 bp, Oryza sativa
gctcgagcgagcagggcgccgtcggcgccgtcgttcgtcatgctgcttccgccgcatccaggcagaacattaccagcctatcatggagacaacagatttcttcttggagcttgtttcctgagtaaactgcctatgctgcgcccaatgaagttgtctttggtatgcagtgctaatcccaacaaccataggtcaagaagttcggatatcacacgccatcagaagggtggatcagctcggaggaaaagtaagccttaccaggagaaagatgactctgagaatattgatgaattcgatactgatattatgtcctccaaaaatggaccacccatctctttgacaagcaattcccgtcctcaagcaacatcagtcccaggggaaagagagaaggagatagtagagctgcttaaaagggttcaagcacaattgcgagcaaggggaaaaaggggaggaggagaagaagcctgaaca

SEQ ID NO: 425030 - DNA, 117 bp, Oryza sativa
actcacttcacctccgcgcttcccgcctctccgcattctgaccctccgccgcctccgccgcggtcgggtggtgtccgtgagagaggagccggaataatgctgtgcgtctcgccgacg

SEQ ID NO: 425031 - DNA, 238 bp, Oryza sativa
atcatttggggtgtggagttattgcaaagcaacctcgatttctgcaccgtttcctcgattcgatgctgaagaaattgagcaaagcatggacttcgtttgggtgaaacccacaagtatcttaggtcgtatcagaatacgagaatgatcggaggagagcagaggagagccggaggatttccgcgagggagggagctccaggaccctatcaatcggggattcggtgaggggggaggaggag

SEQ ID NO: 425032 - DNA, 382 bp, Oryza sativa
tactcaccattgttcaaatcatatcagctccagtttttactcacaagtcgcaagtgagagccactgagccagcatccaaccagtgtacatcatgaggactcaacgaatcctcctcgccgtagtagtgtccatggttgtttcctcagcgatgctggccgttgtctcctgcgcgcgggagaggaagaactacgtggttcatctcgacccgagggaggacggcggcgtcgccgactcggtcgagctgtggcaccgctcgttcttgccggaggccacgccggaggcggcgggggatgatggcccgaggatcatttactcgtacagccacgtgctgtccgggttcgccgtgcaactcaccgacgacgaggctgaggcgatgaggaag

SEQ ID NO: 425033 - DNA, 239 bp, Oryza sativa
  unsure (1)..(239): unsure at all n locations
acctaatcccgcagacgcgatagccgccgccatctcgnggggcactcttcacacccgcagagggggtcttaacacctacatccgagccttcccccttcccctcccccggcggctgtggtcatggccacccgacgggccctcacctccgtactccgctccgccttccgcctatcatccttcttcccttacccgtgccctcgccgtgcgctgctccacccccaccgtcgaccgttcccctt

SEQ ID NO: 425034 - DNA, 472 bp, Oryza sativa
gccgaccagacgagccgccgtttgacccaacaccgagctcccgcgcggagttgatgtccatctccccttccgaatccaccagaggatcccagccgctcgcgccgcgcccttccaaccctagccccggaccccgccatggcaacagctccgccccaccgcgccgccgcggccgacgctcccctacggctcccgtctcaccgccctcagccgccggcgggagcggcggcccgagctccgtctcggtggttccagctatcagagaatatgttgatacttcccaaaaggtagttggattcagaatctctagagaagagaatgatgattcatatacccaagaagttggcaatttttctgaatgccactcttctgaacatgggaattcaggtttttcagccaataatggcacctcaggccaggcaactcctcagagacctgaattgatgggatccctgaagattgatctatccactac

SEQ ID NO: 425035 - DNA, 505 bp, Oryza sativa
ttttctctctctctatctctctctttcaaaagcgtgtgtgcctgtgagcctgtgactgacgacggactgtctgctggcacgcacgagcgggcgcctgtgcgtgtgtgctccgacctgcaaatcagagaccagatcgagccccctggccggctgcagctgcctccttgcttcctctagctcctggagtgaggagagctcgccattgctgtctgctcaagctctctagcgtagctagacttctccggcgtgtgcttggctgctgctagctgctagctggccagtcttcctctcttgtccgccggcgagatggtggtggtgggcgccgtgagctgctgccggagagggagttggcggcgacgcgccgccgacctcgccctcgccgtcgtcgtcgtcttcgccgcggcagctggtgccgctgctgcaaggaggccaatccgtgtactacggagaccagcagcagcagcggcgcacgtgaggagactagactcgtcgccgtcgctgatgc

SEQ ID NO: 425036 - DNA, 244 bp, Oryza sativa
acgtgctgacgcacgcggcgcggcggaccagctcaatttgcctgccgctcctcgtcttccggtggggcggaggagggggacgccgggctggctggctctcgcattccggagcggagagcgcgagctcgatcggctgcggttgtgctgctaacccttacccttttcctcgacttagacttatcatttgagacctcgtcctggacgacggctacaccgttaccaccgtcgacgattttaaccaccc

SEQ ID NO: 425037 - DNA, 504 bp, Oryza sativa
attctctccagccaccctctcgcctcctcctcctctcatcatctcccatccttcctcctcctcaactcctctcctctcttcgcttcttctctcatgctagctactactactagcttctccttctcctgtcgcacggtgcggcggaagtggtagtagtagtagctctcttggtttaagcaaggatcggcgaggacggacgccggcggcgaccgagcttggggtgtgtgtgtgtaaagttgtcttctccggcggatgagctgctgtttcttggctcgcgcctccggcgtgtccggcttgttgccttccatgtccgcgacgctgcaataattcgcttccatatttgctgccgccatgccatgtatagccgcgctgctgatgcggccctccagccgttttaatgcgtgccaaatcctctccccgaggctcataaaaattattgaattgttgggatctgaggggatccgccggaggtggtaggatcacggtggagtgattttggcccga

SEQ ID NO: 425038 - DNA, 388 bp, Oryza sativa
gtctcaagagtcaagccggccttgccggcaacggcaagcagcatcgcgccgtacgcccccctcccctcactttccccaacctccctctcgcctccctccccgtcggcgaccaccaccaccatggccgcctctcctccgctcgcgctcctcaccctcaccctctccctcgccctcgccctcgcctccgccggcctcgtcctggacgacggctacaccgtcaccaccgccgccgacctcaaccacccggtctccgccgcgccccacccctacgcgctcctccctcgcccgcgcgccggggacctcgtcctgctcgactccgcggcctccgcgctctacaccctcgccctcccgctctccgggggcgccgccgcgcggaagcctcgcggcg

SEQ ID NO: 425039 - DNA, 577 bp, Oryza sativa
  unsure (1)..(577): unsure at all n locations
gcagcatgcaacttagatcgatatcgatctcatgcatccacacagagcacctgcatatgcttctctccttggcaatattatgctttaatttcagctagcttagctgcagggtgtactgctagctccttgctaacttctgttgaaaaatggaacaggatatgccgggcgttgttggtcgatcggatcgtggacagttaccatgtcgcactatgcatgcacctagctgttcgatcgatcaatctccggcgtttcctttctcacgtattctaaggttaaaatctcaattagttctctcgtacaattttatgagtaaagattctacgactacatatgagtaaaatctacaatttaacaatttttatatgtacgattctacgatcacaacaatcctaagcatgcttggcacaattttagctctagctntcacctctctgaagttgaagctcagctaaacaatttcagctctacttaaaatggaagcggngctgngtngagcgttttcacaaaatgaactaggaagtggaattgagtttaagcagctctacactttactccagacttacttctgaagtaaaat

SEQ ID NO: 425040 - DNA, 299 bp, Oryza sativa
  unsure (1)..(299): unsure at all n locations
tctcgccccccaaatccccctcctcctccgccaccgccatggctcgcctcctcctccccctccccatcgccgccgccgccgcctcccgcctccgcctccccgtcctctcctcctccgtggcgcggcgtgaggcgctgctcttcggggggagggtggcggcggcnagggcgccggagaggctggcgaggagaggggngagcgccggggcggaggcgggcgggacagacgcggccgccgcggcagcgcaggagaacgggcaggacgaggcggcggagagggacaagaaggaccggaggcgc

SEQ ID NO: 425041 - DNA, 347 bp, Oryza sativa
  unsure (1)..(347): unsure at all n locations
caatctcaaatttcgccatggccaccaccaccaccaccaccaccaccatgggcggcctccaccggctaataagcaggagcagctgcagccggagaaccttcgccgcctccacgccgccgcagcgacccagagcgatagccgtccgagtccgaagcagcagcgccggtgtaacgaagagccagaggcagaggcagaggcaggtgaagctgacatacctggagatcaacagctgggtgtgggaggtcggcggcncgcgcatcctggtcgaccggcgcctccgccgaggtgtacacttccgggtgccatgtctcttccacgccgtcaagaagcgccttatgacccagccc

SEQ ID NO: 425042 - DNA, 261 bp, Oryza sativa
  unsure (1)..(261): unsure at all n locations
agaagaagaagaagaagaaagactagtgcaatctagaagccttccaacggggaggagagagagggtaatccggggagtaggactagactactactagtacatgagatcgatcgatcgatcggcatctgcatctccgcccccgcccccgtggatctgaagcggcggaagagggatgnncncnncgnncgactccgggcagctgctagcctctgcctccttcgccctcggcgtccccctccttctactagcctgtgctgagct

SEQ ID NO: 425043 - DNA, 203 bp, Oryza sativa
ctcctactagagtagtagtagtaccactaccactagtaaacacactctcaccttcatcttcttctccttcctccatctcccaatctccccaagaacacctaatctaatctctctccctcctctctctctattgtccatcaatggagatgatgatgccatgatcaaatgatgagagaagaagaggagtagagagggagggggtg

SEQ ID NO: 425044 - DNA, 278 bp, Oryza sativa
gcgccatccaatctctctatccaacaatgaatcccgttcctctctcttatcttctcttattccccaaatgcttcttcctcgcattcgcaatcgcaatcctgccctaatccccaatcccaatgcaatccccccgcattaatcctaatcctaatcctaatcctaatcccaatcccatggacgagtaccaccaccgcatgggcgccggcgccgatttccgccgggacctcgaggacctcgtctgcgaccacctcgggggatgcttatcccgacgtcgtcct

SEQ ID NO: 425045 - DNA, 505 bp, Oryza sativa
acttatgccagctccagccacacgagcctagttgaggtagatacaatggcgtccaccgcctctttcatgctcgccgtcttgctggcggcggccgtcgcggcggcgccggcgagggcggtgcgatgcccgcccagcgacaagcaggcgctgatgagagtgaagcagtctctgggaaacccggcgacgctgtctacgtgggacctggcgtcatcagactgctgccagtgcgaccacgtccggagcgacgaggcctgccgcgtgaacaacgacttgatcgactgcgccaactacttccggtgtcagatgccagactccagggtgctgctgaccgccatatcggatatgcatgtgttgcatatagcgtattcagcccttgatgactatcgttctggatgtacgatatcttctactataaactagaagcttgcgagttggctgcataaatttgaatcttggagcagcaagttatgtcctcaagatacttgcatgtaaaactggtctatgt

SEQ ID NO: 425046 - DNA, 371 bp, Oryza sativa
gtgttctggccactcatgacatactatacccagtcagatattcaggccacggtgggattgtcacagatgaacatacccaactagtggtgcgagaagttctcatggctttaccatttcatatgcttatctctggaggcttgacatgagctacttgctcacgtcgtcttggagacccacagcttctagaggaggctcatgacttccatgctagcagacacagcgcatgtggaggcatcgaatgacatgatgatatgatacaacgtgaatacggcgttctatatcactacgatgttctacataagcgatgaactgtttacatgacatactactatcctgttatccgttgatacactatgtatactactagcatg

SEQ ID NO: 425047 - DNA, 311 bp, Oryza sativa
  unsure (1)..(311): unsure at all n locations
cccttttttacgtccacacgtcccccgagcgtccgnggggtatctttaaatcttctcgggggttccaaaccaacaccagctgataagccagtccatgataaaagctggggagctggacaaaccccctcatgaaaacccccctgggttgtccaagcgaggcaggcatgagacattcaatcatgaacaaacacccagtggtaagaactcctgaacctgctctgacaaaaacattgataccacaacgggaagggagccgtgaataacatggagcatccggaacatacatggaccactcaacacctgttctgact

SEQ ID NO: 425048 - DNA, 332 bp, Oryza sativa
gatgtgtaagcaggggtacactcaacactctggggggtactgcttcgatgaccatggacatgtgtctttgatatgctgtaacatgaatgatgacactttatggtggtctatcatgtttttttttgagatgagctgagcatgagggcttgaagcttgcctggaatactttactggtgactggatatggcaaggccatttaaactctatgataatgggtagaccaggtctatactaaaatacaggtgggactaaacattgatgcactagatatggagagttatgctccctacgcagccaatccaagagagaaacccggaaatgtgggctacaaa

SEQ ID NO: 425049 - DNA, 242 bp, Oryza sativa
cccgccacatatccagtcttacccaggggggctcattaaataatatgggggggcaccaacaaaccttatcatggaacgacatttcgtttgacttccggtcgaatacgtcacactccttactacgaccggactgttatccctacctttacgtggacaaccatcgatagtacttttccctcgacaaggtcacagtctaggatcgacttcacttagcctccctcagcgatgaacttatcggcctc

SEQ ID NO: 425050 - DNA, 150 bp, Oryza sativa
cacccggggggccccgccccaatattcccggctcgccctcacgcgccgcctactggtgaggcccacgcgctagccgcagagggggggacttttataataatagggggggatacctcaccatgaccttgttctcgaggatgaatttctacc

SEQ ID NO: 425051 - DNA, 423 bp, Oryza sativa
agagtacaaacccccattcccaacaccttcgcgacgggagcgagccaagcacgagggaaaaaaaaaatccccgaatccgcgacgagcgaggcggcgagctcgctgcttctatcgatccggagagggaggtagggaggagtgagcttgctcgctgttgccgccgtggccgaggccgaggccgatcacggcgccccgggtgctcagatcgagcgcggcatgatggatccggggatgatgtcgctggcgcaggagcagatgaccaagatgtcccccgttgacctcgccatgatgcagcagtagcttctgtcaaatcctaacctactaaaggtagcatgctgagagcatgacgaatatgacagctgatgacttcaaacgagctgcacagctcatgaatcacacaggaccagatgaaatgcttgacat

SEQ ID NO: 425052 - DNA, 555 bp, Oryza sativa
  unsure (1)..(555): unsure at all n locations
ctgtgagcaaccatgtccctaagtctgatggagtgaaaatccaggacggcacaagtagtggtcatcagatggcagaagtagaaccaaaacataccaatgagcacacatttgatcaaaatttggaccttgaagtagcacaggttgtttgtgagaatacaaagcaagctggttcatcggagcaaactgttaaaatgattagtgagcgctcggtaacaactgataagtacagtgtggaagaatcacagacatcatgtgatcgatccatttctgagcatactggtgctgctgacgaaagtgttacaaaaaaacctgttgaagtgcctgagaaaagtgattattcctctgcttctgtggagcaatcatcttcatataccaagaaggagaaaattatgcatcctcaagcatctgggcagtcatctccttctacaagcgcattcaactcaactgagtcttcacatgaacctccgagtagtgcataccctcctatcaattcatttncagaagttactancgcagggatgcttcaacagctcatagcaatgcataaggacttgc

SEQ ID NO: 425053 - DNA, 317 bp, Oryza sativa
ggcgcttggtgggcgcaggatcagcccggagcaggggccattcggtgcccacgaggagcggcgctgcacctatgctgctgctgcaagcggccgatgccgtaagcccaacaggagggatctggaccgacaacagacgtgcacctgtaccttaaaccgagggacgccggtagggacataatacacctgcgcgcgtgatatctctttctacggaactcatgcctatactcctggaacttcgaccgaaggggtgaggtctgggaggagggggtcggagtgaccaggcgtaggggattgctgaccaaagacacagggctcca

SEQ ID NO: 425054 - DNA, 142 bp, Oryza sativa
cccaatatcccggtcgaccctcacgcccccgatatcttacaccctcattccaccgtcttccactgggagataactaaacaccacccgggggtccataaaccaccactactctataagccagcccttcatctcatctggagat

SEQ ID NO: 425055 - DNA, 369 bp, Oryza sativa
tcctgtgctccaatctcccactccattccggccgggcgttctcccgctctcgatcgatcgatcgatcatggtggtgcctttcgcgacgacgccagcgaggcaggagacggtggtggcggcggcgccgccagctgcggcggcgtccggtgtcgtcggcggcggcggcggcgtgacgatagcgacggtggacatgtcggcggagcgcggcgcggtggcgaggcaagtggcgacggcgtgcgcggcgcacgggttcttccggtgcgtcgggcaccgcgtgccggcggcggcgcccgtcgcggcgaggctggacgccgcgacggcggcgttttttgcgatggcgcccgcggagaaacaacgcgccgggccggc

SEQ ID NO: 425056 - DNA, 460 bp, Oryza sativa
ggaaaaaaaaaccaaaccctctcgtcctccccttgcgggcccaccccggcctcgccgcccccttcccgtcgttcaccggcggcgaattcaagctgacgagctcgccaccgggggggggatttaggattggttcgatcttggccggccaagaagtacaagtttcttcgggggattagcttgttcgcgagggggaggagttcggtggtggagccttcgccttcgtgatggcggacaccaaggcggaggcaaaggcggaaactatcggcggtggcggcggcggctctggctcgttcagcgagcaggcgtttgttgagaagcttaacaagctcaacaacacggcgactaggatccagacactttcaaattggtgcatttttcaccgaaagagagccagacaggttggtgatacatgggagaagcagtataacagtgcacataaggataagaaagtatcattcct

SEQ ID NO: 425057 - DNA, 447 bp, Oryza sativa
ggaggagcttcttccgtgtgcttctcaccctgcaggctctggagcggatgaaaatcccatcatcattcaaccaatgccttcagaatcaacctactgggatggtttctctggttgatcgaagtggaaataaatggagtgcagagctgacttcagactctgagggattcttctttgtgcatggatggaaagaatttgtcagagataactcaattcagtgtggtcaatttttagtattcacttatgataaacggtcacaattctcagtgacagtctttgaaccttcaggcattgacaagatatcaactttctctgctcacccttccaaaaatgtgatcattaaaacagaaagtgatgaagggggcatggtcaccgcagctatcacaacagagaaaatggctcccgccctgcaggaaaataatggcatcacaggacagagaactagagatg

SEQ ID NO: 425058 - DNA, 53 bp, Oryza sativa
actcttacacccggggtaccccaccccaatacccccgtcaacccacacgcccc

SEQ ID NO: 425059 - DNA, 523 bp, Oryza sativa
ctcttctcgccggcgtcccctccacctccatctggggcgctcgccgcccgatcccggcccctccgccccgctgccccgcacctagagatgccgtcgtcgtcgtcggcggcggcggcggcttgcgggcccccggagttcacgccggggtggaagacggtgtcgacgtgcgccccggacgtcgtcggcgagggcgtccacgtgttcgacatcttcgggtacaacgaccacaaggggatgggcgcccacgagcccatcaggtcgggggccttctccgtcgccggcctcgactgggtcgcctgcctctacgccgacggctacggcgtcgccggcatcgacgacgtctccgcctacctcaggctcctcggcgacgcgcccaccccgcgcgtgtgggtctcctgcgaggtcaagctcgtcgaccagcgcaccggggtggcctccacgccggagcccttctcaggtacgccctggcgttcggcgacaagtgcaaggccctcactgtatgatgatccccaggggccagatc

SEQ ID NO: 425060 - DNA, 297 bp, Oryza sativa
gttttacgcaaaggaatcagatgcctgcccacggggggctttgtatttatcagggggggctgttgtgcctgtttctgctcactgcaagggtggctatgctcttcccaatcctggggccggtctgatgcgcatcgctaagtaccattctatggggctctagactatccaggcctctggtgagcatatcattgtacctgctggatagctacaccttagaaaacaggttgaaggatctgcattggagattacatgggttgcgctaaaatgaactgctccacacctggtgacctttgctat

SEQ ID NO: 425061 - DNA, 501 bp, Oryza sativa
tttttcttctcgattctactccactccttaaagggggccattttttgtgtaattggggttgttatacggtttattgtgtggttgctgaatcttgaaaatttaggatccaatggttaggagatttttatcggccctgctgtctccagagttttttaggttgaggatcccagttgtaaatttgtaaccagtttttttgccctgctttctccgccggccgatcgatcgattatcgacctgtatgcctggtggtgtacgtgagctgctcttgatttcttccaagaatacaaaaaaaaaaaggattacagctctgccagtggaggttcctttttgtgctcctagtgtttgttcttgggcagaaagcctgacgaaactgaatcctccaacaaaagcaaatggcgaaacgtgggctttggtgttcattatactgtttgagtttgcccattcctcgaggttggtagtggtgaactggtatgtgttggtagtgcagatgatgcttctttg

SEQ ID NO: 425062 - DNA, 338 bp, Oryza sativa
  unsure (1)..(338): unsure at all n locations
aggtttcagaggaggcaatcccctgtttcttgctcggggcctgtgttcccggcggcggggatggggtgcgcggtgtccaagggcgcggcggtggcgtcgccggcgtacgaggcgaccacgacgtcgtcatcgtcggcgtctgcggcgtacagcgtgtcgaggagcgcgtcgactggcgcggcggcggcggatgtggcgtctatttggagcctgccggtgcggctcgactcgtacgaggatgatggcgacgggaagaagaaggcggcggctcgtgggggtggtgaagtgttcgtccgtcgttntcgtcagcggtggcgtgcggctcgggaacatccaca

SEQ ID NO: 425063 - DNA, 447 bp, Oryza sativa
  unsure (1)..(447): unsure at all n locations
cggtcgcgtggggccaccccctcactctcctcctctgctcttcaaccactggtgtgtggtgtgtgtggttctcttctcacaggtagaaggaagcaatggcgatgccgcccaagcccggcgatcagccctccccggggcggagccccaaccccaacctcaacctcccctgcccgctcccgcccatccctagctggggcggcgcgtcatcngccaccagtaccgccacctccggatcctcgtcatccgaggcaagacggtggccatgttcaagcgcgatccgagcaagaaccccggaatccaacctattcgaaagggtggtgtaagtcaccacttttatggtggaggagcttggtcgcccgattacttagccatggggaactgtatttcttgcgggattacaaatcgctggatcaaacaaagaaaggagagtatgcttgtggggacccc

SEQ ID NO: 425064 - DNA, 138 bp, Oryza sativa
cctatgcttgcggccatgcctccgcccacaggctggggggagtcttttcaatcttcgcgcggttttaggaacccaccgaacacgttccgatttcctcacccacactacagtgatacggcccctccaagctttggcttc

SEQ ID NO: 425065 - DNA, 563 bp, Oryza sativa
tcactatagggaaagctggcacccgggggggcccctccccaatttcccggtggacacccacgcgtgcggtctcttaaaaagtttcagcagctgtctccagagatagtacagattgaaggaaaggatgggactgctttatatggaactctttatctccctgatgagaaaaaatatggaccacccccatacaaaacactcgttaacgtttatggcggtcccagtgtccagcttgtaagtgactcatggataagtacagttgacatgagagctcagttcctgcgtagtaagggtatattagtttggaaggtaactattctttcctctatttttttttctttgctctttgtttaacaagatagattccgattgaggattttttttttctggtttcactttggtccataatgtcaccaatcttaaggtatgctgtgcaatgcattgcatgggtaaaattctaaactaaaaatgattttaataaacttatggccaagatagcaccatttaattctttttgtttacaagtatgctgtgcatgcatggcatctcatccattaatttttcca

SEQ ID NO: 425066 - DNA, 505 bp, Oryza sativa
  unsure (1)..(505): unsure at all n locations
ggggtttatatctaaacacactgttttggaaccggggttattgggactcaatcaggacccttgctggagaggttgagaatccaaagagaacactcccaagggcactttcttatgctctagttttagtggtggggggatacctctaccctctgatcacctgtacagcagcagttccagttgttcgggagttctggacggatggatatttctcagacgttgcgagaattcttggtggtttctggttgcactcgtggcttcaagcagctgctgcactgtccaacatgggcaatttcgtaactgaaatgagcagtgattcttaccagcttctcgggatggctgagcgtggaatgcttccagagtttttcgccaagagatctcgctatggaaccccacttattggcatcatgttctccgcgtttggtgtggtcctgctgtcctggatgagcttncaggagatcatcgctgcggagaactacctgtactgcttcngtatgatcctggaaat

SEQ ID NO: 425067 - DNA, 370 bp, Oryza sativa
ctgtacgcctggggtgccggtccgcgattttcgggtcgagtcccacgtgcgcggattcgtggggccaccccctaactcttctctgggggggatctttacttcttctggggcgccatcacacctctgctcacaggggctgggtactagtcccgtttttaatgaaccactttttccgacgtcactgaaattttcaatgcaaaccgcgatctcatagttgactatgtctggatgactggatctgggaacatctcatactataattgtaagtacgactttactcttgctagatttgcttataatatgtgcaatacttatttttattgtggctctctcgtgtatttgctcatgacattgattacatgcctctatt

SEQ ID NO: 425068 - DNA, 372 bp, Oryza sativa
atacttttcgatgcaatacctcccaggagacgctgggggttctttatgtcgcttccgggggggggagcctctctggtgttcctcctcatcaaggttttgcgaggagaagaaggcgagacagaaagaagttggttgtgacgaaggaaaccgcagaagccgcagccatggcgccatctcctgcagcagcggttggccccactttcgaggaccttgagcgcgacctgcaagccgcattgatggaccagaaccactcggccaccgacgatgagctcagcatgttccgtagcggcagtgctcctcccactgtacacggtgctcgcactgccagtggttccctatatcctgctgcacctgattcacgtcaacagcttt

SEQ ID NO: 425069 - DNA, 384 bp, Oryza sativa
acgcgcgcgtgttttctttctgggacccacatatacagctgggggggttgtttatgttatagcgggttagagtcatcacggatcatagtacgatgcaagaaagagctttgtgcccattgtccatagcgcaccatttactgcattaaaactagccaagcagcgcctacgaggctgtatataccaacaaacgctctgatgatgagcttgtgcctctaaaacgccgatacgatgaagaatgtcttacatgcgactacattgcacatgacctgctgcacatggaaacacctcgtgacggacctatgatccgtaccagtgtcaaaccaaaacgaattttatgaaaaacaccctgggtgagaagaggtactcatctactgggacatttta

SEQ ID NO: 425070 - DNA, 320 bp, Oryza sativa
attttgtcgactctagagcaccaaacgataccgggggggatagtgcagcaactcagggaggctttccccccaccgtgcttctgatgctcgcgccgggattctaggctcgtgtgatctacgtggccggtgacgtgccatcagcaaccatggaaggacacaggagggcggtgaggactgtccgggtgcccaacatctcagatctggcatgggagcagaaggtgcgtgagttcttctgcttctacggcgaaaaccagcacgttgacaacagatgcgatggggtggccacggggaggactgtctactgcacgttaaaggatccc

SEQ ID NO: 425071 - DNA, 237 bp, Oryza sativa
gttttcaccgatgcaaccgtgcacaacataaggggggccatactaaaaggcatcgggggcgacatagacgcgcgccatcgccactacctaccacccaaggggaaggggtccaacgtaaacgaaagaaagtggactctactgatcacagaccaaaacatcctcaggctggtgattacggacaaatggctatgcaacgactcctagtccttgagaccgaccaacctgcatcgcgaaggc

SEQ ID NO: 425072 - DNA, 172 bp, Oryza sativa
cttttgtcaccctggccctagcttggactgatgggggggcccttaactatcatgggggggtcataagaaagcataaggtcaaccgaatcacacctacgatcgcacatgtgataaaactacggacacatgcttaagacaagtaggacgctagactacagggcaggctaatgca

SEQ ID NO: 425073 - DNA, 365 bp, Oryza sativa
gcgaactttctgtcctctgttcgttccccgccgcgaacgggatccgtatccccaatggccgaccgcgcgccgcctccgcctccgccgcccgctgggatcgactccaggagcggcttctgcgcggcgacgcggatcttccacagcacccgcgccccgggcgacctcccgccggagtcgctcccgatgaccgcggcggcctacgccttctccctcctgtcgtcgtcgacgctccccggccgccccgcgctcgtcgacgccgccactggcattgccatctcctacccgtccttcctcgccgacgtccgctccctcgcgggggggctctggtgctccctcggcctaacgcccggggacgtcgcgctggt

SEQ ID NO: 425074 - DNA, 364 bp, Oryza sativa
cgcgcgctttttgctgttctccctgcaatgcttcggtccggggccaatataagacaaccacttggggtgtgcacatgggctaagacgccataatcttgtattgacgtctgcatttgcacggcggtcgccagcgattgggcaccacaggcatggtgtcccgccggactggcctgattgctgcacttattatggctggggttctggagttcgtccacgcagacaaatacaagccaagtgagttcatacttgtgaactggggttcatacaaggaggtgcacgacatcgactgcttgaaatggcatcatgataaggacagtgagtggctcatccacggtcagaaggcatctatcatggcaaatgcaga

SEQ ID NO: 425075 - DNA, 405 bp, Oryza sativa
gatggaccgggggttctgcttattttggtctgtggtagtgattatatgcaactactccagctctgtcctatggtgtacactattcatattactagagaccactagactgcatatgtttccaaagagcagaaactggcgaatagagatatttagcgatatgatcttcagtatcatatagtcatggatcacgtattcaaccgataatattggggcacactcttaggctgaacctgggcctgtttgaaagcttggttcatagaatcaaaaaggggcttctaggacccaccgggaatacaagtgacatatacttacctgcgtaaagaatcttgatgctgtcaatctacaaagatagatactgttaagttagcaatacatacccacttacacggtggataccaaggtgac

SEQ ID NO: 425076 - DNA, 400 bp, Oryza sativa
gtgttttttttggcgctccggtgccgccgttttcggggagcgtggttgcctgatccaggaacaggatcggaggccaggtcccatgcatgcatgttaattagactgccactgatcacttgattccattagccattagctgtgtctcatgcagacggacacggcatacaacacacatagatcgatcggaggttgattgcccggtcatgacgacgacggccgccggccgagccaccctgtgcgcggcgagggaggagcacgagctcctggccacccggctgaatgtgaacggtatccggccgtcgcattgcgctcggggatccatcctcatgtacctgaccgtgccggggctctccatgatgcccatgcgggtgatggcctacgacttcatctgctgcgtcaa

SEQ ID NO: 425077 - DNA, 295 bp, Oryza sativa
gtttttctatctgactacacagataactgcatggggggatcttgcacagtatcgggcggacaaccaccatgtagcttctgaccagcggccagctcgccacctttgccaccgatcttctgcatgatgccacagttctgcgccgtcgtagatgttccaggactgctcccacggcctcaagctccgcaagcccaacatcagctgcccgacgttggtcaagaccacgaccaatgcgagcgcaactaccaaacagactggtccggaacagcgtgtgaaccctacggtcccctccatcacc

SEQ ID NO: 425078 - DNA, 509 bp, Oryza sativa
  unsure (1)..(509): unsure at all n locations
ctctttcttcccctttgccccgccctctcgtccggccgtttcgtggccgtttccgtgggtcccatccacttgtcctcccgtgcaatttacgaaattgcccctatcatcttcgggtggtccccacactccacgactttctcttgccccctcccttttctccctccctttgtttattccccaatcgctatcgccgagcgattccgtctcgtctcgtctcgtctcgccgctgctctgctggcgtggcggcacgggggccgtcgagatgtcgatctgcgcgagggcggagccgccacgtggcggcgggacgctcggcaagcggaaggagcgggaccgcccgtcgtcggaggagaanggggcgccgtcaccgtcgacgacgacgctgttcccggcgatgtccgctaggccccagccgcccaggccggctcaccccgctcggttcgtcaagcccatgccaccgncgccgccgncatttcccaagggtggcnggcgggagcagcttcaagctcatg

SEQ ID NO: 425079 - DNA, 303 bp, Oryza sativa
gtgttttctgcgacgaggcgcggccgttgccagtgggggccatccccgtccacacgctcttgatgggaaagaaatcggcgggcaccaaacaatatgatgatgcgactatggaggtgcagaaggtcctactcgctgcaagcgctgttacgttaaaggatataatgacgtggcggcctacaaggctaaggtacagtacaatcatgataagatgtaactaggtcacaagtcttaaatcggaggctacagcgagatagtgacgggcatccgtgttcactaaggcaacgactgctagttgctactagc

SEQ ID NO: 425080 - DNA, 454 bp, Oryza sativa
cccttaaccaaaccctagccggcggcgtcgtcggaggccatggcggaaggtgcgccgatcatctaccttgaccccgccacggtggcggaagcgcgccgccgcggcgacgacccgcgcaagctggaggagtgcaccaagtacttgatgacgcacatctacgggttgctccctggcccacccgtacccatcgccgccgcccgcacccacgccgcctgcgccgccgcagcctccgacggcgtcgaccgcatcagcgccctccccgacgcgatcctccgcaacatcgtctcccgcctccccgtcaaggacgccgcgcgcaccgccgcgctctcccgccgctggcgcccgctctggcgctccacgccgctcgtcctcgtggacgcccacctcttcccgcgaggtcgaagcttccgtgtctccgcctctgccccgacgcgcgccgacacgccgggcatcg

SEQ ID NO: 425081 - DNA, 543 bp, Oryza sativa
gttttatttcttgtcttgtagggaagttggtagaggatgtgctctcagggtaaggattgattgtcagtttgcttagttctttcttttgattcaccagttgggatttagttagtatggatagataatctgctaggttggggttaaatgttgcctctgatatggtgagtgaaactacttttgtggattttgtatggattgtggttagtgggtgaaatttgtgttcttgattgaaacatctacctagttcttgaatcttcaatggcagcattattgtactgattgttgtatggtccaataatgtatttagggggattctacttactgctagtctgctcccagatatgaagatttgattctgttttttttcctcttcaaatgtttcttttttataattagttgaaatatgctattatccagagtacttttgggggtttatggattgtttcctcctactcaagagaggtaaacaaagtaacttcttcagtacagattttccagagatgccatttcttcttcatcattccttctttgattacttcatga

SEQ ID NO: 425082 - DNA, 313 bp, Oryza sativa
ttcttttctgcctctatccatcccattctcatgagagctcattgacctaatcaggagctttactcgaacataatagtataagtccagcaccggacaagcatctgattctgaattccgattgctgctgcctggggagaggaacggtaaggcttgccaacacggctccgaggcggcgtatccggctaatctacagtcactttggccttgcccgtggcgcgcccgccgcctcgcgccctgagtgaggtgtgtggtgctgaggggcatgcgatctccttcgcctgattactcctagtttctacgagcttgctacgga

SEQ ID NO: 425083 - DNA, 326 bp, Oryza sativa
ttatttgctacctgttgctacctctctctcacggggggaaactgtacatccatgggggcaatatcaatgctaattctttagctatgccaccaattaaatcattcggatctggttaaagcgtactaactcctcgcatctctcgctctgatactaccgaaaatgcttccaatgcgaaaacatagactccacttgagccatatccggagtcagagtacctgctccgatgtttacgacccactctaacggacgtgactctacgtgcttaccgatccaccgacactacacggtgctacatatactatcatacctaactctcgactctttct

SEQ ID NO: 425084 - DNA, 329 bp, Oryza sativa
ttttgggggttattttttttttttttgggtttattttttttttttttttttttttttttttttttttttttttttttttttttttttgtttttctttttactatgttactctctgatttcaagaagacgaggctgtttttttttttggcccagcccctgctatttttgggttttgcaggatccgtgaagaattttccccccctgacctccgaaattctttaaagggacggttgtccttttgggtcaacagccacctgctggacggcttcttcgggctgattttttttgcgcccacgggggccgcgtagggggcactcactttttttttc

SEQ ID NO: 425085 - DNA, 522 bp, Oryza sativa
ttattcctctgcaagaggaaaacaaaaaagagttgcatatcaagatcctgaacaggggaaacgaaatgggggtaaattagcagttcggcagatgaataagccccatgagttagttatatcgtgatcccgatttcgatctggaagggaattttttttcgaattcgcctctcctgatcagatctatcaccttgggcactgattagtgtgggaaggaagctccatgcgtgctcctctcaatggatctaagctacctaacctgatccaagaatccggtcaagcgggagcgaaacgaactgaattactgctacctaatctgctccaagaattctggcaaaagcaggagcgaaacgaactgaattactgatgaaacgaatcggaattcaaaaaaaaaaaaaaagccaccgacacaccgaactggagccaccgacacagtcaggaggggatcgcattgcccaaatctcgtggtcacaactcgtgaaagttagtcgagagcctcggcgattcggcccgcgcatggatctg

SEQ ID NO: 425086 - DNA, 433 bp, Oryza sativa
  unsure (1)..(433): unsure at all n locations
gccttggtgtacgacgacgacccgttcgacggcgcgcccgcgagggccgccggtgggtacggtgacgaggagaggggcgagggtgatgcggaggaggaggaggaggaggaggagagggatttgttcggttntgacaacgaggattacgttaagacccccgcgcgtagcaactacctagtcctagtgctaccctcaatacggaacaccaacaatcattcttggggaggatatggggggcggaatggcttaggtccacctcttcttacaaggccaggaggtcattcaggacggcataactttggatatggtgggaggttttcgcatggaaatgggcgtaatgttgaaggttttgtttcagaaattaattttaataggagtgtataaactttatataggaagtttgttgcttttcatgagccttctgagattgtat

SEQ ID NO: 425087 - DNA, 364 bp, Oryza sativa
ttctacaacacccgaggatccattggctaccggttgggtacattccgtgagccggtggctgttatcaaagctgggttcgatccctacccggtgatcgttgcgaggagggccaactgtaatctggcatatttaggtgtccagagatccaacgcagctgatgaggatttgcacacttatgctgaacatatgagggcatttaagaacatcatccaaactggcgacggtggcgcaaggtgatgcatggtacatcataggattcagcagggcatgcccacctacaatgtatatggataatcacgttatatgtcgaatcacggctatgcgatgagcttctataaaacacaccgtgggcttggagcccagt

SEQ ID NO: 425088 - DNA, 232 bp, Oryza sativa
taatcttccgccaataattaaaaaaaaaaaagggaggaatttatttaagaaaccggggcgctcacatggtcctctcctaattactgactcatggtgactacctactccaactcccacggacacaacaagaagcccgtggagatcactcagggcgtctacagggcggccgcagctgtggctgccggcccctgcggcacgtttgacatcaccaaactcggcgccataaacaact

SEQ ID NO: 425089 - DNA, 504 bp, Oryza sativa
  unsure (1)..(504): unsure at all n locations
gtattatcgtcaccatcttggatccttagcaagaggagaaaggagggtgcttttttccttgacatgagaaaatgggggctctgttgcctgttggattctcttcacctttgttctctgtttgagaattagtaggtactagcttttatgatcagtgaggctaagctgatggttggttgcagcctttggctgggttcgtgcgtgctgatggcgacccggacacagatctggagacagatggggtggccactccatcctccaatgcctctgcagcattcgccgagccacacgacgaggaggagggggacgaggtgttgtgtggggggtggaanggggactggtcccagntgcangaaccaaccaagagtgcggcagaccgtaccaccggagaatgcctgtaccagcggcgccggtcagaagcttgtcttttgcagggtaggatggggttgaagcaacggccagcctttttggactttggcaacggcagccccgggttcaatggaaccc

SEQ ID NO: 425090 - DNA, 502 bp, Oryza sativa
  unsure (1)..(502): unsure at all n locations
atgttgtttactacaatgaatgtattattttagacaggggtaagcaccagcaaattttgtgatttttttttcatgttgttgtgagcatgcattgggatcattgatatggaattagcattacattgttcttgatgtcaacacatgcacttattttgactgtcttgttgacacccatcagttacatgggcaaaatcccttatatcatgggacgggggtagtagatggttttcataatcacaaaagagtgcaatcagtgcatgctggtaactaaaaaataagatgtgattccacagtgatacaaaatctacttctcatactaagacagagtagctttgacaaaacattctttgcgatataactgcaaacaaatgccaacattgatcaagaaaactggaaaagtaagcgggttaatatggtactcttgatcgntactacccgaacaagcattatggaagacagctagcangtggttgaggtatcgagttatcctactactaccatg

SEQ ID NO: 425091 - DNA, 524 bp, Oryza sativa
catttagtacggtgatgatgatgccggagatgactgtgaagtttaccacagggttagggggaactggtggacatcctgtattttctgtaagtcattctgcagatcttcaggaggcagaagtagagcaagagcaagggaaaggagaagtagtggaaggaggagcagcaataggtctagccaagaaagctttactattgaggtgccctcgggatctgttgacataagggaaatcagatttgatgaaatagatgatgaatatatagttacaggagcaatgcccggcattgcagcatccaggaggatcgccagtcattacagggatcctagatatggacgcagacgttcatactactaggatgaaccagccagctgaaatgtaatgcagtgcagccacaaccagaatattgtgcctctacccgcctctttttcttgttctctcaaaaatctggaagatgctatcccagcccaaatttggtgtgcatataagatagcagcaaacccttcattgttgttcatttacagca

SEQ ID NO: 425092 - DNA, 339 bp, Oryza sativa
atccaagagctctcttcctttcttaggtgcttggttcaagaaggttgtctggttggttcacacggcaaggcagatgagatgaggaggaggaggagaggaattgatccattatgatgatggattcaagtgcaagtccaaggcgctgcgttcggatctgagcttccatcggtacctcttggctgccgccatggccaacaaatcgaaatcgggatccgtgtacccttcttttttcttctcaccgttagtctcccttggtcttgccggcaccacgcccaccaccttcacactaccactagcacctgcagctgcaggctctttctccaacactaatgccacgcc

SEQ ID NO: 425093 - DNA, 366 bp, Oryza sativa
acattctgtagtgagagatggagtggcattgaatatgcgggatggcgctgctggtgctgatgttgggttactcgtgcaatgcatgtgaccacccgacctgcccggatgtgtgaatggcggcggtgtgggcggagctgttccacggtggcgtaggcggcggcaggcggtaaaagaggcgtgcatgcagtcactaggtgcgccacacacatcggtggccaggtacgggcaagaaggggaaccggtgcggttatgactgaacctgaagatcgtcgacgtggagttcttcctgcacgcggagttatgtgtgtggctgaacaatatagacgctaaattgactctgggaggtccatcgaccgcaggcaccag

SEQ ID NO: 425094 - DNA, 468 bp, Oryza sativa
cctttattttttgttcatttgatgtgctttggttatgtagaagggatcttgtggaaggaattatggggggctgcaaaaccaatacctgctgttgaacaggcgcctatatatgatgaagatttagctgtggagagcatttttgatgccttggaagttattgaaccgtcaaaactttttgagcagctactagctgtcattctttctgtatgctttgtagcagcagaattggtgctaccagcaggtagcaacttgtcgaaattattctacgactgtaaagattacatactcagcatttaccaagatgacatatcaaaagagaagctagatgagatatgcatggtctacgagacgatggaagccatagtaactaaccttgaaaaacttttcagataatgatgcacctgagaaatgtacgcacttgagagtaaaaacccgttcatgatcaagctcaactttatcggcaaagat

SEQ ID NO: 425095 - DNA, 341 bp, Oryza sativa
tcgttgctctcgccttgcctcgctgtcgctcgctcctgccaatccgcgctgcccccgtccctcccttcccacacgctctgccctccaaataaagtaaacccgcgcgagccgccaccggtgaggctcccgtcgccgtccgtaccccggctcccggcgaccgtcgccaccaccacccagggtccccgcttcgtaggcgaggggggaggaggagacgacgccatggggttctgggaagccttcctcaactggctccgcagtctttttttcaagcaagagatggagctttccttgatagggcttcaaaatgctgggaaaacatcgcttgtgaatgtcattgctac

SEQ ID NO: 425096 - DNA, 183 bp, Oryza sativa
catcatgattcttgatccttgctgcttcttgctgcttgttgctgacgcccttgggtggatcttcgaccaaggcggcgaggggacctacgcccccatccttccccccccccccacctacccctgccccttcagccaccacaatggccacaccccccccgacctccaagaggcctcctcccacgc

SEQ ID NO: 425097 - DNA, 143 bp, Oryza sativa
gatgcgcctccagcaccaccaccgctcccgctggggctactacacctacttcgcgcgctcctccgacaccgccgccaccgacgccgacgcccgcagcctcgccgcggacgccacccaagacagccccttcggacacgtcaaag

SEQ ID NO: 425098 - DNA, 52 bp, Oryza sativa
caatgtaggccttgcctctggggcgcccgacggagcggatcgctaaccgttt

SEQ ID NO: 425099 - DNA, 84 bp, Oryza sativa
caataatattaggatacaccatgcgtacacccatagtggtgtctacaactggggggggcaaattagcacaatccagaaggggag

SEQ ID NO: 425100 - DNA, 92 bp, Oryza sativa
catggtaaacacattgctgcattcacttgatagggacagttattatcgaatgaaaggacccaagcacggaccatacccagagatggaggagt

SEQ ID NO: 425101 - DNA, 84 bp, Oryza sativa
actacagatgaacttggggagaaccaattattttgttgacataaaacagtgcaggtggttttactcctgctcgctctggtgtct

SEQ ID NO: 425102 - DNA, 128 bp, Oryza sativa
cgccccagaatccctggcgagacccacgcgcgcatattgatagccttatgtgagcaagcccaaaaggagacttactcttgctaagagaggtggtcaagcaaaaacaagctgggaggaccttccagcaa

SEQ ID NO: 425103 - DNA, 106 bp, Oryza sativa
cccattatcaacacacagctcagacaccaagaacgggagggtacttcaccaccatatgggtctctttcgctcccgctaggcagaaacgtctaggacaccaagggca

SEQ ID NO: 425104 - DNA, 106 bp, Oryza sativa
tcatactgctgatgaaggggatggtggagatggggggctatgtccagactacgcgcgccgggccacgccacggccaggcacccaattttgaagccctacctccacc

SEQ ID NO: 425105 - DNA, 326 bp, Oryza sativa
gcaccggcccagaatcccgggcgagacaccacgcgccctgtaaaaaaagagagagagatctgcagcaacagcggttcctgatagagacaacctacgggtgccatctactatctctgactgcagcagtgcagcactctccatctcaacccaagctaggaggaggtcatggcagcccaggggggcaaggatgcatggagcagcagctgcagacttcaagaaccattttgtgatgggggggaaccagggtcattggctacctcattgtcaggatcctatgtcagggggggcaccaggccacatctgttacaataggaaaggtcctcatt

SEQ ID NO: 425106 - DNA, 59 bp, Oryza sativa
gatcagtccaaggaaaagagagaattccaggattgtgctttcgatgtgtctgtctagta

SEQ ID NO: 425107 - DNA, 136 bp, Oryza sativa
aaatcatgacaaggaaatgaaagaaatgagacaacgaccttgttagccttcctgtggggatcctctcctctccactacttggtctatcttcttcttggagagctagcaggaggagcaaagcagtaggggagagaga

SEQ ID NO: 425108 - DNA, 103 bp, Oryza sativa
ggcaccccgcatcgcccgcacgtggccctcctggggtcccttccacctagtctcctcaagaaatcgcaacccaatccaagcagatttcgcgtccaggacgtga

SEQ ID NO: 425109 - DNA, 150 bp, Oryza sativa
gtagcgcactgcgaagcgaacccttctccggcggctccgctctacgctgcacggggctagctcgccgccgtccgtctcgcgcgcctcaagggttatcacaagatgtatacagcaaggaggaagatccagaaggacaagggatttgagcca

SEQ ID NO: 425110 - DNA, 78 bp, Oryza sativa
gtcatcgcggacaccaccatcgcgacgggcggggactgcatctccatcgggcgggggaacgacaacatcgacgcggtg

SEQ ID NO: 425111 - DNA, 345 bp, Oryza sativa
cttttcgtctccttcccccccatggcctccctgggggcgcccgcgccgccggccggcggcggcgacccgctcgccgccaccattccgccctcattgccgtcgccggcgccgtcgtcgtcttcgctcaacctctccccgtcgcttctcatcatcaccgcgctcctcgccttcgtcttcttcgcctccgtgtcgatccacttcctcctccgctgcctcgcgcggccgtcgcacccggctccgagcccgctgcccagggcgtcggcggcggcccaacgcgcgacgacggcgtccgccgtcgaggctggggaggctaccgccgcgtcggcggtggggaggagccatgag

SEQ ID NO: 425112 - DNA, 383 bp, Oryza sativa
gttatagttcagaacaagctgcaacataaagcttggaacaacattcagagtagatgtgcaaaacccaggaaagttgttaacgctgcgaaatctgctgaagttagaaggtcagatactgtaagagttccttctcgtgctccatcagagctttctgaggaaacagacgatatagttagcgaggctggaaccgttgatgatagtaaaggcaatgaagaggccaaggagattgatgtgctagatgaagctccacattgtgatcagagcactggtactgacgatgaaattcctgaaattgaagaaaagatagttgatgatgagaaaccagttgtgtatcaaaggaatgaggagttacaatcaaagattgacacgttggaacaagaact

SEQ ID NO: 425113 - DNA, 277 bp, Oryza sativa
atttgacgcgatggtgcggagcgaccgcaggggcgtgaggattggcactggcggtgtccacggatcactattaatcaagacgctttacaaccacacgtgcgatatgctcatcgatgtgagcgcgtcctcatagatgccccgatcgaacctgatcgctatgagggacactgcggctagggtgcgcacggtgaatcagcactcttggttcgtgcaacatgatacagtggagccctcaagttgtatggggctgttaactactattagatgctcaccttct

SEQ ID NO: 425114 - DNA, 484 bp, Oryza sativa
ttatccttcttcctcctccctcctctcctgggggctcctgcagcagcgcccagggccatcggagcctcgccctcgcgcggccatgcttggtctgaggggagccagggcggcgcagctcccgtacgcttccgccgccgtcgctcccacccccacgccctcgttttccggcttcgcgcgccgcctcccgctcctcgcctccgcggccctctcgcctctgccgccctccttctccttctcctccgcttccgccgtcaggagggatagggaccctcccatgcgtcccgtctccggcgccctctccaggtccaggccaaccaccaggggttttctgctctgcggctgctactgctcccagggagggcaaggagttgcttgtccagcatctgctcgtcggcaacaggatgtcaggcttttggtcgatcttgaaagaacatcattacaggaggtgcagacttgagcgattagctgtcgagtactctttatg

SEQ ID NO: 425115 - DNA, 372 bp, Oryza sativa
tattccgtcgccgtctcccctctgacgcgtggggggcacctgccatccacctggcggcgccgccgccgccgccgccgctcccggtcgccggccggcaggggctccgaggggggctctgcccgttgctcctcctccgcctcggcgccgccgccgccgctccggtcctgtaggcgcgctgatccgagggtgggagcccagtctcaggacgaggcctagggtttcgtacaccccctcggctgctcggcggtgaggaggggggccgcggcgtccctggagatccgatctccccgggctcggcggtgaaaggggggcgccgcgccgaggttggctgcgctcgatttgggcgggacccccggaattcgagctccctat

SEQ ID NO: 425116 - DNA, 247 bp, Oryza sativa
attatttcccacgacatcaaaaaatttcaggggtgggctttagaagaacctggggcgaaaaaactccccacctacatttgttttatatatgtgaatgcaatcgacgatacacactgtacctaactcttattacctatcctctaacatataaaggaaaaccctgtgtgcctcctccagtctcttgagctgacctatggaatgagggatgctaccaatgaacttattttctacaataacaaaggtgacc

SEQ ID NO: 425117 - DNA, 302 bp, Oryza sativa
ttgtgtgtttttttttttttttttggggggtttttttttttttttttttttttttttttttttaaaaaaatacattaaaatccttaacaaagcccccccaactttaggcaaagttcccgctttaggaatatccccatttttcccattcctttggggggaaaacctccaattaaaaagggaggcagttttatttccaaaacccaaagggaaaaaaaaaaaaaaaacttctccaagagggtggggcctttccccaaaggtttgggtgaaaaaaccctcacaaaagccattgttgcccccaaaaa

SEQ ID NO: 425118 - DNA, 251 bp, Oryza sativa
tttaaagttgctagatagtccaacagcagctcgggatgataatatcaactgtggagtataccgtcattgaaacacatagttcaatcctagtccattatacggccaatcgttggcataataagcatattctatattccttagttccttggtaaataaactgagatatcgagtatgcgaataaaagaaaaataaggcactgtaagtttatttgtacaaagtttggaatttatgctatgtatagttttgcctgt

SEQ ID NO: 425119 - DNA, 292 bp, Oryza sativa
tccaacacgagtcgcgccgccgatctcaggaggggaggtgaggggaggggatgctgtttaacaaatatggatggactggtatagaattttgacgcagatgatcttggtgaaatgtcttataatcattataatgaagaacaactgatcccctacagtgatgtgtcacatccttacaacgaataacccgataacatggacaacgtataataggggaacccatacattcagcaagtgagttttgacagtgaagaaccagagaatcagtacaatgaggagccatctaacccttatc

SEQ ID NO: 425120 - DNA, 336 bp, Oryza sativa
tttttggggttttttttatttttttgggggtttttttttttttttcttctttttttattggcttaaggtaatgccaccattcttggcattctcaacatatctatagttagctccaaaaacttgggactgcaaaaaaacaaacagtccttcgagctccaaaaacctgggaatgaatccttgccaacaaaccaagtccccatcaacatcgacttgttggtgttacaacccccccagggggggtccctttccccataaatttaagagaggctaccggcccggagcttcccccttccctggtagggtgtgacccccccatgggcacccgggcttgaattc

SEQ ID NO: 425121 - DNA, 311 bp, Oryza sativa
atttctctctctttttcttcttcttcctcctggggtaaattctttctccactgccgcaagaaaaggcacctcaccgtcaccggggtgtgccggaaagctcccatctttgtctccatttgcttgccctcaattccttccttctttcctccctctgggttcttgtccccggaggcccggtttcatctctccactcctcgatgtgatgcgtgtgactcccagacaggcgattgaagctcacgtcgaggcggtgatttgccctctgacaagcactgttctcggggtctgaattgctgattactactgagcgtctc

SEQ ID NO: 425122 - DNA, 432 bp, Oryza sativa
  unsure (1)..(432): unsure at all n locations
gtcaccgatatgaatttcttgtgctttttcccggtcacaaagaagccggattcgagcaagggggcggaggcatcgccatcgatggaagagggggaggcctgcgacgactgcgagtgcgagatcgcgcggttgccggaggagctcctctccgccgcgatctccctcaccgcgccgcgggacgccttccgcgccgccgccgtctcccgggccttccgcgccgccgccgactccgacgccgtctgggctagcttcctgccgcgtgatctccccgatctcgccgacggcgagctctcccccgcgccgccttccaagaaggacctcttnctccgcctctccgncggccactaccacctnctgccagacaggctcaagggcatgtgattggacagggagaccggngcccagtgctatgtgctctcggctagagcgctg

SEQ ID NO: 425123 - DNA, 259 bp, Oryza sativa
tgtttaaagcgggaggccacctcttccatggggggaccaccaccctgacgccggcgccgacaccgactgactcacccgccggcgagcccacgccgcccaccgccggagacggccatgccccccgacgcaatccagctctacagactcctcttcaagctcattctgcgccgtcgcctatactccctgttcgactacggcggctactgctgctgctcattcgagagagtactcccgcgctgtcgccgaccaccaccacccc

SEQ ID NO: 425124 - DNA, 452 bp, Oryza sativa
tttgccggctatgtaataaagtgatggcagatgcggtgttgacaagcaagtgctgcttcgacagtttctgtgataaatgtgagtaaattctgtatttctccttaactctttgctgtggatatgaacaatgtcattactttgatattcgaaatgtggctagtcatgcttcaaattagtcacagaagcatgttgttttggacattgacgtggtatttgacaggaaaaattacgaatagttattgttgtacgacctccatccttcaatatatgatgttggttagttcaaaattgaactaaacaacatcatacataaaagaacagagggagtactatatttgtaaaactcgataaaattatagcactgttaagtactttccaagacaaatataaacatttagtaatttaccaatactcaaaactttgtctaaatacattgctaaacatgttttcac

SEQ ID NO: 425125 - DNA, 174 bp, Oryza sativa
  unsure (1)..(174): unsure at all n locations
ctttccgctctccggccgccggtcgctccgacggcccgaccctctcccgttagtggtggagccaaccttaaccatcctactccgggcggggcgaaggcgtccggcggttgcaggagcccgatggacagcggtggcactggcagtcctgtcggcgtanccggcgactgcgcttgt

SEQ ID NO: 425126 - DNA, 340 bp, Oryza sativa
gcccacaccctgctgaaaagaggccgggtaaagcagcatccttggacccattgcctctggcctcccaaacatttattttttgcatttttgcttgtgtttgtgagctcaagcaaagactgcaagagaagaatcaaagtgtgcaagcaacttcatccctatccccctatatagacaggtaaaaactaaaagtggtagtagatgaaaagatcaaaaactttgatttcaagggtacacctagtacaagcctgatttgtcaaaagaacaacaaaaatcttgtgaagaacagtgtgtctgaatgtctgatgcgtgtgtgctgctgctgttcttcttcttcttctca

SEQ ID NO: 425127 - DNA, 368 bp, Oryza sativa
ttggacgggaggcttcctcctcctcctcctgctggagactcgacgccgccacctccacctcccgtctcgtctccagaagcttctggaacacccttccggcttcaattcccccctgctcgggtcgggtagctcccttccatcatccatggccgacgccaccgccgccctctcagctcggagcaaggtgcaagctttcctcgaagcggctcgtgccggtgatctcgactccctcaagagtaggtgcccccatgccttcctctctctctcctttgctttccttgcgtttcttctcatctcctctcctcatgcgccattgcagagctcgctgcggcgctcgacgaggagggcaagggcgtcgccgccgtcgc

SEQ ID NO: 425128 - DNA, 570 bp, Oryza sativa
attaatgaggggttttttttaaataatgatggggtttaaataattatatatttaatattataattaaaataatattaatataaaaataaatatttaatataataatatacgaatataattatttataataaattattatatactatatatatattttttataaataaatattataatatatttatattataaaaataaataatataatttatttataattttaaaatattataaattaatttattattaatattaatttttttattattataaaattatatcaaatttaattttataaaatatataaattattttaaaattttattatattactattaaaattaaaaatatttatttttatataaatattatttttaatatattttatatatttataatattatatataaaatttatagtttttatattaatttaaaaattttaaaataaaatataattaattattaataattaaatttaaattaattaaatttaattaatactaatataattattatttaattaaataaattaatatataaactattattatattataatattaattat

SEQ ID NO: 425129 - DNA, 57 bp, Oryza sativa
tactcatctagtcgatcggtcatgtcgtctcagcagggactttaaaactgcacggcg

SEQ ID NO: 425130 - DNA, 61 bp, Oryza sativa
tcctagattcttcgagctcccggccatggctgaacccgatgtattaaattcctcaccttta

SEQ ID NO: 425131 - DNA, 436 bp, Oryza sativa
taacccggacgcagcagccgcagcggaagagggaagcgaagcaagcgaagctcgaggggagatggctcgcggcgtggcggcggtggttttgggtaagggttgtatctgtaatattatatggcttcgtcacctttcttttcttttcttcccttcctcttctttttctccttttctcgttatttttactctctactctttcttcttttttcttcttttctttttatcttctttatccttccttttattttcttttttttttttatcttctcttttttccttttttttattatttctttctattttttttttttctttccttttctctttttcttactttttcttttattctttttttttctctttctcttttttctattcatatttttctttattaattttttcttattttttttttcttttttttttctctcatttt

SEQ ID NO: 425132 - DNA, 86 bp, Oryza sativa
cgcctgccgcgggtctcctcgtcttctcctctcgctgtcttctcaaccagctgtcgtgcgcggtcaacagcggcagagaggggagg

SEQ ID NO: 425133 - DNA, 303 bp, Oryza sativa
ctattgagatcttagccgcgccggagatcgagagggaggagcggcgacgcgggcgcccccgatccctcctcctcgccgccgacggcgtcgtaggtgtcacgagcaataattagtcatctactactacataccgatgtagtaacctatcggtggattgaggtttatttatattcttacttttatttataacattttttatttatttattatttctatcttctattatatattaattttaatttaaataataactcatatatatttcttccataatatttttcattcacaatacttatatatcaa

SEQ ID NO: 425134 - DNA, 243 bp, Oryza sativa
tgaggggggaagagaggatctagtaaagtgccgggattcttagatacagatgccggattatttagaggcattaggaaactagtatatatcgaaaaaaagttaatgtttaatcacattgtttaaagaataaccatacctcaatttctataaataaaaattacttacatttatatcttatataatcaaaatccactatctctaatctttatcataaatattaaatatttcgttccttaaccaaat

SEQ ID NO: 425135 - DNA, 120 bp, Oryza sativa
ttctaaaaccctctccgactctccccttctgccactcttctccggcggcggcggcggcggcggcgggagcgcatcggagatgatcatcccggtgcggtgcttcacctgcggtaaggttga

SEQ ID NO: 425136 - DNA, 132 bp, Oryza sativa
tttattcttcgatcatcaacttctaaaccctaggggggtttttattaaaccatagaccaaaaatcacctaaagaataatttcacaattaccatttcatacctctaataattcaacatttctaatccaaccat

SEQ ID NO: 425137 - DNA, 63 bp, Oryza sativa
gtcatatattggccgcctaatctctccgaactggctaacatagacgatacctccactgacgat

SEQ ID NO: 425138 - DNA, 53 bp, Oryza sativa
acctcaagcggtggatacctaggtacccagaggcgaggaatgttataccaagc

SEQ ID NO: 425139 - DNA, 123 bp, Oryza sativa
gcctaagcggaggacacctacccccacaaatcggggggtctctttcaacaacaccgccaccaccgacgacgcgatgatcagcatcctctcgcacgatcgcctactcgtgttcgtcctggtctc

SEQ ID NO: 425140 - DNA, 183 bp, Oryza sativa
tgcttacccttcaagaaacaagaaagacaacaccaacaaactagctagctcaccaatggcctcgttgtcctccttccggctcgccgtggcagtggtggcattgttgttctttcttttatgcttcacttgtgtcattcttatggtatatttgctctttatttcttatttattttatctttctat

SEQ ID NO: 425141 - DNA, 163 bp, Oryza sativa
tcgtggacccttgggcgagcgctcgcgagcgccaggggcaccccacgtttatgcgcgtcttatataatgcaagaggcgcaccactgacgctccttctttgtctcttccttgttacatatttaaaacttttttatctgctgaaaccgacgcttcttcctacatt

SEQ ID NO: 425142 - DNA, 398 bp, Oryza sativa
tcgttagttctagatcgcgagcggcgcccttgttgggttttttttttttttttggggttttttttttttttttttttttttttttttttttttttttttggggcgggaaacccaaattttactacttgttagcacgggaaacccaaccctaaacaaaacttctgggtggggcccaagttccccaaaaaaattaaatcaagaccccaacttgataaatacactaggaccatggccttccatgggttggtcgggagggaaaaacttttattaccccttgggggggaaaacccgcaccacaaaattgttggccaccaaaccgggcttgatctttccggtggcccccttgggaagcttttcggcaaagtacacctttttgggccccttgaaccccgcccggt

SEQ ID NO: 425143 - DNA, 194 bp, Oryza sativa
tcgtcccccctcacctaatccctccctcctcgaatcgccctcgtcaaaggggtgcaagaatccaaggggggagtggttggggttgattggttcttggttgtggtggcgcatggcgtttttttattcttttttttttgttcttcttcttcttcttttgcttatttttttttatgttttcttcttttccttatatt

SEQ ID NO: 425144 - DNA, 436 bp, Oryza sativa
tcggtctcaatcccctcgcccaggtccttgatgcgcgaggcgaatcaattccatgggcctcatatgattcctggatgggttatgtacctgaaggccagttcctttcgcggatagggccaactgatttcctcaaggaccttgatgaatttgttggtgctgatgcagtccaggagtggaaaaagcttcttgatgcagttattcctatctctgcagctgcaatggctttgcctccactttccattcgaggtgatttaggtgttctctccacatctgctggtagatatgctccttctctgttgaaatcaatcctgcaaatgggacctcaaggggctcttggtgctacaaaacttctaagacctttctcagagatcgttgattcattgggcctgaaaaacccctttgttcgtaattggatcgatcttttgtgttttctact

SEQ ID NO: 425145 - DNA, 463 bp, Oryza sativa
tcggttacattgtcaagtttcatagtagttattttggactcacctcttcaaagtacctgtcatctgggttgggaggtaatttctaaatctcagctctactatttgatgatctgacattcatattttactatatacttcttgtcactagaattcctgctgcatacgtactagctaggtatttcctcttacaataatggttgtcagaattagcagcatatcagctcaactccatgcttgaacaatctgagtttttctttactccagaacacctgagagttgacatatatgatatatttaacagattgtgttgattgcgcataaagaagtagccgaacatatttctgctatgcacattaacatattggtacatatttacaattctatttttacgaagcactatgctactgataggctattgatgggctacagcttgatttattttaaaaacacccccggttttttt

SEQ ID NO: 425146 - DNA, 435 bp, Oryza sativa
tttattagatctagagccgtccttttcctcctatttcacatactccggagagagggggtttattgatactagtaggtaaaatttccacaatggatgatgataaagtgactgcacatcctcacaccttttaagatgctttgcagaacattcagcacctggagcgtgtgtcttcatcagaaacacaggctcaggaccatcagaacgtcactcggatcacacatgtgatgcattcacacccaccaatgccattgatgctagttacatcaatcacccaccagggccttcacgtgtcctactttgatttcgatactttagactacggtgagcatgctaactatacttgtcgcgcctactcagtggatgaaaaaacatacattgaccacactgatgcatggaccatggactggtcatgacaagctttttactataaatcat

SEQ ID NO: 425147 - DNA, 375 bp, Oryza sativa
aggtggacgattcggaactctgtggtgtgatgacccaaagaaggggcggatgtatgccgatttcattggaagtgctggaagcatcttcgagctcatcactccgctctatcctggatacttcctcccacttgcgtccttggggaatctagcaaaggctgtacgaagaggatttagggatccatccttccgtgttatccaaaatcacttcacggaatctggaaatttatgggaggttgctgcaaaggaggaactatgggaagtaggagctcacttggtaggcctttctatcggtgtatttattatggatacatcaagtataaagtcatcatacccaacacttgctttgacatggcttggtgtccgtcttttacatct

SEQ ID NO: 425148 - DNA, 348 bp, Oryza sativa
ctcacatcacgcaaccctactctcccaacaccggaccgccgcccctcgccgattcgctccgccgcctccgccatcccgcgccgccgttgcacccccatcccgcgccgccctcgccgatctcttcccttgcctccgcgccgtcggtctgcatcctccgcgcgccgatctcctccctcgcctcctcgcaccgatctcctccctcgctgccgcgctgaagaaaaggagctgcatcgccggtcgcctctcctcctcaagaccacgaagcgccggttccacaccgccgttcttcttcgctttctccgccaccgccgccagggagaagactccgccctccggcatggcgccatc

SEQ ID NO: 425149 - DNA, 525 bp, Oryza sativa
  unsure (1)..(525): unsure at all n locations
ttttgtagtcctatagagttgcagcggcatctcaagcggatcattttttagcgggagcggcggtgtccgaggatgtcnttttcttcctttttttttttttctttctttttttttctttttttttttttttttttcttctccttttttttttttttttttttcttttttttttttttctttttttttttttcttttttttttcttccttctttttttttttttttttttgatgtttgtcttttattctcttttattttttttgttttttctctcgttttctcttttttttatctcttttattttttctttctttttctttttattcttcttttatcttctattttgttttttttttttttctctctctttttatctcttcttctatttttttttttttttttttttttctcttttctttttttttttatgattcctctttttttcccttttctatcttttttttcttttgttcttttctttttttcgtctcctttttatttttcttttttttctcaaggctttttt

SEQ ID NO: 425150 - DNA, 378 bp, Oryza sativa
tcggtcgcacgcgcacctcacctcctattctctgggggtcctcgccaacctcctgctgtgcctctgtccctctctctctcgctctccattcccaaatctcctccgcatcgggatggcgcaagtggtggctgcggcagggacggcggcggcggtggcggcggtggggaggccgctgggtggcggcggatctggggccgacgcgctccgcccggcggcgaggctgtcgttcgcgccgcgctggtgcggtgggagcgcgggggcagcaagggcgcgccgcgagtccgccgtcacgtccgtgattagccgcgccccgcgtctcgacgccgaggtgctgccggtgtcggccgacgacgacgcggacgtgaaggaagaagaaaa

SEQ ID NO: 425151 - DNA, 79 bp, Oryza sativa
gatgccgcccgagatagcaccccactaactgcccggtacgtgttcacaacccggccatgggagcggacaagactcctga

SEQ ID NO: 425152 - DNA, 443 bp, Oryza sativa
tcctgtcaaaaaaatcacccactctttgcccggcacgtgtgccctccccggccatgggagccggcatgctcctcggtgccatggcctatgctgcctgctagcctacactcccctggccgccgtcacctgcccaccccgtgtcggctccgcctgcagctgctctcccgcgccgtgcccgaagccgtcttcggcaccaccaccaccaccaccgagcccgacaaccacttctctgtcgaggaatacctcatctccaactgcaatctgacccagccacaggcccacagggcgtccaagagcatcgcccacctcaagtcccgctccaaccccgacgccgtgctcgccttgctcgccgacttcggcctctccccaagggaggtcgcggccattgttgcctgcaacccgcgcatactgtgcgcccgcatcgaccgctcccttgcacccat

SEQ ID NO: 425153 - DNA, 312 bp, Oryza sativa
gtaatataaaaagagaaaaaagaggagaggcctggcaactgcaaaccctcgctttctccgatcgaattgctcgcccgagcaccaccagttcgccgcccttgccaccaccagtcgcctgcctcccccgcgcagggtatctcctccggccgccccagtggcgattccccccgagctcccccgcgcggcgccgtggccatgtcgctcacctgaggatacggtcggtgggctgtttcttgcaagagtctctcccccgagccccccaagagaaacagcccgggggacgccgagttgttgattcgatcgccggagttg

SEQ ID NO: 425154 - DNA, 554 bp, Oryza sativa
gtgatttaatccgcagccatggcgcctgacgttcgaggcgtctatttttttttttcttttttaattattttactatcatctacttctttattttattttcttctaatgtatcttcttatttttttctttttttaacttctctcattttttttattttctataccattttttgagttgttttcatttatttttaatttttaatttttctattctcttacattttttatttttatcttttaatatattttttcattaattttttttatttcttttttatttcttttttctttcttttttttttttttttctttctttattttttttttttttttttttttttattttttttttttttttttctttttttttttttttttttatctttttatttttctttttatttctattttttatatttttatttcatctttttttttttttcttttttttttctttttttctttttatttttttttttcctttttttttttttttatacttattttttttttctttttttaatatcttctttttttttattttctttctttttt

SEQ ID NO: 425155 - DNA, 304 bp, Oryza sativa
ttatcatgtacaaataggagggcgcatgcaccttgtttgccattagctctcgacgtagcctagagcgcaagcagcagcagcagctagattggttggttgccaatgatcccggccatctccccgatgatggacggcgccgcgcctctgcttcccgagacgagccccgagagccgccagcaacgtgatccggagaggggacagaggtggggcttgtcttttgtgttcatgtgtgattcaagtgattcttgtttggtcggactctgccctttttgttctagagagatcttcctggtgctcttggggc

SEQ ID NO: 425156 - DNA, 353 bp, Oryza sativa
aaaaaaaaaacaaaacacaggggggaaataaaaaaaaaaaccccccccaaaccacaaaaaccaaaaaaaaaaaaaaccaaaaaacaaagacaaaaacacacaaagacaaaaaacacacaaccgaaaaaaacaaaaagaaaaaacaaaaaaaaacaactaaaacaacaaccaccacaaaaacaacaaacaacaacaagaacaaaaacacaaaaaaaaaacaaaacaaaacaaaccaaacaaaacaaaacaaaaaggcaaaacagacaaaacaaacaaaacaaaacaaaacaaaaacacaacagacataaactggcgaaaaacacaaacaacaaaaacaacgaaaacaccaacac

SEQ ID NO: 425157 - DNA, 323 bp, Oryza sativa
ttcttttggcacgacgagaccagaccaggcagagagggagaataggccaccctcgcgtggcctccgacctgtgcttatcgaggtcatcatgatctgctgtgctgtagatcgagcttctctggtccattcagaagctgcggatccctatgactggagctggcggcttcatcgcatcccacatctcgaggcgcctcaagagcgagggccactacatgattgcttttgactggaagagaaatgagcacatgactgaggatatgttctgccacgagctccatcttgctgatttgagggtgatggacaactgccttaaggtgaccacc

SEQ ID NO: 425158 - DNA, 205 bp, Oryza sativa
tctttatgattatgttgatcccatgcgcatgagtggtcagcgacctaatgaagatctttactcgaacagaagagtataagttcagcaccggagaagcatctgattctgaattcggtttgctgctgcctggggagaggaaggttaggttcctggctcctcctgactgacttaatttcctttcgttgtctttctccaccaggggtgg

SEQ ID NO: 425159 - DNA, 194 bp, Oryza sativa
ggtactgagtatcaaatgcttccatgcttggatttgagcaagagcaaggacaagcaaaactatgtgccgattgaattgtgtgatcttcttgaagggcagagatacccaaaagcaagcttaaataggaattctgataaaacactgaaagaaatggctttgatccctgcctcaagtaggaaggaggagattctgga

SEQ ID NO: 425160 - DNA, 92 bp, Oryza sativa
gaccggaccggaaggcccggggcgacccacgcgaccggtgggtgccaagcaaccaaggaacacctcggggggggcggaaaaaaaagagaccc

SEQ ID NO: 425161 - DNA, 473 bp, Oryza sativa
gtcgtcgcaggtatctcaccaggatggtgtgcgcagtgttgttactggatctctggcatctgaaggcatatgccggagatgtacacagtcattcttccttgcaccacaagaatgtggtggctatgttgctctcaatgatatttttagatttatagtggaaaggccaccagttgcaataagtcaagttagtcaagaaaatgagaacaatcagaacactggcactcttcctgaaactgatcctaatccagcgggagatggtatgatctcagagcctgtggcagtggaaaataatgttgcggaggtggaagtgacaaattccacggttgatggcactagtattgaaaataatgctactgctgctgtcgaaccacctgtacatatgacgaaagaggagcccaggaagatctctgttgctgctacttcccctccagctcagaaggtagttacgaaaaaatgcctatgcggccctgtga

SEQ ID NO: 425162 - DNA, 114 bp, Oryza sativa
  unsure (1)..(114): unsure at all n locations
acctgaaggccatctatggaaggatcttccatggcgggttttgtgcnaaatcccccgggttccaacccagaatcagcatagtatgatacactactcctttcacacctatctttc

SEQ ID NO: 425163 - DNA, 264 bp, Oryza sativa
tggtcaaggcgaacgcgactctgtgaccgacctgttctgtctctgctcgccgtcctaggaagtcgcaaccatcctcagccaagagccacaggataacgcaactcacatggcacgcacccatagatagatagagagagggacagagagagagagagatagagctcaggttgcaagcagatagaacgggtccaggtagctccgcaatcaagaagaagaagaagagtgaaggaggaggaggagcaagagcaagccatggaggagccg

SEQ ID NO: 425164 - DNA, 93 bp, Oryza sativa
catgacaattaacacgacaaatcatggagagatcagccaccgtctttgtagcgctcaccttgctcgtcgccggcagcgtcgtcgtcgtcgtcg

SEQ ID NO: 425165 - DNA, 309 bp, Oryza sativa
gttctagatcgcgggccgccatcctcatctcttggggggtaaccctagacgagcgaccatggccaccatgccaagcactagcgcgtacttctcctgactatgtctactcctccacagggacaggaggagcagcaagagagccagactgcctggccccgcccaacgtttgcgggatgggcgcaccttcctcctggagagagtctcccaccagggactgcgaagcgccctccaggtcgacgttctaaccatgctggtttagcttgctggagatggaaataatcagaggctacaaccaccaaggagattcaa

SEQ ID NO: 425166 - DNA, 234 bp, Oryza sativa
actcgagccaatccgtcgaagaaggaagcagcggcgatggcggcgaggtccggcgaggtgcgggcgacggtgctgggcatggcggtgctggcgctgcttctgctgctcggccaccacgcggcggtcatcgaggccaacgtcggcgtcacccgccaggtcagtttcagactgaactgctgttccttttccattctttttctcttttacttccttttctcttttcattcttttctt

SEQ ID NO: 425167 - DNA, 92 bp, Oryza sativa
acctcgggcgctcgccgacacgaagaaacagcaaggggagggcgccaaggccgggagaggaggagggcagcacgagcgcaaggaggagggaa

SEQ ID NO: 425168 - DNA, 100 bp, Oryza sativa
accgggccggaatggccggaacgacaccacgcgttcgttgcaccaacaaaaccaaaagggagggggggctaaataaaaaaaaccggccaaacccaacaaa

SEQ ID NO: 425169 - DNA, 76 bp, Oryza sativa
gcctggcccaggccctgatgtcagcgggctactcgctgtgcctctgggacctgcagcacttcatggtgctcctccg

SEQ ID NO: 425170 - DNA, 62 bp, Oryza sativa
cgtccactgtctccgggcccacttgcttcgcatgggcttgcctctcactcctccgcgcggcg

SEQ ID NO: 425171 - DNA, 188 bp, Oryza sativa
  unsure (1)..(188): unsure at all n locations
gtcgtcagactgcagagccaagaacacatccatcttgtccttctcccattgctccagatcccatcagatcctcaccgagatcatcagatcagagcaagaggaggtagctcgatgcgcggggcggcggcggcggggaggagatgatgaagnncgagnacggnnggatggnggggcatggaggaggaagg

SEQ ID NO: 425172 - DNA, 78 bp, Oryza sativa
gctgagggagggagagagtacgtgcggacgggcggggtttttaaaatacacccccccttctttcctcctatcaaaaat

SEQ ID NO: 425173 - DNA, 302 bp, Oryza sativa
  unsure (1)..(302): unsure at all n locations
ttagtcataatccatccatggaagccaccggcacacggctgacgcgctccgcctgcctctgcccacgcctgcgccgctcccccacagccttgtgcgtctccccgcgcagcatgcatcatcatcatcagcagcagcagcagagcctccgccgcgccacctgcgacgccgacatcgccagatccgcgcccgcgacggcatcatcgccgctgcccctcctgctgcgcgacatcctggaggaggaacgtggncgtggtnggggacggcgccgggcgcggcaggggcaacgacgacgacgacaagac

SEQ ID NO: 425174 - DNA, 237 bp, Oryza sativa
ttattataacacgctccagatcttcacatctccatccagggctccgctgcaaacgagggcagaagatccctccgacgagcacgatccatcgtcgtcgcgtgcgtcgtgcaccaatgccaggctcttcacggccgagccgtggttttccacgaccaggaggcaagtgtagtcgttgttcttcgcacctagcatagggcacactaatgaccgtactgttcgtcgtgctcgtgctcacct

SEQ ID NO: 425175 - DNA, 266 bp, Oryza sativa
  unsure (1)..(266): unsure at all n locations
accggaacccaacgaaaagagaaaaaccaaccctagttaaaaaccagaaaaaaaaaaaaaacggggggggataaaaaaaaaaaaacaccccccccaaacacaaacccaacanagaaagaaaaacaaagaaaacaacgaacccaaccacccacaacacaaaaagcccaacaaacaaacaacaaaaaagcacccaaagcacaagccaaccacaacaagccaaccaaaaccaacacccaacacaaccaacacaaaaccaaaccccccac

SEQ ID NO: 425176 - DNA, 231 bp, Oryza sativa
tcgtgcgaggcggggtggctgaaggctgtggctgctgactcatgtagaacataaagcaatctttccacaagaacgtgctcgaatccaaaaggctggaggatctgttggccctaatggcagattacaaggtcgcattgaagtatctagagctttgggtgatcgtcagtttaagaaggttgggctgattgctacaccagactctcacttctttgtagtaacgtgataagatca

SEQ ID NO: 425177 - DNA, 341 bp, Oryza sativa
gcaggaccggccgacctcccggggcgacccaaccgttcttaccaaccaagaacaacaaacaagggggcgggcaaaaagaaaaaagcccccaaaccaaccaccaacaaggaccaagggcacaaccgccgcggcgacagccagcaacagccaaggggccggccgacacacaaggacaggacagagacgagaaagccccaaaggccacgaaagacagagcgcccgcaagaagcgcaccggaccccagcagccccaagacccccaaggacacagatggaagggaaggggaaaaccgcgaccaagccccgccacccaaaaaggcaacaaccagccgaaagcgaccc

SEQ ID NO: 425178 - DNA, 635 bp, Oryza sativa
ttcctcgtcgctcccgtcccaggggcggcacggacggttccttatacttctccgccgtctcctcccttctcctcccctttgactttcctctcttcctttctgtctcttcttttttctcctccctttccattctctttcctctcttttttttcttctttttttttttcttatttcctttcccttttttatttttttctttttctttttttttttttcttttttttttttctttaattttttcttttttttcctttttctatcttttttttttctttttttctctctcttattttttatttctcttttctttctcttctttccctcttttcttcttctacttctttctgtttctttttttccttctctatcttcttcctttcttttctcctatttctcttcttttccttctttcttttttcatatttctctctttctcttatctttttcttttctctttcttattcttctttcttttcatctcatttctcttctctcttttttttcctctctcctttcttccttccttttctcctttcttgtccctctctttcttctctctctttttttcttcccccttttttcttctttcttatttctttcttccttctctcttctttctttctccaccttttcct

SEQ ID NO: 425179 - DNA, 404 bp, Oryza sativa
ggtgagccggtgggtggagtcggggatgacgtcgacgagtgggagggcagcaggagcatcgagcgttgctccatagtgaaggacgccgtcagctgggagggcggacactcccttggctaccatacgtacagtatggcgattgaacagcttgatgaactggcacatgacaggagatattcctaggttgtagacagaccattgttgagagtaacgagacagtatccgagcccttcaacaatattaccattaagggctttttaaccttccctgcttacatttttagcattggggatctcctgtccaataggattaatgcaaggcccattggtgctttcatggcatacctctcgactgtcatcggagatgaaccaaattgtcccacgctttggttggataattagaca

SEQ ID NO: 425180 - DNA, 108 bp, Oryza sativa
gcgtacggcacgccgcaacacaacgcgctcgcctcgcctcgccccgatcggtggtggtgctcgccgtcaccgggcggagctagggtggtcggagaggctacagagagt

SEQ ID NO: 425181 - DNA, 197 bp, Oryza sativa
atcagtgtcaaacaacgcaaagcagtagcagcagcgagaagcaagcaagaagcgatggggatggggatgaggagggagagggacgcggaggcggcgcccgacctgccgccggggatcaccgttccaccccacggacgacgagctggtggagccctccctgcgctggaaggctgcggggctgcgcctgccggtgccta

SEQ ID NO: 425182 - DNA, 143 bp, Oryza sativa
gaatagaaaaaaaaaaaggaaaatcgtgtctcgtctcgtctcgtcttcgtctcccccgattcccgagcagcttctcgaaaccctcgcggcctcgattccggcgatggcggagcccaacccgcaagtggagagggaggtggagg

SEQ ID NO: 425183 - DNA, 402 bp, Oryza sativa
tcggtcgaaagcttttctcagcccgagagatccgctgcgagggcgcccccaacccgacggtcgccggagaagcagcagccgccgtccacccacccatccagtcgatggcgccgccggataccagccgcgcgccggcgcaaggcgaggaagccgcctccacatccccgtggcctctccggaagctccagagttttacaccagggttgtgttcgcagtacaaagcttatgagaatgcatttgtggatatggctaaaggaactatttcggatgcaatggttcttgtgaacgtggcctcagacagaggcaattggatgttcctcttgtggcaggatttatttttttgaggggggcttctgtgtatctctatccccctttactcttgtgttttcttatgtatttatc

SEQ ID NO: 425184 - DNA, 81 bp, Oryza sativa
ctcgttgtggatacctaggaacccagagacgaggaagtttttttcaagcaaccaactgcttacaccagaagaaaataatcc

SEQ ID NO: 425185 - DNA, 74 bp, Oryza sativa
accgacccgaacgaccgggtcgacgtaaccaaccgttcattagaaaccagaagaaaaaaacaaacagggggggg

SEQ ID NO: 425186 - DNA, 134 bp, Oryza sativa
gcctcggggcggtttcccccaccatttccccctcctggatctgggcctcctccccgcaagcgtgcgcctcgcattcccaccgagcgtgcctacgtgctgcgctttgctgtgctgcgggaggatggagggtgggg

SEQ ID NO: 425187 - DNA, 199 bp, Oryza sativa
caataccatttcccccatttcctcccctcccctaccctaccatggacttctccggcggcagcggcggcggcggcgtcacgtcggggaggctgcaagcggagcggcggctccagatcacccacaagctccttgcggcgccggaccacagaggacactggcgcagatccgcgagccgctggtcaagaaccagggtgccacc

SEQ ID NO: 425188 - DNA, 229 bp, Oryza sativa
ctgacgcgtgggcggacccgtggacggacgcgtgttggctcgacagttcgacttactcccctcaagcctgaaccccttcccctaccaggcgcggctgccgaggattgcttgatcccttcgccatcctgcctcgccgacgcgcgccaccttgccgtggaatcgaaggctataagccgtttgcggttttagataaattaggcccttttcaatccatcgagtctgaagtgcc

SEQ ID NO: 425189 - DNA, 319 bp, Oryza sativa
acctgacgcgcacatcgcctccgccaccgccatggccgcgccgtgcaggggcagccgcggcgccctcccgctcctcctcatctccctctccgccgcctacctgacctacaccgcgctcctctcctcccgctccctcctccccctccccaccgtctccttccccggcgccaccgtctcccgccgcctcgcctcgggccgcccgacggcggcggcggcgtatcacactccggtctccacattcctctccctctacatcacgacatttttccattctcttgaccctccggcttttttctaactttttaccgctcactcttcc

SEQ ID NO: 425190 - DNA, 499 bp, Oryza sativa
tatgaacccgaggaatcaaccgtcgaacagcttgaagacatccatgacaacaactcctctgaacaacctccagctccagctgacatgaacaaccaacagtcagatttccagcccatgacggcgatgagcatgagcaagtcatgctccctcaccgatctcctcaacaccatcgactgcgccgcgctctcgcagtttctcctcgacggctcatccgacgccatcgctgagcctcctgctcctcccagccccctaatatacacaacacctcatccaaattaccaaacactaaactataacattaacagcaacagcagcatgccacacgccttcgagtcacgcctagatcatcacgatggttacgttaacaattataatgttaatggcctgaggaggaagagaatgatggcgtgtagtgcaacttcctttgatgatggcagcagcagcaatgactttgtgcattgccgtgtcaagaaaccgcagctgctgccaagtgattcga

SEQ ID NO: 425191 - DNA, 220 bp, Oryza sativa
ctaatcatggagagatcagccaccgtctttgtagcgctcaccttgctcgtcgccggcagcgtcgtcgtcgtcgtcgtcgacgcctgcgacggcgtgccgaggatgtctgccgcagaggcctgccagcacggcaactgggtccccggcgatgtcgcggccttgctcacaaacgctgggaacctcgtcggactagcaggacgcaaccgacttcatggtggcc

SEQ ID NO: 425192 - DNA, 434 bp, Oryza sativa
  unsure (1)..(434): unsure at all n locations
tttttgaaaggccaaattcctcagtcgcttcaaacatttccaaatggctcattcttggggaatcctggattatgtgggccacctctagctaaatgcttgcttcctgattcaccgacgccttcaccagcatccccttcatcagcaccaactccaatgtcagcgcatcatgagaaaaagtttggcgccggattcataattgcagttgctgttgggggcttcgcagtactgatgtttgttgggcttgcgcggctctgngcngcaactcaaagaggacaggcaagaaagagagtggtgtggacttcacgggccagggcactggtgtcagaagtgagaagcccaaacaggagttcagtaggggcgttcagatcgccgagaaaaacatggtggttttcttggagggttgcttctataccttcgatttggagggatctact

SEQ ID NO: 425193 - DNA, 90 bp, Oryza sativa
gtgaaagtccatagctgctgctatagagacacctagaatcaaacaacagggccagcactgtgacaacggggggaacaggcacacccccga

SEQ ID NO: 425194 - DNA, 269 bp, Oryza sativa
tgagaagcaaccagacactgcacacatcatcatcttcttccccgaaacccggtgatcttgggttagcttagctagctaaattaaagctgggtgcagcatggggcttctcgaccaggttttggaccaccccggtggccgggccgcggccggactccggccttggcaagctccggaaggaccccttctttttccctttcttcttctcttgaccgatgggggggtcgccgacgcccatttcggcggcggcggcggcggccgacccgccggcc

SEQ ID NO: 425195 - DNA, 351 bp, Oryza sativa
gtgcggttggcgtagcgatgattcccctcgagtcgcggtggggaatccgacgggaccagcaccccgaggggcaggagcgacaaccggcgcttccgcggattgtgcgaaccccgaagggccacgcagagcgtctaaaccacacagcctttggaatccttaaaaacgaatagatcagtgtcaatgacctgaaactgataataattacaaaaacgccttatacgaggactaggagactatccagatggaccccttcaggaccaaggggaatagccagcctaccaacacttctatctttcaaaaacatataaattcttctcacttactgactcacaataccatacactatctcac

SEQ ID NO: 425196 - DNA, 231 bp, Oryza sativa
taaccttgatggggacgtctatatagagcaagctgaaggagctcatctctggctactgaaatgcatgtccactgagttggtgaaacctcatgcgaatgctactcaatgcactaagacgctggggaattgtgatggactgatgaaaacttttgtaagtggaaacaaactgcagactactgtaccatgtatgtcacatgagccagcaaaatctgacggaggatgtggacctgc

SEQ ID NO: 425197 - DNA, 147 bp, Oryza sativa
tattatactgtgagacttgcccacgaaagatgactggttgaaattcaaatgactaggacacattgtgatcctaatgagttggctatatatgatagatatgagacaaaagtgcacatggcgaataaagcctgagagaggtcatacaag

SEQ ID NO: 425198 - DNA, 256 bp, Oryza sativa
tacagctgcagctcccacgccgccggcgacgacgacctcctcctcctcctcctcttcttggcggaaggaagccattggtgaccccggccaggtgctggcctgtggttccggccggcgccggcgccaatgggaaattgccagccgccgaagttgccgccgttgtgaaccaacacccgggcgggcaggtgggaacgggtctactggccggccaccgccggggacgtcatgcgcagcaacccaagccactacgtcgccc

SEQ ID NO: 425199 - DNA, 254 bp, Oryza sativa
tcgattctgcccatggcgacgccgccgcacgacgcctcgccggccccaccaaaccctaaccccgtctccgacgaccccccgccgccgccgccggtgacggagacgaagccggagccggagccgcctctccccaccacctcgatcgaccccaccccgtctggcgacgaggagagcggcgatgactcctcgtcttctgtctcatccgcctcgtctacttcgcccacggccgccgcggctgctgctgctgcgggagg

SEQ ID NO: 425200 - DNA, 527 bp, Oryza sativa
tatcactaatggtggtgatatagctgcctcttccgttgttcaagttgtcggtcttgtcctttgtttgcatgcagctgctaaaatttctcacagagctcaaaacattgcttcactggctagtcgatggcatgccttagtaacatgctctagtgattctacttatgtaagcacaccaaacagttctgggaaccttgtgccttttccagcacatatgttcttgagagacttttcagaaagtgatttggaatctctggagagtggctcagtacaaggcaattctcatggcacagctcaattggcttcatacatgtcttcataccacaagagggaatcacttgtgctgtatcttctgggcaacccaggtggcatcacgatatttggctggatcgttgatcggacattcctaaatacaattctgatgctcgaattaacacttgtgctcttcgtgcttagcaagacccgtgtggttccggcccaaacattagttcttgattacatcaggttttcatgatgggggctatcacatc

SEQ ID NO: 425201 - DNA, 323 bp, Oryza sativa
tttaatggtaaacttatgtatatgttgattactatgcaagcatagaaataaccaagctaaggctgtaaggcataactaattcccatgaagtcatgattatggtgaacatcccggtcataattagctcccatacagccatgctcatgtccagttcttttctttgaggcatgactcatgatgtgccatcatgtgatgttgttataagaggcagttcaactctaggatattatttccgatgttactatgaggtgatataagttgcttagataatgtcaaactaattaatgcaaaaaaaaacttctgcaccttgctttgcctacaag

SEQ ID NO: 425202 - DNA, 226 bp, Oryza sativa
tacttgcttggctactactacttcaccacgcacagctggttggttggttggattagctagctactaggatcagtgcttcgcttctctctctctttgcgttgccgtcgtcgtcgccgctggtggtggtggtggccgatgaccaggctgagtgagcggcggatggagggccaccaggcagttgttggagcctggcgcccctttcggcaggtgggtggtggagagcctt

SEQ ID NO: 425203 - DNA, 179 bp, Oryza sativa
tagcctcttctctctctcgtttcgtctcgtactcttgcttccccctcaattccccccctcctcggacccccgcgtcgccgaattgggcgcctgattcggcgtccccccgccgcgccgcggccggatcgaggcgccggagggtgccgctccggtttgctcctggggtggcggccgcgggg

SEQ ID NO: 425204 - DNA, 380 bp, Oryza sativa
tgcgtcgtgtcgcgttcgtgctcgtggccgcgtagcggagtacgctgctgcgcacgcattgatttcatcccaccatctcgtggtacgtacacgtccgtctccgtccccatggcgcgcggctaaaacgagctctcgacccccgaaatagcccggcacaaacacgcaccacccgcccgcgcgcctacgcctaccgcgcaggaggcagggcgagcgagcggcctccctccctcgctgctgccgcgcgagcgcgccgacgctgctcgatcttggttttcgcctgtccgggggcgggcgagatgatgaagctgcgttggtggcgggtggacgcgtcggaggtcgcggccgtaacggcgatgggcgtgtgggaggccgtcctcgcc

SEQ ID NO: 425205 - DNA, 324 bp, Oryza sativa
tatcaaccagagagagagggcgagagggcgccgcgcgcctcctccaataatacactgccacgtcttgcgtgccacgtaggccaccccaccaccatgcgccgccgcgggaggatgatcccgccggcgctgctgctggccgccgcggtggcggcggcgctcgcgacggccgtgtcggggcaggggcggccggtcaccgagagcggcgcgcagacggcgccgacgccgtcgacgttcacgcccaaggacaacttcctcatcgactgcggcagcacgagccccgtcaccaccggcggcaaggtgtacaagacggacgcgcaatcgaac

SEQ ID NO: 425206 - DNA, 313 bp, Oryza sativa
tgccctccgtgcgctggaggagccaacacggaactttgatggcaaaatgctcaatgtgcagaaggctatagatggcaggaccaagaacacacctgggatgaatgcaaattctaaccctagtggtaccgctgcctcggcagcagctgctgctgcagctgcacagatgactgctcctgctactgctgcaattacaccgcatgatgcatcagcttatggtgctactgccgatcctgacttgggtcatgcgcaccaggctgccttgtggtgatcgaatgctttttccataacaatccttcaaattttgttgacttgg

SEQ ID NO: 425207 - DNA, 354 bp, Oryza sativa
  unsure (1)..(354): unsure at all n locations
tatgcctcctcttttgccctccaagggggaggaggatcagggagaaagggagggccaaacaatacaaaaagaattactgcaggaaccctagggattataattagcgagttaacggcaaattaagatgccggtgtcacggggcggcaaggccgcttcgtcgaacgctttctgcttctgctgcttctccctttccctctcaacttctcaagtggcagtggtgggagggtagcatctggcccaagcagataatgngctcttgaatatgatcgcttttttctgtggtaaaatttgtgtgcaagatctggggtacaaaaggaggggacagcagcacaagggaggagaaggagttcttgc

SEQ ID NO: 425208 - DNA, 248 bp, Oryza sativa
taccagcaaagaggaacaaacaatccctaagagataggaataaaaatcggagatatgggaagatttcgacccgagtgactcctacaatagaggtgagcaacaaagaaaagattcaaacagttgctgaaggcaataattccctgattcctggttcaaagtcaggacaggttgtcagtgagaaagaacctgagccttctgaatgcagtgagtcatgtgcttctgtgcctaatctagaacaaacaggtact

SEQ ID NO: 425209 - DNA, 214 bp, Oryza sativa
tttatactctcgcctaccatttcgcccccctccgcaagcaatccaccactgcatcggcggcgagggctcaccggcggcgagccatgtgcggcggcgccatcatccaccacctgaaggggcacccggaggggtcgcgccgggcgacggaggggctactgtggcccgagaagaagaagcccaggtggggcggcggcgggaggcgccacttcggggg

SEQ ID NO: 425210 - DNA, 488 bp, Oryza sativa
  unsure (1)..(488): unsure at all n locations
tatattatgagtgaaaatattgctggaaatgctgactgtttcttgagttccacaattaatctggcagcagttcttgttcgccatggtcaatatgaagctgctcagagtcttctgggcattctcgacacacacatgaactatgtgaaagcatctcaagctgaccaggatacagatcttgcacgctcatcatgccttcatctcaatggattttgccttctggtgcttgcacgtgatgaagcaaacattgtcctgaaagaatccaaggttcatgaagctatccgatgcttcttcagagctgcatctgggcaagaagctccaaaggctcttcagaagctctctgtggaaacagggtttcaaatctccggggaatgcagatcttttacagcatggaggcttcgttactatgagtgggcaatgcaaatttttgagcagcactccatgagtgaaggngcatgcgagtttgctcttggggctcttgaacaaataga

SEQ ID NO: 425211 - DNA, 475 bp, Oryza sativa
tctacaatctcctccactcccattccctccatctcccccccacgctcgcgagcttcgcggagtcgggagatcgaccgccgcctcccccaccacacatccgcccgcggcggcgggttgcgcctgcgccggccttctcggagtcccgcctctccactccggctcactctctccgggctagcccaaaggatttaaaatggtagagaatggcgttctggagcaaccaaagggggtgtctcgaaataggccacgtgctcagtcgaatgatcatccagttgatcctggatacctcccagagttgacatgggaacacaagcttagcaatattggctatgatttgccatccttcagacttacatggagagagacattccagttggctggccttggtcttcgtcttggccgacacatccttgaagaaacatcaaaaggacgtgctgctgtgattgatcccatgaagaagcgcattgcaaaatct

SEQ ID NO: 425212 - DNA, 250 bp, Oryza sativa
tcaacgacaacgttggcgttgggaaccgagtggagactagctagtgaagaccagaggcagacatggcgagatcactggcgcacgcgacgctgctcctcgtcgatgccgtcgaggcggcggcggcctgctggaccacggcggccggcgagaacgaggaggtggccgatctatgcgagatgactccagaccaacgggagggagatgacggcggggctgaacctgcaggtgagcataatcagccaggcgcccc

SEQ ID NO: 425213 - DNA, 381 bp, Oryza sativa
tacgtttcctccgggtccgccgctactcctccgctccgctgcctgcctagcctagccttcgccgtcgccgccgccgccgccgccctcgccgttgattccgccgcccgccgcgtgatggacggggaggaggcgccgccgggagcgctcaacctggacgactacgcccccgccggggcccgcaccgtcgactgcttcaggcgcattcataggaacggcgagggcacctacggagaagaattcgaggctatggatattataactggagaaagagcctgcacttaagaaaatcaaactgcggtgatggcacataatggctccaaggctataacttgcgtgagattaaactattaaaaaagcttgatcacgatgacaccattcaga

SEQ ID NO: 425214 - DNA, 174 bp, Oryza sativa
taccttatctcctttccccccaccacctccagagatatttccccacctccgccgccgccgccgccatggagtccggcctcgtcgcaagccaccgcctccgcgtccccttcgccgccgcccaccaccgccaccacccggccgcgccgccgcacctcctccgccagcggcggtgca

SEQ ID NO: 425215 - DNA, 64 bp, Oryza sativa
tcgtcacccgccacactgtcacagacgcgacgcgctcccgctccccgacgatgccggcggcggc

SEQ ID NO: 425216 - DNA, 243 bp, Oryza sativa
tacgcacggacggacgccatggacgaagccctggtgggcaggctggaggccgcggtgtcccggctcgaagctctcaatggcgccgccggtgccacggcgagaggcggctacggcggccaggtcgaccacgcgtcggcgcatgacccagcgatcctggcgttcgacgagctcgtctgccgcgccgtcgggagggtgtcggcggccgccggcaagatcggacgctgaggtccctgaggtgaccag

SEQ ID NO: 425217 - DNA, 108 bp, Oryza sativa
ctcacctcgtgtctcgcggagtccggagagcagtggctctgctcatggagtcccgccgcgtcgtagcagcagggcggagccatgtcgttcgggaagggaggttgaggc

SEQ ID NO: 425218 - DNA, 217 bp, Oryza sativa
tgcgaacaggaggaccacttcccccctccctcctctccagtctccctccgccgcgccgcgattcccctccctcccttctcccccccgcgccgacgtcaccgccgccgcgggaggagggggcagatacaagcggggaggtagcatacgctcagcggaggcaacctgctggtctgcggacatttagacagaggccgagtagaggattgaatgatgctat

SEQ ID NO: 425219 - DNA, 285 bp, Oryza sativa
tcgggagagagagagagagagaggggatggaaatggtttgcactccgtgtccctactgtgtgcgccggcgacgccgacctgcgccatggtggatctcgcctccctatagtacctttccccctgcggactcgcgcgccgactatcgcccatctcagcctgctctatctcatgctgcgcggccccgaccccgccctccgagaaaggatctcaagaatccagaactccacgtagaaaggtgaggaaaactgagggtgccacccaagagctctggaagattcattcaag

SEQ ID NO: 425220 - DNA, 131 bp, Oryza sativa
tgacaagttagtcttaatcactcccggcgtgggctcatccctccgcggatggaacaaggcgtgcctgctgatttgttactgaggggggcttacatgcatgcagcgcgaaaggatggggcgacctgacagat

SEQ ID NO: 425221 - DNA, 251 bp, Oryza sativa
taccatctccatctcctcccttcacccccgatcgcattcgctgccgcccactccgtgctcgcctcgcctcccctcagagagattaaagcagcagcggctttctttcctctgcgtttcttggattgcagcaaaatcgatcccccccccccctccccccgcgttccaattttggtggtggattgcagctcttgcgccatcgctttgggtgggactctggccccccgtggtaaggagagggctcctctgggggg

SEQ ID NO: 425222 - DNA, 76 bp, Oryza sativa
tgtcacagcctcggcggcgccctggcgctggtcgtggtcgacgagatcgccaccaccgtccccgacgcgccgcccg

SEQ ID NO: 425223 - DNA, 374 bp, Oryza sativa
tcgttaagacgagcagccgtacgagtgcgggcgggggtttgactcgcatacgccggcgaccgtgctatctctctggtgcggaagaaaggggctcctgccgccgcccaaggagcgggagatagctcgcgcgctggaacgcaatggaggacactgattactgcgggtgcgtgacggaccgcctaaggacagtcgccagggacagcggatgcccacggccgccatgatcaacgagctactgccagaagggatggtgtagaggaccaaggggagggggctcacatggccgaatcgggagccggagaaagagatactagcgcacgcccccacgggcggtttagagacccactggcgtgggaactcaatggtgaagagcc

SEQ ID NO: 425224 - DNA, 117 bp, Oryza sativa
tttcgtctccgccgtgtctgctcctcttccttccatctgaccaccaccggtgacgacaccgtcaaggatctccacgacccgcggcgagaggacgcggtgggcgacgggtgggaggag

SEQ ID NO: 425225 - DNA, 257 bp, Oryza sativa
cccgccggacgcggaccggaacggaagggccgacccaagccacccgttcgttcggacgagcagccggacgactgccagcacgggctgatcaagatgacgccggcgatcaagctctgcatcagctagggcaaggaggagctcatggagccggccagggatcagcagagtgtcgcacggctacaacgcacagacgcccatcaagctctgcgagtgctgcaccgcctgctccgggacggtcgagtacaacatcatgggcc

SEQ ID NO: 425226 - DNA, 448 bp, Oryza sativa
cgttcgtttaccagcaagaccatacaactgcccagactagtatctttgacgctgacatctagagcatgatggtctgccgatggagaacgtctattatacacagggcgaattactggtgagggatggtatgacatctactatggacatgagagacggatatgctgatgatgaggggtctgcccttaatcaacataccaatgatggcattcttactgtgtcgaaaagtttgccggaacgcacagataaaagcactagtctggatgattcaaaaaagtggcacttagatcctgccgagacatatagtgcgggttacaaaagatcaaagacaaataagcacaagaaaaatttggattcagatgcatatggaaatggggagagcacttccgtatccaatgatgatgacgggtatcaacctacagattacagttctgttaaacctgatagggct

SEQ ID NO: 425227 - DNA, 309 bp, Oryza sativa
cttccaaatttcatatggcttcatttcttattccaatttaaaatctgtaacaaggattccatccgaattatttaaattagaacccatgtctcgatactcaattagagcgacatgtatccactagcagcgtcatttacagagacactacctacactgtgaatgactatttgtgtattagacccctctctttctttctcgagaggatggtcgtcttcctccgcaacgcctggtacgccatcgccgccttcaccttctccgatatctcctccgcgccgatcaccccggcctccccctcccagctccaggtgt

SEQ ID NO: 425228 - DNA, 544 bp, Oryza sativa
  unsure (1)..(544): unsure at all n locations
gtgaccaccaccacggtaccacccacctcccatctcccccatctccggcgatcgccggcggcgagatggacctcctcgtggcgcagatcacggccgacctgaggtcgtcggacgcgctgcggcagtcgtcggcgctgctgcaggcgctgcagcagtgcgcggcggggcgggacgtgtccgcggtggcgcgcaccgtggcgaccgagatcctggcggcgccgtcgtcggcggtatgcaagcgcctcgcgctcgacctcctccgcgctctcccgctgccccccgacctcctcgacccgctgctgctctcctccctcgcctccgacctctccttcccggacccggacgtcgccgcctcgtccatcgcctcgttcccctcgctcccttcccacctcctgccgtagctcctctcctgggaccacgccgacatagacgccgcgctctgctaccccgacgagtcgctccgactcgcnggggtgacctcgctctctcgctcctccgcgggacgacctcgcgctatgtgctcctccaacccgtcgtcatgcgc

SEQ ID NO: 425229 - DNA, 271 bp, Oryza sativa
gcgttccttggctggctccaaatagattcaatacgagactggacagtggcggcagctgtgagagtacggatactgcggcaatctgacctggtctaaggatttactgcgtctgccgagaacaggtcataggacagagtatgcgaatgaaagtgcacacatggttgcagtgatagcaggaggaatcaaaaaagatccaactggaaacgtgtgtattgcaagggctctgatatcaactacgtttggatgatcggttactgatgggcaggatacg

SEQ ID NO: 425230 - DNA, 383 bp, Oryza sativa
gtcctagacggtcagtagctttcagggcgtggcggctcatcggtcgctggaccggactggaaccggagaagacggacgagaagatggtggaggccattatggacgccggtactgaggacaccgacagcgtcactgatggtggtcctcacgagaccgagtcgggcggctactgctagacggagggctatcgcaagaaggtaggtgacaggccactggcaccgaactggggcagggccaaggactgtagcctgatgaatgatgaggtcaggcaaggaaagattgtcaagttctctgagtgcatttggaagctgacatactatggatgttgtcaagcatgggtcctcttgataataaagcaggaaccctggtcgttagatacaatg

SEQ ID NO: 425231 - DNA, 465 bp, Oryza sativa
aggcgttggttcccaacgaccacccttcacattatcggggcgcgcgcgcgcgagagggggggcgccctgccgcgggagttcgccgtggtggtgcggacggcgagggggctctgttgggttgtcggcgatggcgatccggggcccggaggcgtcgtctttcttccccctcacgctcgtcttctccgtcggcttcttctgcgcccgcttcttcctcgaccgcctcgtctacaagccactggcagcttactgtttcagtagcaaggcttctaagctgatgaatgatgaggtcaggcaagcaaagattgtcaagttctctgagtcgatttggaagctgacatactatggttctgttcaagcatgggtcctcttgataataaagcaggaaccctggtcgttagatacaatgcaatacttcgagggctggccagatcaatacatgacgtcctcattgatgcttttctacat

SEQ ID NO: 425232 - DNA, 231 bp, Oryza sativa
tcgtccgatcgtacgatgaggacggggaggctgccgtcttctctggctcacgccgtcgcggctgtccatagggtggcgccctcagaccaaaccctggatgcggactctcttgtttatccctgcgagggagactgcccgaacgctctcaggctgcaattgatcgagctatccctacacctccccctactggggtcctgctgggcgtatttcacgaggcgctatcttgggctg

SEQ ID NO: 425233 - DNA, 210 bp, Oryza sativa
tcgtgggttggggggacgcgcggctagggtttccgcgattcaggaggtgagggttgttggacacctccctgatcaagctcaacaatccaaagaaatatacactcacgaagctccttacgaacaccctcctcatttgcaagacaaaccagataccaaaaattcataatcacagacaaccaccatgccatggctatgatacctgtcataaac

SEQ ID NO: 425234 - DNA, 243 bp, Oryza sativa
tcatacgtcggtggtgaaagaagatgagagggctactcgcgtgcgccacgctcgcccgacgcgccgacggcgcgacgtagacagcgcggcggcacctgacgggcgcgatcgaggctgaggatgcggagctgaagaggaccgcactgcactactttcacatctcgcacggcgtggagagggtgctgatagactagaggaggaggtccaaggggtacaaggactccttgatggacgagacgctga

SEQ ID NO: 425235 - DNA, 249 bp, Oryza sativa
tcgtattctcctcacctgacctcacacgccgcgtgggtgacattgacagccgggccccaccacagaccgcgacggccatggaccacgatcccaaggagcggctcctcctgacgtcccgcgccgaggaggtggtggcggacaatggggcccaccgtcgcgccgcgcccgatgtgggcggtggtgggggcggcgtggacattgacaggcacgggctgaagaggcgcggtggggggccgcagtcgtgggggc

SEQ ID NO: 425236 - DNA, 190 bp, Oryza sativa
tccacgcgtccgctcagctcctcctcctctcgcatggcagccatggccaccaccgcgtccagcctcctcaagacctccttcgccggcgtgcgcctccccgccgccgcccgcaaccccaccgtctccgtcgcgccgtgcaccgcgagggccatctgccactgcatctggtcgtcgacaatccctcacccct

SEQ ID NO: 425237 - DNA, 281 bp, Oryza sativa
tcgtcgagaccagaccgtctcccctggccctctgtccgattcagcaaaattgccacctgtttccgcatccgcctctaccgaggttttagacaccgcggcgcaggcgctcttcccatttctcgcgtcccgcgaggcagccgcaactcgccatcaccacctcccgatccgcgcgctttctctcccgcgccccctgcggatctgccggctctggaagggcgagagggcgctggagtcgtctcggcggcgctagggttgaagctggtgggggaaggaggtggagg

SEQ ID NO: 425238 - DNA, 424 bp, Oryza sativa
ttgaaacattttttacatttatattttttaaaaaaatataatttatctgttatatgctttataaaatattttttattgatgtttttaatataaatcatctttcatatactacataagatatttttttgtgttattatccctcgtataagcatatttttttcccattatataccacatacaaaatttttttctaaaatctaaatatactagaaaaaattaaagcatgtatacttgtgtaacgaggccacataaaaattttcatatttttttgaaacttctaattagataaatcaaatgttaatcttgtatgtatctaaggtttttttgcgtatttttgaaaagaatgcccagtccaatagcatattgtagaacaattaataaagtcaccggtatattatagaaagagacaatatcggaggcaaat

SEQ ID NO: 425239 - DNA, 564 bp, Oryza sativa
  unsure (1)..(564): unsure at all n locations
gcgttattttcctccgtatgcccaacgtccaactcactgaagcaattcgatggcagtggttcaccgggatataactaatactaataatttcccaaaaaaaaaagtaaggagtagtactagctattcacgcatttagaaaaaagaaagggttgctcctaacattatataaatgactggtgtattgctatatttgtgtatctatatatgtgtgtctaacgagcaaagctgcagcaagcaggggagtggaaacctataaaagataattctacaatgtgatttgcttaagcttaaatgaaatttgactattaaagatcaaatgtatttgactctaagtacccatttagcttccggtttgctgtgaagggtgtattcactgattaagaatgaattttgataatttatgaagcaaataataaagcaatcaaatattgtattatcaggtatttctttttcttgatgttatgagttttaaagcaggaattgaaatgactgtaatatgattngcgttattggtctttacctgaagtgacaattatgaaatanacgtcctttcaaaaattgggt

SEQ ID NO: 425240 - DNA, 344 bp, Oryza sativa
ttctttcgcgttagccatcaacgaccagcatctagggtttgctcgacctgctcaagctgctgctgccatgggggcacagctctactccttaggagacatgcacctgcacggcgggcagcgcagcgctctgctgcaggcccggacgggcaccgcatactggctgggatgccctcgtgcgaccccataccggactagtattaacgcctgggcggccgcacggcatgcatatgggcgcgaattgaggcagagactggcaccctttatggggagggccttatacacacatcgaaggaggatggggaagcactaactgcgaagctgcaagtacagcattccagtgggat

SEQ ID NO: 425241 - DNA, 491 bp, Oryza sativa
  unsure (1)..(491): unsure at all n locations
tcgttcttccacgacgcccgcgcagcaaccgaccacctcctcgcccgagcccgcgtccccattgtcgccggagggactggcctctacctccgctggtacatctatggcaagcccagtgtcccgcagtcttccatggacgtcacctccgccgtctggtccgagctctcccgcttccgggacaccggccgctgggaagaagccgtcgacctggttgccaacgccggcgaccccaaagctcgggacctgtcagtcaacaactggtcaaggttaaggagaagccttgagatcatcaggtcttcaggctcacctccctctgccttctccttgccctacaatgcttacaatctcaatcaccaccgtcgtctcagtctcaccaaccaagccgatcaacccacggagctggagctggactacgacttnctctgcatcttcctcgcgtgcccacgcgttgagctctacagatcaatcgatctgaggtgcgaagagatgct

SEQ ID NO: 425242 - DNA, 350 bp, Oryza sativa
tcgtctagctagaccaacccacccagccatgaagaatgacgacgacaatgggtagctgttcctcgacgccgctgtaccgaggttttagacacagtggggcaggcgctatgcccatttctcgcgtcccgagaggcagccgtaactcgccatcaccacctcccgatccgcgcgctttctctcccgcgccccctgcggatctgccggctctggaagggcgagagggcgctggagtcgtctcggtggcgctagggttgaagctggtgggggaaggaggtggattggcatgcggttcagagtgggtcgcgggaacaaaggcatcaaagaaaccagtgttgtggtctctctctttg

SEQ ID NO: 425243 - DNA, 541 bp, Oryza sativa
gccccacccgtacgttttaaagggaaactactatgtcggtgctccaaaccaagacattggggggtgtgtgcaggaaggaggcttctggcaccgccgcggacctggtggactcgattagcacgtacaggatgatgaacgactagttggtcgcgcatgtcacacacaaggacaggaaagagatcgagctcgacctcgacctcaacctcgagtaagcaaggatgcagtgctactcgtacggcgacggaggggtcaatcgacggtgtagagcacaatacgtacgatctgctaatagtcttagttctgattgagacgccctctggcttcgcaatgttcggtatgagtggggacagactcatgtaaccaaatgccctgcaggaaatctgggcaaactttggcgtgcactataagttcatttggctgaaggaatttcgagaaatcaaggacaagtccagtgccattaatcatgatactggtgtcagatgcgaccttgctgagatgatcatgaagtggcatcaccctgggcagaaaatggccgttgaaa

SEQ ID NO: 425244 - DNA, 508 bp, Oryza sativa
acccatctgtatctattgggagagcacgaaggttagaagaggcatgtgatctgtgtcgcgctggctggtcagtcactggagagctgcaactctttgcccctttggtggcatagatttgtttccttccttggaggccatgctgaagaatggaaagtctagaacactgcaagcgattgaattggaaagtggtgttggacggcagttatgtctttggaaatgggcttcatattgtgcttcagagaaaattgctgaacaagatggtggccgatatgagatggcagtatatgctttacaatgcagtaacttaaagcgtatcttgccgatctgtactgactgggagtcagcttgttgggcaatgacaaaatcctgttaggtgttcaagtggatctagtattgtcttagtaccaaaccagtagaccagatgagaaacagtctgatgacgagatgaaaggaacccaacctatgttgaactcagctggcccaagaagttggccccacagtgttcttg

SEQ ID NO: 425245 - DNA, 505 bp, Oryza sativa
accggaacggaatggctggaccaacgcatgcgtgctttcatgttaggagacagggagagggaggaggcccatggttcaaatgagtgcaatgactgctatccaggtagactgaacacgggctgccaaatcactgcaggatgcacggcaccagcttcaagttgacaacgaggagacagaaaagctgcacgagaggctggtgtacactgaatcagcgtgtgctgaggctagcacggctctgcatgaggcagagactgataaagagagtcttgaagagaaactgagatacacagaagctgctgttgctgaagccaacaagtctgtgcaggaggcaacatatgaaaattcacaactgaaggagcgattactagataaagagaacgcactgcagagcctaacccaggagaacgacgagttcaggttgcgagaagctgatgccatgaagaagatagatgaattgtctgccttgcttgctgaagcgatgatacagaaacatcccgaggaggag

SEQ ID NO: 425246 - DNA, 353 bp, Oryza sativa
agctggtacgcctgacgtaccggaacggaattgtcgactcacgcgaccgttctgttgtggttgctgctctatccgttatgcgagcgcagtcatggtaactcgcagcatgtagcatgacagactcatgggtggacgggcggctaaagaactcggaccgtgtgagcaagtaggatgatgagacattgatccgtcaaggagtagcaagaaggtaagcactggcgaggtagtaaggatccacgcgtggaggcaggaagacaggagatggcttactattgcaggggtgagtttgggcatgttatttggaagcacacattgtggggagggaaaggaaaagaatatatggtacccatgct

SEQ ID NO: 425247 - DNA, 558 bp, Oryza sativa
cttccttcctcgacccacccgtcctttctttccgcttctctagtctagtccacaggctggttcccacccgataggcgctgcctggtgctgtgtggtgtggtgaggtgcggcggtcgaggactacctcaggagctcttcccatctcactcttcttcacacttctgtccttgtgcctctgcgtctctgtgcccctttcgctcctctgcctttttctcggcttctggcccgttcccttctcttctcctgttccctcctctctctttttccccctcttttttccttctcactctttctctcttcgcttccttccactctcctctcttattcctcttcttctttctctcctcttctttcctttcttcccttctcctcttccccttccctcccctctcctcctcttctctcctcttcttcccctctcccttcctcccttttcctctttttcccccttttccccttttctttttcctttctccccccttcccttttccccttctcttcttctctctcttccctctctcttctttcctttccctcctttttctcttttccctctct

SEQ ID NO: 425248 - DNA, 216 bp, Oryza sativa
cttgagcgagaggagaggaggaggaggaggaggctagatatggtggcaccgaacggtaaggcagggggaagggagccagagacgctagaggaggcagtgagagctggatggaaccaggagtgcgctgagcatgaccagtgcgtcttcttccaactggaaacgatagagaagactccttgtctcacaaagatcaaatctatattccgtggaccatta

SEQ ID NO: 425249 - DNA, 424 bp, Oryza sativa
atgatggacgcctcccgggcccggtccggactggcaggctcgacccaccccacccgtacgtttgtaggggagactactatgtcggtgttccaaaataagagatgtggagggtgtggacaagaaggaggtttctggcgccgccgcggacctgctgcactcggcgtccacctacagcaagctcaacgacaagccggtcgggcagtacatcgacaaggcggaggggtacctcaaggtcttcagctacggcagtggcgggtccgcaccgacaacgccggcagccggagacgccgcagcgccgaagccagcggtggaggagccgtccaaggagcctgcgccggctgagaaggaggaaggcaagccaccgtcgtcgtcggaagggttcggtctcgacgacgtcatgaagggggccgagtcgctgatggag

SEQ ID NO: 425250 - DNA, 169 bp, Oryza sativa
tccgtaagaatggggaaatgccaccaagaccgaagcacaaggcctagcgctagccctgtaccgcgccgacgcggaggaggcacaaggcagagcaataactgaaagaaggcgaaaacgaactgcaaagagacaacgaggagaaagaaaagcttcaagagaggatggagac

SEQ ID NO: 425251 - DNA, 165 bp, Oryza sativa
tcgtggagatctgtctcctggtcaacagcctgtgtcttccctggaattggctttgtggtccttacaaccaagggtgcggtcggggtggcgcgcgccgacactggcgtcgcaaaacgccgacgttgcaaggatggtccggtcacccggccggcgcgacctagggtg

SEQ ID NO: 425252 - DNA, 143 bp, Oryza sativa
tcgttctcactcaccgaagctacccagctctattgccccgctacttgatcgatcagcaggctagatatggtggctccgaacgggaaggcgggggaaaggagccagagacactagaggaggcagcgagagctgggtgcacagag

SEQ ID NO: 425253 - DNA, 260 bp, Oryza sativa
atccggtagattatcacacagatgcgcacgttacaggaattcagaggggctacagaatgtcgctgctgtaataagagcgagtttctggtgcacacgccgagttgtttaggctacagtaatggacacagctgggaagcaaagtgtactcagtcgattcctagagtgagccgtgaaatgttggaatgagctgctaggatggatggttatatcgaactcagaaggagctgaactagtggcacagcagagaaaaagaagataag

SEQ ID NO: 425254 - DNA, 187 bp, Oryza sativa
  unsure (1)..(187): unsure at all n locations
ttgtcttcccctctgcgtcgaaggaaatctcccgtctcgtcgtcgctccttgcgccgatctccatcccgcgagtcgcgagcagagagcaggggaggggaggggaggggcncagangcacntnctgctccatcctgactatgctcttcctaatagaggtcccatagtcggacggaggatgctcacgga

SEQ ID NO: 425255 - DNA, 455 bp, Oryza sativa
acccacgccatgcgtttcgttgccgcgcacgcaccgagcattccctatgctctatcttcgactctcacttctactgcttgatcgtcggccgacggtcaccgtctactatacacagggcgagttactggttagtggtggatatgacctgtactatcgacatgagaggcggatatgcctgatgatgaggggggtgaccttaatcaacatacgaatgatggcatccttactgtgtcgaaaagtttgccggaacgcacagataaaagcactagtctggatgattcaaaaaagtggcacttagatcctgcaaagacatatagtgcagtttacaaaagatcaaagacaaataagcacatgaaaaatttggattcagatgcatatggaaatggggagagcacttccgtatacaatgatgatgacggttatcaacctacagattacagtcctgttaaacctga

SEQ ID NO: 425256 - DNA, 321 bp, Oryza sativa
gcgtaacttacctggcaaaaaagcggggaagtaaagctaggggtgaaaagaaaggagaaacataccctagccgtaccgatcgatgcagaggacgccaccagcggctattcgtgaggcgaggcgtccgggaccactatcgccgctggtgaagctgcttctggtgcggcatcagcgttctgggacgccgaccgggccgaagaggctgtccgtgctgtgtcgcatggatcgcctgagggcacagatcaaagccctagtgtggatgatgcaaaaaagtgggacttatatcctgcaaagacatatagtgcggtttacaaacgatca

SEQ ID NO: 425257 - DNA, 237 bp, Oryza sativa
attcgttcacaaattcccccgcgccgcgccagccacacccacacgcgcgcgccggccagcctacgctattcccctccccccctgccccgcaacgagccgcggcggaaggaaggatggggagccttggcggtgaggagggggcgaggccggctgcagcggcggagggggcgcggaggccgaggttcctgtgcctgcacgggttccggacgagcggggagatcatgcggaagcaggtgg

SEQ ID NO: 425258 - DNA, 317 bp, Oryza sativa
aaaactcccataaacccctcctctaggagagagagcttagagctcaccgacgacacgagaacccaagcaacccccccacacccagctgagtagcggacgcagcaccagcagtcgcggggaaagggacacgtctagccgccccagcttcccgcctccctgccatgccgacgccgcggacgcgtccaagccacaggaacagcaaccactccgacgaacacctcgcctgcgcgatggaggcggcggcgctggacgcgatggcggggacgaggtgggggcaggtggctggcgcctcgagacggccgtgtgggcgcagggcc

SEQ ID NO: 425259 - DNA, 320 bp, Oryza sativa
caccctttacgtcttcttgtgagtgcgaggaaatctgccttctggcagaagatgaatgacccagttgtcctggaagcgagttctgagcacagagcccttggtgtttaaattaccctactacacacagctgggggcagagtgtatctcatctgcggctcagagtcagcactgggatgttggaatgagctgctaggatggatggttatatcagactataagggagctgagctaatgtgcaccggcagagaatacgaagatactggttttacctgtcaggacaattactatgtagtggacgacaacaagaatgttttgagatc

SEQ ID NO: 425260 - DNA, 339 bp, Oryza sativa
ttgcgttctcttctgcgaccaaggaagtctgccggctagacagggcatggtggaccgaggagacaaaccctagctaggacgctcactgctctacactctactgcacaggagaggaggagatggagtcgacgtcgaccgccgccgtcgtcgccgccgcagccgagcgaccgtccgaggcagccgcgctgcgtgcgctcgtggaccgcgtgcgcgccggggaggtggaggccgcgcgcgaggtgcgccgactcacccgctgctcctccaggcaccgccgcaagctcgccgccgacgtagagcccctcgtggtcatgctacgatcccccgaccccgacgccg

SEQ ID NO: 425261 - DNA, 438 bp, Oryza sativa
  unsure (1)..(438): unsure at all n locations
tcgttgaccaacaagtccatagtactccccagactatatccttgaagctgaaattcagatcaagaagctttgcagatggagcaggttcatcagacaaatcaagaattactactgcagtagggaatgacatgaactctgaacatgataaaggtcatatgctgcatgatgagggttctgcccttaatcaacatacgaatgatggcatccttactgtgtcgaaaagtttgccggaacgcacagataaaagcactagtctggatgattcaaaaaagtggcacttagatcctgcaaagacatatagtgcagtttacaaaagatcaaagacaaataagcacaagaaaaatttggattcagatgcatatggaaatggggagagcacttccgtatccatgatgatgacggntatcaacctacagnatacagtcctgttaaacctga

SEQ ID NO: 425262 - DNA, 335 bp, Oryza sativa
tcgttagcattcccctctacatcgctccagagtccccagttcccaactactagtttctttcaggtgcagcgcgcgatctcgtcactctggtgaccatctgacaagttctcggtgcgtcgcggccggacggattctgtatgcacgcctgacgacttctgctggtgaagcagggcattgaccgtcgtcggcgatcagatgacccggtgcggactggctccgatcgctcgagtggcgctgccggtcagcctgtagtctccggtgaacggcggagggggacaaccttcctggtaagacggagcgggaggtctactcaaccagccaaccagaggctgatc

SEQ ID NO: 425263 - DNA, 431 bp, Oryza sativa
tcgtacaaatgctggctacatggttacagatggccttgtcattgctgctgggagcagctgggcgacgaactctatggaaggttggcaaaagaatagggaccgagtgagcagcttggatgatgagacattgagccgtcaaggagtagcaagaaggtaagcactggcgaggtagtaaggatccacgcgtggaggcaggaagacaggagatggctactcattgcaggggtgagtttgggcatgtcatctggaagcacacatcgtggggaggaaaaggaaaagaatataaggtacccatgctgcacgaatgttggctcaatctgggtcggccatgcaaaagaggataaactatccagaatcgaaacccacatgccgaggtcaatcgcacatcaaggttgatactgactacaagaatgggctagtgcgattttgtt

SEQ ID NO: 425264 - DNA, 503 bp, Oryza sativa
atgctggctcgcccgcctgcaccggcccggccttcccggctggacccacccacgcgtatgattgtgcggaaaagcatcatgctctgggccatcgttcatgctactgatatggtgggagtcacatgtcataagtaggcgctctcccactggcaggtggcagcatgagctggtcaaacagcactccagctgggctgagaacactaaccctactgtaggaccgatgaatcgcatcaaggacattcttgctggcaacagtcagccaactccagctatacatggacatgctcgattgagctgattatgctcaccaagtcccgccgacatgctcagtgtatgagacatctcctaaatatgtacccacttgaatcatgatcatctgcgaagaatgaatgcactggggcatcatatactcaatactgacaatcgtctgggggcttatgcgccgaaagatgtaatagattcacacccccccttggatgtgaatctatgcgtttagtgtgatt

SEQ ID NO: 425265 - DNA, 329 bp, Oryza sativa
ctctatttcctcgaaggcctcgagccctcccctaccttgttctacctgctcccatggaggctgaacaagttctatctatcacctccaaccccaaggtagacagtatcaccaatggcgacaatgcgatcatcatgcctagtgtgagcaccgaggagaaggagcacatcaatggagctgccgagacagatcatgttgtgatgatcaccgagccttccatggacagaaccctcgaagacgacaggacgatcaaccctgaggagaccttgcctaccgacctcttcaggatgaacctgctacaccacgatgaccgcagcaagacaagaattgca

SEQ ID NO: 425266 - DNA, 181 bp, Oryza sativa
gtttctttgtcatcttggcaaatattaataggaataattcatattgaaaaagagagaaagaaaaaaaaaaaaagaaataagaaagaaaaaaaactaggacacaaaaaagaagagcaacaaaggggcacaactaaaaaaggggggggccgtttttggggttccaggtttccttccccgggct

SEQ ID NO: 425267 - DNA, 247 bp, Oryza sativa
  unsure (1)..(247): unsure at all n locations
cttctctctccctctctgctctgctcttcctgagctccgcggcaaggaagcttctggaaggttctgcgggatgacgacgagcagctggggtggtggtggtggtggcggcnncnncnncccncggctgcngcgctgcggcctcctcctgacgctcctttcaggcggtggccggtggcgcatgcgccatccctcaaaggcccccggtctacatgacctctacccgatttcgctcccatcctcataactg

SEQ ID NO: 425268 - DNA, 448 bp, Oryza sativa
gccttctcatctagcgccgcctctctccacctccctcgtttcgatctagctcgccggcggcgatgtcgcagccggcggcggtggccgctggggcggcggcggggcagcagccgcagggccgggcgcaggcggcgaggcaggcgggcggcggactggggcagaccatcgccgggatcgtgcggatggccgtgttctggtacttcgccgccaagttcttcggcccgaagcggcccccggcggagccgggcatgctcatgtccaacctcttccagaagggagagccgctggatagtgggatgtatttatcagaaaatgagaaattcaatgacttcagtaatgaggatgcactcgtctggcatgaggcaaacataccatatgcagtctggggacctaccagtacgagaacgcacacattgacatactatccttctgaggctatcaagacaat

SEQ ID NO: 425269 - DNA, 286 bp, Oryza sativa
tcttttgcacctgcacgcgaagacggactcggaggtgacgtcgagcatggcggcgtcgtcgccgccgcgggcggcctactacgtgcagtcgccgagccacgacgacggggagaacaagacggcggcgtcgtccttccactcctcccccgcggcgtcgccgccgcgctccctcggcaaccactcccgcgagttctcctcctcccgcttctccgccgccaagtccggctcctcccgccgcaccgtcgccgccgggggagacggcggcaaaggcggtgtcgcggctggc

SEQ ID NO: 425270 - DNA, 105 bp, Oryza sativa
tcactcacaccgtccacacacccacaccgccggtagcgaggcagctcacatggcggcgacggcgacggcgacggcggcgccggaggaggaggaggggaagaggtc

SEQ ID NO: 425271 - DNA, 404 bp, Oryza sativa
  unsure (1)..(404): unsure at all n locations
gctggctccgcctgcattgttccggtcctgtattcccttttcgtcccacgcgttcggtagaggaagtagagttgcggcgacgagtagttggggttgggggaagagtaggaggctgccgcncgccttcatcttatgcttttctgctgcggttgggctctgtcccctttttctccctcgctatccttcgcccgttggcttcgtctttctttcccctctctcctgtcttctcctgcggcttcttctgctcccgtttcttcctcccccgcctcttctacattccacttgccccttactgcttcagcatccatgcttccaccctgatgtctgattaggtccggctctcattgattgtccagttctttgattccattttttttgctgccctcctatggttctcttcttgc

SEQ ID NO: 425272 - DNA, 511 bp, Oryza sativa
  unsure (1)..(511): unsure at all n locations
gcggcatctttacaagtacgtgcatagaaattttgtaggaacttttgtagagtttgaattgtttgtaacaacagatattcctgcaggttatttgctttcatagaacaggataaggatgaaaatttgtgagatgtcccacagtttccacgttcgtctgaccagcattcaagaaggcatatgctggacatgtggttccaatgacagtcaaggctcaatgaatgggctaaggttaatgttggaagccattaaccttagcagtgaagtatgctaaggtattatgaatgatgaaatgcactgggcgccgagcagtgaattacgccacgttttgatggatatgncgttttgcctagaaagcattgtctgacacaagaatcagcagcacatgtttaagttcaaagttgtacttcttttacaactaaaatgtgtaaattcaaatttgtaacccatactgacctgaaagcaggttttgtttggcatgttcacatcttgcaggtccacacctacaagatct

SEQ ID NO: 425273 - DNA, 378 bp, Oryza sativa
cggtctcttgggttcgcacagtagcaggacagtcgccgcctccatcaatggcgaaaccgacggtggtggtgctgcccgtgtggggcgccggccacttcatgcccatgatcgaggccggcaagcggctgctccgcggcagcggcggtgcgctgtcggtcaccgtgctactcatgccagatgccgacgctgtgtcaactatgcgagcagagctcaacggaagcactgttctacctccaacaaaatgagacccaaactgagattcttagcatcctccaccatgaagtgcgcaacattggacctctaaaacagcagtgcatcacttttggtgactactacattccccttttcttataggaggtttagatggtaacacctgaa

SEQ ID NO: 425274 - DNA, 355 bp, Oryza sativa
ttctaaaatgccactcactttccccacacgcgttcgtcactccaagctcgatgtctctctcccccgccgctttggatcaatcgtcagcgactcaccattcggcgactcggccattgacagcgatagtcgcacgggttcttgcttatttggatccgttcttccggggagcgagctaaccgggcgagcgagatgcagcaccagcaaggatttgatacacacaggctacaccaggaagtaaaatcgcggtggttaaagcctaaagaggttctgcagatattgcagaatcatgatcggttcatcaccacacataagactcctcataagccaccgtgtgaaggtcggtctgttcttaacc

SEQ ID NO: 425275 - DNA, 120 bp, Oryza sativa
tcgtgctgaggagccaggaggaggagcaaggaggtgcctgatgcgacggactgccagccctacaggatcagctggttcaggggaggaagctggaccacccgcccgcacggcgacccgggc

SEQ ID NO: 425276 - DNA, 112 bp, Oryza sativa
gtcagaagcagagcttagctctcccctcctcctcctcctactactcccatggcggccgggtgggcccgcccagccggctttaacctgcatgaggagactccggaaccacacc

SEQ ID NO: 425277 - DNA, 322 bp, Oryza sativa
  unsure (1)..(322): unsure at all n locations
gtgtaaatgtcatgtctcctcccgttaaaccctagcttaagcccccttcctcttctccgcgcctccgcctccgcctccgcctccggtctcccctctcctcacacgctccggctccgacggacgattcccacccagtaatggcgatggatttggacgagccgctcgacgcggagaagggcgaggcggcgntgcggcggctgcgcgacgcccacccggtcctctacctgtacatctcggccgacctcgacgtcgccgtcggtgaggcctacaagcacctctacgactagctcgtccccttctccaccgcgcagccggccccgct

SEQ ID NO: 425278 - DNA, 323 bp, Oryza sativa
atcggtacatgatccatacgagaaagagaggagcagggatgccgcgcgggaagaaccacccggacagccaggaggaggaggcgccggctgccgcgggggcggaggagagcccaagggaaacggacaaggagggggaaataaaggagagtgcacaacactgcaagcgacagaattggaaagtggcgagacacggccggaaagtcccaggaaatgggcaacaaatcgcgcctcagagaaaattgctgaacaagacggcggccaatacgagatggacagaaatgccacacaatgcagcaacttaaagagcgacgtgccgaaccgca

SEQ ID NO: 425279 - DNA, 210 bp, Oryza sativa
tgtaaaagatccatccgagaaagagaggagtagccatggcgcgtgggaagaatcacccggacggggaggaggaggaggcgccggcggcggcgggggaggaggaggcgccggtggagatggacgaggagggggagatggaggaggaggaggttgtggagccgtgtgcggcggagagggaggagtgagacgttctggaggtggcggtggtgc

SEQ ID NO: 425280 - DNA, 400 bp, Oryza sativa
atgcttcttcagggagggcacaactctgccggatcatcatctgggtgtacggtcacactgtctgtagatgggaaggccggctgcgcacatggggagcgcacgcgcgagccaaggctacatgataggtgtggaagacttgcactatggggcaaggagtggaaggacatgacctaatgcgaccgcgggctggatttatcagagatgtcatgcggctgactggttctgcctgggcatgtgatgtacaggggtggggtaactgggcctgcgagggctgctgaggatagcttgagcagagaatctgtagtgggcaacaacattcggactgattctgagactaggatatactctatggagagacaccattgaccatggcatcagcttacgcgtgacttctttgaag

SEQ ID NO: 425281 - DNA, 275 bp, Oryza sativa
tcacttatgttggccgcctcgccctgccggttccggacctacctgctcgacccacgcacgcgatctgtttcgcccgaccttgaagacggacggggtagagttggtgtctcccggcgcgctcggaacctccctagaaaaaatgacttatatggtcgacttcgacgccgggaacatatgaaccataaaatgtgtaaaaacgatgttaccaaaaatcgtggacaacaccacttaccgatcgtgggaattaacaaccagtttaattgttcacacgaaaa

SEQ ID NO: 425282 - DNA, 494 bp, Oryza sativa
tgttaagtgcgagctccggatcagcacccccggccgcggcgcgtgggccggcgccggctgcggggtgccgttcccgcacagcccgctcctgctgcggtgcagcaccacccctgtctcgacgaggaagtccccgtccgccatgtcgccgctgcgccgcgccgatgacgacgacgacaacgccgaggcgccgtcgcccgctcccgccagggcctcctgcgaggtcggcatccggtgccaccgctgcggcgaccgcttggccaaccacgacgccctggagtcgtaccaccactccagacacgccgtgaccgagctggtggaaggcgactcgtcaggaaagagtgggagatcatctgcaaggccggggggactaagactgagaacgcgctgtgccgcatggaggtggcggtgtttagcgcacaacgcgaagaggacagtgtctagggcaaaggcagacgcagccagttatgaaaaggtggatggagaacccatgcctg

SEQ ID NO: 425283 - DNA, 237 bp, Oryza sativa
ctctctatagttcccttcccaaaatccctcccctcgggcccctcttccccttcgattctggcggtttgccgccggcgagggttggaggaggggtccggccacctcccctacactagtatggaatagctagaccagcttctaggtcgacaggtgctgcctatagagaggctttgcccggagttggggtcccagcggaccagcaaccatggtctccgaagctctcgaattgaaggacag

SEQ ID NO: 425284 - DNA, 168 bp, Oryza sativa
tgttccctttcttggcaaaaagaaaagaaaaataatatcatcgcactttttgctgaccttttcatcccctcggatattcacgaagcaaatctctctgcaatccttttctttttttgtatgtgatcctgcggagcctctacattgaggaaaggcgagagctttaacatc

SEQ ID NO: 425285 - DNA, 352 bp, Oryza sativa
  unsure (1)..(352): unsure at all n locations
gggccccaattcccttttcgttccacgcgcccgctcntgcttatcccccaaattccacccccgcctgctccttctcctttagtcgcgagagaatcccaggcccgcgagcgagaggaaagagagaaggcagagctccatccatgggtgcagtctaaatgcattgcgaggatgcaaattggttagcattccctttcccagtgcatctgctgcaactatgtaagcaagaatggtctgatttgacacgcctgattccagcttctcagatcttaagttctgctgtctgcctggcaaaaggcgagagaaaagaggcctcctttgggtccaagaagagaaaaatggatgaaagcttctt

SEQ ID NO: 425286 - DNA, 187 bp, Oryza sativa
gtaacagaaagtactgtcgttggtgcactgaatgcattgctcgtattggagagtgacgactcctccagcgcggaggccaaggcatgacagtgtcgccgcgccagatcttctacagcacttgaggcgcccaccggctcggtcgactgtgcgctgctcacatggaacctttgtaagggctgcagacccc

SEQ ID NO: 425287 - DNA, 164 bp, Oryza sativa
ctcgtctaccagatgaagatggggatacagatgggaccgtatcgacgacgaagggagaactcgaactctggcctaccatttcgcccccctccggaggcaatccaccactgcatcgggggcgaggcgtcaccgcctgtgtgtgatgtgctgccgtcccatgatac

SEQ ID NO: 425288 - DNA, 214 bp, Oryza sativa
taccgtgacgagccgcccttttttttttttttggatagtgatacaccatcaggagacgtgttacgagcctacatctcgagggaagtcacatttccccactagcccgtggagttccatgtattcgccatctccagttgagtcagttctcccaccagtgaagtccttttcaatcttacgcaccggttttttaactatctaccaccaaacatagttt

SEQ ID NO: 425289 - DNA, 264 bp, Oryza sativa
gggcaccgaattccgagagttcgagccacgcgccacgtcttgcgtttattcctcaaattccaccctcctctgctcttctgcttcgtatgggagactctccaggccgcgagcgcgctggaagcatggggtccttggctgccatccatggatccacgctaaatgcattgcgaggctgcaaattggtagcattcccttccccgctgcatgtgctgcaactatgtaagcaggagtgtctgatttgacacgcccgaatacagcttctca

SEQ ID NO: 425290 - DNA, 122 bp, Oryza sativa
cacgctcgcgttcttttgctctccccaagactccttcggcgtttcctgcctctccccccacatagatgttgctcgtgagccaagccgccaatgttttccctctcttccggcggttgtccctc

SEQ ID NO: 425291 - DNA, 158 bp, Oryza sativa
ctcatcattatcattcatcaatcgtcgcctgatcgcctccagcgaaattcttcctccatttctctctccatcgaatctcatcccagcagcagcagcagcagcagcagccgccatggattccaaggcggacgcggagtcagccacggccagggccgcca

SEQ ID NO: 425292 - DNA, 194 bp, Oryza sativa
acagcttctcagagagtgccgtaattggaaggggtgcttgtggcactgtctatataggctatcatgcctgatgggagaagggctgccgtgaaaaatctgaagtgccagggagaaggttccaatgtcgataagaagctttcgagctgagataaccacactcggtaatgtcagggcccggtacattgttaagctgc

SEQ ID NO: 425293 - DNA, 295 bp, Oryza sativa
tcccgtaaaaatctccacccgccgccgcctccggcgacaccgccaccgcccaccggagagatgttgctggtgagccaggccgccaatggttccgtctccgcgcggcggctgccctccaagcagcccggccgccacggcggtagcggcagcagcagcgtccccaacccgtacccgctcttcgccaccacgcgcctcctcccgcaccgtcgtcgccgccgcctcgcgctctccggcgccgacgcgcgggcggggggcccctagacgccccgggggagggccttttcggatcccccgc

SEQ ID NO: 425294 - DNA, 434 bp, Oryza sativa
gtcctcctctcgccttctacgtaccttgccaatggcggtctccacctccaggcgcgggggcggcgtgcttgcggcggtggtgacggcggtggcggcgctggcgatgctgggcggggtggcgtggggcggcaacccggggttcacgtgcgggccggcgtcggcgcagaaggggttcgcgttctgcaacgcggcgctgccggcggagcagcgggcggcggacctggtggcgaggctgacgacggcggagaaggtggggcagctcggggaccaggcgcccggggtgccgaggctggggatcccggtgtacaagtggtggtccggaggcgctgcacgggctggccatctccggggatgggcatccacttcggcaacggccccgcgcgcaccgtcaccagcttcccggatgttattcacaccgtcgtcggcttcgacga

SEQ ID NO: 425295 - DNA, 81 bp, Oryza sativa
gtgtaacgcgtactcacccacaagttaggtgcatgccatggcaccatacatggcgtgcgccccaacaccggcacttacgct

SEQ ID NO: 425296 - DNA, 375 bp, Oryza sativa
  unsure (1)..(375): unsure at all n locations
cttggttcgttcttgactggaaggtttctttggtgatggcgaaggcgagcgtggtggtgcctgagcaggtgggcgcggcggtttttanatcatttatattatccttctatttatatttatatttttttctccccacctatttttcttttttttatattctatttatatctccattttattcacttatttttcttattttttaatttctatatttttataatatttctacatattttttttattttttctaatttttcttatattattctctatcttttttatttcttttatacatactcttctcttttttttttatattttattctatattttattttcttttaatattattacattatttttacactttttttt

SEQ ID NO: 425297 - DNA, 134 bp, Oryza sativa
aagcaaaaaacgggaactaattgatggctctgtttctgtgatctgctagttagtatttttttatatatatcttattttttattttattcaaatatctatacttaataaatatttttttttttttattttttatt

SEQ ID NO: 425298 - DNA, 353 bp, Oryza sativa
cttgactttttcactgaatatggagaagcaaaccggtattaagccagtgcagcccctgcccacccgagtttttttcttctcccttcttttttgtgagctcgcctcgggagacgtaattccatctccagaggcagagaattgaatgctactaccacccgtgaaaggtacggtgtgtcgtgtaccgccttgaaatcttagctggttcgccggtgatcatgccgtgaagccgccgccgcaggcatcttcccggcgagcgagttggtaggggcgctttcactcgcgtagcttcgaatcttggccttcccggcggcgattggatggtgcccctgaccctgaggtgaattccaagaaga

SEQ ID NO: 425299 - DNA, 101 bp, Oryza sativa
ttgtaagtttagccgtccagcagagagaccatcactggcatgcatgcgcaggcacgaacgaacgcattacatgcattgtgtgccagatagtttcttacaga

SEQ ID NO: 425300 - DNA, 348 bp, Oryza sativa
ggtaccgatccgcaatttccacctagacccacgcttcacacattgatacaagtgaaagcatgcaaggaaagcctcttgagagcgctaagaatgccatgtacactactctttctgagcttgtgcaaggagattacttcaacataataacatttaatgatgagcttcattcattctcatcttgtttggagcaagtaaatgagaaaacaatagaaaatgcaagggaatgggtgaacacaaacttcattgctgcgggtggcactgacctcatgcacccatctgagtgaggtaatatgctttgcttttaaactcttacaatgcacttccacaaatcttttttgtgaccgatgg

SEQ ID NO: 425301 - DNA, 335 bp, Oryza sativa
ctagaatccccttctacagttcgaccgaggccctcgccggcgccggcgccgccacgcccatctccatccccgaccaccacttcttctccggcgagctcgcctcgggagacgaatccgcagctccagaggcagagaatcgaatgctactaccacccgtgaaaggtacggcgtgtcgtgtaccgccttgaaatcttagctggttcgccggtgatcatgccgtgaagccgccgccgcaggcatcttcccggcgagcgagttggtaggggcgcttccactcgcgtagctacgaatcttggccttcccggcggcgattggatggtgcccctgaccctgag

SEQ ID NO: 425302 - DNA, 64 bp, Oryza sativa
attcgatccccaaaaaccccgatccccgcagacgctcctgcgactcgcaggtctcgccaagcca

SEQ ID NO: 425303 - DNA, 596 bp, Oryza sativa
  unsure (1)..(596): unsure at all n locations
cgcctgccgtttcctttccttttttcctttttcttccctctcgtccgttttcttctctttccttttctcctctcctccttctttccttcctttcccgtttttttttttttttctttctcctcctctgggtgtgctggggtgtgttgttgtggtggtgttcttctttnctnttccgctccttctattttctctttttcgttttcttttttttctttttctttttccgttgtttttttcttgttttcttctttttttttttttttttgtttttccctttttttttttttttttttctagtttttttttttttctttttttttcttttatttttttttttttttctctttttttttttttttctttttttttttttttgttcttttttttttttcttttatcattttttttttcttttttttttttttttttttttttctatctcttttttttttttttttttttttttttttttttaattcttttttttctttctttttttttttttttatttttttttttacttcttttctttttttttctgttttttttttttcttctttttttcttctatcttttacttttttttttttttcttt

SEQ ID NO: 425304 - DNA, 57 bp, Oryza sativa
ttgcaatctattcatctccgacctacctacccgctgctgtttccttacgcgaaagag

SEQ ID NO: 425305 - DNA, 87 bp, Oryza sativa
ttccacctaccctttagccgtcgcagatccgatccaggaagagcttgccgtcgccgttgccataggcgctctacgtagagaagacct

SEQ ID NO: 425306 - DNA, 66 bp, Oryza sativa
tcccgttatgttctagaacgcgagcgcacccgtgatccatcctcttacaattaggaggagggagcc

SEQ ID NO: 425307 - DNA, 115 bp, Oryza sativa
ccttgcgttggaagcatattggcacccattctatgccaattgtactctcctgaggctcccatcgacaactggagatctcatgaattcagcatatggtgttcttataccttattaa

SEQ ID NO: 425308 - DNA, 60 bp, Oryza sativa
ttttcctttcctcccctcctaccccactctcgtctcggtgaaggcaacgtcgccctcgcc

SEQ ID NO: 425309 - DNA, 92 bp, Oryza sativa
gactccgactcgatccaggcgctgctgaattcgttccccaaggaccagctcgttgagctgctcagcgccgcggcgctcagtcactaggacgt

SEQ ID NO: 425310 - DNA, 89 bp, Oryza sativa
ttcagactttctgctgaagaaccccactgtgacgatcataagccctgggatcagcaacactagagtccattcaagactccataagcaac

SEQ ID NO: 425311 - DNA, 113 bp, Oryza sativa
agcttacgctctttttctcgccaacagaagaaaaaccctcatctacactcccccctcgccggagccacggagaccctatttacccactgtctagtcgacggagtgtgatcatc

SEQ ID NO: 425312 - DNA, 259 bp, Oryza sativa
  unsure (1)..(259): unsure at all n locations
acgttggccttctttttttaganaaaaacaggctgcttctacttcccctcctcccatgcccgcatcgagatcttagccgcgccggagatcgagagggaggagcggcgacgcgggcgcccccgatccctccttctcgccgccgccgccgccggcggcgccggagcagcagcagccgacgacgacgacgaccgccgcagcagccgatcggtggaggaggggaggtttctatcaccttttgcgtcctcttctcccttcttct

SEQ ID NO: 425313 - DNA, 121 bp, Oryza sativa
gttctcttctgattgttatgttgccccttttctttgacgggtttgtgcacatcaaatgaattcatggcgagaaacttcgttttacatttaatctttatttaaattacacaccaactgtcag

SEQ ID NO: 425314 - DNA, 218 bp, Oryza sativa
aagtaacatccccccaacctccgcctcctcctcctccccctcctcccatgcccgcatcgagatcttagccgcgccggagatcgagagggaggagcggcgacgcgggcgcccccgatccctcctcctcgccgccgccgccgccggcggcgccggagcagcagcagccgacgacgacgacgaccgccgcagcagccgatcgggggaggaggggaggggag

SEQ ID NO: 425315 - DNA, 76 bp, Oryza sativa
tgtgtggatcaacgcctctcccgccatgatggacctggatccccgtctttacgagaacaattccaagagagataaa

SEQ ID NO: 425316 - DNA, 130 bp, Oryza sativa
tttgcagttttttctacagcctacgactccgcctccccctcgcgccgccgactccgtcccgcgcgaccgcctacgatctacgtctccgtctacgtctatgcctatctatagagccatcaagtacacctaa

SEQ ID NO: 425317 - DNA, 66 bp, Oryza sativa
gtcgcggtccccttcctcacgccagagccaccacagctgaagcgtgatccagcgacggcccgcgcg

SEQ ID NO: 425318 - DNA, 74 bp, Oryza sativa
  unsure (1)..(74): unsure at all n locations
atggatctacnacgcagccgttcatttcttttaaaaaaacagaaaagcacaaccacaacaagtttatgaatgaa

SEQ ID NO: 425319 - DNA, 59 bp, Oryza sativa
cccacacatccggtgttagtccactagctaccaaccaagctgccggcgagaggtatggc

SEQ ID NO: 425320 - DNA, 79 bp, Oryza sativa
ggtaccgaaccgcaattcccaccccagacccacgcttccggtctcagcagccacagagctgaaccgaagcaggggaggg

SEQ ID NO: 425321 - DNA, 84 bp, Oryza sativa
tcccgcttgctttgcccacaacagagaaagcgcgaggagtggagctcaaaattaccacacccccaccaccaatcaaaaataata

SEQ ID NO: 425322 - DNA, 497 bp, Oryza sativa
ctcctctttaagaatttcgaagcttagccgaagatgccaatggagaggtcggtgccctgcccccgttgtgtctctctttttctcttttctttctctttttctcttcctttctttcttctttttcttcttctttcttattctctcttctttcttctcccttttttttctttttcttttttcttctctcttttttcttctttctttctctctactttttttctcttctctcttctctctctttctctgtctctcttttcatttttctttcttctcttttctctctttttctttcctttttttctcttttcttcttcttccttcttcttctttccttttcccttcctttttctctcttttctttctctctcttctttcttttatccctccttttttctctcctcttcctctttcctcttttctatcctctacttctttttccccctcctctttcctcttttcttcctttccttctcttctttctatcttatttctttctc

SEQ ID NO: 425323 - DNA, 67 bp, Oryza sativa
tccgttctagaagcaagcgccccattttacaagagcatatcaaagccaagccaccataacactaaat

SEQ ID NO: 425324 - DNA, 392 bp, Oryza sativa
ctttccttccccaacaactcggccaaattcaaagcaaagccgccattactgctcctcttccattccactggggacgtacgagctccgcgcatcccttccattccattactgaccttggctgctgcggctgcagtgcagagggggtttggtggtgcggttgtcccgcgccctttcttctcctggggggtggtggcccctttccctcctcctgcccttcctttgctctttttttttcctctgttctctttcttccgtctcttttcttctgtctcttctttctgtcctctcctccctcgttccctctttctcgtttctcgcttttttcttctcgtctcctttctcctctcttcttcttccctttctcctcctcttcttcctcctccttctctcct

SEQ ID NO: 425325 - DNA, 67 bp, Oryza sativa
cttgaatttcgataaaaacccacaggacacctgccctgtgctcattatacatggaactgccgatgaa

SEQ ID NO: 425326 - DNA, 130 bp, Oryza sativa
gtgtcgctgaacctagacacacacacagaatcaaatggtttccatggtcttctagcctcacaggatacatatatatagaggccccacaccacactggagcctgtcaatgatctccaggaaggcatttctc

SEQ ID NO: 425327 - DNA, 127 bp, Oryza sativa
  unsure (1)..(127): unsure at all n locations
tctncgtttatggagcaacgaccgatagcacacaccgtgacgctcacataaaagatatacacttcagaccatctacggcttcacagaaggtcatctcattaatcacctgaacaggacataccctccc

SEQ ID NO: 425328 - DNA, 374 bp, Oryza sativa
gagaactgcaataatgtggattcatttgatcacagctaccagcatatcaaaatcgcgagccaaagccatgtcaaagatcgattgagttgttctccaggaaggatcaatagagcacaattcaggaaggatcttcctcaaaaaatcaggaaggatcaatgttaatgttccttctcctcacagggaaacagaagatctcctattcttcatcgatcctagttactatgagcttcatcagctcaagactgtttcttcttggaaccacctgagcaggagtggaaccagctcgctctcgctgccccttgactagatacacttatgctactgacctcctccttctcgttcttcttgttgttgcgacagccgttgcagatttg

SEQ ID NO: 425329 - DNA, 162 bp, Oryza sativa
gggtggttaagattttttagggggtttacctttttttttcaacaatggacagtacggtaggggcgtgcgcgcccgcggggccacggacccgagctgatcgaaaaaaaaagcgccaaggaaggggcgccccccccgccagaggggggacccgggggggagggg

SEQ ID NO: 425330 - DNA, 186 bp, Oryza sativa
aactataacgcgggctcttgctatcatataggtagagggcccgggacaaaaataaccccggccaaaaaaagggaacggccacacccaagcgccacaaaataccagggcacaacaacagggcagcacatcccaccgaaggccagaagggaagcacacgcgcccaaagaaccaaccccccggcagagg

SEQ ID NO: 425331 - DNA, 433 bp, Oryza sativa
aacaaaattctcattcacattcatgattgatcgatcataatgtttcaaaaaaacaacagttgtgcatgccatacactgcaacagggtaaacaaacataaacctgaaacagatcaagaaatctgcctacaaaaacatcatactctcgagtcagccaaaactccactctgtgggggcatgcaaaaccggatgcctatatcctctttttttgatccataagtcacaccatcagtaacagcagctgctgtgatgtatggtatggttggtatccaccgcctatgtgccactaaacctgtgcctaaacaagaagaaaattatccagtcgccccatcaccaccgggtgtatctactctcactttccagtaaacacaacactaactacagctccacctggcgaatcgccacgtcttaaaccaagagggcccctgctaggga

SEQ ID NO: 425332 - DNA, 312 bp, Oryza sativa
aaccaaaaccaaagccccccctggaaagaaaaaaaaaaagggggccggggaaaaaaaaaaaaaaagacccaaaaaaaaaaaatccccccttggggggaaaaattccccgaactgggaaaaaaacaaacggggggaaaaaaggggaaaaaaaaaccccaaacccaaatggatatttttggggaaaaaaaaaaaactattccaaaaacccctgggaaaattttttgggggggaaggaaggggctccccaaaaaaaaaaaacccggggggggaacaaaaaatggcaggggaaaagaaccccaaaagggctttttg

SEQ ID NO: 425333 - DNA, 380 bp, Oryza sativa
aacattaccatatattcattcctatcaaaggcctcgctttaccttacaacaaggtacaaaggacgggggctaaatccaagttcacatggctggggcatcaattatcataatttacaaacaacactctgaccccacttatttctatgcttttcaggagattaactagcgacacaccctcgagcttaattgtgtttaacgcatgcatgcatggattaaaagatcacaaggacggaacacaaaacccatgtataacagcaaacaccacattacacagtatcacatggtcttttctgagttgaacctagcatttgagctcagggcccaagtgcatccatcatatccacaggtgattgcttccatgcttctttacctttgtggaa

SEQ ID NO: 425334 - DNA, 452 bp, Oryza sativa
agtatctctgaactcaaatattgtcaaggttccatttacaatactactattgtacaaaacaaagttaaagcacatatcgacacggtagagcggaaacgcctaatgccgagtttcatcatagtccctaaaattttcaaattctacgagaaaacaaagttctgaacaagattgccaaacagcacaagattgtgcctgtctgcgtatcaatcggtgtaggacttttcaagtcaagtttattcagcatccactagcattttttacatcgataagccaaaagttttcggtactacatgctagctactagactgtgacagacgatctgggcgcacacttcctccatcgagacaaatttcatcatctggtagcggcggttcattccccatatccctagtcttgtgcaggagaaaagttcctgcaacgatggtccaaaaccacataactgtgttgaatct

SEQ ID NO: 425335 - DNA, 432 bp, Oryza sativa
aaacaaatgaatgattttttttttttggatttgaagggaaaatatgtaactgcagttccgtcgacctcccagataaccaaaaatgggaggataatttacactcagatgagactaaaatttctatcatttcaatgagcaattgagtggggggagtaagaacaaatttgatctacactgaaagatttctacaaaagggacaagctaccgggcctgccacgaacaaccactgatgtagagatctcaaaggacccctggtttgattatgtacaacgctggtccatgtccaattcagggggggccccaagcatgggatggcttggaccaagtaaccacacgctgggccagaataactgggtgcccgggtgcttttcttgaggccatgtgaggggccaatgctgcgtttacttccatccaatgctcaaactattcact

SEQ ID NO: 425336 - DNA, 193 bp, Oryza sativa
gagaaaaacaaccttgaaccttattgaacatcttggcctctgctcatgaacactagagagttacagtttacagggaaatggctccaaaattaaggaatacaacgccggtcaactacacgtgcggaacctagcgtactctaagtcgacatgacagtacaaaaactaacttgcactaccgaccaaaaaatgataa

SEQ ID NO: 425337 - DNA, 324 bp, Oryza sativa
cggccccccaaaggggggttttttaaagaacaagtaaacggccacccaaaaccccagggggggaacaaccaaaacaggaggggcagacccaaaacccaaaatttttccccccccaaaaccctaaaatttggggggggaaaaaaaaggggaaaagcttggggggttttaaaacccaaaacggggggaaaaaaagggggtttttgacccccaaatttccaaccccccaagaaagaaacctggcgggggggaaaacccaaatttttagaaaaaaaaatctggggccgggggccttaaaagggggggataacccccaaaaatcccccc

SEQ ID NO: 425338 - DNA, 368 bp, Oryza sativa
agaagataaccagggcttaattaacataatgatatgggtcaaggattacaagttgagcacaagccacttcacaggtgaagataactaggagcaaacacccttcctttctttacaaaaagaaagctctaaaacctggaagggaaggtgaagaaaagtagaaaacatacaccaaagggggggagggggggtcacctatactaggccggacattatactcaggcagctaacacccagtgcacactataaaccaagccaattctttgatctgggacagttaacaactgaccctgcacaagaggctctctatgtgatgcaccattaggcgcatggcaccttccatggcgagaaactatggcaggaactggggc

SEQ ID NO: 425339 - DNA, 129 bp, Oryza sativa
gggggacaattggaacactccgggtgataaatgaagcttgtcagttctccagtccacttaaatgcactcaatcaacgactgaaatcacattagttctgtcccactactaggctcacagttcaaacccta

SEQ ID NO: 425340 - DNA, 383 bp, Oryza sativa
acttcgcaacattcatccattggtagcctgagacagttagtagtacgatctaagcctcggtaccttctaattaagcaacactagacgatagatagcataatagcatccctaagcaaacattgactataggcatcagtgatcagtggagttggccgttgacgtagtggcggtgggggtcatcggcgcggacacggtcatggagtcgcgggcgaggtcgtcgacgcggcgggggcgggggcggtcgatggggcgagggcggcgccgatcgtcgcaggggcgggcggcggcggggcgtcgtcggcggctggcgtgtcggtgggcatttttgccttgaccttggcgaagatcttagccatcgcagccttcctcttctcggaaaaaca

SEQ ID NO: 425341 - DNA, 92 bp, Oryza sativa
gaccaaacatttataatgttttaagtgcttcaaacaaccgttagttccagacacattgaagatgattgctcgacacattactaaaccgagtt

SEQ ID NO: 425342 - DNA, 407 bp, Oryza sativa
aaactctccctaataaactaaggcccaaagaaaaaagctaaacaaaaaccacaaagctggccgagccccccccaccaggacgggggccccaaaaagggaggggcgaacaacacagggccggccaaaaaacccaaaaaacaggggaaatcccggggaaacctatagaggaccacggggggatttgggggggccacccaggcccctggggaaaaataaactcaagggggggaagacacactaaaggggggggggaagcccaaaaccagctctggaggcaccaagccgagccgcggggccccacccaggagggggaacccgcggaacaacggcggccccaggggccacgggggcccccgggggaacccaacctccggggggaaaccccggggtggcaaaaaaaaggggga

SEQ ID NO: 425343 - DNA, 172 bp, Oryza sativa
agcaaatcgatccatgcgaccatgcgtgcaaatcagttggagcacaaatttacatgttacacccacaccctacacccatgcataataatacatcgtatatacgtacgtacatacatacccctctcgatcacacgcaccatcgatcgtacaaagttgcgtacatacatacgta

SEQ ID NO: 425344 - DNA, 499 bp, Oryza sativa
ggggagactaaagtagaattttccatatgttttttttctccccagagcagctcactcgactcttaacctagctaagcttgtttgactgatattgacctgtgcgcatcacattttttagcattaagctgaacactatatctcttgattgcgaccatggcatttaagcagcaggctgcggggaagagaagattaggctcatcagaagcccaaccaagagacctatgagcccaacaaaagcagcaaacgttaaggagaaacccgtatcgcttttgcggcttctacgcctcctaatcacatccaattcacgttgcatttgctgattttgctgcagcatgttatctctttcatctttcaagcgttgcattgtctgtatctcttcaatgcttgcattcttcagcatcgtgaaatcgtcagacaacgatttgaagctcctgctttctaaagatgtaataccagagtcgtcggaacttccactaggcactgataaacaaccttaagc

SEQ ID NO: 425345 - DNA, 432 bp, Oryza sativa
aagggccggacttcagcatgaaaaccatacagaaatcagagaactaatcgtcatgggtacagaagatcagcacagccggggatctaataaacatgagatgacctaattaggactaatcatgcatgcatgaactgggtcagcacgtaaaggaattttcgatctaccagaaaaaataaagggaaaaaccccctggctggaccaaggatggatcaacgccagcgcctaaaaatcaccatgaatcgatcagctcatgcgagggcgtcccaacttgaaagggcctgccgaccgaccgacgccgttgaggtagaagccagcttgccaatgatgtttctgaggcctgaggacgattaccccgccgggccggccgttgtggggggggaccatggcccatgggcgtccctgtgaattgccccaccagcccatgcttgatgc

SEQ ID NO: 425346 - DNA, 70 bp, Oryza sativa
gggtggagattagaatttaacgataaacagaaaataacagtttgattagtaggcacgtctacttttagca

SEQ ID NO: 425347 - DNA, 78 bp, Oryza sativa
cgacggacaaacaacggattatttgtcctaagataaatgctcttaccgtaagcctggccttgctaagagattttatgt

SEQ ID NO: 425348 - DNA, 480 bp, Oryza sativa
gaaatctctgcatccatatcatctttccatacagcgttgggtttcagcattaccaagtactgctagggcaagcaacatttcagagaatcggcgatgagacaagaaatacaatacaatcagccattatttgttttttccttttacaacaaaacctacaggctagtccccctaaacacgattctactgataaattttattcttctgttagaacgaacattacctacatatgattggaacaaataaacaaaattgtaaatgtgcttctgatcatttctattattttgttagaactgtacagcttgtctccaggaacatttcttaagtatcaatcgctctgttagatgaataaccattcactttgcgactttcttgccacagctggttcacttcaatccatcatccagcgcaacatatccagctgacatcagctagagagggtgactgataggagcaggcaccatgaacaggtttcctttattg

SEQ ID NO: 425349 - DNA, 163 bp, Oryza sativa
caaaaaaaaattcaagattaaaaaaaatttaatttcgacaacatgattgggaatgggccattgaaaagagtccttgcctccatgcacttattgctccccccaggtttttaaaattttgggccataaccatgaaagattggatcaaccgatgtggttaccttac

SEQ ID NO: 425350 - DNA, 403 bp, Oryza sativa
caaggggtattttgaccttttcccatgtaaatacgatgataattccaaatctgacaatgatcatttatatggacaagtgattttcattgcaccggaaggccataatacaaaatctggggcaactctaatgtaattaattgggtgaggttccgaaaagctctataccagattgatgttataacgccaaaacttgagatttgtgaatcaatcccgttgaatataaatgtttcccagcaaaggcacaaactgtttggtgaccagcttaattacttcttgggatgctactccgccaatgaaggcagccacgggatgaatcctctgcacccccaaaccggcacatttcagtaatcaggtcttcagacaaaggtgccccgttcatacccatcttacttattactgaaac

SEQ ID NO: 425351 - DNA, 255 bp, Oryza sativa
tttttttggttttttttttttttttttttttttttttttttttttttttttttttttttttttttttttttttttttttttttttttttttttttttttttttgttttaaaaaaaatgcagcctaattcaaaaagagaatggaacgctgcatgtctgccccaggggaaattttaatcccaaaaaaacaaattatgctgggggcgaggaccccgcataattaactaatattaagaaaggagaaaaaagttcctccc

SEQ ID NO: 425352 - DNA, 341 bp, Oryza sativa
tattttttttggggttttttttttttttttttttttttattttttttttttttttttttttttttgcacaaaagacaggccattaagtttattggacccttccaaatttccaggggttaagtaaaactttttttacccaagaagtcctttagctttgtgaatttacaagggtcaagcaaagtttctatttctttgggaattcataaaatccattaggcaaaattactccctcagccattagggtttttcatttttaaggattacaggcttgaaagctttatttcaccattccttcacatgcccattctttttggcttaatttgcagggggttttaaaaagg

SEQ ID NO: 425353 - DNA, 158 bp, Oryza sativa
actattatatgacgccctttatttatattttttctgggggaaaactttatcataaccaacttgttgaatatgccaaatttacttatacactttcctctcgtggtgctagtattatatcctttgaccaacatgttatcttgaacttaatttacaattgt

SEQ ID NO: 425354 - DNA, 149 bp, Oryza sativa
ttgtccgccgccgtcggtgtgctgctggtgggggcttcgctggccggtgtggctcgcggtaaggacccgtacgtgttctttgagtggaaggtgacgtacggtaccaagacccttctggacgcgccgtataaggtgtatcctgatccaac

SEQ ID NO: 425355 - DNA, 93 bp, Oryza sativa
ccttttctttttttcgggggcatcttggcacgaagcggataaacacacccttatgcggacagggttctaacaattgttaaaaaggaaaaatga

SEQ ID NO: 425356 - DNA, 61 bp, Oryza sativa
ttatttggccgccctatttttttatttattttgttacacaaaaagtaatgttaaacctacg

SEQ ID NO: 425357 - DNA, 339 bp, Oryza sativa
tattttgttggtttttttttttattggccattaaatattccattcataaattgctatacaaagcaaaagagaaaattcaacatatcagtaggtcttatctagccatatggctcgaacaacgcctctttcagccagtgtgaccaagtcattagcaagactaaaactatagggaaaaacccggctattacatgaagtatcgtgatgccactcattacatttggcggtggttgtggtagcatatgctacattttattgatggatggataagaccaggtgttgtttgctaaagcgataggacaagcggctgctctgaatgtttcatccattactttaaacttg

SEQ ID NO: 425358 - DNA, 56 bp, Oryza sativa
cgcaccttataattactactcaagggggtactatgcgacagaacagcaagaatcca

SEQ ID NO: 425359 - DNA, 118 bp, Oryza sativa
cttttatgagggggaccaactccaatatatttacaaacacaaacaacgtacccaatttttactgttaaaattcaggcacactgcctggcttcacacgatcttaagtaagacagacctc

SEQ ID NO: 425360 - DNA, 137 bp, Oryza sativa
tttttcgccctcaataacaaatttaacgagggctcaagaacataatgtgcagaacaaaacaatgacactgcggcatcactaataaggggaaaaagagagaaaaggaagacaaaaaaaactatcgttcatacaaaaga

SEQ ID NO: 425361 - DNA, 208 bp, Oryza sativa
gagactaaacttatacacttaattacttaaagcgtatggtacatgaggagaaaaaagggagtaaaacttaatgttgaaattgtcataattatacatgattttgaaatttgaaacactacctgaatgacacaatgccacatatttgagtgtggagggagcaattttatgaaagccagtggcagttttggactacagaatacttacattt

SEQ ID NO: 425362 - DNA, 118 bp, Oryza sativa
atttttcctagggggtacaacagtcaaacagcggcctaaaaagctgggccgatggcaagcaacaaagagacagcccgaaacaccctataacaccacatagacacatatctagagctgg

SEQ ID NO: 425363 - DNA, 315 bp, Oryza sativa
tttttccgccctttctttttttttttttttttgtgatttggacttcaaaaggcaccgcccaggtattattatttataccaaactcagcctcaaggatttttgtgtagtaccaaacagggtggaaagtttcgaacaccccacaaaaaattaaattaaattaatgactacaaaggtgaaacaacaaaaaaaatgtttttttttcaaaagtctataacttgaatggggtaaacttaacaggtaaacccaatggttaaaagttaaacaacttaaacaaagaatggaaacaaccgaagtaccatgaaaaaaacccttttg

SEQ ID NO: 425364 - DNA, 401 bp, Oryza sativa
ggagaaaaataaggaattccattttcaccaaccaaacagtatcatttaccatggatatttgtcagtttcaccatgggatgatgagtgaaaaaaaaaacaaacacatattatgcttattttgacataagctctggctggctggctggctggccatcctaaactgcagtgttacatacaccaagaaggattataactgacggcaaaaatctacaggaactatatggttgaaatgaaatgaagaaatcaggactatttatacaatcaaatctaacaggctggaaaaatcgttactggttggaactttacagggctaccaatcttggtgtcgaattgcggtgaaaacttttcgctaggggaatcttttttgcttggtcagtagtgcactattggtttgataaggg

SEQ ID NO: 425365 - DNA, 364 bp, Oryza sativa
aaaagcatccttaagctattacttttatgataagctcaagtttttagtggatgatgaatcatttgtaaaggactggaaattaggccaggatgattttcacaacacaaatacaggatacacaaatttttgtttagtaaaaacatacggagatgggcagggagaggtccttcttgccttcgtaagctctttctgtgcagtctgtatcctaattacttgtccagtatgcccctgtaatcagtaactgccagaagaacagctcagaactttagacccaaaaggtatcctgaaacatcaaacatgataagctaggaatagcagtctgcatacattcaacttccactttttattccaactgtacttccca

SEQ ID NO: 425366 - DNA, 134 bp, Oryza sativa
gttaagatattcaacatcctcatgattctacctaatgcttaattaaccaattaacaagttagcaaccagcaggtcacaaaacacaaataaaccgaaaaattttaaggataagtcaccttaaccaaaattatttt

SEQ ID NO: 425367 - DNA, 101 bp, Oryza sativa
aaaacccggtgcgcgaggccatatggagcggccgggggtgcccaacttggaggtacgagcaaacattcatatgagaactctggaggccaaacaagcaaaag

SEQ ID NO: 425368 - DNA, 177 bp, Oryza sativa
tcgtttcgcccattttttttttttttttttgagcgttgtttaatcatattcccagtcgcaggcacaacgacatgattaaacttattaaagaaattttacatattgcactttaacacttgatgatcgtggtcgaaaagggtaaattcttaaacacgtaccaacccccctcttaccaaa

SEQ ID NO: 425369 - DNA, 250 bp, Oryza sativa
gggggctaaaaggccctggggggaaagctcccccaggttatcaacaaaaaagggttatgccctttggggggaattttttttttagggaaaatccaaacccgggggctaaaaaggggctcaccctcattcctaaaaaaccccacgcccactttacccttaggaagcccccaataaaaaacattggggacctggggccacaaaaaaaaggcccggggtttgggttcgggaaccggagttttgtcccaaaggg

SEQ ID NO: 425370 - DNA, 523 bp, Oryza sativa
gggccaaatttaaacgaagaaatttatttgactgcacggcagatcaaatacgttaaacaacttctgtgaaaaaaaggtaaacaactgatacctcttcagaagggactaattcggtgtgccagctttatttgccactcagaaaccagccggcctgggataggtgccaatgcatccttctcacgtgcatctgcatcatcagcatggataacagaaataacgtcttcaaccagtttgtccctgccaccccttagtggatcctgtaaaaatacatcagtatgtgttttcccttcatagagtagtaacttggctttagcaccagcttgtttaaggacacccgcaaaagtttcactagcagaaaatggtatagaataatcatccgttccatgcaaaagcacaatctgaggaagaagagctattgtttcaggacataatttcttggcaacagtttctggagagaaatgtggcaatgatttctttcccttcattatgctgagaaaaatttgacggtaaagaccacgttcat

SEQ ID NO: 425371 - DNA, 362 bp, Oryza sativa
acctgttaattgactgcgctctcggtattatgttgtgtctacaaagaactgcagtgcaccaagtacacgacattattaagtttaggggaaaaacaatgtatctttaacctcaacatttctggtgtaaaacggaataaatagtttagtatcaagcaacagtgtttaaactaaggaagttttgcctcgttaagttctgttctaactgcataaataaggtaatccttattttttttctctatgttttttatctaaagctcccggttgagtctgacctggtgtccaaaacttgatgatagttttaccgatgccattgctgtcttgtgcagcctttttttatttactgacgctattagatttttctt

SEQ ID NO: 425372 - DNA, 400 bp, Oryza sativa
ggggttctgaacccacggccaggcattgcctgccaacagtgaaagtgtttacaatatacagggtcccccgaaaaccaatcaaatggactgggccaggcaaaatgatttttacttgttacaaaactgcttgatagcctccgtctatggtgaaaccctcagtagcataagaactaattcaacacgagcggtataaatagggagcataaacaagctgctagggggacaggtttgttacagcacagcccgatcagtccaaggggagcaaaacgcatcctagccgactgggctagagataagaacaatccctaactgtcattatccaagatattccgattcgcttggtggggacccccttcttcctggaagacgacgatactacatttggtaaaccgcatggaaa

SEQ ID NO: 425373 - DNA, 450 bp, Oryza sativa
aagggaccctacaaaacttgaacccattagcagcacaaacaccattggatatatacacaaactaggggggctaaaattttgctcataacccactgacatggttttttgaaaacatggatagggtctacaccaacaaatagttttatttttccaaaaaaaaaacaaagatttaagttttttccattggggaaggaaaaacccttttaggtaaggggacaaacccccgaattaatcttagggggaaaatacccaacaacatgccccatttacgcaacccctcttttaaaaggataaatcccaaccgtggattggttttccgaaaagccaagggctcgatttgggaccacccttccgacttggccggacaatgcctaggtgctttaacaaatttggtgctttaattaattatccccttacattgattatctaccctggaaggaacccaattaa

SEQ ID NO: 425374 - DNA, 403 bp, Oryza sativa
gggggaagttaaaaacagacaatgtattcaagaagagtttacaagctgtttttacaactacatcatcattaagcaaacgtagaaaggcatgaaatatgatggcaggatacagtgagacaggttgaaagagccgcagtaactagtcggaatcagagtcatgcctcctcttgggcttgactttgcgggggggcttcgacctgttgaccgactcaagccgactccttttttcttggttggcacgcctcctatcctttccttccgagggcctttctcgcttccgctctttatcccctcccgaattctaacggccgcttttgctccaacgattattatcggaaggctttacggtccggtatggtttccgggggagggttgtcagcctgctcagcgggcaccatttttg

SEQ ID NO: 425375 - DNA, 425 bp, Oryza sativa
gtgggggcaatcatatcaggcaagcaaaacttcgcctcttgaagcaaatgagagtgatatctttacagagatcttgccttgaaggtatattataatcaagttactgaaattctacgcataactatttgatctgggatcacatttcctccgatcatacacaaaacggaagctaactgagagctcaatatacttgtaaacctattagcacttctactatacaccagggaaacatggcagggaaaagctttgatcctagaattactagaaggcagggggtaaaaaaaacaaaaagaggacaggaagaatgggtgagggaattatacatggtcgaatagctcaacttcgcaggattttcgaaaaggagctttaatatctgtgtgagacgctctgcttattcctgtcccaggcagccctaagagcgtcgt

SEQ ID NO: 425376 - DNA, 437 bp, Oryza sativa
  unsure (1)..(437): unsure at all n locations
ccgacacggctctcatcttcacgcagcttaacttttagcagcagctcaagctaagctaagctaaagtactacgtgttctttcgtcttcgtcggcgccggagtttgattcgtcggagctagctagcaagaggaagaagaaaatgttggccatattccagaagcaggtggcgcacgcgccggcggagctgaacagcccgcggagcagcgcggcgaagcccaagaaccccgacgagatcctcagggacttccacgccctccaccccatcgaggccttctccacctccttcggcgggcggcgccgccctcgcctgcgtcgccggccacgcccgcaatggcctctctggctacgagaggatgttctgtgggctggatgacatctactgcgtgttcatgcngaggctggacaacctgagcagtctgatccggcagtacgggct

SEQ ID NO: 425377 - DNA, 427 bp, Oryza sativa
ggcggcggcggcaagcgccgcagggtctcctccgacgccgaccctttctcggcgacgccgccgacacccacgacttccaccacggacgcgtacgccgacctcccagccggcttcccgttcctcagtgacggcgccttcctgccgcagttcggcctcgccggcgttgcgccggccgcgttctcttgggcatcggctgtccctgacttgtacaactgcgggatcgcgccgtgggacgatggaacggcggtcaccggcgcggcgtgggacaacttcgccgacatcgccggccttgatctcagctggccgtcgccgggtaactgacgaacagtacacagctggtcgctcgtgttttggggggctccggttttagcaaagcagcctcaagtagtgcgttctcgaacggatgcaggtagtgtgttcttcgatc

SEQ ID NO: 425378 - DNA, 273 bp, Oryza sativa
ccgcttcccaccctccactgcttggttcgatttacccggatgaccttttaatcacagataggtcctcggatcgagcgggctgagatattcgagggggtctgctggaatgtgtcgagttcgacggcggcgagcgagagagagagagatggggatctccagcatggcggcgccgaaggatagcctcgtgctgtacgtgctgtacaacgcggtggtgtcggtggcggcccttgcccgcgttgtgccggacgccctttcgttcctggggctccccac

SEQ ID NO: 425379 - DNA, 145 bp, Oryza sativa
ttctcctgagtcctgacttcttgatccacctttgttcttcgatttcttgcttcttgattcgacgccgctgctgctgctggaggcagaaagggagcacaagatcgagcaatccaagctgcaattagaggaggaggaagaggatgac

SEQ ID NO: 425380 - DNA, 186 bp, Oryza sativa
  unsure (1)..(186): unsure at all n locations
ccgtccgttgggaagggagcttcgaggttgctgtacgaggcgcgccttttcgtgccggcttggncggtggcacgggcccttgggggcttgcgcccctaacgtgggtcggggcgcgcggcgtccacacagcgccgctagcttgcttgaataatgacttatacgcgctcaattatagtcaggcacacg

SEQ ID NO: 425381 - DNA, 214 bp, Oryza sativa
tgccagcgcacctcgtcctcgttgttatatttcctacgcctccgcctccgttctccgcctcgcgcttggtgtcccccaaaaccctaggtggagctctcctcccccctcaccccatgcggcgccgccgggtcgggacggcgggagggttggttcgatcctgactgggctcggcgccgcgggcgagtcgcttgttggagggggattggggaatttg

SEQ ID NO: 425382 - DNA, 291 bp, Oryza sativa
ccacgaccacccaataaacgcttttgtggttatactacacagtctcgttcgcatccaccagcgaatacgaagacgaccgcctggcacttgtgtcccgtcgagaacctacgagagcatagcgccgtacttggcgccacgagtactggagacgtgtgaaatgatctctgcgttgggcatgagtacaatcatcaaaccgttgtgaggcaaactgaaattaaatgaagttttttgttacactgatttggtggggcaaaacatatttgagtgggttgatgtactcatctgttgcct

SEQ ID NO: 425383 - DNA, 498 bp, Oryza sativa
aaaaaaggattatctcttcttttatcgactcgtcttcttctcccccgattcccgagcagcttctcgaaaccctcgcggcctcgattcctggctgatggcggatcccaacccgcaagtggagagggaggtgtaggtttttttttttttcctctttcttccttccttattatttccttttttccctcccttctccttctcttatttttcctttttcccctcctttttttttctttctctcttcacccttttttcttcctctatttctctctctccttttcttcttcttatctcttttttttttccttttctttttatctcacttcttttatctctttttttctttcttctttcttttttcttctatttcctttttttttcttttctttttcctctttttatctttcttcccttttttctttttttctttattcttcttcttcttttctttctcttctttcctttattctttctatttctttttaccacttttctcttttt

SEQ ID NO: 425384 - DNA, 348 bp, Oryza sativa
ccgaccggggtccagaaccgtaaccttaatcttagcgaggaagcattgccttggcggcggccggaggggggagatgtccaattcttcgccttctagtccggaacggtgaggttttccctccctttatatggacatcacccgtttgtattttctgttgcgcatgcttcaaatcttggatggacttgctcatccttcggcgggcatggatctatcggcggaagctgttgctgttgctcgttcatcccttcggatagtcagatattgggccgtcttgacttcttaaagggccggttggggcattgcttcgtacgagcttggcctgtattaaatcctcactgccaggtatga

SEQ ID NO: 425385 - DNA, 329 bp, Oryza sativa
atgcctgaacggccaggctgtgcctctttttatctggccaggacccgtttgcgtgttcatgcgggcaggtgtaacatcttgggtggagtggcccattcttcggcgggcatggatttatcggcggaagctgctgctgctgctcgtccttgcgttcggcgagtcagatctggagcccatctgtccttttacaggtccggttggggcatgctccgtacgagctggcgtggatgaatcggccgggtaagggaggtggtttttattcgcctggatctttttcattggggccttatccgaagacgtctttctgtattgataatattggaagaact

SEQ ID NO: 425386 - DNA, 477 bp, Oryza sativa
tagcgcggctaaacctcgggcgtgttcttttagcggaagccagcttcaatccaagccccccgctacccaattggccaaactgtctcgagaactgaacacactgatatcagaaatcagtttgtcgaacgactcaaacgctcatcagtgatgcagacgtagctggtgatccgtttgtgagcaacggtcgatatttccacaatgcgcgacaagctaacgggagcatctaggttttccggacgagcagcacgacgtggactcgcacatcgttgatactccgtctacagagtagattccgctttttcgcactcaacactccgaaggagcaaacccgtcagaggtccaaggaaagcctaccgtcgactttgcatcgagccgtatggggcagggttaccgcagagtgccacctgtcacgctccggaagactcgagtgttgatcgatgtccacgaggaagatcacagggagaccttgatgcgatc

SEQ ID NO: 425387 - DNA, 337 bp, Oryza sativa
aaagcagcagcagtagtcagtagacgctttttaagacaagctcaagcttaagcaagagacaccaaccggcggcgaggaggcaggaatcgcggcggcggggtcgccggagatggggagggaacggggtggcggcgaggggatgacgatgctgcagcggtggtcgtcgtcggtgtggagcgtgagcgggagcgggcggctgctgtgggcggacaaggcgtggcgcgcgcacgccgccatggcgttcacccagctcgcctacggcggctaccacgtcctcaccaagtccgtcctcaacgtcggcatgaaccagatcgtcttctgcgtctaccgcgacctc

SEQ ID NO: 425388 - DNA, 93 bp, Oryza sativa
aggcgcggcgctcctcctgctggtcttgatccgatccccatggcgttcatgccctcccactccaatgcattcttcggtatgggggttggttct

SEQ ID NO: 425389 - DNA, 188 bp, Oryza sativa
ccgcacgcgacgacctcgccggggctgagacgccgtcgccgccttcatggcgaggcgatccggggggaggaagctgtccttctttgcctcgaacgcctccacgtcgttctccaccaagcggacccgctcggcgcgccgcctcccttagctcaccaggccgtgcgcgtcgagctccccatccacggtgt

SEQ ID NO: 425390 - DNA, 311 bp, Oryza sativa
agaagcgcgcgagaagttgggaagcaatttagggactgaccggtgacccctaaagggggtgaccaccgcaagcagtgatgtaccatccaacaaggtcatcttatgcagtggaggcaccagagcattggcatccactgagggacaacactccagggagagccttgtatggccatctaagccatgctttgtacctgaagatgaggggagccactgtagacgacacatgcttaagggcgctggtatgcaagctgactggaatgctatagtggcacgctgatgagatgaagctccccgaagatgcacagcacctt

SEQ ID NO: 425391 - DNA, 451 bp, Oryza sativa
tttgtgtggttggtgacccgacccttatttcctcctccgactccgatgcgctcctccgccgccgacgcgccgccccccgccaccgcgagtgagatcggagacctccccgtggagatcgtcagcgacgaggagatggcgctcatcgaggccgcgctctccgccgccgcggcagcatcccgcccggtcctctcctccgccgccgcccgccgagcggtccagctctcctcctgcgcggcctactcggccgcctccggcggcgacatcgaggactccccacctctcccgacgccgcggagggggtctctgctcgcgcggttccgcgaccgccgtgcgctcgccgtcaccgacatcaccgccacggaatggtgcgataagcagcaggagttcgtgctggagcacggcaagccggagatgacccaggccatgaaggccgggttcgagcgccatgccc

SEQ ID NO: 425392 - DNA, 218 bp, Oryza sativa
ccgaggatgaagcgagagttatgcgttgttctctaggcgacctaggatttaacaccaggggtccgaatgacatgctcatagttacaatagagctgtgctactctgtcattgcacctctgattattccatttggcgttgctcactttgctcttggatggactatagtgccaaatcaggttctacaggcttatgttcccccctactagagccaccgggaa

SEQ ID NO: 425393 - DNA, 470 bp, Oryza sativa
  unsure (1)..(470): unsure at all n locations
cgcgcgagctgactcttcgtcgggcttctcgttattggcgtacgtactcttgctgccgcacgcgccacgcggtgctgcgcgttctactctggtctccggtggcctcttggccggaagctgccgcggcggcgatgcgagctgcttggtgctgacccaggagatccctcgttcctgctagttatcggcgcgccctcgtgtctgcccgagcggttcttgctccgcgcaggccgagggggnnggggcgccgcgccgacgcccgcaacctgttcgacggaatgtctccgcggaagaaggccaaggaatcgcccggctcgaccggcggcgaccggataggggaccttccggacgaggtgctccaccacgtgctctccttcctaccggcgcaggaagccgtccggacgtgcctgctagcccggcgatggcgccacctctgaaagtccgcacgggggtgcgcattgcgagggcgagac

SEQ ID NO: 425394 - DNA, 242 bp, Oryza sativa
tgcattccgaagctaaaccttgtggggtttcttttggccttacttccgttcttttctctgagaagatttgactacggattattaatccatattattacgagagacaatgtggtcgaatttacatggagggaggctggttcagaggagccaagtgttacatttcggcggatgcaggcttaaggttcttgttagggctgcttaacacaaattcgctggtggccttattataccttaggtgatgg

SEQ ID NO: 425395 - DNA, 438 bp, Oryza sativa
tccctctcgtcttcccccagatccccccattccctaaccctaccatcgccatggcctcccgcatcaaggaccgcggcaaggccgcacccgccgccgcgggatcccgcccgctcacccccaaggccttctccgcctcgtcgtccgctcgccgcacccccgccgccgccgctgccgggaaggagaactcggcgtccaagccctccaagcccaccgccgcggtgcggtggtccacgtcgtcgatcccgagggccagcaggatcccgagctccgtggagtcctccaagctcgtctccaccctcagggcgtcctcggtgatgccggggagggcatctgtcgggaaggaaatggaggcggaggcggccttgcggcggagcgtgagcggcgggatcagggccgctgccccggagagagcgaggaggctcgttgggtggcgttggg

SEQ ID NO: 425396 - DNA, 196 bp, Oryza sativa
aaatcatccctagatgtggcgagctagaaacttgccctttcttgtcgttcccctcggcgatcgacttaggtgaccaccgatgtgcgggaggatgaagtggatagaaggattgctccagtggaggtggaggtggaggcggaggtagaagccaatgttagctttatagtacctaagtgatcacttgatggattttgct

SEQ ID NO: 425397 - DNA, 364 bp, Oryza sativa
tgcacgataagtgaagcgccaagttttgttacaactaaaatagttttccagccaacatgaatcagctcgagcgttgatgctttgcagctgggaggcgggaaagtttcttcgagggagatgctacgagcgtcaagtaaaaaacggtgccaacctgcaaaagtatattgaatcatcaagactaatatgtaatggggtaccaaacatttcagcctatgtaatgcacctgccaacgacaacgagcgtcactatcggccgtgacggctggtttttacttccaggaggagtaattgtgcccagatggccgatcctgtatcgtccagaaagcttttttcatcctaatcaccgcatttcagtacctattcat

SEQ ID NO: 425398 - DNA, 497 bp, Oryza sativa
tatgttgtgaagttagtataatgttttgatgtttctagatgtaactttatactgactgctcctctatatattagtttgttacttagtggaggatataggatataggacggatctaggacgccggtggaatgaccgatgaaccagctgtacatcagcctaggttgaaagagacctattgctggatttgctggttcagattatgatagcaaacgtcgtacccctccaccttctgttcatggaacttgattcaattagttttacgaacaattgagtccatgcccaataagctcaggtcttcggcgttttccacacttgctgcttgcttgattctacatgctcgacacaaggaatttcactgcgggaactgaggaaatggacaatcaacttaataaacattatttaaattttgtctacttatggtgctttgacctaaattccttatctgtagtgacaaaatgtgtgcaagctttctgagcttgtactccatattattatcg

SEQ ID NO: 425399 - DNA, 322 bp, Oryza sativa
caaagcaagcgagcgccgccctcactgctcttacacactgcaccacacgcctaaccaaccacgcgaacgaagcgcgcgcgcgctgacgtcatcctcctccgccgccatggcggcttcttcctcctccaccactcgcctcatccccctcctcctcgtcttgaccttctgcctcgctctcgcctcggcgtcggcgtgggcggcggcggcgggggatgacgacctcctggcggcggtgcgcgagccggggatggccgagtggctgcgcggcgtgcggcggcggaaccaccggcaccccgagctggcgttcgaggaggtccgcacc

SEQ ID NO: 425400 - DNA, 466 bp, Oryza sativa
tgacctgaaggaaaaggtggttgttctttttggtagaatcagacatttagaaactcaagagaaggatttgaataaccaaaatatgctgttatttactgctataagtgaagcaaaaaatcctgttggcacttccagaaagggtactgttggttctgaagatggtcaacattatgctatgcgaaagagcattcgagcttcccatagtttacattatagtaagaacagcttcttgtggcctgatgacacggatatatcagattctgagaaatcggaaggatctgatgcacattgggaagcatttgatgcagactacggagcatctgatgcagattgtgaatgctccgagaaggtcagaagacgtttgcacacagtgtccagccatatgaatcctaacccgagtagcggtactacacacaaaagtgcaaaatcagaaatggtcagtcaagaaaagatactttactggacc

SEQ ID NO: 425401 - DNA, 436 bp, Oryza sativa
tatcttgacaaaggaagagtttgtgaggattttttttcgatcatctgcagaaagatcgctaaactctcagatagctgcatgtatgagagcttccttatcaaggtgctgatcatggcaagcctgcatttgaacactgaggccagcctacataaatggacagagggatgaggccaagttggcaacatcttgtgcagaaaaaggagaacagcaaaaggagaggaagagcaagtaacaaagtcatgcctatatgatggggccttgagctgctgctgctgcttgaggatatcaagaagttcttcaccatgaagtacatgaagcttgggacaaagcctgacacattttacactgaagaagctgtcaggtctgtacttgcagacgtacctgctgatctcatcatacatgtcaacaccacatagtatcagctacataagttccc

SEQ ID NO: 425402 - DNA, 230 bp, Oryza sativa
ccgccgccggcgacgccctggacgcgttataagtgtttggagcagagcgctgagcatggcggagaggaacctcctcgccgacgcgtcgaggatcgccgagaggtgccgcaagggcggcaagaagaaggccgacgttcgctgcgccgtcgccgacggtctcgccggcctcggctacgacgccgccgtgtgcaagtcgcggggggacaagaccccctcctaccccgcaggcg

SEQ ID NO: 425403 - DNA, 267 bp, Oryza sativa
ccgtgttagctaaggcggtggtcggcgttttatttaagggggcggttcgttctgctacggaaccacgagaccaggtgttgtaatcgtcgctaccaccacgctggtggctcctggggtgcgcagactaatgcctggtgtcgttcaagagcgtccgacgtggtaatggaggatgggctacctgtacacaggtgtgaaggacgttgaaggcacttcaggcatcactctggactaccagcgagacgtgccagccatggagctggggacagg

SEQ ID NO: 425404 - DNA, 493 bp, Oryza sativa
  unsure (1)..(493): unsure at all n locations
aaagaagagtggttgagtgcatgtcggatagagtgtgtgcctatattcctgaggatcgatgntgnggcaaggtagctgggcaggacaggcatcggttccatgctctagtttcaaggaagacatcgttccaagtgcacggtggctgcttttgctgcgataatcccataacatacatcaacggagctgaccgatgtaagaagccaacattaaacactgctagttaccagcagagccaccctgaaaagctgaaagcaagaaaaaatctgagagaagagcaagctgacatacatcatggagatgatcctggatgcccttgcatcctacctcggcgagcagttcgccaagatggtgaaagacgaggcaaggatgctgcttggcgcttctggcgaggtcgagaagctgacaggcatgctgagcaggctcaagaagttcctggccaacgcggagaggcggcacatcaccgatgccaaggaaggagaatatgtgcatgagt

SEQ ID NO: 425405 - DNA, 421 bp, Oryza sativa
ctcactcaccctcattcatggcctctccacttcatacatgtcaaggaccagcagcatagcttaggagagatcgtcgtcttccgcccatggcaatcccgtgaagcctcgccattccccatgccgaagcaaccccgccgccgtagtactcgctataaatccacctcgccgctgcttcttctcggtgtctcgcattgccggacggccggcgtcgacatgaggctcgtggtggtgtggctcgccgcggtggcggttcttggtctggccagccatgggcgccccgcggcggcggcggagtcgacgacgctgtcgacggcgtcgaggtggatcgtagacgagggcgggaacagggtgaagctggcgtgcgtgaactggccgtctcacctggagccgaagctgccggaagggctggtcaagcaccctg

SEQ ID NO: 425406 - DNA, 487 bp, Oryza sativa
  unsure (1)..(487): unsure at all n locations
tctgttgtagcagacgccaaaaaaatgttttattttgatgggccgacccatgcccatccgcnntgaagacccctctagcgacatctggaaacctaggatctgacctacaaaaggcggaatccagaagttggagccattctaacatgcagcatgtctctctgctaaggtcttcctgacctttcaaatcataaggcccttgcctcactgaacaaaatattcaagtcactagaggatctaattcgcttgcaatccttatggtttccactcatcacagtgataaggcaccatattcttatggccagtgcttatatgttctgagcttactgtagtaacagcagggtggaagctggtgaacacgatctcagggaaggacacactggcggcttcgtacgatcttacatatgacaattctattattgccctagattttaccagccaaagatgcaaggggtactcattctgttgattttggacagatggacagcta

SEQ ID NO: 425407 - DNA, 463 bp, Oryza sativa
ggccgtcgacatgcagtaagaatgaagaactttattgctcaaggccgtcatttccattctactagacaatacgcaaactccagagtaaagacaagctcaattagagaacgaatgtgagcatgtctactgctgttgccataatatcgtcagtctcggcaaccgcggctgcagtagtgatgctcgctctgatcaagcgatgccgccgctacaggaggaagatgaagaagaagatgctagctaggatcgcccacgaggcgaccgaacagcaccgcgagatggaagcccgcgacgcggcggacagcgtgatgatcgagatcggccccgggcagaagttcctcaacgagatcctcagcgagaagccgatgcgcttcacctccgagcagctggcggcgtgcacccgggaactactcgtcggagctcggctccggcgggttcggcgtggtctacggggggagctgcccaa

SEQ ID NO: 425408 - DNA, 457 bp, Oryza sativa
ctagctagctagctagctactcctattgatgatatcgccggccggacatatgcgcaggatgctcggggactgccaggtcctgtcgtccatggccgccatggccggggccgcctcctccgccgacgcgctcttcgcctcgccgctcatccccaaccccgctctcgccggcttcatgtcctcctccgccgccatgcccttccaccacttctccaacgccgccgccaccttaatacctaaggaggaggggttgatgggcggcctccatgtggccaaggacgaggggatggacctcgagatggacatggagctcagtggcggctccggcagcgcccacctcgacggccttctcagcttcgccgacgtcgacgacgaccacaagccgcagcacagcggccatgaccagccgcccgacgccgcccagcccagcggcgccgtggggggcaacgccaagaagaag

SEQ ID NO: 425409 - DNA, 494 bp, Oryza sativa
caaatttgtcgcaatcttcaggaagtccatgaaaatccttgctatctagagaaggctgcttgaatgatacggaatacaggatgggtgagacaaattcacagattgatcttgtaactcatcctgtggatgatgcagaagatctggacaaggttttccgcagattcaatggagagacagagcagccagttactacagctacaatgggtaaggaacctgttgaaaggttaccctcacttgcatctattttttcagataagattgatttggcatggactggatctagtgagatacaagatgaccttctacaaggttttaccaaaattgatgagtatggatcgtttaatttcccagacaatccaagctatgggaattctgtaacccctgtcagaattcattcatttgattctaaatttgctatacaccagcgagaacgcaatggattggctcctacttcattgcatctgtcgtcattcagatctgctgaatactttggg

SEQ ID NO: 425410 - DNA, 258 bp, Oryza sativa
actctctctgtttgaagccacggggaaattgtttgtttgattgcttgccagcgaatagcgaggggagaagaagaagaagaagaagaacaagaggggggaggaggaggatcttccaacttatttctgtggatgatgcagaatatctggacaaggttttcccgaaattcaatggacagtcacagcagtcagcctactacagctacaatgggcaaggaacttgttgaaaggtttccttcacttgcatttattttttcagat

SEQ ID NO: 425411 - DNA, 434 bp, Oryza sativa
tgactccgccgccgcgcctcctcgcgctgtttatatgcgcgctgcgcctcccgacgcttcctcgctccaggccgccgtcgtcatcgcacggtcccgacccctccagtatcccccccatcccgcctcctcctccaccgcgtcgccgatggctccatgtcgtcgtcgtcgtcgcgcggtcccggctggctgtccaccgcgccatcacagatccagccatccctcataccggactcccccatcctgacggccccatcccagcggcgaggaggcgtcgtcgcgcgggagatgactggtggggagaggtgaagagggagaggcggatggcaaccctccctctgtcacgctcgctctccaatcccccttcacagtcgagccctgcgtcgtcgccttcccccgccgatgccaccacatcaaggcacctcacgcatggagct

SEQ ID NO: 425412 - DNA, 330 bp, Oryza sativa
actgcatcaatggccagttgaagttttttttgataagctcaggcgttcgcccgagagacgaaccggaggctatgaggtttctttggcgaggcgcggatcaccatgcacaagaccgcaacgaagtcgaagccaggggattactatgctagaccgtggtacggcgccgaccgggagctgtagctggagccgtctcctgtagccggcgacaatagctgaccgggcggatgccgcatggtactgatgagataccgtagggctgttagcagatcctgagaaagtcggtaataaccgggagcttgaggcaaaccacttctggtgtgtaacgctagc

SEQ ID NO: 425413 - DNA, 316 bp, Oryza sativa
gtttcaagtttctgatgtcaactgggagccttacaagggcgttgatcctgtatccattccgaagcattgcgctgctccggataacctctgcttctccagaacatggttggtcagcttcaacctcaaggaaatctacgccccggaccggttcgctcgccagtttgggcaagaacagcatcgcccgctcaacgatgtccccgcgttccagcggcagctgtggaacccggcagtggactggagcctgatgtacgcttcagagatcgaacggttccagcagctgatcaacgctgcagatggtggtgatcatggtcataca

SEQ ID NO: 425414 - DNA, 448 bp, Oryza sativa
gagagagagagagagagagagagtttgatagaggagtgagagagttcgctgccacccagctaacccactcggacggcaccaactgcggccatttccgacgacgccgacgccggggcgcgcccgtcggtgctcccaagtccgccttctctgcggatgagaagctgctccaccgcggcggcgacagtgtggtcggccaccgcctgagaccggagagccacagctgacggctcgggggaagattcaggtgggctcgcactagaacgaaagacagtccccatgggttctttggagacgacaaacacgcggttccggtcggccggagcagcggatgccacagctaagagaaggcccctgcaaagcagaagtttcaaagaggtcgacaaatttgatgtctttgtcctagagaaacgctctgggtggcagttccgggccttacaacttctgctct

SEQ ID NO: 425415 - DNA, 494 bp, Oryza sativa
cgagtggctatctagattgcgacacattattatttacaactgcacatgttggaagttccttcctcctttaggccagataccatctctcaagaaacttcatattgatagaatggatgcattagaatgtatagacacatctttctatgggattgctggttttccctccctggaaacactagaattgacacagttgccagaactagtatattggtcttctgtcgattatgcttttcctgttcttcgtgatgtattcatcagttgcccaaagctgaaagaacttccactagtctttcctccacctgtagaaatgaaagtgctttcatccaacattgtttgcacacagcatactgatcatcgcttggacacatgcattattcaaaaggttagtttaactagccttgtgggtattttccatctttggcacttggattctgaggaaatcgcagacaccagctttgacagagcaaacatgttgaacaatgggcttagagatt

SEQ ID NO: 425416 - DNA, 67 bp, Oryza sativa
ctcgagagggagttggtggagagagaaatagtagagagagatggcctttcctcccccccccgaggag

SEQ ID NO: 425417 - DNA, 447 bp, Oryza sativa
gttgcattgggagcggcggggtttgttttgttacggagccgttgtgtgctcggcgtcggccgccggtggtgaggatggcgtcgcgaaggcgaagacgaagtcagcggggagctcgaaggcggtcgctgtgcagggcagcacggccaaggctgatcatgttgaggattcagtttcatcacccaaatacgtgaaacctgccgttgcgaagcaaaatggagaggttgtgagcagagctaccaaatctgatgcaccagtgtctaaacccaaagttgacccgtcagttcctgcttccaaggctgaagctgatggtaatgcacaagctgtggaatcgaaagctgcactggacaagaaggaagacgtcggtgttgctgaaccgttggaagctaaagctgatgctggtggagatgcaagtgcagtaagcttttgcgatgatagtgagaacaagga

SEQ ID NO: 425418 - DNA, 490 bp, Oryza sativa
tgtcttttcaattagttatttatgatatgattatttgatagcactgttgctggcctaatcagtatttacttatcatcttccttgcggcaaggcagtctgagttctttttaatacattacacatcagctttgctatcctttttcttttgtaggacatatctagatgccttctttgggttcaacgtcgtcattgcacatggccaaacttccaaactgatccagtgaacaagcctatagatatgctaatgctcaacaaactaaaagagtcatacagccagataagaagtggaagttttgatgctgtcagtgttgttcattcatatgagcatgaaaaatcagttggtcatcagaaaacaaaagctatcggctttgaatgtacctcctatggggctactttatccaaaggttcttgtcccagaagaatacccttcacctcctcatcttgggtccaagattatgatgacatgttagaagaatcatggcaaacaagt

SEQ ID NO: 425419 - DNA, 268 bp, Oryza sativa
gctcgctcgctcgctcgcgctcacccgctctctttccccttctcggctcctcccccgctgcagcgccggtggggggtggcccccacggtcgccggcgaccggaatcccttcaccgccgccgccgccgtcggccgtcgtcgcccgtgttcggtcccgccgcgccgtgacgcgacgcgacatttttggactgggacttgccatgatctagtggagggaattttcggtattggcactggttggtggggtggatggatggatgaataaagaa

SEQ ID NO: 425420 - DNA, 466 bp, Oryza sativa
  unsure (1)..(466): unsure at all n locations
cgcctccgcctccccctcgcgccgccgtcttcgttccgcgcgaccgcctccgcctccgcctccgcctacgcctctgccttcccctcgcgccgccgcgtccacctcatcgccgccgccgtcgcttcgtcgtctcccagcgcctcagcctccccattgcgtcgtcgccgccgctgtcgccccgtcgtctcccagcgcctcagcctccccatcgcatcgtcgccgtcggcgagcgcacccatctccgcctccactagcgtcgtcgcctcgcgccgccacttccaccttcgcctccctccgtccctgccgaccgccgtctccggccaccagcgtccggatctggcccccatgtggtcgggggccgggatctgacatcccccgtgcgccgggcagcatctccgcctccgtcccaccgccgtcgtcgccgagcgccgncactttcgccaccgnctcgccccgttgctgacga

SEQ ID NO: 425421 - DNA, 497 bp, Oryza sativa
gtctcgccgaggcgattagccgcctcttcttcccttgcgccgccgccgccgccgcgcactgaaccggagacgaggtctttcccaacccctgtcttcatcgtgcgcatccttgccgtgcgccatgtttagttgtcttaaccctcgacgcctcggagccggacgcccgctgcccacctccacaccaccggacaacctctatccctgccgccctcctctccatcgtgtgcttgccttctttgttatctacacgcccgagaagagaggattcctaccgcgtctttctgttgtgccagtatcctcatcgatgaatgattttaccacagcagcaaagtggttgccaaatgctggtattatcccaggtttgcttttccgtctcctcttctcaaatcctttatgtgcccttgttcagattgcatttactttctttttctcctttctgctatcaaataggatcaatgaattgttccgtgaatgcttattatattatgagaattttt

SEQ ID NO: 425422 - DNA, 442 bp, Oryza sativa
aaattagaaaagccactttcagttatctaaaaccataaatcccattttattggtggcctctactttttactcctaacaaattattgacgacctcatcctacaccatgcagtataacatatgcgaccaacacaagtcccacgtgtcatcttactactggataagctcactagtgcctagtgatagctacaatacgtggcatctcgcctaatcagtccacgtcatcactcaccacccccatcacgcaaccccaccccaatcactcactcaccaccaccaaccaaccacagtactgctcgtgctcgtgtcgtgcactgcgacgccgaccagtcagtgctcgccgccgccgccggcgacgatgtccttgatccggagcatgaggtcgcgcgcctcggcgaactccgggaagatgtagaaggcgtggatggcgtcggggtagtccaa

SEQ ID NO: 425423 - DNA, 443 bp, Oryza sativa
aggagctacgacgcatgctccccgccgtcagctggtagcctcttgtgcggccgccctcgtcttttttttggtttttagcgcgggcttctttaagatgacagcttatgttcctgaaaagaaaaatgcttttcccgaaatgcggaattcaaataaaaatttcccgttgggggccacaagccaactttcctattggggcctcacttcttggcccgaaaaaatccttataaaccatactaatatttttccccttttccccatacaccattggaataattatgccaatggatttttttcgacgggttaatgagcaacccctcataattttccctaggggcaacggatttttcaaagaaaactggaaaaaaagaaatggggatatgaagaagggaaaatttgtggagccctgcatgcgccgcccggtgctaaaggcttcttggaatccg

SEQ ID NO: 425424 - DNA, 401 bp, Oryza sativa
ttgttaaattataaaagcctctttcatttttctaaaaccataaatcccattttattggtggctcttacggaaagcacctaacaaatcaatgacgaccacatccgacaccatgcaggaaaacatacgcgaccaacacaagacccacgagacatcttacaactggaggacctcactagcgccaaaggggagctacaaaacgcggaatctagcctaaacagacccacgaaaaaggaaccacccccaagacgcaaacggcccccaactacaaactgaccacgaccaaacaaccacagaactgctggagcccccgccgagcacggagacgccgaccaggcagagctcgccgacgtcgcctgaggcgcaagcccggaacccgagcatggggacacgcgcccggggaa

SEQ ID NO: 425425 - DNA, 437 bp, Oryza sativa
aaacacaaagatgactgtcatgttagataaatcagctttaactgaaacaaacagattgataatttacatataggcctgaataatacagtcctcggaacatgactaccatcagcagcctttgctgctgggagaggaaagtatacatacaaatgcgggctaaaagaatgcaaaaaaagacaagatgtatgggcatatactatacacaagactagcaacgctatccaaaagatgagattggctgtgcagcctgtccaggaaggcaggagcttcgtgaagtttcggcaccttccagccacaaaaatggggcaaaatgtgcgcgttcatgtgtcactcgattcactccaattatctccgtcttcatcgtcgcttccaaccgcctgtcgtatggcgttcgctttctctattatggcagcaactttcaagttccttgttgaggc

SEQ ID NO: 425426 - DNA, 78 bp, Oryza sativa
tttttgtttttttaattttctggggtaaaccctggcataaaattatttttctcaaatccttattacacagtcccaccc

SEQ ID NO: 425427 - DNA, 427 bp, Oryza sativa
ttgttttttttttttttttttttttttttttttttttttttttttttttttttttttttaaagccccaagaaacaaggattaaccccccaaggggtaaaaaaaagggcccttaagggggggcaaaaaaaactttttagcaacaaacggggaaaagcccccaaaaaaccccatcaccaagactccaggcaaagccccaaaatcacaaggttcgttacagccaggggggccaaggcccttttttggaaggacccgcgacaaacacaggatttggaaggtttacgggcccaaacacagggggaaggtcaagaccaaaaggggggggtcaataactccaagggtacggggggctaaaatgggagaaaacacagacccgactaaatttctttctttagcgggaagaccccagggggggaaaaaacaaaaccc

SEQ ID NO: 425428 - DNA, 70 bp, Oryza sativa
tttttttttttttttttttttttttttttttttttttttttttttttttttttttttttttttttttttt

SEQ ID NO: 425429 - DNA, 103 bp, Oryza sativa
ttgggtttttttttttttttggttttttttttccaaaaatgttttgaattaaaacaactttttttatatgggagaaacttaaaggaacaacaaggaccagaac

SEQ ID NO: 425430 - DNA, 368 bp, Oryza sativa
aacaaaaaaaagagagggaacgaggaccaaatttgcataccaaaccaggaccggccccatgaaatgaaaccaaaccaaacaggtgtccaggattccaggggtgagaagagacgagattggaattggtgacaatactaatgagggaccaagggctttggaacagcatatagatgcgggccttggatgaacaaaaaattagacctgttaacctggccccacagggcctcaatcgggggggggcaccattaaaacacttgcacagcatgcatgtaaaattcttacaaaggcacgctctgccttaaaggtcagagggaaactccaatccgaatgaagttaaaagttccaaaaatacaattgattacagggcc

SEQ ID NO: 425431 - DNA, 365 bp, Oryza sativa
tttttgttttttttgtctgaaatattgtcatatcaaaatttatcaggttcaagatttaaggttaagacttcctgtaatacattctcttcgaagaaaaataagctgatactgataggttacaggtggatgagccagccggaagtatggagggggcaatacgtgcacgattaccagatgacatggacagatggtttttagagtacccagttttcttttaactaatgggcgagttcattccaccattttttaaaaacagtctttgttgaatcaaaattgaaaactgaatttatgcgggagccttggtaaaatgaacatttcggccttttaaatgactgattgcatccttaaaaggggattttcccagc

SEQ ID NO: 425432 - DNA, 292 bp, Oryza sativa
attgtcacttatttcatcagaaaagaaacacatgctacatacaccacagctcacatccatataaggtgaaactacataattcaccaaataaatttaggtttcaacatacacatgttaattaaagaaatatcaaagctttaagacaagctagcttgcctaatctacaaattcagacagtcatgtgacatctcaacagatgaagcagctacatatatttcatcttaatatatctatcagcagaccaaagcaacaaattcttccatagatcaataattcaatatcgaatcagtca

SEQ ID NO: 425433 - DNA, 338 bp, Oryza sativa
atacacgacttaattcataataatataagaaaccaatcggaatatacagggggcacacaactttttctaaggtctcactggattcgaatagggggcaccgacccagaccaattttttgacgggtaaaacagggacaaggaaacgaaagaaaagggggggaaaaagaaaaagaaaaaggagaagacgagggaaacgaactttgaaaaatcccgggttgggcagagcatcgggagggggcggaggggagctcatcaccttgcaactttacacgtacactatgacccaggtgctgtggtcccattaagcacaggaattacatggcaaaagctggtagaagg

SEQ ID NO: 425434 - DNA, 315 bp, Oryza sativa
ggacaacatgcaattcataaaacgtataggattacacgtacgcacagatcgtgtacatactgaagaaaattaagcatagaacatgcacacagggagacgtgcaacataaagcatacacgttgatacagacgagagaatggagccgctgcatgtcgtgccgcatgatgtatatatttaatgtacttttgttgatatgatggctgtacctaggtcacgtgggttaacttactcagttgaatcaacttcacgattgcagctagcaatgtttaagcctcgcatcggatggactccaagccagcgatctgatttcaactg

SEQ ID NO: 425435 - DNA, 371 bp, Oryza sativa
gataagacccagaattcttttcctttcatttctgatttctgaaacaaggacaagcatgagtagtaaaaagaaaacctattctttcagagcaccgcacacctatgtgccttcaacaccagacagaatttcatttagtattccttctgggaaaatgagggagaaaaccttaaaacctcttttcagcagggaaaattttctactcatgaaacatccccacatcgctgaaacatcaacaaaaaaactcaatttgcgaagctgtatcttgatggctttgggcaaccacttcagccgacagtatgactgtctagcttaacaaattgagtttttttgctgatgattctactcatgaaacatccccacatggttgaaac

SEQ ID NO: 425436 - DNA, 368 bp, Oryza sativa
ggggacagcaacagaaatgcagtctcccagttccatttttcagggttcaacactccagtagcagtgtacactttcgaaatcaaataatggttcctcgcaaaaaagaaaaagaattgaataatgcatcatgcatgattgccttttagcctaaaagagggaataaaaagcggggaatgtacccaaaagttagtacacgaaaaaatggtcgcagatcaacaacggattaataactcccggaaattcttggacaagagcaaaaacaccactcaaaatcatggttacaagttggtaccggttccacatcggtaagggcacccgctaatggcgggggcattttgacaggggcagaaccattgcccccttccctt

SEQ ID NO: 425437 - DNA, 437 bp, Oryza sativa
gatacatattgcttaagggcacaaaatgaactacaaggacagtaaaccattaccgttgacaggaaggaagcctacaggcacatacccaaggcttcggggttcaaaatggacacaacctaaacatagaaccggactgtaccatggagccatttaaccagaatgcccacaatccttacagactgataagcaactaacatcacctccctgggatgctgaaggaacaaccgaacatttgctaccagccagcacgtgacagaacactgtgttcctcccaccagggaggggaaggaggtgcaacagcagaagcggcggcaggaggaacaggaactgcatcccacccttttgcagccacaggagctggagcagcaccccattccccagtcggtgcaccagggagggcaggaggctggacccctccaccccattgctggccaccc

SEQ ID NO: 425438 - DNA, 302 bp, Oryza sativa
aaccaaaaaaagacaaaccgcaaaggactggggaaaaggaaaaaaccgggaaaacactaaattcgccagaaaaaaaatggggaaagaaaaaaaggaaagttaagaaaaccaactcagcaaaattccaaaaaaaagggaatgaacgcgggggggcccaaaccaagatgactgggggggggacaacataactctggtgacagaaaaacccggagacagttagccggggcaaaaaaacaggacacgcaaaagtaacaacagctggagcgacgggaaaaaccaaaaagggccaaaaacaaacagag

SEQ ID NO: 425439 - DNA, 335 bp, Oryza sativa
ggggaaaaaaaaggacgtaaaaaaaaaaacccaaaaaataaaaaaaacaattaaaaaagggaaaggggaaaaaaaaacttggaaataaaaaaaagttaataaaacaagaattatccaaaaatatataaaaattgtgaaattattaaaaaattttttttggaaagtaaaaaaatattttttaaaaaaaacccggcgaaaaaaaaccggggcaaaaaaaagaatataaaaggggaccggcccggaaaaaaaaaacggggaaaaaaaattagcaaaatgtggtttaaaaaaaaaaaacattaagaaactctaattatgccaatattaaaaaaaaaaca

SEQ ID NO: 425440 - DNA, 220 bp, Oryza sativa
ataaatacgatccattgatttgcaaactgttttggagttttaaagcaaaacatatttgtaacaagaaataaaagaattgctcagagtgggaagaaccaaaaaaacatagatatttaggcacgacttattaagaataagaaaaactcaacgggtgtctgacactagagatctaccataaatagagcaggctaatagtaaatcgaatagactgacgcgaacg

SEQ ID NO: 425441 - DNA, 420 bp, Oryza sativa
aaaagaaataaataaccaatttatcgtacaccaagaatcatacatgcagacacgcaaaacacaaaaaagacgacgggaaaacgatcgagtaataacaaagttaaacagaaaacgcgaaagtaggcggtgatgtgactcagctatacttaaaacaaggccacgagccccgccgccgccaatgccaccaacgcggcaatgccggcgggcgcgcgcgtcgccgctgactcatcctccgacgccatcgccggcgcgagcgagggccccggcgacagcgagccgaggggagacagctccggtgccatcaggggcgacagctcgggcgccaagatgggcgccggggtcggggccacgatcggagccggcgccggcgatacgggcgctggcgccggcgatacgggagctggcgcgggggccaaggtc

SEQ ID NO: 425442 - DNA, 67 bp, Oryza sativa
tttttgataagtaggtttgatcttttttttttgcccaaaaaacggcatcaggtttttttggatacca

SEQ ID NO: 425443 - DNA, 422 bp, Oryza sativa
aacaaacgttgtttgccaatatatatatatatataatataattatatatccattcactagcaaagcaggagcaacgccatcagtcccagacagcccaggctcagagtaaaaaaaaaatcagaagatcacgatactggcgtatcagctactactatctgctatggtagccagccgtcatgtgacaccaccactgcccaagacattttctggggcctatcacctgtacaactaatctgcgcgttacttatgcgtgcagattaccagcaaaaacaaaacccgtaattagtagtattggatgctcccgctcagtaataaaaggttccttccttccttccggatggctacctatgaacctttctcctttgtcgcactagtatgctacgagctactactaactaacactgatgacagtacttggcaac

SEQ ID NO: 425444 - DNA, 395 bp, Oryza sativa
gagataaaaggctcatcattttgattctaaacttcattaaattgacgaggttacaaagacaatttcgaatgacaaccacggaaggcgcaccctgccctcagcaatgcacctactcagatatgtaagaaaaagttacacgtatagaaatttgttaaactccttagaaacgttgattagtcaaaattttgtaaggattttcgttggtgtcctaaaaattttggaagagttatttaaagttcctatagcatcctccaaaatatgaaataccgaatgtttgtaattaatcataagttgtcacgggaggagcaggcgcagtgtcgacgacaggaggagctgatccggccgctgcataggtcttatcgggggttgatccggctactggagatgtctccttt

SEQ ID NO: 425445 - DNA, 287 bp, Oryza sativa
aagattccaaagcttacatgaatatccgtcaaatatcactatcaacgaattctttcaaactcaaattagtaaatacgcagaggattaattcgtaagaaaaaaattcagtgttaattagttttcacttccaaaaattcatcaattaagtagggagagaacggagggagaggtaaaaatattataagtaaataagttgaaaaaaatcgatcagctagaagttcttcttggcctggtaggtgttgccgtaggtccagtcgcgaggggcgacgcgccaggaggtggccttg

SEQ ID NO: 425446 - DNA, 413 bp, Oryza sativa
ctggtcaaacacaaaaggtacgtacacttatttcttcccgtacgttacatttcgaagccagctatgcatggttcggttcgtcgactgtaccatacgtagcataagtccataatttggtttagatttgctttgctccggatcccacacttccaaaatgtaaacacgatcatactcgcaagaaacttcatttctacaaaaactgacacacaccgaagacatgctctcttttgtattacaccttcacaagaatactagactggtcgtgttgatctgactggcaaggtcttcctgtggatgctcatgaacttggcaacaaattcttccagtttcaacagtgcacttgcgccaacgggcaatctcttatcatagtaggcatgccaataataaacctccctctttatactagattggat

SEQ ID NO: 425447 - DNA, 297 bp, Oryza sativa
aaaaaaaaaaaataagaataccaaccaaagagataaatttaacttaaaaaaaaggaaaccaaaagaaaaaacacgggatttttaattaagtacccaccaaaaaactggaaaggaaggaaaaaaatattgtacacaccccaaagatttttaaaaaaaaaataatttttagcacttaattaaataggagggatttctttagtctaaggttttggattaaaaactaaggaaaaaaaaagtaacagggacaaaaaatcaacccttggaacgggaaaaaaataaaattttaagataactagg

SEQ ID NO: 425448 - DNA, 300 bp, Oryza sativa
ccaaaatataaatatttttagctataaatctgaacaattgattcatagaaaaaaaatgttatattatgggacgggggagttactaccttacccccaactgctgcaacgatgaacagcaatcttttgtatcatgcaaaacaaaaccaaaatcctcaccgtgatacaatgaagtagtaggagctaaaatgctttgcctgcttccatcggttgagatggagcttttgcttgggatgagctcccagtttgagccacaccgtttgtcatctcttttctcgcaatgcaacgccagcttgtctcgtg

SEQ ID NO: 425449 - DNA, 296 bp, Oryza sativa
gttttttttaatttttttgttttttatttttttttaatatttattgttatttatttttaaaatgcaaaaaaaaaagaaaaaaaaaaaaaaaaaaaaaatacttaccaaaaaaaaaaaaaaaaaataaaaaaaaaaaaaaaaaagaaaacaaaaaccaaaaaagcaaacactaacaagaaaggaaacaaaaaacccggtgaccacaaaaaaaaaaagacaaccgaaaaaaaaagcataacacaaaaaaaaatgaaaagaaaaaccacaccggggggggaaaaacaaacagccaaggc

SEQ ID NO: 425450 - DNA, 188 bp, Oryza sativa
attgaaaaaaaaaaacatattaagtgaaaggtgagaaactaaagaaagggcaaatatttaaaaggggaacagaagtcaaacgcatcaaaaaaaaaaaaccaaaaaggggaggcccaagggaaaaagtaaataaaaactaaaaaaatttgaaattttgcatgggaagagaaggactttttgtttgggaa

SEQ ID NO: 425451 - DNA, 267 bp, Oryza sativa
aaaaaaaaaatcacaacaccaaatttcaatggacagggtaaaaacccgcacaaaaaaacacactaccgggacaaaactaaccttttttccaaaacttggacaaccaaccacgggggccaaaagaaaacgtacatttatacgggacacggacgaacaattaatggaacgcggacaaaaacgcacacttttctgcaaagaaccccaaaggagggaacctaaaaaggttaactgaaggggaaccgtccccatggaaaaacgggggggggg

SEQ ID NO: 425452 - DNA, 430 bp, Oryza sativa
tttttttttttttttttttttttttttttttttttttttttttttttttttttttttttttttttttttttttttttttttaaaaaaaaaaagacttggattaaattcccaaaaaaaaagtttgaaattgggaaaaaatttggaaaatgggggaaaaaaaggaaaccaactaaggcccttttattcaaaaaatatggaaaaaaaaaaaaaaaattgggaaaaggaaaaacaagaaataaataaaaaggcggggtgggtgtttcaaaaagaaaaaaagggaatgctatgggagatttggggatttttaaaatttaagggggattccctaaaaaggaggacctaaattttttaccctttgggccaaatatttccctgaaaggatttatttcccagaagagagccctcattttaccagttttttccggggttt

SEQ ID NO: 425453 - DNA, 173 bp, Oryza sativa
tttgtgtttttatttagtaatgtgattttttttattttattttttatgttctttatgagacccccctataggaatgttaaaaccgcatataaaaatattcgatccatgaaagcactttatggcagttcaaaaccacctttacttgggggcatacaaggacatcccagaaagct

SEQ ID NO: 425454 - DNA, 409 bp, Oryza sativa
  unsure (1)..(409): unsure at all n locations
aatataaaacgagcagaaactgttaaacatgactgcacgatcacttgactcggtttgaaatactttacattgttctgcacacatttccttcagtctttgtaggtacagttgttaccggtttcaccgttattatcatacttggaacggcatcatgtcaagtactccatatttgggtgttcatcctgatgtctgaataactgacaatatatgtaccgggtgtttattttcacttaattgtgtctaccatgagcagccaaatcagctgctgcctgtgctgccctatggagagcatcagacagcatcatagctcctgcagagaaatagctgctggtcatgatgccattcacaaccttaactgctgttcttcctgtggcggtggcgacggncttggtcgnctcggatacgtggt

SEQ ID NO: 425455 - DNA, 439 bp, Oryza sativa
gcataaagagcatctttattcagagaactgcatatacaaccagaggcagtcaagtttataaaatttatatgtacaaaaaatattacaccgacatttacactattaacaatttaacaattatccttacacagttacactacaagacaacaaatcaaaggcacccaggctccgataaaggataaccttacatcacgtgtgatctaatgaaccaggcatgtagatccacgggtgtcatcacctaactagagtggcacaatggagataacccaccgtataaaaggctgatatttatcaatgatacattgaaatttagcttctgtcgaaaattgcttatcaaagggttgattacgtgttgggcgcatgaattaacaggatggatcctaacctggatattgaggtgggcattgaatcttagccagctcttatgaaagcatacatc

SEQ ID NO: 425456 - DNA, 118 bp, Oryza sativa
gttgttttttttttttttggtgttttttttttttttttttttttttttttttttttttttttttttttttttttttttgtttgaaaaaaatgactccaattcctgtatgaacggaagg

SEQ ID NO: 425457 - DNA, 355 bp, Oryza sativa
  unsure (1)..(355): unsure at all n locations
gttgttataattattcacggggtttcaattgcttacattaagctacatgatctatgtctaatccttacagaaaatggttgttggtttgtacaagctcaaaattcttacaatgtttttagaataatctacatacatgaacaaatcattaacatgcaccgaagaaaaaaaaaaggaagaaagaaaatggacacagctaagcgtagttcggagtccggcgtcgtggtgaacaccggcttgtccttgtccaccaccgacgccaccgccggcggcgcccgagagggggctttggcgctggcgctgccggtggagctgccgctcttgcggcgcggctnngtctcgccgaccatggctatga

SEQ ID NO: 425458 - DNA, 251 bp, Oryza sativa
  unsure (1)..(251): unsure at all n locations
acaatacgtttgggggacaaaaaacaagccacctaggccaagccccggggccaaaaaaaaaaattttaaaatgggctaaagcttaaaaaaaggcccctgggagcctcaattttctgggggccctttttttttagaggcaaaccaaaaaaaaagcctctgggggggacccttggagggggatcccccctgggaaaaaaaaaacatttgttccctngccaacaagagccccggaaaaaggggggggggaaacc

SEQ ID NO: 425459 - DNA, 343 bp, Oryza sativa
  unsure (1)..(343): unsure at all n locations
tttttgtttttttttttttttttttttttttttttttttttttttttttttttttttttttttttttttggggctcttaaaggagcaaatatttttcaaacttgatgaaagggggacccaagccattatttatagggggggggccttttacaaactttaaaacccggataaaaaggaacccctcaaaagtcaaaaggtggctggggtttgggggcccaaaggaaccccccggcctttaccccccccaanatactcccccccaaaatttcaactttggaaaggctttggggggtgctcaaaaaccaaaaattttgggggggacctttttaacaatgccgggctg

SEQ ID NO: 425460 - DNA, 385 bp, Oryza sativa
  unsure (1)..(385): unsure at all n locations
actggacttaccagattgtacattgatcatatgaacagtaatacagtggactatatgtaaatgtaacttctcttttctgtagtctgtcaccaatgctatggtcgaaacaggcttggaagacttggtctcggttcctttgaagaaagagcaaaaccaaaaaaataatctgatctccaattgagccggaaagatcatttacaccatgtcattggagtggcagctatgcttgatcatttacaccatgtcatcctatcttagacatttgaattacatttgtgaatataaattgcgaccaagagaagattccacgaattatgtacacatgcactgtgatcagcaagaccagaataagaactgacctgtcaatgnactgtaaagtgtaaac

SEQ ID NO: 425461 - DNA, 433 bp, Oryza sativa
  unsure (1)..(433): unsure at all n locations
tttgtttttttttttttttttgtttttttttttttgggttcaacttccatcattcctttgaatttagggatctattaacagggacatagcagtaaccacgaaatacatctacttgtacaatggacacaccccagcctttggctacccaaaagaaaaatgtagcactctattatggcagaagaggggctataactgtaccaaaggacaccttgctaaaaacacttcaaatatccaggtgcctcagaagttacctcctgagactccaggccacttggcttctttctttcttcttcgctgtcgggaggggtcacacacgtcacagggntcgcgtctttggaggagcggcagatcgtatcaaggcccaatttaagccttcaaagaaagggggttgcttgatttcagctgctcctctcaatgatccaaggctgttctt

SEQ ID NO: 425462 - DNA, 316 bp, Oryza sativa
ggggccaaaaagaaacttggaacccctttattacccacgaacactgccttccctttttccactatgcaagggagaagaagtacccccttggttattcattcacaagcatcaaaattttgggtaatatttaccaactcctcccgtggggttggccgatgagatccctcataagattccatggttcattcacgtcagggaacattttggattccgctgaaatacacctcggcttgggtcttggcctatgaggggggtacttctatggcgggaggccactgggagaggggggtatcctacctccctgcccctacttggc

SEQ ID NO: 425463 - DNA, 346 bp, Oryza sativa
ctggggaaagggccccctctttttttccgagggaaaaatccagggaaaaaaaacattgggttttaacatcaattaaggggggaaagaaagttgggccaacacacggaacggaaaaggggcgagggcactccatattcccttggtgaggttggtcacggagccatccaacagcttggatgccctattgaaaaacccccaaacataaagggcggcatataacaagcggaaatatcccgcgggcaaggcacatctatggtgtgccctccagaaaacgccaaaaaaagaaggggacagaatctcacaggggggggggcccggagccctaatagggggtctttcaaggggg

SEQ ID NO: 425464 - DNA, 403 bp, Oryza sativa
tttgtgtttttttttttttttttttttttttttttttttttttttttttttttttttttttttttttttttttttttaaacaggtaaaaaatttcaaaggggtttttggggccggggggggcaagggattttaaaaaaaaaaaccgggagggccctgcccccccgggggggattaatttaaaagccccacaaaaaaaacgggggggtccgggcaatcgcccccggggggggtgattatgtaaggggcccccgggttccgggggccgaaaatggggtcaaagttcccccgcatggaccccctttcgccctttttacggcccatggtccaaaccccgggggggccccccccccccatggacaccccccccaaaggttccacaacgggaatcaaacccaggggggg

SEQ ID NO: 425465 - DNA, 435 bp, Oryza sativa
cgcgacgccgagctagtgcgacccggggagctctgcgacctcctccatggccaaggcggtgctgctccgcaaggtgcggggcaccgagcttttccgagagccccgcgaggtggacatcaatacgttggaacaaaactctcaaaaacccggattcaatgaccaaaggaaccaaggatctcaagtccagatatagatatcatgcttgccagcggtagcaagaggtgcctaaccccacaccatgaactttaaactaccgacgaagaatggccctgtaggatcggcaagtaccccatccttcttcaatcttgaccatatgtaaacagacccatcattagcaccagcagctatggagttttcatcagggcttatgcaaggcctgccccagctgctaaccactctgttacccatggccttgaattttccacagacttccat

SEQ ID NO: 425466 - DNA, 406 bp, Oryza sativa
ttggttttttttttttttttttttttttttttttttttttttttttggtttttttttttttttttttttttttttgacccgggggaccaaaaaagattgcctaggatgtttagcacccccaaaagagagaggtgtccctcccatacaccagagagggggggatcagttgttcagccattacagacgcaaagccggcacaacaatgggttggaattccgcccgggcatgcatttttaacgacaaccaagggcaaagcctacttgaaaattaccgggggcccaggggggggtacaaggaaaccatttttccctccagatttgccagctattgaactggctggcatatacacaaacaagggcgaggaaaccgtccagcaaaggggggaggctttgggaatttggctttc

SEQ ID NO: 425467 - DNA, 408 bp, Oryza sativa
tttttgttttatcgacgaacttgtccatacgttcatatgccagagcatcctcatagctgaggctggagcaatagcaccaaggagcaaacaagtacagtagatagaaggtactagcagcattttcagaacagtctaaaaaccaggtagcagtctagggcacaaagaaccaagaaaatcgacgaggaggatcccaacatatggatcaactacaccataataaatacattcttaaactgctctagaacatattacagatcatcagctatgggaattctgaattctcaggagggagagggttatgacggcggtacacaacacatcaactggaaccggaagcatgtcccagggaaagaagcggcttggctaccggtagcatcatggacctgaatcttcttgcctcgaggatgg

SEQ ID NO: 425468 - DNA, 404 bp, Oryza sativa
gtgttttttttttttttgtggggtctttttttattattttcatgaaaacaaaaacaaataacagatgaataaatgacaatggatcgtcttctgggagaaaagatgaacatataaatgggataactacacctcttaggccttattatgagaaatcgtgcgcaacctgcaacatatcaatctatcagctatcggacagacatacaggtatgcagcctcgctgacagggggtccctatcaaaaatgtaaaggtaacagacttgagcaaagtgattgatcatcttaatcgacaaaacagctccctttgacaccatcatacacccaaaaacgggctccaggacaccggggacacctccaaccgctaaaggagcccccgggcacaggcaggttttttccaccatcaggaa

SEQ ID NO: 425469 - DNA, 187 bp, Oryza sativa
gttgttttttttttttttgttgtttttttttttttttttatttttttttttactggaacaaaccccagggccaacgggtacagagggcccaccggaaggaacaccgaaaagacaggccaagtctaccggcctgaaggaacggcgaacaaagcataatccaggcgagacagcgtcaagaacagccaaa

SEQ ID NO: 425470 - DNA, 413 bp, Oryza sativa
tttgtttttttttttttttttttttttaagaaaaaaaaacattagagggccgtaactggcttttaataaggaagaacattgtatgtacctttctgggcgatcaacctcccatgcactgatgcacaaatatatcccggacttaactacaacaattgggctttctttttgctaatcatccaagaccaagacgcctatatatggccgcttgcgagaaatattgataaaaacatacggcactggatgctctccccattctccccatgacccgtgtacatacagacaccatgttcgctagttcacacgtatacgcacatgaaaaggcagagtgtgcgcacaccatgcaggacttggcgcagtaggctagccccctcccctggaggcacaatcaaactacaaacctagggtggtcggcc

SEQ ID NO: 425471 - DNA, 200 bp, Oryza sativa
ttgttttttttttttttttttttttttttttttttttttttattatttttatattttattttttattaataatataaaaaagtaaataagaaaagaaaaaagaaagaaaaaaaaaaaaaaaaaaaacagaaaaaaaaacaaaaagaaagaaagggaacaaagaacaaaagaaaacaagacgaggaggaacccaacaaaag

SEQ ID NO: 425472 - DNA, 376 bp, Oryza sativa
acaacatcaatacattaaaaaggctttagtggcaaccccttacaggggcaggatattgggaaaagagctacatccaactgatcagcagcccctctgaagtacattcctgcttgaacaacagaatggtacacataacatattacacagccagtacacttatgttgcttgccatgcatgaagaacttgtgttttatgaaaaggtgatccaaaccacgggaacctatgttacaccacctgcgtggacagggaccgggacaccgaaacatcagtcctatgcaaaggtcataggattgcaggagacaccctcaaccttgaaggttgcacgagggatgtatacttcatttgcaggaacaggagccaccttggtctcgggggt

SEQ ID NO: 425473 - DNA, 380 bp, Oryza sativa
  unsure (1)..(380): unsure at all n locations
cgaggcattaaaagtccaacatatacatttcactaacagggggttatacagttcttcaggggcacttggcctatgaacagcagttctacattttttttttcggttccaggtaatgcacaagaaaaacacagggatccctgcatttgaagcacccctccagcatgtatgttacctctgagttcatgtcaaggctattcagttccctggccagcacaaattcagcaggtttttagccttggccaggctgaaatgcctaagtactcgncattgctgaatatgctgctataatgcaatgccgattaaatagcaagccggtaaactacccagtttaatttattttgcaatctcttcgagctttttggggataaactttgggttag

SEQ ID NO: 425474 - DNA, 140 bp, Oryza sativa
tttttgttttttttttttttttttttttttttttttttttttaaaacaatagtttaatttattagcaggtaaaaatttcttgaaagaatcccatcgactcacttgggtctacaggcctggagttatactttttgcaacac

SEQ ID NO: 425475 - DNA, 350 bp, Oryza sativa
agaacttccaaaaaaggaagaacaaggacatttatttatttatttcccgtaagggaaatcccccggggactgagctaccttgcaagccatttttaaccataaaacccaacatcgcgaaacaaatttttgactgaaaacgctaagtttgggaaaagccagcctcccccttttgtacctactactactactgggaacctattgggccggacttcaagttacaaatttgacttcaagaggggggtgctaagtgggggcgctaaatggtttaaagccaacttttcctctgttgggcaccctggcacaatgtgtttaacaacccttctcatgctgactttcaagctgcaaccctg

SEQ ID NO: 425476 - DNA, 397 bp, Oryza sativa
  unsure (1)..(397): unsure at all n locations
tttgtgttttttttttttttggtgttttttttttttttttttttttttttttttttttttttttttttttttttttttatcacgggggcaggggggggacccaccaaaccccaaggggcttaaaaaaagaggcggggggaaaaaaaaaagggggcccgaccgggggaaggccaccgaggacattgggggggggggaaaaggaccccaaaaaaggggggaacaggggctcgccggggggaaccccgggaccaaaaacctgccctcctgagagggggggaaaccctgggcccctttgcacaaagccggcccaggggaaaaaaatcccggaatcggncccccacccggccccccgcccccccnnnccannnccaccccccccccncccccgggggccccc

SEQ ID NO: 425477 - DNA, 475 bp, Oryza sativa
cgcgatgacgcgaccgcagcatgggagcctttgtgcggccgccctccttttttttgtgtttttgtattttcagggggacacaaattgaaggccaacggaaagaggaaccaacaccatgccaaaactgataggagaccaagcccaacacacatgagggattaaggacaaagataacaacataagtgttgtaagcaatagagccatataggagatcaaaacatgaaaacccactggggtggacaccctgagacacggtatgatctgactgatttggatgaccagcgacaacacacagggttgtcacagttggcctccacttaacatgtgatgcgcaattacggtagaacgcttctgggctttgattttgtgacagactaaataagccggcacatccataggccaagcattcctgtcattgcaaaggtaccgccaagaactgcacatagtcgggtgaggaaatgcaggaagacccttc

SEQ ID NO: 425478 - DNA, 472 bp, Oryza sativa
cgcgatgccgcgtccgcagcttgatcctttgtatgcgccgccctttttttttttttgtgctctaaaagcatgggtgccagcatatattcatataggatggctgcaatcctaataataagaaaaaagaagcgctcaatacctccaattggcaatttcagaccattgtattcagctgaacaaaagccatgttcaccaataatcaccacaagagcacttcccatccttgaaatggtggaagcgcttattacctcttacgataatgctctctccctacaatcctcgacatgatcttgatagcactgaggcagactccacagcacctgaggttctcaatgacgcaaagagaggttccatgctggggggctcatcaaaccataggcactcgctagcctctccctatggcacaggagcgcctggccccttgcctcccgtccactgcaaccttgaacagacccggacgcggggatatacc

SEQ ID NO: 425479 - DNA, 412 bp, Oryza sativa
gttgtttttataaataatggatttttaaccaaaggtcgctttcattttgttaaaaacgcacaaaaccattatataatgggtgtcgggaaaaagatagggccagaactcaaagagaagaggctcactcgatcggccaacagcaagcgtcgaaccggacagagtgagggtagggtgtctctagaatacgtacgggggcttgggaaactgggaggcattagctaagtgtagatgagcacgaaatgcaagggctaggcacggtaggcaaggctacaagggagggggaggaatttgcggaatcacggggggggggatcatatcccataaagatgggaaaacacattctttgttgtacactcaacgcttacaagaggatgagaagggcatggattgatagactggcaagccacgccac

SEQ ID NO: 425480 - DNA, 423 bp, Oryza sativa
  unsure (1)..(423): unsure at all n locations
gttgtttttttttttttttgtttttttttttttttttttttttacagggaaacaaaaaagggcactagtattgttatattctgcccgaattacattgtgggggaggaactaaacacgtactggtggggtccaatttaagggcagcgggcagggaaatgaaaagaatgccctatgtcccaggaatagttacggtaagaagaaagaaaataaacctgggaatatatctggtggaattggacaattatgctacgggggcaatggtcacaagagggtggctatcaaccatgggggcaagaagagccaattcaccctgagccctagccttggacgaggccggttcatcagaaatcggctccctgngacccagatgccatcaaccctatcancaatccgttttccttgggctggaatcatgccggaggg

SEQ ID NO: 425481 - DNA, 354 bp, Oryza sativa
gaaacctcggaagatgaaccttaattatcggagcatggggaaaaacattgtgcttttaggatcaaataacaaagtggagtctgcaaacagaaacaagaactggttttacatgataaccctgtttggacttaggggggcatggatttggcccgcaaatcctattttattgggggctgaatacatggaacaaagggggtcatgaccactgggtataggatggggcccaaatttatagggatatccttattggacccttatcctataaggattagaaacaccttgacaaggattccgggcaacttccaatgcatcccttcgggaaaccctgaccaccaagaggaaccgtcttgctgg

SEQ ID NO: 425482 - DNA, 386 bp, Oryza sativa
tttgttgtttttttttttgtggtggtttattttgagcacattcaccacgtattcaggtgcaaatgccacttattcataaagacatctgtactcccccagtaaacggttcgataaacatcacaaattgatcgtccattgggtgtacacaaccccggcccaaagcgggatctgtgccccctgtacccgtataccagaggctggggccgacccatgcccattccatgccaccccctactgggtgattactgacccccacgggggcggggccccaggaggggggggggctcgttctggatgttcccaaccgacagggggcgatcattctacagctgcttggccacgacaccaccgcccttgcggggcgccgggaactgcaatgctgggct

SEQ ID NO: 425483 - DNA, 412 bp, Oryza sativa
  unsure (1)..(412): unsure at all n locations
agaagtgtgaagtatgtataaaaaggataaaccaaatcgaaacataactgagcataagttttgcattgaacatcacaataaactgggaatactacatatgaataagcacccgatgaacttttttggtgctaatcttcaaagagggtaattaacaantcctctaacgtcaacctataaaaacagtttgaaattatccccttttattggttcccaattaatcttgatttcaatcgatccttaagatgaataccaagtcgcggcttcaactagtacacatcagatatatgagcatgtatcaaaaattccccccggccactttctgaaagcaaacttacctatatacgctcttcatttctaccacttgccgttgcagcttcagatgttcatggccagaaatgatgttgatgctatt

SEQ ID NO: 425484 - DNA, 126 bp, Oryza sativa
tttgtgtttttaatttttttggttttttaactttttttattttttttttattttaaccgttcaaaagaaaaaaaaagaacaaaacaacaaacaggggaggcgaacacaaaaagaagccaaccgcag

SEQ ID NO: 425485 - DNA, 237 bp, Oryza sativa
tgtgtttttttttttttgggtttatcattttttaacacactctcatcgtatcacgctgttattgctagtaattataaaacaacaacctattgcagtatggatcggttcgataaacatcaaccaatactcatctataaaacaagaaaaaacctaccacaaaacgggacaggttgccgccttactggtgataccttgcctcaggcgatcccataccacctatgcggctattgcgaactg

SEQ ID NO: 425486 - DNA, 301 bp, Oryza sativa
ggtgttttttttttttttgggttttattttttggtttattttttttattttatactcgggttgagaaacgaaaggaaccaagcaacacacagaggaagcgccaaaaaaagaaacaaacaggcagaggggcaaagcaagcaagcccccaaggcagccaggaacaacccaggggcggcccccgacaggctcagacagaaaggaaaaacgaaaaaagcctgcgcggacaccaagcaagcaggggggcgggaacacaaaacccacgagcggggggtgagagaaagcaccgcagaaggcccagggg

SEQ ID NO: 425487 - DNA, 273 bp, Oryza sativa
tttgttttttggcacaacctggcccatggcaaggatcagagggcacattcaacacccgaattggtaactaaatagttacaagctactcattcaagaataactaaaaatagttacaatttaatggagttttcatcggcgagcccgggaggctgcccgggctagctggtgcggtggctccgcccttgcttttaattaaaggattattgtgtgatgcttgtgctttcgtctagtaagcttgtctgttggtctcatattatcccattattacattat

SEQ ID NO: 425488 - DNA, 124 bp, Oryza sativa
tttgttttgagggacaaccggggccatggctcgggccagcgggtacattggacccccgtcaaggtagctaaattgatacaggctgccgatccagggctaactaaaaggacatgcaatgcacacg

SEQ ID NO: 425489 - DNA, 443 bp, Oryza sativa
tttgttttttttttttttttgttttttttttttttttttttttttttttttttttttttttttttttttttttttttggaaggggggcaacaaccaacaggattccattcgcctaagaaaaggaccaatttacaaggggggaagggattttacatggatattcaaaaagatgtcaggggggggccccagcgttacacaaatttatcagggccataggggggggggccaattcttaaagagaaacatagcccaaaaacctaccggttttaaaactccggactttttggtgacattttcccatcctccggggggggaccaatagtaggggcccaaaaaaagcatccacaggggactgccgggttaaaattcgccaccaggccaagggtttaaccttgttaaaaatcaaagaaaaggcccaggaaatttttaggcacatttatccc

SEQ ID NO: 425490 - DNA, 332 bp, Oryza sativa
gggggacgagacatcctaaattttttttcaccaggaatttttttggaaaaggcgaagcttataaaattttttcaaaccctggggggggaacctttagcaaccctgaaaagggttcttttaaggggttccaacccgggggaacttggatgcttttgggatacaaaaagagggcaaagagctggcatgcccaagctttttttgctttttccacccgaaaaccaaggttacgggggtaggcatgaaacttgacctccggtgtcccccccccagaaagggagaggggggcccccacctgatgaatacccccatggggagacaccacctcaagattg

SEQ ID NO: 425491 - DNA, 252 bp, Oryza sativa
gagaacaaccgccgtttaatggactttgacaatgtatgcgacagcagtattgctcactgggctggctacggtaagaatcaacacctacagcaggtgggttggtagataaattgatacttaatggaaagagacaacccggcatcttaatgaagcatggtggcttaaagataagcttactcctggcagttattatgaagaggatcctgggctaccaccaagtttatgagagctcttaggacgcggatgtgaaca

SEQ ID NO: 425492 - DNA, 404 bp, Oryza sativa
tttgtttgtggttgttttttgatgaacaacactgcagtttcagggcaatacatttaaaacaatcaatgaaaaaaaataattcctgccctagggccttctgcataaatgcgcatgtcctctatcatgacaatgcattggctcttccgtgatcaccatcaacaattcgacctatacgcacaaacatgcatgctcctcgccctatcgccctctaaatttgcatcgccaccgctttcaaaaatgcttttaattaatacaacttttttatctgtagaacctataggatcacattgaccagaacccggccggccacagatcaagatttcttgagtaaggtacctatggtgttgaacaaaaaattagctcacacagctacaaaataggaatcatttccggctagccgtgga

SEQ ID NO: 425493 - DNA, 427 bp, Oryza sativa
gggctagaaacgataaataacattacatcacatagtttcatacaccacatatgcattaagttgaacaaatcttaaggaaataaaaacacacattgtctcatacaagcaagcccaaatttgtccgaccaacaacaatgatagatggaaaagagatgtggctcttccccctttggcatcgaggaccaaaaagagataaattaaaattggagagagaacctaatgccatatggagtgcaatcatcatgcccatcatcaccactatcaccatgtcccacaccttccttctcctgaacaacaccactactagcttcgtcggcaaagggatcatcgaacactttatcactttcattgacctcggagccatcgggggagcaaggaaagttgtagtctgcttcttcaattacgctcgccccttcctggctttgat

SEQ ID NO: 425494 - DNA, 402 bp, Oryza sativa
atgcacccgaacataggattgttgatgggaaacacatgcatttgacaaaagggacactgacctccacaaccagggggaaggaacccctagtaattaactattcgacactaacagcaacaaagattaacacaaaacatcaatcaatcaaatggaacaaattagtgaactcagtgcaaaatgataaacgtaaaaggcccttttctttcacgttaaaagacctacacaacaaacagcacggtcgggtcgtgataattaacaaatttagacactgtcaccaaagtaaaacacaaaattagtaaataggactgtgcaaaagaaggaaaaaccaaatgcatgggcatcccaaatccctggacaaccgggaggaaagacttgacattttacagaggggtaccaggactc

SEQ ID NO: 425495 - DNA, 385 bp, Oryza sativa
  unsure (1)..(385): unsure at all n locations
attcaaaaaaacatttattaacaccaaaatgaacatggaactagggtttgggttattttcaccactgcatcactgggacagggaggcccattgtaaaaccatgctgttcatgttgggaggtgagtttggaggccaatccccatcgtttggtgcttaactgattttgctccggggaaaactcgcaaacgtttttattgacagggtagccgagggcatcgatgatcattcgggagttttcctttaagaaacgaacaatacccttcacgaactggggcatttgctcatttgngacccactttttgatccgagccaaccactgggggaaactgtcggggaccttttccgtgatttcctggtggagagcgttgatcacgggggaagcaac

SEQ ID NO: 425496 - DNA, 450 bp, Oryza sativa
ttgtttttttatatataacacaagaacaccatcatatataatttattatctaagattcgtaacaagctccgtttaagaaaaactcccgagatttctacctaaatcctaggcattattagtaagttctataacaagcccaataatatagttccataaactatgaaataaagagcatctatctaattagcatctctaaaacacaaatacataatatatttagcacggtcaaaagcttggattggcattgaattcttagttggcgtttacaccagcagagtctaggaggaaaccagggtgcagggcctcttgatcttcaggtttgggttttacctcttggagcagtttgacacactcctctattttggcagacaacatgtttgatgagtaaagtagcatgaccacttcagaattacctagctcaagtaacattccagtgattttactggcaag

SEQ ID NO: 425497 - DNA, 104 bp, Oryza sativa
ggccgcccttttttttttgtttttttttttttttttttttttttttttttttttttttttttttttttttttttgggctagggaaacaacacggggattagggg

SEQ ID NO: 425498 - DNA, 430 bp, Oryza sativa
gaaagcacattatggtattttttttttttattgtttaacattgataacttttgctttgtttgtgttttcagcagaagggaaaggaaactaccgaggatacttattcaacagtttcggaacttttatgactgaccatggttaatggggtcaaccaatctttccaccttacgtttttggttacccatttttttttaaccccagcatacttcccaagagcacaacacctgcttacaagcgaaatgcctaactaacccggcgggctgctttacaaaaaaaccaaacaaactccttaacaggataaaattccgcggtaggaaaacaaagtattgaagtgttcccagaggtcccatccaactaaacaaacactcaataattttgcctcaacggatcctttggccaggggagaagatatcaaagtgtaccttcctta

SEQ ID NO: 425499 - DNA, 337 bp, Oryza sativa
ggaaaaaaaaaattgggccccacaaaggtcaatttaaaccccgaaaggcaaacagaaaaaccctgggggggcttggttaaaaccccccaaaaagggttccccggggggggttatttcttttcccccgggcccccccaaatttttttttgggggccccccccggaacaattttttccaagttcccgccccccccaatggggggggggggaggccctaccttgggggggggggggggggggggggtccccccctttttgaaaaagggaacccttaccccccccttgggggggggctttatgggcgggttacccgggggggggccccaaccccttatttt

SEQ ID NO: 425500 - DNA, 448 bp, Oryza sativa
gctcgcgatccaagaagcgccaaaggaggaagaagactcctctctcttctcctcccttggctgcaattgcaatactgcaatacagcaaatccatatccagagaagcggttgaattccaggagccgtgtttgcgcagagaacgcatgctgcttctggaatcgtttcctgcctacttttcttctcctcccgtttggctgggcgccgctgctctctccgcctcagctcctcctcctcctcctcgtcgctctcttccctgtcgcggctgttgcgttttgccagttagagcccgactgcgtcggagccgtggcggggattgttgttgccggtgccaaaaatctgatcttggcgaaggttttcgggtggaaagcatgggttctcgctaactgccactctaaaagccgtcggcactcctgaagcatgagaggcctacccttcattcacagcgctt

SEQ ID NO: 425501 - DNA, 239 bp, Oryza sativa
acaggcacacttaccactaatgaattttttaacttcccagtttgtgggaaggaacagtccatgaacaactggggaaaggttttgctcttaccttaccaacggggtactagaactactactactgggaaataatggccagtttggaaaactccagcccgccaaggagggaggcaccaacaatgggtccattattgggtaaaaacggaaaatggacctgtgaaaaacaaagtttggttggg

SEQ ID NO: 425502 - DNA, 377 bp, Oryza sativa
agcatcaaaaccaaaaaattattattagtaggggcttatgggccatcaaattaatgaatacacatcatgcctttgaaactgattttggtaattcatgatgagatttccagagttgacaacaaatcacattttttttaggcgacaatgggaaaatgggttttagactaacaatttcacttgggtggaaaggtacatttaaaggtttccaaggtcagaacaacatattcctttgactgcacacagtgcctccaggtactagttaaacaaatggagaacaggaattggggaatcaccgactggaggggctattttttttttccctcaaccaggcccatcttccagcgaattgcaaaggggcaatttacgagacatgggtt

SEQ ID NO: 425503 - DNA, 279 bp, Oryza sativa
aaaaaaaaaacaaaaaaaaccccaaaaaccaaaaaaaaaaaaaaatgggaaaaaagggaaaaaaaaggaaaaaaaaacaagaacaaacaaattaaacacaacttttcccaaaacctcaaaaaaaaagccagattgccccgacctcccccatccccaacccacaacaaggttctttggggccaattgggggcaactggccccccggggggcccccggagagccccgggaaccccggggggccccccgggggaaacccgggggcgcccccgccccccggcc

SEQ ID NO: 425504 - DNA, 418 bp, Oryza sativa
attcaacaggggttttatgtcattgccacagaaaaaaatgcgccaacctcagcaatagccctatggaagaagaaccaaccaaggcacaagctgaacgttaatcctgtcaatttttttacaaccttactaatgacccccatgttcttatttctgtgagattacactgaaaatctactcttatctctgcctacagacaaccaaacacgcaccccaaagccttccggtaaatggagggaaactctattatatgcagtgacagggcatatatgttaattttagttaataccgtctcataagaaatgcactgtagtttcatttttttgccaacacatccggaatatgttgacataatcatgtcggagagaatggccctgagcctcctgtaccttgatctgggcaccattatatgatccctaca

SEQ ID NO: 425505 - DNA, 380 bp, Oryza sativa
  unsure (1)..(380): unsure at all n locations
aaacagcggtttcatttcttttctatgttttattttttttttttttttgcagaagcatagggacagacgagccgagtaagttaaatttcaaggtagaggatggcacacatgagcagccacacgaaaagaccagaatgctctgggcggggggagaatacactgccgcattacaaattcccaatacacgggaatggaatacggccttaaaacggtgcagctacatgactgctgctatatgatatgacaggaacacacacagctgttcatgcataatgagaactgaggaatacaaggcctctaggttcacattcactgatngcttgggaaatccctcccattcactatcttgtggaggattgggcctgagcactactggaccc

SEQ ID NO: 425506 - DNA, 434 bp, Oryza sativa
  unsure (1)..(434): unsure at all n locations
aatccaacagtagtatcatgtcattcccacagtaaaaaatgcgccaacctcagcaatagccctatggaagaagaaccaaccaaggcacaagctgaacgttaatcctgtcaatttttttacaaccttactaatgacccccatgttcttatttctgtgagattacactgtcactctacttttaacctccctccagacaaccaaaactgcctcaaattcttcctgtaattcgatttctcctctattatatacnatgaacacacacactgatcatcagaattagactgtatataaaaatgcctctagtttcacctacactgctgcctcctgaaatttctcgcattcatcatcttgttgagcatggccctgagcctcctggaccctgcaccggcctttatcatgcccttcctcccggccttctgcgggtttgagcacag

SEQ ID NO: 425507 - DNA, 74 bp, Oryza sativa
acaaacggaaagaagggggcaaaggtgaaaaaaaaaaaaaaagaaaaaaacgggggggggcggggggggggggg

SEQ ID NO: 425508 - DNA, 448 bp, Oryza sativa
acagcaacaacagcatagcttgccttatttgtttgtttccacaagatgaaaatgtcagcggaccaggaactgccacaagagaaggcggcaattagctctgccaacctgggcagccagcccccaaaggtgcaaatactccccccaacctgcccatttccgcttggtcccaacacgctacaacaaagaccacaagcccccctgggtacacgggctgttttgttaagtactcagcatactatttttacaactagaagcttttgttggatttctacagaatgctcgccaacgattaacagggcagataacctggcctaaaacaagcaggttctccggatgaagccacatcgttcaggcgtcgcatgctaattttagttcaggattttccaaggaacaacgggacgcaggtcattgaatcatcggatcaccagaagaaactgtgtgcatgtgc

SEQ ID NO: 425509 - DNA, 445 bp, Oryza sativa
tttgtttctgaaacaaacatctttattattaatgaaaataaattactagctaatacatataataataccattccagtgaatttataaaagcctaataaatgaattaactgctaaaagaaattgattcgccgaacatggacaccatgcgttatcaagatgtacgtacgtactaaggcatgacttggaacaaattaaactgtgctaattaggctagaaagtatgagaaaagccttttgaacccccccttgataccgagacatggctgagactccatagctataccagacgctgcctgcagcgacctcttgtggaggcgcttgcaggtgtcgtcatcgcaggggcaaaacacccctaggtcgttcaggccaatgcgatggatggccggtttgttcaccaccttgatgtcacaacggacgatgatggagtcgtcgtcctccccaacata

SEQ ID NO: 425510 - DNA, 339 bp, Oryza sativa
ttgttttttttttttttttttttttttttttttttttttttttttttttttttttttttttgggactgaaacatttttatttcctcatcctttttattcattcctcccaaagagacggatccatggaagtttttttgcccttatcaggcaaggaaagcacacacacacgggggcaggggaagggttttgaacaaaaccttaataaacattcaaagctaaaacaaacaaggggaccaaaccaaatccccaaaaaaaaaaacccaggggaaaggccaaattttttttttgtccccaacgcctccgtgtaacccccaccttttggggaattttttttaccct

SEQ ID NO: 425511 - DNA, 422 bp, Oryza sativa
aacaaaaggactgcaaaattttctgccttaggcagaaagtttggcttaggtttggccaaaccagtacaaaccgaacccccacatttgtccttccaataccgccataagaatttcaaagacacagcaaataattttgaggtactgtgccatgttggcacgagggaaacatgattgaactatctgctacgagctcacgactaagagtccatgagcacatacaggacaagaaaatacaacagttgtggtggcaagccgactgaagggtttgaccagcgcatcccctgggaacgagcgaaattgttctacaccactacctataaccaccggcacctaccaaacattcaaccctttgagctctacctctgttgaacatgattgcttagaagaacataagttacaacataaggactatagggcatgga

SEQ ID NO: 425512 - DNA, 125 bp, Oryza sativa
gtgtcatatttttttattttttttttttttgtttgtataaaaagaaaaaaaaaggctatttagggtaattacagaacccgggtaacaatattacaatcaggaagtgtaaaatagtatgataacgg

SEQ ID NO: 425513 - DNA, 279 bp, Oryza sativa
ggggagtaaggtttatttactccgccaaccccaccccactccttatttttgtttggctataatgtggaaaaagttaggggaattagtaaaaaaagaaattttgggtgttgtttaaaaaaatgaaaggttttttttttgtttataaaattaaaagttaaatatggaatttaagatgttagagttggtgtatttaataaaagggagagtggggtaatgttggttgttttatggttaagggtagtttattttttgagggaacgggaattggaaaaattggtt

SEQ ID NO: 425514 - DNA, 259 bp, Oryza sativa
gatatatacttaaactaaacgtggccttggtcaatctacgaacaaaggagacagtgagcaatgttttaaagacgatcaaaaaagtaaggacggagaccccacactctcttcttggcaacagagcatctttgtcattcttaccgcctccacattctttaatgggaagcactctaacctcggaagttccagcactggaagacagccatgaccaactggccacacagcgacgcataatcgcggcagaccaaaccttgtccat

SEQ ID NO: 425515 - DNA, 433 bp, Oryza sativa
ttttgttttttttttttttttttgttttttttttttttttttttttaaaaaggcaaatacagctcctcattttccatttttttgaagctgatgaatcaaatgagcacaaaccaaagaacaaacagcacaataaaaactacagccctagccactaattaaccacatccaaagctacaggctacagattgggcgccggggagacatgaacctataaacatttgctactcgctggagcttaaatggtttagaacgttaatttgtttccaatcgaatctacatacaataatttgtagacctacccaggtggttaacaaggtaaccgagggtgccggtgctatcgacgctagtaccgccggcgaaaaaggggtaggggaggatctctggaacggtgggcccgttacggggctgcctcgagagcttgttcaggaaggca

SEQ ID NO: 425516 - DNA, 432 bp, Oryza sativa
tttgtttttttttttttttttggttttttttatttgtttgttaagatcattgtatggagtatagccaactggtaattgatatatggtatttgagaggtcttcacacatgtgtcacggctaaaatcccctgtgaacagacatatgctttgatgcactgctattaattactaggccaaaagggtaatctggctcaaccgatggaatcccctatactagtttgagaccataaaccccacaacaaatcctgctaagtgacggcatataatattatggaaacacagcaggattctacaaagttggaaggtgcttgagtaacctcccacttcttatgccacagccgttagtcgtgctgggcagtctagcaccgggagggtggggggtggaacctaccctaagctggaacgttgatgtagtcagcctgagacttgcaga

SEQ ID NO: 425517 - DNA, 440 bp, Oryza sativa
aaagaatatatgtaatccattaattggttgtaaagatcattgcaaggagtatagttgcatgaatcttgtatatatggtatctatgtggcctacaaacatgtaacacagctgatatcgctgtgaaagaatatgtatctgcagcctagaatactacccaaagcttctctgtccaatgaggaatccagataataatttggcaacttataatcattgcaaaattgagtaatcttatatctgagtctgctcttgcaaagcaaagcagctccaaaaaattgcaggatgcttgagtaacctccactgcattatcggtttttcttcgaaactttcgggttcttgcacatgcggatgcttgcaggagtaacctccactagctcatcttcttgaataaactctatgcagtcgtccagactgtagcttaacgcttcatcgagaaccactga

SEQ ID NO: 425518 - DNA, 514 bp, Oryza sativa
ttcattgcatctccatcatctccccatcctcgggtggactcgtgtcttccattggtgcatccctcgcgcgcatctccgacgagctctctactccctcctccgccgccgacgatgattcacctccactccccgccgacggcgcccgccgcattcggcggcgccggctcggcggactggcggcggcggcggcggtggtcatggtcgtcgtcgtcccgcgctccggtggctaaaggtggccatcttcgtccgtgcgtttggcggcgcggcggcgacgacggcggcggcgaggatcatcacgccgacagcggcggcggcggcggaggaggagcggcgtggagggcgcgggccaccaccgccggcgtgtcgagctccagcagtacagccaaagggctgcaagccaacatcatcgaacatgagaccccccggatcacgaaatggcccaatgaatcacgcgacctcgacgatcaccaacataacaacgaggctgatgaggaggcagatgatgagctgcagc

SEQ ID NO: 425519 - DNA, 287 bp, Oryza sativa
tttctttgtaaggaggagctcccacgtgagcggtgggcttttttaaagacgggcgccttctaacaacttagccgaacatggcggcggattacaacacaaagccgcttgctgagaaggaccactcctcgtaatgcacggtggacaaagacaccggttggctcgtcaacaacatcgccgtgcactgcaatcccaactgcagttcgaactctctcgccccatccagaaaacatttcttcaatgtccacaagggaaccctcatgtatcatcagcccaaccttaagtacatt

SEQ ID NO: 425520 - DNA, 233 bp, Oryza sativa
tcggtttacgggaccaagccggcatcctcacgcagggtctgcttacccgctcggagggagaagataacacgaagaactaacaccaggaggaagaagccacgctaagacgaagctgattgaggaccacctcactgacgaccatagacgacgagttcaaggaggccttcagactgctggaaaagacatggcatggttggatcacaaccctacaatttggaacacaaatacctgca

SEQ ID NO: 425521 - DNA, 391 bp, Oryza sativa
  unsure (1)..(391): unsure at all n locations
ctgaatcaccagccgccgccaccaccgccgccgttaaactggccgatggcggggggaggcggcagcggctctggtggtggagggcagctatanctactcccacagagacattgcttatacctatccaaattctactacaataacttccagctcaatctcaccggcattagacaatatacacggactttcaaagtctttgaccatcttataaacttgtcgcttgatgaagctctttaattctaaaaaagagcaataagatccattgaaactatcatggaaaaccatacagctagctcttattgcctgtagcgatacatcatcgactcttaaataaacaaccctattaacaaactatatttccaacccccttcacatcaataaagcataaacc

SEQ ID NO: 425522 - DNA, 199 bp, Oryza sativa
agcagttctgttctctctctctctctctctgcccatacactcggcgcatcgactcctcaggcggcaacagcggcgagcggagcaatggaactataccaaaacctattgatccaattgcgaaatgttgctgctgttgataccttaattttcaactaactgctactagatttagcttcttagatgacgcatttacggattg

SEQ ID NO: 425523 - DNA, 434 bp, Oryza sativa
tgttaatccattaagtgagcgcaaggatgttccacatgaagtagctccaaatgctaatgctcaggtacctgcagcagcattggtaaatcatgctcccaatgtggaccaaatccaagagtctggcttacaaggccagcaatttggcaatgacgacccctggaaagtagtgacaaatacacatgctttgccaccgagacctaagagggtagcaagcagggaaaacatcagcccgaaggatccacattctcacaactctttattaaattgcaaagggccagatctgaatattccggctgaagatgttgctctccaccaacaatcagatcacaaggacgcccatacagagcatggtcgattcatcaaaggtgatgatatgaccagcccagatttggtaagtgtcgaggacagtttacctacatctaatacaaagtcat

SEQ ID NO: 425524 - DNA, 480 bp, Oryza sativa
tgtgctctctctctctctctctctctctccccctccctgccgctgctgccgccaccgtcgcggcggcgccccgattcggtgatcccccgctcgcccatctccgccgtgacgtatcggcgacgcggagggagccccccaccccccacctccggatctagggtttcgaggcccaggtggcgttgcgctgcgcccccgctcctccgtctctcctccgccgccgagggttcgcgtgaggtttctgcgtattaccagctctgtacttaatttactagtgagaagcaaaatgaagtgcaatgcttgctggcgggagttggaagggcaagctgtatcaacaacctgcggtcatcttttatgtacagaggatgctaagaaaatactgagcaatgatgctgcatgcccgatttgtgatcaagtgctctaaaaagccatatgagacctggtgatacaaattcaaatgatgattggacacatatgtcaatg

SEQ ID NO: 425525 - DNA, 500 bp, Oryza sativa
ttattctcccactcccagggttttagctagggttctgtgtcccccgcatcgccgccgccgccgccgcgagccatggccgacgccgccgcccccggagaggacgacgccgcgtgggagcgcgccatcgcggcggccgtcaagaacgcccccttctccgcccccaagaccctaaccctcgacggcgccgtcaagtccaccaccggccgcctcccctcgccgtcgctcctcggccgctacccgtccctcgaggagctctccgtcgccggcgcccgcctctcctcgctcgcgggcctcccgcgcctcccggcgctccgccgcctctccctccccgacaaccgcctctcgggggccgcctccctcgccgccgtcgccgagtcctgcggagccacgctccgtcaccttgacctcgggtacaaccgcttcgccgacgtcgccgagctggcgccgctcgcgccgcacggagtcgagtcgctcgacctgtaccagtgccccgtcaccca

SEQ ID NO: 425526 - DNA, 454 bp, Oryza sativa
ttgttccattgcatgcactcatcatttcttgggcttcttcctcgccgccccgccccgcccgcacgccatattcttcttgcaaatcaattagcaacagagctgcagccaaattgtgcagattaattagctgtggagcgagctgttgctgacattgattttgttttgttggatttgctgtgcaggcggccactcgacatcgactacatacacagcagcagcagcagcaagagggcgccgcccaaggacaaacccgccacttccgactgccctgcgccgccgcccccagcgtattacttcaagaataagcccgacgacaatgccgccgtcgcatccgccgcctccgctggcgccgtcaactacaagctcttcagcgagctggaggccatctacaagcccggcagcggaggcccccagacgggctccggctccggcctcaccggtgacgacaatgcca

SEQ ID NO: 425527 - DNA, 262 bp, Oryza sativa
  unsure (1)..(262): unsure at all n locations
ncttcggctcgcgtctgtccactggtcaacaactcgtgattcgcacggccgcgcgcgcgcgcgcgcgccgcgcgttccgcattcgtacatggccgtcgcgaggctggtggtcatcacccccgccgtcctcctcggccgcaccgcccgcgtctcgccgtcggcggtgccgcggctgcggcccatcgtcgccggccgccgcgccgtggcggcgcccacacgcgccgtcctgggagacggggcgggtgtcggcggcgaggaggat

SEQ ID NO: 425528 - DNA, 396 bp, Oryza sativa
tcgtctgaactgaagcaggggaggggaggagaggagaggagagagcatcgcgttcaccgttgagagaagagaaggaagtaagacgagcgcaatgcgtagcgtcacggtgctcgttctgctcctcgcctgcgcggcagagcgcgccgccgtcggcgctgtcaccgacggactgctgccttacgagaacttccaagagggcccacgcaattgggaccttgtgaacgtcacggctgtgcgacggggcgatcgctatccgaccgtgggatatttaccgtgttcgtgcagcgcatcgagtctggcgacaagcaggagctcatggtcttgatggtgtcctactgcgtgacctccgtgcgcctccccacccatgcgaggattcgctaatgcgtcttatttacc

SEQ ID NO: 425529 - DNA, 434 bp, Oryza sativa
tcgttccgattcttccggcgaggccgacccgacacgaccatgctcgcctccgggcggtctctccgccgcctctcctcctcctgctagtcctagaccttgtcccccgcctcgctacgccgactcctcctcctcctccaccgaccgccgactacgcccccgccccctcggactgctctaccgcccttccaaaccctagcccgaggcctcctgccgcgcatcgcggcgcggcctgtgccccgccaattctccaccgcgtgctgctcctgcacgctttgacgcgtgggggaatgcggcgcccccggcgccaccgccatacccgaggcggagcgaggcgaggaggaagagcgtgagggggaggatggaggcgaggccgacgcggcagtggaggtggcggccgcgaggcatgacacggacgcgtacgcagcgggggagct

SEQ ID NO: 425530 - DNA, 273 bp, Oryza sativa
tttgctttaaacctcactctcggcaagaacaggggggggtttataagataatgcgggggaccacccaccccacgggacctaaaacgccatattgaaccacacaaaaaactcacccgaacaaccttagacacgacgccgagcactgcaggacaatcacacctgacagcgaaagcctccatgtggactactggaccaagctagcatctggctagaccacagagaacacgattcaattgcacgagccagcctccctcattgagaagacctagaaaa

SEQ ID NO: 425531 - DNA, 323 bp, Oryza sativa
attagtgtatatggcaccagagtcttgtcatggaggagatatctcaactacgtgagacatatatagtctgggtattctaatcctagaaattgtgacaggagaaaaaaaccaccaaagcagtgccgatctttctggtcagcggattattcatagcgtacgtaacaaatggtcaaggatgtcgaaaataacatcaaggtatccattgctggatacacataggcttcaacaagttcattcatgttctaaaattgagctgaattgtgtggggatagatcctaaaagaccgacctccgcatgaaaaactgtcaatatgctatcatggg

SEQ ID NO: 425532 - DNA, 504 bp, Oryza sativa
ttcgctgccatccgtgccccgcccccccgcgtgaaccaaaccctaactcgcccaaatccgcctctcgatctcgcctccgccgtccgccgtcgtcgccggcgtcgtcggccgccaaaaccctaccgcctctcgtcgcctccgtccgccgcagacgcgcccggtatacaacagggtgatcgtcggttgaaaatgccatctgcatccaaatccaagtccaaagacaggtcagctgccaaggcaccaaaagagcaacctaaggttgcagcatagcctatggggaatggcacagttgcaagtgcctataacaacttctctggaaaattccatctgttggagccatcatcttctatgctggttagccagggcaatgacaaattaaggaatacagacgagatagatgaacattctcgtagcttccatggtacaggagactctgattgtgcctctaacaatggtagctgttctggtgagtcagaagatccacaggtaaaatcaacgagtact

SEQ ID NO: 425533 - DNA, 336 bp, Oryza sativa
tcggacgcgcgcgccgccgtctccgcctccgcctgcgtctctatcccatcgcgcgctatggactccggcggcggcggcggcggcggggcgctgaggccgtcagcgctggacctggtggcggcgctgctcacggggcggggacgaccggaggaggaggggtggccgccctcactcgccgagaaccgacagctcatgagcctgctcaccacctccctagccatgctaggaaggtggagagacccgctgctcgtccgacgatgctacatctccgggcccggcgtgagggcgcatgagctctagaggaagacccccgaccccgcgaagaggcagcaagag

SEQ ID NO: 425534 - DNA, 404 bp, Oryza sativa
tcgtttaactccttgggacagcttgacactgcatggcagagggtgggtataggtggggacagaaagaaatgggctaggaggccaattgcatcgtggggatggagtccgactgtgcccaaggagaacggtcacaccaccgttggcgccggggcggaggccaaggccgtcgacgactgggctgagatcgccgtcaccgacgccgctggggatgccaaagccgacgccgccgcctgcggccgtagacgtcgaccccctgcttcagggcatctccgacgccatgcgagtggaccaccacttcctcaaggaaggcatcatgttcaacgacattacgccactagtgctgggcccggcagatgttaaggacaccgtcgacatgttcgtcgagcgctaccgcagaatggtca

SEQ ID NO: 425535 - DNA, 290 bp, Oryza sativa
ttctatgtttctcccccaccattcccacatctgggcggcgtcttggtactctctgtggtggcacatctccctctcgcttgcacgcctcctccggtttggcggcttcttctgtagggttggtctcgactcgactcgtcgaagggaagctgctcccatgaccgcggccgacgctgaggcgtgcgcggtggccgcggcggcggacatcatctgctcgctccgcggggccgacctcgccgggtggacgccgccgtgggggacggctgccgcgaaggggaaagaggtggtggtgg

SEQ ID NO: 425536 - DNA, 360 bp, Oryza sativa
gctgatggagcggcacacgatacgcgccgcgcggatgggctcccttccctcctgtgcgggctccgccttcgccgccgccgccgacgccgtcgattactcgcttccgcctccgcctcaaccccgttcgtgcccaaccaaccaaccggagagttccttcatacacacaccactcgcagtctcagcagcagcagcagcagcgcagtccgtagcaaagctgctgttatcttcctacatgcggatgcagcccagctagctaagctaggttagctgctgctgctggtcttggaggccaactagtgtaatatgtgccgtaccgactgcctttttttattaaccaaacccctgtcaccacttaacccg

SEQ ID NO: 425537 - DNA, 541 bp, Oryza sativa
tcgtctcttccacccccaacatctccctgaattggggtgctttcgtggcacagatggagtgcgcaagccataaagatcgagccttagcttcgagctggaatttatcggcggatcggctggcattttttcagtttgtgcgcgcgcctcaagctcaagaaccgggagagagatgagctgcttcccgtgctcggggtcgtcggggaagggcggggttgacgccaagagcgtggcggcgctctcgccgggtccgcggcccgcggcgagcgcggcaccagatcgatcaaactcatcacgtggttcaggcattaagaaggacgattctgtccgaagaggaggaagctctgcgaatgatggtccagccaaaattttcactttccgagaattggctgttgccaccaagaatttcagataagactgcctgctgggtgaagggggctttggtcgtgtctttaaggacagatggagaatggacaggtttttgccgtgaagcaacttgacagaaatggcctacaaggataccgagaatttctcgtggagggtc

SEQ ID NO: 425538 - DNA, 336 bp, Oryza sativa
ttcgctcgccggcggcgaccaagaaaccacgcgaaggcgtggcattcccgagcggcgagggctactacctccacctcctcctgctcgcgatcctgccaagcctcgtcgcgcggcgcggcgcggcgcatcagggcggcgtcaacgagaagcagctcctgctccaggtcaagcgcgcgtggggggaccccgcggcgctcgcgtcgtggacggacgcggcgccgcactgccgctgggtgtacgtgtcctgcgacggcggcggcaccggccgcgtcacgtcgctgtccctccccaacgtcgcggtcgccggcgccgtccccgacgccatcggtgggctga

SEQ ID NO: 425539 - DNA, 150 bp, Oryza sativa
tttatatacgccaacgatgcggcgcgaaggtggagggattgattgaacaagacggtggtggaaggcacgcgcatggcggcagtatggccagccgcggacctgagggagctggctgtggccacggtcgccggcgtcgtgctggaccacccg

SEQ ID NO: 425540 - DNA, 255 bp, Oryza sativa
tgctaatcaaatccacccactccccatccaccggggggcttttttaaatcattcgtccgtacctcacccgcatgtataccaagctctatactccctccttcatcaactactatgattcacctccactcccctccgacagtgcccgtcgtattccctctcgccgcctcggatgacatgccaccacctacagcgacggccatcggtctacgacctccctccctcctctagaaaaaggtcgccatcattcacacgtgc

SEQ ID NO: 425541 - DNA, 374 bp, Oryza sativa
gagtgatacagggcttctgcaactggccactggggggataggttcctgacaccgccgctgacgattcgtgatgctactggtgaaaagacattattcacaagtagactaaaggttggagaatttattaagacatgagtttcagatatggatccgaacacattcttttctatgtttatttggaagatccctgctaaaggacactgtattcaaagaggaggtggacaaaagtagaaggaatttttgtcttatgcaagagcagactgaccattttggccctgcaaggacaggaataacttgtgtaaacttgagagagagggaatcattgaatcatctactgcacaagattgtgacctctgctgcaaaaagtctgattt

SEQ ID NO: 425542 - DNA, 386 bp, Oryza sativa
tcgtgataattcgaagcaaaaaaaggagaacaaaggggatggttaaaaagaataggtaaacaaaccctagccgcaccgatcgaagccagtgagacgccgccgacggctatgcgtgaggcgaacgtcggtgaccacgatcgccgccgccggcgcacccgcatccagtgaaaccctgcactgtcgtctcgttcggttgtgaggagatgagggcggcggcggcggctgcggggcaaatcgatccgtcccctggggcgccggctaaatccctgggtgaagaggctgttcgagaggcagctgctgcgggtgtcgcctgcggagaggctcccgactgtcgcggttgtcgacgagaaggatgagtccgcggactcgaacttcgtgtgcctgga

SEQ ID NO: 425543 - DNA, 406 bp, Oryza sativa
tagtgagggaacgggagcggtagcgaggtcggggcggatttttgtaacacgtaggctgttaagcccaccgctccctatccatttgcaaaagaggacctcggagaagacgacgggggggcgcctctcgccggaactgctgacaacctctggctccccctaaacaggacattaatgctaaaagactgcctacacgaataaaccacaaactgagcaagccatacgttgaacgcactatagcagtccaatatctcagaggacggctatggagagattagcacaagttgcaacagtgtcggcggccacttaagctcaacagcagagatgatgacccccataaaaaaagcgtccccagatacatactgcactacccgcagagatggggctatctttaagccataaatttcaa

SEQ ID NO: 425544 - DNA, 206 bp, Oryza sativa
  unsure (1)..(206): unsure at all n locations
tnctcctcgacacgtggacgcagccttccgtggggggtttgtaaaatacaaccgacggtacctaatgacaacccaaaacaaagcgggatgcattagctctagcctgccaccgatcagtaaccatatactgataccggccaactaaatacataccaagatccgcgtttaatatgcagatgcaatcacgaacgaagccaccgcctgcg

SEQ ID NO: 425545 - DNA, 401 bp, Oryza sativa
  unsure (1)..(401): unsure at all n locations
gttcttttctcctcctctcgtgcgcctcctccccctcccccaccctcgccctcgcgatcccaattcgatccgctccggcctccccctcgatccggcgncccccgccaccggccctcgccgggcgcggaatccgcacgcccacgcccggattcgcgcggcgccggccgcggattcgtggtcccacccccgcccgccgtcgccggcgccggagaccctagatccgccttcgtctccgccgccatggtctggcgcatgaccggtctgtccgcggcctcgcccggggatacaatcctagacacggaaaattgtacactggaagaacttcttgtcgcggatgaaattagttatgagcgcaaagctctgaatacacgactcataaatttcttgcgcgacagagccca

SEQ ID NO: 425546 - DNA, 280 bp, Oryza sativa
ctaaaagaaaaggagagaagaaattgagaattttttttcttggatagtgtttaatgtgttgttgtgaatgatgatggcataggggttgttttgggatgaggggtggtaatagctggatctctctttcttggcctctgagctgcacttcacggcggttcgctccaaccccctatgtcatcctgcctcctccccactcctcttcttctcctgtgacggcagatatgtccgatttctgttcttcctgtcggtttgctctcccgatgctttgctcaccattgcc

SEQ ID NO: 425547 - DNA, 497 bp, Oryza sativa
gatactcaacatctgactgcccaattgtggagatatgggctggtaataaaataaatcgagaagatcgaacatttataggaaaatgggatgtacacgacatgatgttgtcatctccacatctttctggacccgaaaaaacaagtagcatgagtgaagagccaaggcacattaaatttcacttcccaaaccctatccgctgtcgtattgtttcaataaagatgacactcaaccatattgactctcattcaaccaagttcagagaggaatttgatcttttgtcattaagtgaaggcacattttctgaatccaagccaaccactccacagaattcatttatccatgcaaaaaggattgttatttttggcaacactctgagaaaggagacaaatcctgacacatctatgggaataatgaggatgaagacttatttagatagatcgcaaccactgggcagatttaggattccagttgaaagctgaaggctgagagataatgat

SEQ ID NO: 425548 - DNA, 564 bp, Oryza sativa
ttcacgcgtccgcgcactcctcctcctcctactcctcactcgccagcagccgcagccgaggaggaggcggaggcggatgcgggagatcccccgcgtggccgccgccgccgccgccggagatggacacgccggataggcccccccgcgccgccgccaccgcggccgtcgaggactctcctgtcttcaatttcatcaacagcctatctcctataccaccacctaagccttcagactcagcacataatgttcaactattcaagtcatcagacttggctcctgtttcctcaatctttgcctcaccacatgtcaatcctgcaaaggaatctaaacttccaatcagggaagattctgttcaactttctcgagaatcgcactctccgaacagtgtcagaactcgaacaggggccacaagctctattattagaatgatcagatgcaaaaacattgtttcagaaaattgcagtataacttgttacctaaatgattcaacttcaagtaaagcatctcaacccatccagctttgtggcggcagtgcagaaagtgatacgaatcaaaatactgatg

SEQ ID NO: 425549 - DNA, 561 bp, Oryza sativa
tttttgacgcgtgggctccctcttccaccttcctcccgccggaacttgacgaaatctgggaagcgagccaaggaggagggggaggagaaccccgccgccaccgcccgatctccccgtgcggcgccgggcgggggggtgcggagcgggagcctcgaccgcgccgatccggacaggggccaccagattcgccccgcgcgtgtgccggcgccgagcgcccaggcggcgttagatcccgccgtccggcccccccaccctcccccgtggcatgcaaagggatcagaggccacggctatagagtgatacatatatcttgctgctgtgcttttggggcctccggtcctgcttagttagaggagatgcagaggaacggagtgatggaatgcagtgtatgccactccaaggtggtggcttcgagccccaagagtgtgtcgagggcatatgacaagcacccgagcaagatatcgttcaagtaccgcgcgcttaacttgcttcttgagtcacgggactgcattttggttgccttcagcctattctagtatttatgtccacgttgatgggaag

SEQ ID NO: 425550 - DNA, 563 bp, Oryza sativa
tttttgctttgatgaacagagactgattcagcattgcaatcgtcagtccagttggagttcttgaagttgcaagttttcttgatgcgctcgtaaacttgatccgacacaattgcatggctccaggcatactcagccaaaccttttgaatcatagtaatcatcggtgagagggttgcctacctgcaagcagattttttgactgttatgttcatgcaggaaccaattttatgagtttaggatggtttaaatggaagttaatcgtgttccaattgggtgttcctgtgagcattacaactgagaaactattgttcaaaatactccctccgattcaaattacttgtcgttttagttttgtcctaagtcgaatatacctaactttgaccatcaatttctgtaaattcatatagcttaagaacatgtgaattatatattatgaaagtatttcttttgttcaatctaaaaacataaatcttatgagtaaaagtttatggcgtaagttgtaaggaatgtttgacttaagacaaagcttaaatgacaagcaatatgaaaacggtgagagtaaac

SEQ ID NO: 425551 - DNA, 525 bp, Oryza sativa
ttgttcagaaaaatgccacacgcacaagaaaaacgccaaatatttacatcggctctccctctccttctctctctctctttctctagtatccttgtgttcctcgtcgtcggcgacgaggacaactgcggcggcggcggcggcggcggcggcgatggccgtgtaattccttctagggccgtctcaaatcgtccctcggacctactcgattttcgtggctttcgcgaccagcctctcgtgtcgcggtgatgagagagaggggcgaaatggaaggccgagagggctctaggttggacaattcgctcacgaggaagcgccggagcagcagcacggcgaggcggcggccgaggccggagagcaatcatgtcgtggatgtggagcagcagcagcagcagcagcagcagcagcagcgagacggctactcctcgtcttcttcgtcggcgattggctcggatgaggatgccaactccgatggggaggagcaccagaggcgagagatccatcttgatgccccttctcccgatcgtg

SEQ ID NO: 425552 - DNA, 509 bp, Oryza sativa
  unsure (1)..(509): unsure at all n locations
ttcgtctggatctggcggggaggcgaccggcggtggggcctgctggtggcggcggcgacggcgacgcccggtggagcagaggtgggcgaggtccgactccgtgacggccggatccggctggacgacgacagacggcggtgggtgcatccttagatgcgcggccggcgtcggggcgagcgggcaacggaggcagcggctggcggcgatggtgcgacggcgtggaggccggcggcggcgtcgtcggggcggttgctggctgcttagtggcggatggcgacggcacagcggtggtctgtggaggcggtggctgccgtcggtggcagcggcgacgacgaccgtgactatggaggcagtggtgacgtcngcggtggggaaggagtcgggtgcgaggtgaggatggcgacggctaggtggctgggcgttcggcagcagcggctgcggtggtggtgatcgtgactgcggtcaccggaggcatgacgggctcagacggctagtcgagggcgtgggag

SEQ ID NO: 425553 - DNA, 517 bp, Oryza sativa
  unsure (1)..(517): unsure at all n locations
atttcacccatgcataccgcgtagtgtgcgaacactgacaggacaaacgccaccgacgggggttgagatcagtaccaccttatcgggctgcctttgtctgagctcatgctctagcctcgcatacaggcgttaacataatacctactgtcctactactcagtaaggcggctgaccaactactcatatggaacagactgggggaccaaccaacagcaacgccaacaccatgtagcnggtgtacagcaacaccatcttatggcactacaccaacaccatcttacggcactacaccaacaccatattacggtacgacaccaagcaccctcagcacacctgatgtccctgaagttccgacaaagcatgatttctgtggatcctgccattactggaagaaccattcagatgttatcatctcagctattgggtcccttggcgacattggcaagacactcggtactgcttgcagtttgatcactggccagagctagaaaaatctcatgatgcactttcaaacact

SEQ ID NO: 425554 - DNA, 547 bp, Oryza sativa
  unsure (1)..(547): unsure at all n locations
tcttttcagttagcagagaaagagataggatcaacgaatgcatgagaatgctgactcctgatccaaatgctgcggcaagctcttcagattttacttgtcaatctgctcctagagttcctgctggttctgaccttgttttggacacacctcccgggtttcctcatgatgaccctccaggcctcacaaaagcccattgtctcctccatacaggagaaaccactgagccttacatagactcatctccaagccttaatttgggcgtacctccagggctttctcttgatatccctcctggctttatgaaagctcattatctccctcatacaggagaaactactgagtctcacataaacccttctcacagtcacagcctttcttgggacacccctctaggattttctcttgatgttcctccgggatttactaaagcccatcgtctacccatagtatctactgctggatctgaaactgntgtttctgaaaagaaacccctcattaagttcactctgaatgttccaagggttgcacaaacagaagccattcctgg

SEQ ID NO: 425555 - DNA, 512 bp, Oryza sativa
tcgtgttgaacatggcactgatggggaattatgcatacctgatggactagcacagttcagaatgaacttggaggagcttcttgttgatatttgcttgcttctaggtgctcctgcatatattaataagcttttttctggtggatggggtttggctagccaatcaattccttggaaagaggtagaagttcgaatgtatgcacttagcatggtcgctgacacaattttacaagatggaagccccttcgatttttcaatcataatgcattttgtgaacattctgtccagcagagcacacagcgaacttaatggatgcctatccttggtatacaaatcatttggtgatgtcattggttcttactcaaagttgttggcatcctctcaaagtaatattaaaccattactcctgttctgtgcttcagggatttcaaaatccatatcatcaaatgcttgctcattagctttgcgtaaactttgtgaggatggttctttattcatgaacgagcctcagaatc

SEQ ID NO: 425556 - DNA, 333 bp, Oryza sativa
tcgtggagcgccagtcgggccggcccgcgcgggggccatttttacagaagggctggcctaggcaaccctctggtggcgggcggcctagctgatgaggacggacacgcgaggggcggcagttgccgggcggagcttctgctggttcctccggcggacagcaggccggacaaggccatacggcagtagacggctgacgacgaggcggccggccatgagaaccacatcaaggacatccgtctcgacatgggaaactgcgatctggatatcatattaacaggcgtttgacaaggatatgaagaacatcatgcacaaaatcaccagaaactgacttgt

SEQ ID NO: 425557 - DNA, 410 bp, Oryza sativa
ttcttgtaacttaaatagatctggtagacatggggaggagctttctgtgacatctcgtatatatgctccttcttggagtggtggaatcggcgattgtagatctttggttatgaagaagaagatagcggttacggactaggggcatggcgcccgcctcctcagtaggcgaggccgtacagcatacgattaagtgaacggagccagagggaaaacctgcgttagagaaggagccgataaaggcttcttactcacgcgtaaagcactgggccaaaagaggatcataagccctgactcagaggtaatgtctgggtagcagcctgaggagaagccggaaacttactcggagtttaagaacggatcaatggcagaggctggattacaaccagagccaaaggcaagatccacaccac

SEQ ID NO: 425558 - DNA, 395 bp, Oryza sativa
tagtgatggcgatgggattatcgcgagaggtctaggggttgtatagcttaaggtggcgattaggacacggtggaatcgatcggcggaacgggcgtccgggtgtacgatacgcggatggctcctactactcctcctactcgacgccgcactgttgcagcccctccttccggtagcggcggtagcaggcgaggtccgcatcgcgcttaagaagcagaaggtcgactagacctgacgcgttgggggccacctagccggggaggatgcccagcggcttctcgcgcggcgccaagggttatttgaccaaacgctccgtctgggcacgcttgaggaaggccagggctgctgccgagggcgacatcgtggcgccttaataactacctcaacgctcagtacta

SEQ ID NO: 425559 - DNA, 499 bp, Oryza sativa
ttgttctggacgtcagctctttcagtggccatggggcagtaaccacacaagaattgatgtctacagacacaagggagcaagaaattacatggctggcaaggtcttgtagtagcagtggaagtgatcctaacaagaaaaaatcagagcattaatcgcccaaagtgaacctgggggagaagatcatggttttgcagcagactatgtcacctttcgggaagacagatacagcgtctgtcctggtggaaaccataacctacatcaaatttcttcatggtacagatgccttcaatgtttatatctggatagatgctggtgctgagtgcactgctttacttgatggaggatcaattgaggaagctacctgcatttctgcaagactgactacttgagagcggtcaggtatctgatgagctttatcatattctacaaaggttgagtacagggaaatgaacgaggaatggatacatactcaagaaaggaggagttcgaacaagagagc

SEQ ID NO: 425560 - DNA, 258 bp, Oryza sativa
ccccgatgatgaagccccccacgagacacaccgcacgggggcgtttttataaactactgcgtcggatacaccaacaacgccgccgccgacaccgacgaatactaacattacaactcagcctcaacgcctacagacacccaaccaaccaaccgtatatatcactcaaacacacaccactcaaagactcaccacccacagcagcacacgcattccataagcaatctcgctgtcataaacctacacgccgaaccaccccag

SEQ ID NO: 425561 - DNA, 327 bp, Oryza sativa
gatacttgacgccaccgccaggggaagaaagggggggtttattaacataagagcgcgggatgaaaacacccattcaatgtactacagcatgccacgggagcatcggaagaccatcgcggtacctgtcactaatacgggacaactccacacgcaatgagatgacctgtcaactagcgatactagcacacgcggcaaaatgtagcccgaggattttactgatccaagaacaagaagccgctcccctggaccgaaaggccatactattgctgaacaaaaggcgaaaataagggaatacggtatgagtccaaggtcaccacccaaaacgat

SEQ ID NO: 425562 - DNA, 451 bp, Oryza sativa
tctgtatccgccgttcgcccccatgggcgggcgcgaggaccactcgccgcagatcggccacttccaccaccaccccgccgcgcgcccgctcggccactacggctccggcccgggcgccggcttcgaccacgggttcctcagccgggccgtcgccggaggcggcccgcccgtcggcccaccggggatgcaccaccgcatggtcggccccgccgccggcatggcgatgatggcgccgtcccccttcgtcgaagagctggagctcggatcccgaggaggcggcggcggcggcgggcgccgcgagcttactctgttcccgacgaccggcgaccactgaggcaagcagacagacagaccgacggcggcgagccggcgacgggcaccgggcttccgtcctcggggacatacaattcggtcgcttcatctccccctctgctagttccccaccagatcg

SEQ ID NO: 425563 - DNA, 387 bp, Oryza sativa
tttgtttttttttttttttttttttatatggccagcatatatatatatatataatcatccgatcctctttagtattaagattacaaacaaatttgagactaaaaatatgcatgcatgggctcaccaaacctatacaggaccaggcaaccgatgatggatgattgccaaaaaaaaacacacccccaaatctcatcaagaaaccaaagggtaaaaataagactagcttaatttgccaggttaattagacagagtagtcgtcgcgattcccacgagatataggctaatcggtccgttttctcggctcgacgtgtaaaaatgtaaccgatcgatccatttttttcagacatcaatcagcagtttggcattactactaattcaacatttaac

SEQ ID NO: 425564 - DNA, 360 bp, Oryza sativa
gaggaaagtttagggaaaatgtattgacatttgtgaaatgacactgtttttattagtgattagaaactgagggagtaattgtgtaccagtctgttgtaagctagctacctccagtcatgttcataaacagaggcagtctactgcctaagctgtccaagaactgacgaaaccatgtgcatggtagccggtttacgcattatcagcccagtgtcgtcatcttatttggagtctgaagcagtccgagaggtaaccctgatcaggttcggacgaaaatgggcgtgcaacatccaatcagtatgggttttggcaccgctcaaggaccgggatgtcctgggacggctggcgattgatcggagcttt

SEQ ID NO: 425565 - DNA, 359 bp, Oryza sativa
ggcgtcgcggctcctcctcggaggcacggtgcgggcgacggccctcctcctctccttccccgaccctctctctctatctcactctctctgccctagccttctacgctgtgtggaggcgtcgtcgcgcgcgcgcgcccggacggcgagcatctggatttgagcctaattgaagctgaacccccatggcccagcttaggtctgcgcctgcggaaagcgaggcggagccaggcgccgatggccctgcggatgaagccaatgctgtggaagaggagaaatctggtaagggcgaggatggcattgaggaggctgccgataccgttgattccgtgaaggattcagcaaagcctgaaggcatggat

SEQ ID NO: 425566 - DNA, 114 bp, Oryza sativa
gttaaactaacccaaattaagctgtaaaaatccctacatgcaatgcccggtgttctcttcttttggagattaacaaaggtcttaaagagccaggaaccaccagcaagtcatcac

SEQ ID NO: 425567 - DNA, 68 bp, Oryza sativa
tgtgttttgtcagccatgcgggaagatctatgaactaattttaacaatgaatcagcgatcgactcatc

SEQ ID NO: 425568 - DNA, 411 bp, Oryza sativa
gacaaacatgaataaacagttcattactttagcgaaaatacagcggtttagatacatatatatggtatacaacaaggtagttgccttctctatgtacagagcagatcactcaagaacaatgcatagttctcatccatggaaacggtttggatatcaagagggtatgttcttacgcaggcacaagcgaagctcggttcagaccagcgagttggatccacaacgaggcacggatccgacttcttgaactcagccaccttttccccacagctggggcagtagtggtatttgtgccagaggcagtccatggaaggacaaaggaagcagacgcccatcatgaagggcatcatgcaagccacaactgatgctagacttggcttcgacctgttcaaagcaacaacagccatgagtgtg

SEQ ID NO: 425569 - DNA, 118 bp, Oryza sativa
gaacctatctttatttttttttttttttttttttttttaattttttttttttttatacacatcttttttctgatattacatttttttttttcattttttggggccccgggagcaacaa

SEQ ID NO: 425570 - DNA, 75 bp, Oryza sativa
tttttgttttttatgatttaacagtttattactttagagaggaatcaggggtctcggtacatacctatgaggatt

SEQ ID NO: 425571 - DNA, 421 bp, Oryza sativa
aacaaagcaaaaaggtgaaaatgcatattaagggtgtggcaggtgagaggaaaaggacatgaggaggggggtctattaaggccctacagttacgggacgtgacgatgcctaccatgactcttatgtttaatacagtgtaatagaccagaagagcttgaccgatgaatttcagcccgagtcatattgcattagatacatacttaacattggggtagaaggaccaagtatccgatcagcatgttccagattctatatacagaggatggcactaatagctgaaatagccataacattatcccctaagtaaatacacacaaggcgccacagtaaggaattaggttgcgtcaccaagctaagaacaacattcaacttggccataccaaccaatgtacgatacggtctggagccgatcctaactctg

SEQ ID NO: 425572 - DNA, 107 bp, Oryza sativa
actattgcttatttacattttacttgttttatctttatgttcaaacaaattatctaaattttaggtaagtactaacaaaattttaaaggcacaacatatagaccctt

SEQ ID NO: 425573 - DNA, 95 bp, Oryza sativa
tttggttttgtaaaaatatctggattacaagtctgtctaattttccaaagggatagagggttcaatcacaatagactgagattgacaacgttaga

SEQ ID NO: 425574 - DNA, 182 bp, Oryza sativa
tttggttttttaagagtggatgtattacaagtttgtttaatttaccaaagggatagatcgatcgattacaatatctttgtttgtcaacgtttgaattcaattcaaaaatcatggggtgggttcaaataaacagaagggggcctatttccaaactagcaaacaaaatgattttgattgataga

SEQ ID NO: 425575 - DNA, 414 bp, Oryza sativa
agttaattattagacgagtcttatccactttgtgtagacatactgaatccgtgtctagtacatttttcagagtacttacctaatgcccgcaaaattgtatgcacagtgatcaagaagcattttaacatgcatccgtacattataaacctactcttcgaagatagcttattataatacaagatgaacagcacaagtcgagagctatatatgtcagatcatgagaagtgcatattgtagtatatgcagagatcaacttgcttttcaggtgccttcagttatctattgcatcttcagattctttccttttggcgatttcagcatgttctttgtttctgggtgctgggtttttggcaatgtacaacctttttgctgatgcaaggaacaactcccatgggacatcgccaacaagcattc

SEQ ID NO: 425576 - DNA, 238 bp, Oryza sativa
tataaaagagcttcgacgtatgcagcacgcagcacagagcgcggggaccctatagagggcgccccctttttttttttttttttttttttttttttttttttttttgcacagacaaaaatttaatctaaaatcttcattcccagaaccaaattttcggaacataacccaattgtagtgcatttctcagagtcatactaaatacattacactccgctttgacgtgaacaacccatctttc

SEQ ID NO: 425577 - DNA, 133 bp, Oryza sativa
agaaagaagcattctctgatgcataacttctccgatttaatttaatccataccttgaagggggtcctcagctcagacacttgaatttggacccttgggcgggtatgaaaatctaccccaaatgccctcgcgat

SEQ ID NO: 425578 - DNA, 423 bp, Oryza sativa
tttggttttttttttttttctttttttttttttttttttttttctttttttttttttttttttctcccgggaaagaagcccggcccacccccgggaactccgggcccccaaaacccccggaatccgggggttccccttccgggaaattcaacccccgccaggccggacatttggtggggcgccccggggccacccaaaaaatcggggccgccccccccggccccccctggcgggaaggaacgggccaaacccccccaaggcccgggcaccggggcttaagccccccccgcccccggccccacaaaagggcccccggcccgggggcccccgggccgctaggggggacgacccctgaagggggggaaccaggcaattctggacccccacgcctccggggccccggggggcgccccgggaatcccg

SEQ ID NO: 425579 - DNA, 59 bp, Oryza sativa
aaaaaaacgcgaaaaattttttcccttcttttggggggcccccccaaaaaaaccaaaaa

SEQ ID NO: 425580 - DNA, 225 bp, Oryza sativa
gggaaaaagggtacacaaatcctttagtatgatgataaaggcacccctataaaacgggttataaagggtccatttctaccaaaagaacttcacacatgagctctgaacgaataacaacaaggaccccaaaaattagttttcacaaggggcacacaacaatcccggtgctattggcgacagatgaattttataccgaactggcatcactggtccccgaaaatagag

SEQ ID NO: 425581 - DNA, 328 bp, Oryza sativa
tgtgggcgccctccttttttttttgggtttaaggaaatatggggtttgcattacaaaattataataactaccatgcacttattatttttgacaacggggcaaccaccttaaagacagttaattatagttcaagggaaaccaccccaaggccaacaatgacttgactaactaggataaataattataacaacacagactacccctagaatcttttggtaagggtacacggataatttgcctttgaaaagggagggatgttgcacagcacgacaggctgcatcaaagaaagcgcctgaggcggccccattttgctacataatgctacaac

SEQ ID NO: 425582 - DNA, 118 bp, Oryza sativa
tttggtttttgaaagatcaaggttcttttttagaactctaatgacggtcattaatttcccagattctgtcattgtcgaacctccagggcatcctttcgcgtgcaattccttgtccgga

SEQ ID NO: 425583 - DNA, 409 bp, Oryza sativa
ggggaaagcattcttgggacgataatgaaactatgctactgatcccgtcttcatccatcaccgggcacgtattgctaaaaaaagtgttcgataaaatactactagaaccaactggcaatccagccagcatccagaaaaaggaattgccacctccaccggacaaagccagaggtgcaaagagctatcgcccaatgggcaccacaacccctgttcagtcgatcacactcataactggatctgcccgcccagcacacgatcccagggtacaatttccaagaatgcccagggcgctgcacttatgctgagctcaacctttagtacctggaaattgcgcaaggacgttgcttgcttcccaaaacgttaagtgcattcagatgggcttgttgcagaatactgacattcatctcca

SEQ ID NO: 425584 - DNA, 68 bp, Oryza sativa
cttcaaaaagaaatggagcgaaggccccaattcatgaaaggggaaacaggatgggcagtcccccatgg

SEQ ID NO: 425585 - DNA, 229 bp, Oryza sativa
acggcatacagcacgcagcacagtgcgcggatacccctgagagggcgccccctttttttttttgtttttggaagcatacgcacctttctcacctgtctacacaataattatacatatgcccggccctctccctcgtctcacttgacgctcgcgacattagtcagatttgcaaaacactcatggcggtgttaggttacatttttacttcccagcctacaaaaatttgaaa

SEQ ID NO: 425586 - DNA, 91 bp, Oryza sativa
tggttttaaggcaaaaaggaagtttgcttaccattattttaacaaaaccatggaactattattcttggccacgaggccaccccctgacggc

SEQ ID NO: 425587 - DNA, 97 bp, Oryza sativa
aataaaaagaagcaattcctgataagaaaagagtccatagaagggcaggggaggcaaaaaccggtgaacacaatggcatctgctgtatcacggccac

SEQ ID NO: 425588 - DNA, 203 bp, Oryza sativa
gaccgtcacgatcaagctgtggaggcactccttgtagtagggcgccgctctttttttttttggtttaacaaaggaacaggcaattaatacattacttaaacaataggatttgaggagccacactgaaagagtctagaaccctcaacttctagtggtgacaatagaataaacaacccagatcatgggatgaaaagtttacagct

SEQ ID NO: 425589 - DNA, 284 bp, Oryza sativa
tttttgtttttttttttttttttggttttttttttttttttttaaagctacctccaaatagggggtagcattgggtagcaaaccaaggatataactgaggaccaacattcaggtgcagcttcacatcatcggtgcttatcataactgcaataaccgcgcacatggggccataaactaagaacttattccggagtttcttggctgacactttaagaagaagaagctacccaactggggaaccattcccccggcatggttcggggggccctcctgagccagaaatt

SEQ ID NO: 425590 - DNA, 380 bp, Oryza sativa
ggatcaaaccagtcatttcattagcttgattattatataaatttacatcatactttgacatgtcttatttctggtcaagagtctggactatttacaaaatgtaccggaaagaatgaaaactaaagacccaaacctgggacccatggatcacacgatggaaataagggggatgggatcaagcaacaattcgagatgcagagcacaaaccaaaaacaacggaaaaagggtaatggtatggccttatatgggcattaaatggacccacattgaactgggactcgcttcaacattcataatccctttaaaacttttggccaaccagattgctgtttttcgaggagataccttattctttccgaaagggtttaaaacaaccccaa

SEQ ID NO: 425591 - DNA, 117 bp, Oryza sativa
gagaagaatattatacagacgtgatttctatacaaagccggagcattttagctcatggggaagaaatcccctaaaaaaaagagttattacaacgaaccatagtggtcgttttggaca

SEQ ID NO: 425592 - DNA, 93 bp, Oryza sativa
tttgttttttcttttttttttctttcttttttttttttattctttttcgaagaggaaaaacaaaacaatttcaacaatcgcccaaaccagacc

SEQ ID NO: 425593 - DNA, 351 bp, Oryza sativa
aaacaaatcaatatacattgatatataatatttctgaaacaaatcaatataatacatggatcacgtacagagtacagtatatatatgtgggtgagctagctagctagctaggggtcatggcgtcgtcatttaactacaacactcttaacctcccctggcaataaaattcatcaccagtaagggaccactctatagctagatgcaagcaaaaccaacaacttgaattaaaattttgtttgatttctggatcgatcctagatgcggccggcagggcttagtccattcttcttacacattaattaacttgggaaaaaatgaagctaactaattaaagcaaagggggggaacata

SEQ ID NO: 425594 - DNA, 408 bp, Oryza sativa
agctaacagaacagagcagtcttaaaccgattagacaagtcaaaagataggtgcatttcaactacacaactgacagtgcatcggaagacagacaagacatgtgaattcaggagaggcctaagaatcggtcatcacaaaagagggcctgaactaaccatactaacgatcaactttgctgagttttatgttgtccttaggaagatttgctgaatcgttcagcaaaagcccgaccagttggaggacatcatcagcatcgtagatgatttcagtaagctttaggttctcacaccggatatccaccaaacgtgttttcttcgccttggccttccctttccttttcttagaatcctttggcagctcgcaaagccgcaacgtgagcttctccaaattaggcgagttctgcagaaa

SEQ ID NO: 425595 - DNA, 70 bp, Oryza sativa
tttttgggttttttagagttcaggtcaaattcttgttatccggcactttgcacggccgaagcataacatg

SEQ ID NO: 425596 - DNA, 168 bp, Oryza sativa
ttttgggtttttgaggatatcggtttttttttttttaccccaaacttttggttaaagaaacattccaaggatttcatggaaaaaaaaaaatttcgcccaagggccaagggaacaaaattttgaaccacgaaatggtagtaagggaacccggattatcttttttttcca

SEQ ID NO: 425597 - DNA, 98 bp, Oryza sativa
gaacaaggttacagccctcatatttggtatataaaataaggggggtggggggttattttgggtcttcttaatccaacccacatcacgggtgtacctcc

SEQ ID NO: 425598 - DNA, 239 bp, Oryza sativa
ggttatgaattcgattacagtaaatgtatataaacctttatttagaaccgtaaaaaatataagctttatttttcaaatataacaaacagcgggttgacattaaccatactggttaaaatgctgagggaacaaaattgggggggagatccttctttttagacaatgggatgtcctgaaacctcataaccacatatgggaagccaattttggggacataggaaattaaaacatatttacca

SEQ ID NO: 425599 - DNA, 74 bp, Oryza sativa
catactcagtctggtttcagatgaaaaatgggaaactcagaactccagcaggggaacgagaaaccaacaagggg

SEQ ID NO: 425600 - DNA, 253 bp, Oryza sativa
tttttggttggttatgaattgaatagtgttttataaaattaatatattgttaagacggaaagcaagtagccaaaatgagcccagtcaaaggagaacatgcaacgaagtaacaaagcaagcagaaatgccacacaaaggcgttttataaggctaagacgcaattcggagccagtagcaacctattacacccacccatcacagaccacaatcaagtaagcatcaacgtactattaacaacgacacggctgggtga

SEQ ID NO: 425601 - DNA, 90 bp, Oryza sativa
cttgatgaataaggtggaatttattccttttgccgcccaactagaaaggcccacctggatgaggcatcccaaacatgcccaccaactgct

SEQ ID NO: 425602 - DNA, 408 bp, Oryza sativa
  unsure (1)..(408): unsure at all n locations
ttttgttttttttttttttttttttttttttttttttttttttttttttttttttttaaaaagaaaggccccccgcaaaaaaggttgccccctttgacctgaaaatacggccccgcaatgaatcggggacccccccccgggggcagcccgctgccttagggggggaaagatttagcacttcatgacccgatagaaacggcagaggggtgggccccccttagacccgacaaaggggccaaggggacccctgcaagggacccggggggcccaaataaccancncctctaacttggcccccattgcccttttaaaattaaaggcggggcccactccatagcacaaatttcatctgggggcaggccccgaaaagaaccatgtggggtttatttttggggccccccaaggggg

SEQ ID NO: 425603 - DNA, 128 bp, Oryza sativa
ggagaaaaggggcactatacactaatagcggtggtattaccccggaaaaaagaagggataaccaaaacaatgtaataaatacggaaacctggtggacgaggaccaaaaagataacagactaggccatt

SEQ ID NO: 425604 - DNA, 170 bp, Oryza sativa
agaaagcgaagccttccaaaggagcaccattgactcaaagcggcactattaccgcgtcaaaatcccgggataaccagcacaggttcataactacgcaatcctactgccccaggaccaagcataaatcacacaagccctttgtaccctcctctactagctgcactacctat

SEQ ID NO: 425605 - DNA, 167 bp, Oryza sativa
atgggggcaaaacattcctatggcgacaccttttttaggatggaatctattaccaatactataaccccaaattacaagttaaggacaatatcttcgaaatgccacttgcttaggccccatggcatggcacgcatgacctattagtacctatactaaatagtaacact

SEQ ID NO: 425606 - DNA, 116 bp, Oryza sativa
atcaatgatccggcttccattttcttgagagaaaaggcgcacaattttacaacaaaacgcagggcattcctactataacaaaggaggaaagcgtataaagcaggggacggatccca

SEQ ID NO: 425607 - DNA, 347 bp, Oryza sativa
gtaaaataaaattaagcagttgagctcagatcttatgtacatcatgccatcaccatcccttcaagattacaaactgattccataatctcaagcataaagccctcccaaaaacagttatcatgaagaaaacaacacaaaatctcaatatgacatctgaatctttatatcgttgcataaccacacatacactacgggcatttgctccagaactactgacaggccagaattagagaaatcttgcttccaaagatatccaatgttacagctcaaggatacctgagatacagcactttcatagtagatgcatagtttaattttactggtcttgatcttagcacaaacccatt

SEQ ID NO: 425608 - DNA, 138 bp, Oryza sativa
ggaaggttaaaaagaagcgaacacattagaaatttcactatgggccaaaaagaatgcaacgtcttaaatagctttaaataaaaaagggagacctgctcctgtgactaggcaccctatggggtggtacaaacaacacac

SEQ ID NO: 425609 - DNA, 118 bp, Oryza sativa
aaggcaaaaccagtaacacaactgtgatagaccactagttccagggagaagaattccaaagaaacacaaatggaaaatgaccaaaccaaatggaacagaagatccacataatcctaag

SEQ ID NO: 425610 - DNA, 358 bp, Oryza sativa
aattgaacctttttcctttttaattttgtttgagtcaattccttttgggtatctatatatcaaaagtgatttttataacataccggtatgcagaaaaaaaaggccgttaatatatttagtccagaaaagcaaaatatactggacacgacagaagaggaggggcataggctctgttgaggcaccccaattggggggactcaaaccaccagtttgaaaaacctggcaaccacgtagcagggttattcaaaatggacccaaatattgttacaaaatgggaattccatagcaaggcccggttgcctcagtttagcgtttcgaattccttttgagttggggagaccttttaaccaaaacaaag

SEQ ID NO: 425611 - DNA, 265 bp, Oryza sativa
gtctccgtgccccttttgcggggccaccaccaccaccgctgactcctccgccactcctcctcgccgcgccgctacccagccggcttctcgcgagggctcagctgcggctcgttcggctctgccgagcagcaccaccaccggtcgcgcgctccaccgggctcgcacctaaggcgctcgtcggacgagcgggcggtacgaggctcacgagatggcgggatatccgaaccagggcgaggattcccgacggctagggagggtatgggca

SEQ ID NO: 425612 - DNA, 55 bp, Oryza sativa
aaaagggaatatatggggtgaatattaaacctttttctagtccttatgcatctca

SEQ ID NO: 425613 - DNA, 404 bp, Oryza sativa
  unsure (1)..(404): unsure at all n locations
aaaccggaacaagattatacattcaaatgctacaacagcggatgatcaagccacgtggggaaaaaaatgtgtaacaatgacacaagagattttagacctcttcacactttttttttaatactgcattatgattggtttctcattaagtccttgtatctgcctttgtattatggcatatgctatagaagtagctccacaactagcttggtcctccagggcttacgatggctctgccccagtggaagattgactgatcgaagggtgtttgctacgagttagggcgaggctgtttcaatccccatgtatagagactgtacatgcatgngagagggccatacattttttctgggtagaggttcaattcagtaccagcggtaagtatgtttgggcctccctctggctgt

SEQ ID NO: 425614 - DNA, 397 bp, Oryza sativa
  unsure (1)..(397): unsure at all n locations
cagcccatcatattatattcatttatattagtatcaaataacaagtgtgctaagcccatataggcccaacaatcaaacacaataacaacccatatagcacaacccgacaaacattccaatacaacacaatttcttacatacctataactaggttcacgtccgggtggagcaataacattaacatgttaccacccattatcctagtataggcaataacccaaagtttctaccattcactgaccatnattctaccaagagtccaattcattatctttgccctttcttgttgcacggatttatcaattgaactttccattcttcagcaattaacatttcttttacagnngctcattaaaactcgtatttgctgtcttgcaatggccacattctttgaaaa

SEQ ID NO: 425615 - DNA, 359 bp, Oryza sativa
acggcaaaaacatgaacatttcattgcatgctaattgcaaagtctaattcagtacgatgatttctccacaaaaagggaacagaatataaaccatcttttagcaacagtttcttgaaacgggtcaatgaactttggacgcctactttagaacacagcactatcctcaataatcttctgttttctccttgatgagtactccactatatccccatgctagtctttctttagcatccaacctgccgatcaacagaagttgctattagtgcactgcttatactgacatgaactcaaatagaaatttcaatgggctagtttgaataggcagggagaagaaacaagtagacatcctcttctaatga

SEQ ID NO: 425616 - DNA, 200 bp, Oryza sativa
atcaaagatcccttatattaggagacggagagagtactaattaatgtacactggtttgcttccttactggtagcaatagattcaaaactgcacataggagtataggtcaataccccaactgtaacctgcacaattcggttcttgcctatggaattctacaggttattcaaaataggtttaattaccacaaatcagtatcg

SEQ ID NO: 425617 - DNA, 77 bp, Oryza sativa
gggagcacgtaccttgggttataacagcacgcccagagggctctatgtacaggcagagaggtcaataatacaaatgt

SEQ ID NO: 425618 - DNA, 410 bp, Oryza sativa
  unsure (1)..(410): unsure at all n locations
attcacacccgtaccatattattattagcaaaaatacaaaaagaatctaatcctgatatcaaattgttcccttgaacactcgactgaattttcaaaattctctacatcatctccaagaaaattccgaatgcattacctccttcacanttatgcatacggacgagacacgatgatgtacggtaaccatatttagaaccgatagaatacaccctttaatccttagtattgcaattgggcgacngatcttccggccatttttggagtcgctattcaccctgcttnnatgatcttttgccattttttccacgctcccggttagccttccttcttttatacaccaatgttccgccgtttcacgttcccaccacccgtctttgacacacgttcgaccgatgttcgggcgtttcacg

SEQ ID NO: 425619 - DNA, 397 bp, Oryza sativa
  unsure (1)..(397): unsure at all n locations
gcataattatattataatcacattccagccataattaattttccagcccatacaaaagcaagttccagaatatagtttccaacatgttccatacaaaagcacagaacatgaataccaaaatgantccattccatccattttatacttacacatagttcccagtccgtacttaccataatgttacctaccacggtatgtgtccatagtttccggtcacccaatataatattcccaccttatgcagcccactactttaagatctcaagcctgtcattctttgcccaattatgccagncnataaaaaannttccaccaagtcatcccactttacacttttctggacttgcaattccctgccagcaggccaacaaacttagtgccaaanaaattcctatgt

SEQ ID NO: 425620 - DNA, 80 bp, Oryza sativa
actaagcttaccattcactttttatttattctttttcttgatggaagaaagatccagcatacttgagggggatacaaagg

SEQ ID NO: 425621 - DNA, 94 bp, Oryza sativa
aaatgtaacgggggaaggggttagcagatttgcgagaacaatatgggcattttaaaggcccttctaatctctggccagtatattaccaacatta

SEQ ID NO: 425622 - DNA, 197 bp, Oryza sativa
atggggaagaaatgtaccggcaacatagaagccaagaaatgatacagcctatggattaacacagcgctcaggcctgagaatacatgctagagcgactacttacatggaagctggagacagtaccgaaaaacattaatgagactagaacacaacctgaaccaaatggtaggattaccacagtgagtccagagggaatc

SEQ ID NO: 425623 - DNA, 97 bp, Oryza sativa
agagaaaaaaaggcgcactaccaggcacgaaggaacttgttttggagggcaatcaggcccatgggatacatgtgccttcccttggaggttttgacaa

SEQ ID NO: 425624 - DNA, 342 bp, Oryza sativa
  unsure (1)..(342): unsure at all n locations
attcaagagtttatttgcaggccatttggccttagtttgcaacttttacatgcctctaaaatgatgtgattcgtctattgtatctctatcactctcgttctaaaaagaatcaagagtgcaaatattttctttttcctcttatangctnacactttagccttgccggcatttgcatcatcaatagttaccgagttaccgtgttattagtatttgcctacccgatatanttatcaagacntgaattagcgttaattctggcattccaagaagaaacacacagctgctttgtaacgttaatcggggcgaggcgtaagtcccattctgccggccggccgcccggag

SEQ ID NO: 425625 - DNA, 238 bp, Oryza sativa
aaaagtaacgggggaaggggttagcagatttgcgagaacaatatgtgcattttaaaggcccttctaatctctgtccagtatattaccaacattagtatcattttgccaaagcaaaggtgacacgtatatatatgggaccactatcacaaatgggcccagtcacggtgattcttcctttaaatacgggcacaaattaaaccccccaaagctatggcgaattcaattacattcccacttc

SEQ ID NO: 425626 - DNA, 93 bp, Oryza sativa
ccacaggtgataatttcaggtggtataaaatccttctatggttgtacaatacaggaaaactcaacactgaacgaaattgcggcaaaacgctaa

SEQ ID NO: 425627 - DNA, 55 bp, Oryza sativa
gggggaagaaaacaaaggaaaagggatatctctgaactttcgcttacacaaagat

SEQ ID NO: 425628 - DNA, 239 bp, Oryza sativa
acgcgcgcagcatgcattttatttaggcacggtccacaattcatacatgtatagtggatacgtctcgtcggcagacactcacggtatagtagggtagtcgtgtgtccagtgatatagttcatattctgcggcgtactatttcattgccgttgcgtttggacttcgtttcacaggggtccacgggttcggtgtagggcgtctgatgggagggttgatcgccacaccaggcccgggtgcca

SEQ ID NO: 425629 - DNA, 144 bp, Oryza sativa
aacaaatctaaacataaggtgggctatatttattataataggatgggccgtattcacgagattaggttattttgtgatggagggagtatgacattattcatcagtacacctcccgaagggtactaggcatcacactgaaatata

SEQ ID NO: 425630 - DNA, 370 bp, Oryza sativa
aagaacagcatttggcctcacaaaaaaacgccaacattatctgcttaaacttaattacaatgatggtgcataaaagggggaataaacatctcattcggctgtacaaagcacaagccgacagatctcatccctcctggcaaccaaattacaaccatgattactaataaacaaaaaaaaaaaggaccgagccatatcagtaggaccaagagttgaactcacgggctttgttgagcagcaaaaaaatcagccttgtgtccaaaaacacaagtttccccacaaaggcaactgtactttaccagtataatgggaaacaatgaggcctgtcgaagcagccactttcattcccatattaactcatgcaacactatag

SEQ ID NO: 425631 - DNA, 417 bp, Oryza sativa
cactaaaaattagataaagcgatcggattgcatgatctttatacaatatcgctcataagaaatgcctctacgagaagcgacatcacggccacatcagccacgcagccaaggtgaccaaagaatgtagttgcctccctgttaacccctaacccctcttcactatacaccagaagaaacaaacacatggtaggctaagattattaatagatactacacatgacccctatagagaaagtacataaaatcctttaaaaactttaccgaagtaattcaaaaccgatgccactatatataaaaccctttgttggtgcgttgaactaacaatacaagagcaagggaatacaccaaggatgccatgccaattcacttttgggcaaccagaccattctgttgtaggaacaagtttctgcagtttct

SEQ ID NO: 425632 - DNA, 298 bp, Oryza sativa
agcatatataaataaacgcaggaaaccaggcacttgacacaagattctcagttacacggcagctacattaactgggcgatatagttagtatatatctagctgttcaagcaataagagaaaccgctaatcaacctccgtgagcaattaccccccaaacttataatttgttttggtagaacacggacatattgcctctggctcatgacaagaaccttttgttcagaacctgacaggttgttgaacgttatccattcgttcgaaagcgaagcccacctggcccacttgggcaagacttttg

SEQ ID NO: 425633 - DNA, 278 bp, Oryza sativa
gggattcgggaacaggaaaaaaaaatttccttgaaaaagggccaatttattattacaagggtacaaaattattacaaaaaccaaattaattgggggggcaaaattggtaaaaccggcttcttccataaaaaaacccaagggttacaaaaattgaaaaaaaggtttacaaaggggaaacccaatgaaaataaggggggcttaaaggaaaccggcagggggtaaaaaaaatggggaaagacccgggggtttttagcccttgccaaagaatgggtgaaaaa

SEQ ID NO: 425634 - DNA, 110 bp, Oryza sativa
ggaacgcatacaagtacacgggacatcaaattatttattatggaggaatgccacagggtatccatcagaatttttttttccgccggccccagcatcaaagaaatggcccc

SEQ ID NO: 425635 - DNA, 114 bp, Oryza sativa
ggatgggagaccaatatttcagagttttcagcaagtaacatgctcacggactgccgtgactggccgtacatcacacaaaaagagaactcaattatatccttgaagggtcagtaa

SEQ ID NO: 425636 - DNA, 373 bp, Oryza sativa
atggcaaatctgtcgaacttgtcttcaatgtgaaatatatgtaaaatttattacaaatatgtcaaaatatttgaatatatacatgatatgaaataatagtgtcaaacaaacaagatataaaagggtcaaataagcaagggcataaagagaactatttagcccctaaccttaacacccgtttaatttcacccacggatgtttcgtttttttgtaaaagggagggatcacaatacagcaaccttacataaaaggtatgggtcaaatttggttagtttagactttcaaaaaacagggttcaaaataagtcaaattgccccctttttgtagggcataaaaagcatttagatggcaattgaaaaatttctaaatagta

SEQ ID NO: 425637 - DNA, 240 bp, Oryza sativa
cctggaacttgcaatctgttataagtgatataccaaccagtactataatatatgtctgacaaatggtttagcgcaactcatgaaagtcttaacaaccatctactcatctagtaggctaacaagtataagtatccacaatcttaaaggagagatttgccatgcgttgttagaccctaaaaatattacttccaacttataccattagtcttgtaaccattttaattcttcaccacgattatg

SEQ ID NO: 425638 - DNA, 372 bp, Oryza sativa
  unsure (1)..(372): unsure at all n locations
cagcaaacccgtgccgtgaatatcaacaactatggatatgaaccaagcatctacaatcaacagcgcagccaactaatcctcaagaaattattcgtctaatgccacttgaactttcaaattcaaaaaccacgatttataaangtgccggagatgatagtcacaccaaattacatcattcacatcggagtgtttaataaaanncatcatgcgaaaaagtccagtcaataaacaaaaagggcagctataccagcttaagtgatagctctttactggnnagtagcctcgcgaaaagggtgccgactttattttttcagntnnagcacttctactcccattttctttccgaaaaggagttggacacatcttcctact

SEQ ID NO: 425639 - DNA, 166 bp, Oryza sativa
gggagagccaagcacatgaagccaaaaccatttgattatctgattctgatgtaactgtcattgtatcacattactctcagtgattcgaatttccaaaaacaagcattgacgcaatgaacatatagcagcattttgacaaaaacttgaatgcatacttaaattaaca

SEQ ID NO: 425640 - DNA, 134 bp, Oryza sativa
ttgctatccaatcactaaggatcttaaagctgatcctaaggacgagttccttggtacactaagggcgaacataagatgctttatttgtcttgacagtttctttgagaaagcaccttttcttttattctaagtac

SEQ ID NO: 425641 - DNA, 583 bp, Oryza sativa
ttatttctctccgatctccaccaccaccaccaccacgcgggcgcgcgcaccaaccgggggggcttcgatgcgggcgatctcgtcggcagcgggggggatgctgcgggcgcggttgtttctgttttttcgtgtactgtttttttttttttttttaatatttttttatctttttatctcttttttttttttttttttttttttttttcttttattttttctactttttttttcctttttcttcttatttctttcttttcttatttattattattctatactcccatattttattcttttacttttttcattctatttctcttcttttcctatcttcttctttttactctttctctccattgttttttttctcctttcttccccaatttttctttttatattttgtcttctctttattctttctatatttttttaattttttatcctccttttctgtttcatttctcttttttttattctatctttttaatttttttttattttctatcttttttttttcttttctttttcatttttcatcatttatttttttctcttttttactcttcttttttcctcttttttt

SEQ ID NO: 425642 - DNA, 73 bp, Oryza sativa
ttcaatagcaatggcccaggcagggatacgctcatagacatagttattgatcctctcctttctcacacttttt

SEQ ID NO: 425643 - DNA, 70 bp, Oryza sativa
tcgtccgcagccgcccgattcgaccaaatccgcactacgcgttccaattccgggccaatttgaccctacg

SEQ ID NO: 425644 - DNA, 130 bp, Oryza sativa
tcgttttaatccaatccatcttttcatacacgatcgggctctttaactcactacagaagctacataagccagcaaatatatttgttcgatcgatacacccaatgccgctccatgaacgacaataaaacta

SEQ ID NO: 425645 - DNA, 314 bp, Oryza sativa
tcttttactatcctaccctcctcgacgcggggctagggttacagacccctactcctcctactcataaatctaacagagtgggaacaaggaccgaagcgatatcgacaaataacaagaagctaaatctatacaacacaaaaaaacataaaaacaaaaaaaaataaataataatatatataaaactaaaaaataaaacaaacaaatattaatacatcaactcaaaaaattaatcatcaataaaaaaaaatcattaataacaaaagaacataaaaaaaaaaaaataaaaaattaaataataaataaaaaatacacaa

SEQ ID NO: 425646 - DNA, 436 bp, Oryza sativa
atacgtcttcgcctactattccccacttacaccatctgcgtctttaactacgcctcgccgacaaaaaaaaaaaaaaaaaaaaaaatataaaaataaagaattaataactaaattaatataaaatatataaaataaaaattcattaatactttaaaaaaaaaaaaataaatttttcatacaaaaaataaacataataaataataaaacaaacataaaataaaaattaaataaatcaaataaatttaataaatacataaaaaataaaatataaattatataaaaaaaaaaaattaataattaaaaaaacaatattataaaacatattaatattaaaataatatataatactcaataaattttaaagaaaatatactaaaaaaattaaaaaaataattaataattattattaaataaatatactaaaattaaaatacta

SEQ ID NO: 425647 - DNA, 93 bp, Oryza sativa
acgtttctctctctctctctctctcggagggggcgcttcggtcttatcgaccgccccttatctcctccaccatccgcctcaccggtgtacggc

SEQ ID NO: 425648 - DNA, 51 bp, Oryza sativa
aactttcatgtgtgatggccccaaggacaacggaggggcgtgttatttaca

SEQ ID NO: 425649 - DNA, 161 bp, Oryza sativa
ttcgtctcctccacccgctcttcgactcctaccgattcttcgggatttctcacgataaatcgactaacttagcaaacaaaaaaaaatataactactcaaaatataaaatactcaaacaaacaaaaaatacaaaatcaataaaaaaaatatataatttataa

SEQ ID NO: 425650 - DNA, 166 bp, Oryza sativa
tcttacgctccaaatccttattcgaatcccgttcacgccgccttcccccagccgaggcacgcgccgggacgcatccgtcgagcagcgaccatgttgtcgttttggggtgcggaggtgatgacctataagccctagacccacacccacatcctgcgccttggatggc

SEQ ID NO: 425651 - DNA, 133 bp, Oryza sativa
tcgtgaaaaccctcctcctccgcccaaccccattccttctgacccactctcttctcccgccgccgacggcggaggaggcggctcctcgtcgtaggcctcgacgaccatggcacggatcgcgttacgcgccctt

SEQ ID NO: 425652 - DNA, 137 bp, Oryza sativa
tgcttactgatagcgctcccatggatccatgcttgtccttcctccgcctccgcgggcacgacgcaaggccgcctcgcgccgcccctggtcgaggatcgatctccccttcccctcctcggctcccgtattcttcgccc

SEQ ID NO: 425653 - DNA, 157 bp, Oryza sativa
taactctcctctcctcccctcctcgtcgcggggctaggtttattcacacttctcctcctactaaaacaattatacttaattaatatatttttcttattatcattactaatacattacacaaacaatatattattcttcttcaaaataaataatttat

SEQ ID NO: 425654 - DNA, 172 bp, Oryza sativa
tctaaagttggagccctttgaaatggattatactgttgcaaacactaccattgttgacaatgtctgcaatattgcggcttgatcaaaaacagagggatattggtgttaacaagaaaagagcgatgatttctgattcttgtatacttttaagatatatacggagtaatttcat

SEQ ID NO: 425655 - DNA, 80 bp, Oryza sativa
tcaatacctgcattatccagagtccctcatattggaagactaactaatcttcgtgagttgaatgggttgagcctcaccaa

SEQ ID NO: 425656 - DNA, 90 bp, Oryza sativa
tttcgtaaattcctccccacgggcggcgactaggacggctagttaacaacaaataacttttaacaaaaacaaatttaatttaaataaata

SEQ ID NO: 425657 - DNA, 74 bp, Oryza sativa
tcgtgctcatatccacaattgatgcatcatgctttcctttctggaattctgaaatgtatttgtagatatcttaa

SEQ ID NO: 425658 - DNA, 279 bp, Oryza sativa
cttttggaaggtttatctgaagctaagacgttggggctgataagtgaacatggatcgtttattttgaaaagggatttgaaatggtgcccaacatttaccaagctaaagactttgttactcaatgaatactggtgtgtgcccgatgatttcagtgcactaagttgcattcttttacgtgcaccggttctggggaatctcattcttcagatctattccctgggacttatatcttagaatgaatatcaaaggaaactgcctttcttcgtatcgattactttt

SEQ ID NO: 425659 - DNA, 78 bp, Oryza sativa
gtacttcgagaatttgttggtacaggaaggcctgtctggtgaactagagctggactcatcttcctagctaacaaggca

SEQ ID NO: 425660 - DNA, 70 bp, Oryza sativa
gacacttcaggaccctctctcaacatcctcatcaagctcatggcggacgaatccctcgttttcgccccct

SEQ ID NO: 425661 - DNA, 60 bp, Oryza sativa
tcgtaactaatttagctgatcctgtggggaagaagtaatggtactgtcaggctctaagga

SEQ ID NO: 425662 - DNA, 306 bp, Oryza sativa
tctataaaacaccactcgctcgctgacatatagtgagagagagagagagagagccagatagatttcgttcttttcgtttttttttcctcccccccccccctttctcccctcttcctctctctttctttctccccctccttctctctctttcttctcctccccctcctctctctcctttccctcttcttcttctcctccctctccctcctctctcttctctcttcttcctttcctctctcctcccttctcctcctcctcttccttcctttctttctctctctttccccccccctcctcttccttctc

SEQ ID NO: 425663 - DNA, 381 bp, Oryza sativa
tcgtagagagccagacctggattttcatgtgagctttgatagagataagttcactaacaatgatattatgcacccaccagtttcaacggtatcgcatgcccttgatgaaaatactagaggagattcaggttttccattggaagaatcgaacaccatgggatctgtgcaatttggcaactccacatatgaaacatctttagtgcattcccctgcagagcagtgtgaagaacctgcgtcatgtattgattcagttgactacatggaaattgacactgaagctggcgttaaagttgaaagatggagcaggcctgccttaggtgattcagttggagtgatggggaatggtacattggtcccggcattggagaatggcttggcggt

SEQ ID NO: 425664 - DNA, 308 bp, Oryza sativa
tcgttttgacgaagcctcctactacattagggatagccatccataacaccgacttgacggtaagcagctagggctatggatctagtattgcatctcaggctacatccatggtggtagaagagctggcacctaacttaaaagggatggcacataggaccggacgctctggtacgaacaactttctggacttccacatgcgtgtgttggcggtcaccattgttgttgcccataggaactgcccttgactggatggatctacgcactatgaagctgtggtgaaggcatggacgtatcaaacattctactat

SEQ ID NO: 425665 - DNA, 205 bp, Oryza sativa
tcgtttcaaaccacgcgaccctcaaacttctctgtgtctcctcatcttcagggttggcggcggctccatcgaatgctggttgggggtgattggatcacgcgcgggctctgcagctgctgctggccctaatccgcttcgcgggttgtaatgagcttatgcggaaactaacgatcagaggtaagcgctgtccagcgagggatgctgg

SEQ ID NO: 425666 - DNA, 234 bp, Oryza sativa
tttagtggagataggctatgttaagtttctcagttgatattaggaataacccaagatgtctgcttatgtattattttagctcctttggcaattcactagttgataatttgctgtaacatgaccaataagcagactaattgtcaacatatattgtattcctgctattggttagaagttttcaggttccacgctattctctcctctctttcttttttatgtacctttttcttttca

SEQ ID NO: 425667 - DNA, 624 bp, Oryza sativa
tacgtatcgaaatgaccaaactatactaatgctcgacacggttcgatttttttcaccgacccaagaagtatagaaagaaaggaagaattatatatttatcaattaaatatcatattttatttttaattctattttaattatttatttaatattattttttttatttatttatatctaatcttataaatattatattttatatattaataaatatttatttttacaatttattttacttttttttcattttaatactataatatttatattttatatattattattttttattattaaaacaaatatgatactaataattataatttataataaattataattttataattttttttttatattttatattattatgattattatattttatatatctaatattatataaattattaatttaattatatttaaaattattataaataattatgttatttttactcttcaatttttataattataataatttattattttattattactataatttaaattattatataaataatataataacaatattataataattatttataatttatatttattaattaatattttttaaaattataataaaatatactatatttatttatt

SEQ ID NO: 425668 - DNA, 218 bp, Oryza sativa
tcgtatttggtattcccatacactttgtttctcttcctcgtatcgtggtcgagagaaacctatatgagagagaggaagtagccttaatttaaaatatacatattctaaaattaatatatcgtaagcaatatattaaaatatctaaatattaattaaataacactattaaaataataataaaaatctaaatataatatataatattaataattaatata

SEQ ID NO: 425669 - DNA, 61 bp, Oryza sativa
ccactttgcatcgcacgcgcaaggcgcagatccccatcctcgttggggaggatgctctttt

SEQ ID NO: 425670 - DNA, 267 bp, Oryza sativa
tcgtttaaaagaggagaaaaggagataaaaaaagaataaaaataaggcggtggttcgcgatatataaaatcgcgtttggagtggaccttttttatgcatctttctacctctctccctttatctgttacacattctctgtcgggctttgtctgtcctatctcttcctttctcttctctttctctctccttctcctttcttctcaccttttttctcttcttctttttcctccttccttcttctcctcccctttcctctctctttcctcc

SEQ ID NO: 425671 - DNA, 94 bp, Oryza sativa
tttcgtccattccttcttcgattcattcctgtctccaattggaggtcacaattgcagcttgcagctagctcaaatttccattttttgtttggtt

SEQ ID NO: 425672 - DNA, 434 bp, Oryza sativa
tcttccaaagttggagccccttgaaatggattatactgctgcaaacactaccattgttgacaatgtcttcaatattgcggtttgatctaaaacagatggttatttgtgttaacaaagaaaatgtgtagatgcaagaataatactcctagtcaattctttctaggagaatatatgattgttttaatatgctgtcaattacttactcattcattctttgaattatccattcatgctgttctttctgccactagtgcatatggattaatactctttgaattaatactctgttcattctttgaattaatagtcttatccattcatgctgctgtttccgccactagtgcatatggatttgatctcaatctattataacttttactataaatttactaccaaatggaaatttgctttgttcaactttgtttctcctttac

SEQ ID NO: 425673 - DNA, 634 bp, Oryza sativa
ctaacagtgtagtggagcaatgggcgcagacaccaatgctttatcctacctggcgtaataaaaaaaatatactcatatttaaaatatatttatatattatagataattatatttatatatatacaatttatttttctaataaaattaatcactaatattattcacattatattatatttaatattatactattatatttatatactaattttaataaaataatactaattataaattaataatttataattataattatatatattttatatattattatattaattattttatattatatttttttataacatataaaatatatatttatacattttcattcaatttatattttaatattaatcatttcatttatacaaagctatattaactatttatattttttatttcttatacataatatctctataaatcatataaatcttcactttactataatttaacttatatattatttatttaatatttatatatactaaaaaaacttattaatcatactttttattatacttatattcctttaatttatttatttaatattttaattattttatattataatattataataatattatttattatataaatataataatatatatataaatat

SEQ ID NO: 425674 - DNA, 71 bp, Oryza sativa
tttcatatttaacattaccggaagcagcaagggacaggtttagaaatcaccgtcgccctgagaggacaacc

SEQ ID NO: 425675 - DNA, 95 bp, Oryza sativa
cataagacaaatgccgccacgccggccggcggcgcagtttttttaatatatgccgttctaacaaacaaatctttaaaattacaatcattactttt

SEQ ID NO: 425676 - DNA, 84 bp, Oryza sativa
gtaatgcatggtccgagctgttgttcgagaatgtaatgtccacctcacagcgctcgattcaatatctgagcataaaccacacgc

SEQ ID NO: 425677 - DNA, 344 bp, Oryza sativa
tcgtcatcttctccgcacacgctacactcctgtcgatcgatcttctcctcccgtctcgatcagctgattcgcccagcctccggtagcttgcttgtgcttcgtatccatggatcctcaccacagctcccacgtccatgccggagccgccactcctaactgcatgtgcaggttgcccaaggaggaggatctagccgccgccgtcgtcgtcgacgacgtcgaggcggctcctcactacacgtcgttgaaggcggccgaggccgacgtcgtcccgagaggagtcggctgcggctgctgctgcggctaaggggactgaggctaggaggtgaactacatggtccgcccgc

SEQ ID NO: 425678 - DNA, 59 bp, Oryza sativa
gaaaaaaaaagaaaagtttaaatgggaaaataatttttaaaaagaaaattttttaaaaa

SEQ ID NO: 425679 - DNA, 118 bp, Oryza sativa
atgagaagcaccatctaccataagcttttcaaacagagagccaagataagcagaaagggggatagtccattatgattggtcaacagcttgatgaacagatgctacatacacgtagagt

SEQ ID NO: 425680 - DNA, 146 bp, Oryza sativa
acgaaatgcaaataatcacttttgaatttaccaagttgtaggtgaagcaattacaggggtacacttgatccttctgaatttagaaagcatggaccgtgcaaagaaaatatacagcccgggatccaggtattttggaatcaaaatac

SEQ ID NO: 425681 - DNA, 109 bp, Oryza sativa
ggggggtaccaaataccatgtgttttccaagctgacagagtgtaaagctcctaattaatttaaacagttatgagaatacaacagtttttatgaacaaaggtttcataca

SEQ ID NO: 425682 - DNA, 200 bp, Oryza sativa
aaatgaaacacaacaaaactttatttgcggaaagtcaatgtgtccacataactgcaatttcgatcatatgagcaatgtgtgacccaacaaaggctatggcaaaacttgaccatgaatgtaaataaaatgtctaaattgaagcaaagtacttcttgctgtacttggggtcaggctttaattgactttttcccaaggtttgc

SEQ ID NO: 425683 - DNA, 291 bp, Oryza sativa
  unsure (1)..(291): unsure at all n locations
gtcagtaatgtcaatttctccggggaaaaaatgtcacttccactgtagtacattacgcaggtacataacctttgctcaactcttggcaatgcctaccatctactgtctatttgtattctttcctcactctagtgtattcatgttatacantctttcaacangaatttgacttaccttagtaacccttcanntcatgcttacctttttaatntttttcctggtttcctgaaatttacttcccagcactttttaagacttgccaaacccaattccccggaaaaaaaagaaaaa

SEQ ID NO: 425684 - DNA, 69 bp, Oryza sativa
aaaggcaaaaatattattcaaaaaagaccccggacattaataaaaccccttgcacaaagatagtcacaa

SEQ ID NO: 425685 - DNA, 383 bp, Oryza sativa
  unsure (1)..(383): unsure at all n locations
cttagctgtaagcagcaaatatgatattaatccaccagcgaatagtacttccaacttccacgtacaattattgaagtttaaatatggtacgcttgcaaatggatgctgcaagcaagatatattaggnccctaccacaccacagtaagaaatgcttaagccagctagggtggaatcatttttcttagagggtatcttggtaaaatgggcctggtgtgccagcgccgctttttcgtcgattggcttcgccgcccgattgacccgtccggctacccacccttttgtccacccttcaccagcccgttnngcagagggggcgacaaccaaggggccggcaagtttgggaagcattctccttttattcggtttttttccatttcgccta

SEQ ID NO: 425686 - DNA, 329 bp, Oryza sativa
ccgatctgatatccgtatataccttccctacctaagtaaaaggggtaacagacacaggaaaaaaagagagaggaagagtgtacatggattagttacaccaacatttactgtattttgacccaagcggccctcgctgggcacgttccttggatacgcacgtagacgagggtagttaccccccggccggcgctgaggcttccgggctttctcgcgggcgtgttcgaaccggtggagcgtctgtacattctggccccctggcgcccgagaaagcccggcggaacggggcagccaccgagccaaagcgcctggtttcattggagttagcccgt

SEQ ID NO: 425687 - DNA, 165 bp, Oryza sativa
  unsure (1)..(165): unsure at all n locations
gcaaccattgcatgcatatgggcaaaaaattctgattccagctcagtggctatgtgaatcaagcagcgtccattatcttctctcattcaactaatagggtacaaaacttgggatggcagntccaccatcatattataattatatgattctactctcgtatttctc

SEQ ID NO: 425688 - DNA, 155 bp, Oryza sativa
ggcaacaaaacaactttattttgaattttatccacaaggacagaaaaaatgcaaattattacaatctaccaatatccaagagtttaaagcccacatagaaagttatgaaatacagatggttcaataagaatttacgcggaaaaacaaacccccta

SEQ ID NO: 425689 - DNA, 298 bp, Oryza sativa
  unsure (1)..(298): unsure at all n locations
acaacacaacaccgattggctctgcggcgatataatgtcagcagcaatcaaagaccggcggcggctgggcagaaacatgcacgaggccggcaacacaaagggcgcaaacggacgccaccatcaattttgtgcttcctaaaatcctatggacaanntcagaacatngcagatacaccccaagatcgaaaaagggggaaaaaaaaaaaaggggggcggccgtcttcgccgccggaccgccngtgggtcgaccccgngagaattcgcggacccggttaccctgcnnaggcgtaccagcctt

SEQ ID NO: 425690 - DNA, 333 bp, Oryza sativa
  unsure (1)..(333): unsure at all n locations
aaatccgggaaaaaaacacatcacaattattaccgagcacctctatgtacattgtacaggatgggttccgttccatatggacataactctccattgaaggaaaacctcaatctacangttgccctaagaaaggttcgaaagaaaggtgaaacattctcaaangactcgccagaaatcccgcattaaattaaacagcttttcaaaggacttggaacaaactccttgccaccctcttaacgccaattaaaacccggttttacagttaggggccggctttaagccccaaaggcgaaccaaacacagctcagcaaaaaccataaaccatttttgtgc

SEQ ID NO: 425691 - DNA, 374 bp, Oryza sativa
  unsure (1)..(374): unsure at all n locations
aaagtgtaatcctccctcctctataaaatcaagccccaaattaccaaccccccccttctcttcccagctctagctagctagaaataaataaacacatacatatatatagttacacactagagataaattaattactaatccagaaaatatttatagctggcctctaattgaaatttaagctagccatgcatcctaatngctttactacnttcttatgngcaaggctaaccctagaggnnnagctagnnagctagttggtnagcttagttagcttagatccacccctgagcgcatgcttttgaaacccagcatgtcaaatgggnagtatttatgcatcatgaatcttttgagccctcgttcgtccggcccatggc

SEQ ID NO: 425692 - DNA, 117 bp, Oryza sativa
aatacttatcgaaaaaaaattaaaaatgccggaaaaactggactggactataaccttaaaaattattatctactctaaaaaaaaaaccccaactttttttatggtaataccctggaa

SEQ ID NO: 425693 - DNA, 204 bp, Oryza sativa
gattacaaaaccaggtaccttgattggcatggtatggcataccgggcctatcaataattataaggatcatttcgcattgaagcatgtagtctattgaccatggaatcgggcaaaatgaaacaacgctcctaacatgcctattactttaatatattcactcttcacttttctgcacaggacgggacatagagtagaggggtagca

SEQ ID NO: 425694 - DNA, 176 bp, Oryza sativa
  unsure (1)..(176): unsure at all n locations
ggggaaaaaaatcaatattcatccatccaatgctgaatacaacaccttactggaacaaaccacactaaaaaaaatagtggtggtggcaggaggcaagtatttcatcaagtagatgcattgtccctacggggttacattccaaacctgttgagggttntccagccactataatcatt

SEQ ID NO: 425695 - DNA, 150 bp, Oryza sativa
tttttttttttttttttttttttttttttttttttttttttttttttttttttttttttttttttttttttttttttttttttttttttttttttttttttttttttttggaaaaaaaaaaaaaaagtgtaaaaaatttaatttttttcc

SEQ ID NO: 425696 - DNA, 92 bp, Oryza sativa
tttttttttttttttttttttttttttttttttttttttttttttttttttttttttttttttttttttttttttatattttatatattttt

SEQ ID NO: 425697 - DNA, 60 bp, Oryza sativa
tttttttttttttttttttttttttttttttttttatttttttttaattttttttttttt

SEQ ID NO: 425698 - DNA, 340 bp, Oryza sativa
  unsure (1)..(340): unsure at all n locations
ggtagaaaatgtggctcggcttcgccaagcagatgcgacttgggacttctgaagtctgaactctgaacacatgcgtctctagctgttttcctctacacaaatggaggcgttgacatgggnttctttaggtgacataacccacaccctatggttaacctaagagagccacacccataccatatcacattacactgtaataatgctatttaaccaccgtgggaatgtggagaagttgaccatgccatccaggaactgtaccgccagtccgtcatcctggcccggccggagaagccttctgatggcctttccttggtttgaaagatggggagtcccttcgccc

SEQ ID NO: 425699 - DNA, 51 bp, Oryza sativa
gggaaaaaaaaaaaaattaaaaaaaaatatttataataaattaaataaaaa

SEQ ID NO: 425700 - DNA, 119 bp, Oryza sativa
gcaaatagaacttcatacaatattatcttccactattcgtatcatatcccgcaacctgctgggtcaggccgtggtgcggaaatatatcccgtcccgttttttcaccccttaaatttcat

SEQ ID NO: 425701 - DNA, 147 bp, Oryza sativa
cagaaacggaagagcgcaatcactaccaaagggccaaaatgacgttatagcacattaactccagcagggcatttgctaaaaaaaaaaggaaaaaaggaagtcaacaggggttagcacccgttctccccatggcgcagaaaaatccct

SEQ ID NO: 425702 - DNA, 137 bp, Oryza sativa
agaacaaacccaaaataaataatttatagaaaatgtgtcccacatgtagaaccatacatagatacatcattcacttgatgtaaaaattgttagcctttcaacaataatacctatttggttagtatggcttgtgtctc

SEQ ID NO: 425703 - DNA, 91 bp, Oryza sativa
aacaaatcccccaaaaatggacattgcacgtaacacccaagatgattaccaaaaagtgaaaagaaatccaaggccttaacacctttccaaa

SEQ ID NO: 425704 - DNA, 310 bp, Oryza sativa
  unsure (1)..(310): unsure at all n locations
aacatagaacatgtcttgccactttttttcgccgggaaggccaaaggaggccatccgaatgcattaaggagaaaaagttacaagaaaaaacacaacagaaagctgtcgaggacggatgcgcaccacaggngtcacgtcctaaaannccacacgcttaaccnatcaaaagcaccaaacccactganngtgaagcctttagcacccaaaanccgacccttcgccttanntgcgtggcnttgatcgccccgctaggnnncccacgacaaccccaccacaaaggaccgagaactttcggaaaaacgattgccca

SEQ ID NO: 425705 - DNA, 320 bp, Oryza sativa
  unsure (1)..(320): unsure at all n locations
agttcaatgtaaacgacgctggggtaaataatctacaagtcatataaggattaagagtgcatgttttcgtccaaaatgcatgcctcagatggtttgtttccacatgatcatagcggtagcaggtatagatagcaagggaagttccgaggcccccagggtctgacacanacgacttaacacccacgacataccatttattcanaggtggcgcttacattcttgcaccagcaggaagtattccaccaggtctttatacctatgtgtaggtttaagtttctggggaccacactttttggctttcagggggagcaacgcaccga

SEQ ID NO: 425706 - DNA, 285 bp, Oryza sativa
ggcgccggcgcggcggactcctgttgtctcctcttccgtgcgcgcgcgcgccgccgtggccacggccatgtggccaggtttgcggcgtccgcttcgggggccggcggcgaggaggccggggagccgtcggaggacgaggcgcagagggagtgggaggcggagatggcgcggcggctgaaggaggccgaggagatggaggagctcgagcgcaccgccgaggagcctgcagagcccaggccggccgccgagggcccccgaccagtcccgaggaggagaaagcgcgag

SEQ ID NO: 425707 - DNA, 58 bp, Oryza sativa
gagcaggcgaggaccatctggtcagctatacttaaagtaggatgaactttacaccatt

SEQ ID NO: 425708 - DNA, 137 bp, Oryza sativa
cttccttcattctttgtttgtaaatgaaattttagcactcattttaaagtttttacaatcagtggtagagtatacagatgctggtctggggtatcaaacatggttatgtactggctatcccttacacaaaatactag

SEQ ID NO: 425709 - DNA, 97 bp, Oryza sativa
gcaggaagatcaaggttcatgaggctagctagctcagtgcctgaagtgcctgacgccggtgaagaggagggagaccccgcacttgttgcagcagtcc

SEQ ID NO: 425710 - DNA, 73 bp, Oryza sativa
gagaaaaaaaaaacttttatttaaaattgaaaaggtaaactaggagggaggcaaaagaaccaagtttttaaaa

SEQ ID NO: 425711 - DNA, 96 bp, Oryza sativa
tttttttttttttttttttttttttttttttttttttttttttttttttttttttttttttattttttttttttttcttttatttatttatatttt

SEQ ID NO: 425712 - DNA, 222 bp, Oryza sativa
cccttctcttctcccccggggtttttttaccgactccctctcctctcccacccgctttctctccccaacacctcgaatccggtcacaactcccccccaccagttctaaccctaccttcccaacccccccccccccccaaccccaacccccccccaccccacaacaaccacccccccccccccttccccccaaccacccccccactccccccccccaactccc

SEQ ID NO: 425713 - DNA, 154 bp, Oryza sativa
gaaacaaagacctgaatagagccacagacgaagtcaaaaccagactatgcattgtatcatttgccaaggacccgacaaagacttgaccgccacccaaaagctcataaactgtacaagcaaaagcccaaaccatcctcctgcttcgcggggtcta

SEQ ID NO: 425714 - DNA, 160 bp, Oryza sativa
cgctatattatgcattaaacaaaggaatacgatacaaaacattgctcattttaggtacaaggctagtctagctctactttagtttcacaacaaaagctattacaaaaagaaaaacaaaaacacgaatttcataggagcgaattcatcctagtagcctcag

SEQ ID NO: 425715 - DNA, 93 bp, Oryza sativa
ggggcaaaacaatatgattgattatgttttatttcagttgctagtaatatgtcatagttgtagtttgacataaataaggaagcaaaaaagata

SEQ ID NO: 425716 - DNA, 53 bp, Oryza sativa
ggttagtaacagtcagtgattttttgcggtacaagataaaccctacaacgttg

SEQ ID NO: 425717 - DNA, 80 bp, Oryza sativa
cgggaaaacatcatgacatcacaaaaaaagaggggacattactaaagggcactaacatcaacatgcaaaaaatttccaaa

SEQ ID NO: 425718 - DNA, 56 bp, Oryza sativa
ttttttttttttttttttttttttttttatttatattttttttttttatttttttt

SEQ ID NO: 425719 - DNA, 111 bp, Oryza sativa
cagtaaaaaatggaggggcactcattcaagcggtacttgctgaacagaggaaaaagaccgaactgcaaatacacaaccaggttacgcagcatccacgagagaccacaatgg

SEQ ID NO: 425720 - DNA, 175 bp, Oryza sativa
tgtcggttcgcgctcaccttgtacgtccccgccgcgccgacgttggtgagcgtgcgcctgtgcgtcaccgtcgtcgccgtcgatcctgagctctccgccgcctgtctgaatagccgtcgagtacgctcacgtggaaggacagggtacgtgtgaggattgtacaacggagtaggtc

SEQ ID NO: 425721 - DNA, 93 bp, Oryza sativa
caattttttttttttttttggggtatttattttttttaattttaatacattttattttatataaaatcaatttaataaaaatacactacacac

SEQ ID NO: 425722 - DNA, 91 bp, Oryza sativa
gttatgttgttacaatttttttttaggtttttattttaagtattttttttttgaatatggaaggaggcaaaaaaaattccaacagcaaaag

SEQ ID NO: 425723 - DNA, 358 bp, Oryza sativa
gaagaatccgcaatataaaacctcaattattatgatttgtttctaaaaaaaccctatcaacaataacaacaacaaaatcaatatttgggctcgttctgctgcattccccatggctggctgcgcgttgtagacctgtacagtgttcttgtgtcaacaacaagcgaatgcataggcttgttccctgcagacgaagaaaccgccattttttggaggctgaccagtattctcattcccttccaccaaaacgacccaaaaattgaatattccctttatcatgagtacagaagggtttgccccgatttgacccagatgaaacttactgccatgtccgaataaacacgtgacacaaaacggggag

SEQ ID NO: 425724 - DNA, 381 bp, Oryza sativa
  unsure (1)..(381): unsure at all n locations
aaaatgaacactagcaattctgtcattcatttccaatgttttacatagcaacatgccaacattcattagaatcgttctagtcatgaaaacttaatgattaaagcaaagttcaaaatgcataaccagacaattgacgcccccacggttcccttcatgtttccttcattgcgagaaaaaaanntgggtgaaaatgaaacaaatgtccggaacttcaaattgggcacatgnaaaattgtctgaaataaattnnnagctgcctttttctccttttaaagacccaaacgaagccaggattttgcattattgccaagccaaaatcaagatttgccattgcagtttaaattgttcaagtttaaaatgcatttgcatgccaatgcaacg

SEQ ID NO: 425725 - DNA, 75 bp, Oryza sativa
caaaaaaaaagctggttgggttcctttagggcacctttaaattaatatattaggccaattttggtcaaggaccgg

SEQ ID NO: 425726 - DNA, 398 bp, Oryza sativa
  unsure (1)..(398): unsure at all n locations
ggagttcaaccagactttttaaaaaaataacagaaacatacagtaatgtggcgccgaaacaacaggtgacgcattatggtagacatgcaaattaaccagctacaatcatggaacgcttttgtttgctcaaggggcacgactccacactttgcaatnaatagtttcattcctttcctgtcattcttaaaattagtacaaaaaacctttatcgattcctttaactatnnnggaacccnnaaaagttacgtcaaaaaagctttgggtgtaccaacatgttacattatattaggannctaaagatanntttctnngcattacacttccaannnaagtatccatcctgcatcaanaacagatccaaaccgactggctttgttgttggtgttcaagngggcagg

SEQ ID NO: 425727 - DNA, 290 bp, Oryza sativa
cccaaaaaaaggggggaaaaaaaataaattccccccaaataaaaaaacataaaaaaaaccccccaaagggagaaaaaaaaacttgtttttaaaccagaaaaaaaataactgggggccccccgccctttttggatgtagcctgggaaaaaaatggaaggtcaacaaaaaatgtggggaggttaacaaaataaagaccaaaggggtttttaaccacaaaattggggggaaaaaaaattgggaaaaaaaaattttcccgcaagattttttggaaaaaaacaaggtagggaaaa

SEQ ID NO: 425728 - DNA, 108 bp, Oryza sativa
acggaatcaatggtgaaattaattaattcccaaacatggacatttatacatataaccggccggcggtggcggtggccggcggcgggcggcggctgtccggccgcggca

SEQ ID NO: 425729 - DNA, 194 bp, Oryza sativa
ttttttttttttttttttttttttttttttttttttttttttttttttttttttttttttttttttttttttttttttttttttttttttttttttttaagggggaaaaaggttttcggggctttttataaagggcaatggggggaaaaaaaattttaaaaaggtttttaaaaaaaagggggaattttgcgggg

SEQ ID NO: 425730 - DNA, 395 bp, Oryza sativa
  unsure (1)..(395): unsure at all n locations
gagctcccaacgcagttcttcaattcaaaaagactgcccaaacagaccaagggtatcatcatagcagcaaagttttttaacacgcaacatcaaagagacactaatgcaataagataaccttgaagcgcgngatcactagcaaatnttcgcgcctttagtcgaccctcctcgnatacttgggggcccagcaacccgcttgcccgcctgtccgtggnggagcncaatcgtcccttcgtccattgccgaccaggccattgtccggcgccaggcgccctggtgacatctttgggcgatgatggggttttgcagaatgcccctccaagctccctttcatccttggtcattcgaacctctatcacgcctcggccgaggctggttttgccgtccagcccact

SEQ ID NO: 425731 - DNA, 73 bp, Oryza sativa
aaatattattaattattatgataatttaaaaaacggtataaaaaaaataaattttttgtatagaaaaggaaaa

SEQ ID NO: 425732 - DNA, 265 bp, Oryza sativa
aaaaaaaaaaaaaaagttttttttttttaaaaaaaaggaggtcccaaaaaaaaaaagggggtcaaaaggagaaacaaaaaggaaaaaaaagggggaaggaccaaaaaaaaaattattttgcgggttttcaaaaaaaattttttggaaaaaaaaaagggggggggccccaaggggaaaattgaaaaaacgggggaaaaaaatgggggaaaacaaaatggatttgaaacccccaaaaaaaaggggcaccggggttttttagggcaaa

SEQ ID NO: 425733 - DNA, 142 bp, Oryza sativa
aaagcaccctttattaattgcgataataaggaagttgcaacgctttaaggtagagcgaaagcgagggggcaaaaagaacgggcaatataaccgggcggaacaggtcagtcaaaattattagcccgaacagaaacaggggggg

SEQ ID NO: 425734 - DNA, 370 bp, Oryza sativa
gaaatgcacagtactagtagtagaatttttggcaataagtttcgggccattgaatgcttacagtcctttgaatttcctaggctgccttcaccataactgttgtctagattccagaatcgctccccctggccgccgaagaaaccctgttaaagtgtataccaccctggagactttctgaggagggggaaattcacagagaagcttccacaatcgcaaaggcctcctcttagtatccccacttataaaccaaagggttcatacaaccagaaatggagaagggaacgtggactaaaagcctcatgtaaatttcaaggatatattcggcaaggggtcaaggactcggggttttgtaattccctcttcccttttc

SEQ ID NO: 425735 - DNA, 171 bp, Oryza sativa
acccattaggatatacccaggggggttccgccatcagggaaaacccaacaggaagcacacatgttgggggaaaaacacacgggaaaaaggaacccacaacagaaaaacccactcgaatccaaaggaaacaaaaacaaggaggggcgaacaatcagaacaaagaaaagaaaa

SEQ ID NO: 425736 - DNA, 181 bp, Oryza sativa
ttcggccttcctttttttttttttttttaaattgattgctgaaatttggtaaccttggtacaaatgcggccagcatgcgagcaatgaggggcaagcaaggatcacaattaattgattgaaatgcaagactatgggcgttatcattcaacggtggccgcgaagtccaactaaaatatttatt

SEQ ID NO: 425737 - DNA, 96 bp, Oryza sativa
gggacgcgcgcagcatgcattttatttaggcccgggccacaattcaaacatgtataggggatacctcttgggcgggagacacctcacgggtatagg

SEQ ID NO: 425738 - DNA, 65 bp, Oryza sativa
gggaaaaaaaactggtcaattttgaatttttgagttctgattggggaaatgccaaagggcttctg

SEQ ID NO: 425739 - DNA, 397 bp, Oryza sativa
atatcaactcatcatgttgcatgattaacatgatcaatcaacaacagaggtaatgataaacaaaaaaaaataaaaatgaggctttgttaggccttaacaaaggatttttggcatagaatatgtcttggtgcaattattctatgggattaaggaatcatttcacctttggggcttcattctttacctcgtttcagggcattcagagcggcacctttggaggacgcgggcagaatagccactgtgtgtgacctctttccgcgcgggacccctcggggctttccgcccgcggccttgtccgggctctctggcagggtgcctttccggagggccaaacaacaccctgtgaggtgtggtggttgactggttggaggccttccgccaaattggccgccactgc

SEQ ID NO: 425740 - DNA, 58 bp, Oryza sativa
aatataaattaatttaataataaaaattgaaaaaagaaaaaaaataaaaaaaataaaa

SEQ ID NO: 425741 - DNA, 255 bp, Oryza sativa
  unsure (1)..(255): unsure at all n locations
caatcatccatataataataataaatatcggaaccatgttagatgtcaaagaattacaccgacttttaactccaattttctaagcaactggcacgcttcgtttctgaaaaactccacagattggtattgggcatggcacctatggcctttaccaggccaaaatccgaccttcttttgaccaacacttcaactttctaccacaagcttaggagcncgaggctaatttcctgggataatttcctgaatgggtgttca

SEQ ID NO: 425742 - DNA, 273 bp, Oryza sativa
attaggaaaaacaacagaaaaaaaaacttgcagaagggggattggacaagggccaaaccaaaaaaggggttaaaacaccataaagggttttttttgggggacaaaaccttaaaaagggggtgcagggaggttccgggttcatattaagaaggaaaaaaaacccaaaaggtgccacaaaggattttgcctgggtgttttttccacttttaaaagaaaaggcctttatgaacttacttaataaaaaagggcaaaccaaaaaggggacaattttgg

SEQ ID NO: 425743 - DNA, 61 bp, Oryza sativa
ttttgtgtatatattttttttttttttttttttttataaagtttttttttttttttttttt

SEQ ID NO: 425744 - DNA, 261 bp, Oryza sativa
catcaaaaaaagattttattagcaaagaacgggggataaatgattccacatgccgactcgatgaatgatgctaattattaccaggggtaaacggactaaagttggcgtaaacaaaattctagctgaaacaacaccagcatgaactggaatgcacaattggtagaacagcatgccttatgtctattttacatggtgacacgagaatactcactttcggctgttgcttgaggatagattcctctagtggttctaccagtttaa

SEQ ID NO: 425745 - DNA, 335 bp, Oryza sativa
ataatgccacgtaggataaagaatcggtcaagactgtcacgtaggcgccatgtcagctgaaaccatcatgtttgaaggacatgaatcatacccgggcgcaatagttgagggagccaaaatatactgttttcctttcccttttaggcttgacccatcttccttttcttttgtagagcggcccaaatccgaaagggtggggagatcagatgggcttttggggcccacattatcattttgtctttttagaatggtttttttcgaatcagttcgatttaaaatttacaaagtttacaagggttaaaaaaaaaaaataagggcgccgccggacgcggggg

SEQ ID NO: 425746 - DNA, 145 bp, Oryza sativa
gcagcaactgacagatatttgtattaaaggggatagcaacgttaagagtctacagaatatgggaacatcagaaatacaaaaccaccggttccagcctttgagcatggtacctatacaaacgatcacaaacccaaaagcgtaaaca

SEQ ID NO: 425747 - DNA, 164 bp, Oryza sativa
aggcaagccccatccaacttatatcaacccatcatgttgcatgattaacatggacaatcaacaacagaggtaatggttaacaaaaaaaaaccaaaatggggctcttggtacgccttaacaaagggatttttggcatagaattatgcttggagcaatagattcta

SEQ ID NO: 425748 - DNA, 369 bp, Oryza sativa
aaacaatgaacagggattcttgggaaaccagatctctccacaatattatgttatatacagctcatgaatggtccagagcagcagcagattacaaacgatgccagtacattttgacaggtccgggaaacaaagtgaagacattgaaatcaaagtatactatagagtacacagaaatgttcccaactagtgaccctatgtattagttttttttccctgttcgtatgtattagagcagaaatttaaatgagacaaaccggcaacctcttatctatgctgtaatctgtatccttatcatggctacactcaaaaagtaggcctttggaacaagaagcagggaaaaaaatccactttctgggcagcaaaacgttg

SEQ ID NO: 425749 - DNA, 85 bp, Oryza sativa
ttttttttttttttttttttttttttttttttttttttttttttttttttttttttttttttttttttttttaatttttttattt

SEQ ID NO: 425750 - DNA, 399 bp, Oryza sativa
  unsure (1)..(399): unsure at all n locations
actgctcattgcaagcatacttttgttccactttcaatccatttcatgtcctgatccaagcaaccagaccagaaatgaccatgaacagtttgctaatgttgcatgcttacaacaatgtgttcaaantcccaacagntctaactattttcaagttgacanntggctttatatctaaactaaaagtgcaaaggttgatctccacncnnagcaaggannatcatcnnagaaatcaaccccacttctcaactccaggtgaacccaactgacacaaaacacnnttaggtagttttggaaggacccataanccatcaagaacctctcctttgaaaattttttgtaattttggatccgcaaccgatttcagatgccaagatgaaaacactgtctgaattcccactc

SEQ ID NO: 425751 - DNA, 177 bp, Oryza sativa
tttttgtccatatctttgtagtcttgaagccataacaaaaactggtcatgcccaggtatggaccgcgcgcgatctgatacacaggctaaagcgtaaacatagcaacgtgaaaagcctgacagggcgcggctacaaatggcctggttaaaccgatacaaaggctgcactcctgaacaa

SEQ ID NO: 425752 - DNA, 366 bp, Oryza sativa
  unsure (1)..(366): unsure at all n locations
gcacactataaaagggtaatactactccattctgaatatctcttaagatacaatacaatgagccaccataattcaacaacacagaacatgcatcgaatttggtattcccgtctcaattcaaacagttagcataagtcttcacataccatgtacaacataccggatcacatgcgtgccacccagatgtcaattacannncttagagcactccccacatgttttcagcaaccaagcgcacgggcccttgcttggtcccacgcattgttcgcccgacggtccgcccggatggcccgtcttccgtttgcccgacttcgtcagcgcccgaacacctaatgggagaaacggggagtgttgcgcggaagtagt

SEQ ID NO: 425753 - DNA, 346 bp, Oryza sativa
gatgaaaaggtattttttattacatgacactaaacataaaccagttcacttttgattggaccaagggccccggtagaccactatgggacattttattaatttacacatacttgaagggctaagaggggaacttcctaggccatactggatttcccaacaacattccaattttccctaatatagactggaaacaaggttttaaggatattacaacaatattgaagggcatttatttcaatatggacataaggagcaatactcggcaatatgagtagacactaactggatgctgtgccgaagatgttgtggtaggttattttgacgggcgcatatcagcactgtgaga

SEQ ID NO: 425754 - DNA, 133 bp, Oryza sativa
agccaaaaacaaaaaatatgcataaggatcctatatcaaagatccagagtaccgataagctaatgggcaaatctaaccattaattaatgaaaaagaaatagaaagatccatggcaaatgttatgcactcaaaa

SEQ ID NO: 425755 - DNA, 270 bp, Oryza sativa
tttcgttcaacagcgacgaagcaaaccctaggggagggggacatgcaccaccggcgacgaaatcaccgacaccagcgagacaccaccgacacaaaagccccccagaaggcaacccagaggggaccctacgacaaaaaacacacacaacaagcaccaagcgaagagaggggcgagcattaacgcacaaacgatcaccagatacaaaagacaaaagcgccaggaacaccgggcacaaaaaagaagcaacgactgaaaacagaaaacgactaa

SEQ ID NO: 425756 - DNA, 260 bp, Oryza sativa
cttccttcaattcccttcccacccaaaccctaaaacccaaatggtcatcgcaggacgcctggacagtgagccgttcccgagacacgtcagtgaggaaccaattgcgtgcggccccgagggggacatgatgaagaactgaagagctaaaagaacatctgctgtgaaacaattgaaagcacaacaccgtcttatccctagcggtccttcaatctagaataaagctctggagctctggtcactatttgacctctctaacgccc

SEQ ID NO: 425757 - DNA, 122 bp, Oryza sativa
tctctactaccaagatagagcaaagcgtaaaggagacaattgcctagaggttatatggcgctatttaagaacatttgtgtcattttttcatatctttacatatatatttttctgcccttttt

SEQ ID NO: 425758 - DNA, 261 bp, Oryza sativa
tcgcgtacctctccgagctgcgacttgacgtggtagccatggaagcacgggacctggacatgcttgcaaggatgccagcactccgcacactctgcctgagaacccaggcgagattttcatggacagttggtggtgccggactgtttccgaacctgagattctgtaggatggacatagcactcacattttttcaaggagccatgccgatgctcatgaagcttcaattatggctgtgggcgtttgacaatttttccctcactg

SEQ ID NO: 425759 - DNA, 241 bp, Oryza sativa
atacataggaggcaatcccctgtttcttgctcctcccctgtgttcccggcggcggcgatggggtgcgcggtgtccaagggcgcggcggttgtttctttttctttctatttatttttttcctttataatttctttttttttttttattttattttactaatatttttttttacataattttttatattttttatttatctttatattttttttttctttctttataattctctttatttttt

SEQ ID NO: 425760 - DNA, 81 bp, Oryza sativa
agcgtttgctagcatcaagtggaattttatggctttatcggcatcaaacagggaatgaggacgctcatcttattccactat

SEQ ID NO: 425761 - DNA, 434 bp, Oryza sativa
  unsure (1)..(434): unsure at all n locations
gttcttgcctccgccgccgccttcttccgctcccaattcgggcccgaattcggtccggggggggttaaatgaaaattatttttttatattattttttttttatattttttatttatttttttttattttatttttatttttatatttttttttattnttttttttttttattttttttttttatttttttttattttttatttttttttttttattttttttttttttttatttttttttttatttttttatttatttctttttttatttattattatttttataatttatattttttttttttttattttttattaatttttatttttattttatattttttattttttttatttttcttttttatctttttatttctttttatttttattttttcacctctttattttattcttcttctctttcattttttt

SEQ ID NO: 425762 - DNA, 281 bp, Oryza sativa
gtcgtctctggcgcatttcctcaggaagactgctgctgtgcctgatgctaccgtcatatcagagcaccctgttgtcagggttggtgttgtttttagcctttgtcttacctcctccacttttctttttatcttttttttttctttttttactttttttcttcttttattattctttcttttttctcctctttcacttttttttttcctcttcttttttctttcccttcttttttcttctcttttcttttcctctcttattttttttctttctttcttttttt

SEQ ID NO: 425763 - DNA, 689 bp, Oryza sativa
  unsure (1)..(689): unsure at all n locations
cccccctttttcctttccttttttcccttttcttcccatctcttccttttatgctctccctgctcccccccccctgctgccctgttggttggntnnttccctccttcctctcttttgtcttcttcttcttcctctctcctctttttcctttctttttcttttttcctcttttctttcttttttttttttctcctcttttcctttcttttcttctcccctttcttttctcctttctttctttttctctctttttcttttcttttttttcctctccttcctttctccttccttcccttccctcttttttttttctcttccttctctttttctttttttctctcccttctctctcttctctttcttccctttttcttctccctttcctcctctttcttctttctcttcttttctcttttcttttctcttctccttcttttttctttccttttttttttttccctcttttttttcttttttcttttttttttttctctcctcttttttttcttcctctttcctccccctcttctttttntcctcttctctttttctctctctccctcttctttttctcttcttcttctttttcttcttctcccnttcttttctccccctcttctttttttcttctccttcctttcctcttttttcccctcctccttctctttccttctccttctttttctttc

SEQ ID NO: 425764 - DNA, 131 bp, Oryza sativa
gttcggccgccctttttttattttttttgaggggaccattttatagtgatcagggtcagaacctgcacagaaatggatactacgggttcagatctcacccgcttttttaattatcttgttatacattattt

SEQ ID NO: 425765 - DNA, 144 bp, Oryza sativa
  unsure (1)..(144): unsure at all n locations
gcgtcaacctccgacactgtncccctactctgggggggcttccagaactactccgccggcttctccatgacgacggatatggccgacgacccccttgacccgccgacggagccgcagccgcagacgctgccggcggaagcagcc

SEQ ID NO: 425766 - DNA, 286 bp, Oryza sativa
  unsure (1)..(286): unsure at all n locations
acatcncgccgtccggcgatcatccttgataatctcaattaaaattatacatccctttgttatcgatcatcgatcatcagattggtggctggctggctaggccttatcagtttggaaccggatgctggttgaggagctgagttggagtgtcattctcttggattccaggacttgtttctgttgtccttttatctggttccttctttcttatttttttttggttttcctccctctcattccctcctcttttacttcacctcctcccttttttctcttcttttttttc

SEQ ID NO: 425767 - DNA, 286 bp, Oryza sativa
ccctcatcgtctcgtcgtcctcccggagcgaccgcctttcgccctccctccatggcgtcgacggatgccgacgaggaccagctcctcaagagcttcctcgccgaggtcagcgaggccgaacgcgacaacgaagtgctcaggattcatggttgctcaagttaatacccctccgagcattataagtcttcattttaatctccagttgactatgcgattaaagattatacgatgttaatcacattattcttttatatttatcctccccattctactcagacattttatt

SEQ ID NO: 425768 - DNA, 163 bp, Oryza sativa
atcgtcctgaagggcaccgagctccgcctcggcctgcccggctcccactcgccggaccgctccccgcccgccgccacgctcgaccttctccccgctgccaagggcgccaagcgcgggttctccgacgaggcgcgtccgctgccggcgtccgccgccgccgtcg

SEQ ID NO: 425769 - DNA, 304 bp, Oryza sativa
ctaagccaagatacaggagcgataggctccgcggcgttcgtcgccgaaactccactgttcatcttcaacctccagccatttttgtgtgtgagagaaagagagctctgttcttgtgttcctaggctgattccaacaattggtatcagagccggatgacgaagatcggagatagctcgccaccgaagatcggagaaggctcgagctcgggtgccgccgagcgcgtcatggccaactccagcgtcgtggagctcccgctattgacaaggaccaactaccacgagtggtctttggtgatgcaggtgag

SEQ ID NO: 425770 - DNA, 417 bp, Oryza sativa
  unsure (1)..(417): unsure at all n locations
ctccttcccaccatcttccgctgccactttcgccgtcgtcgtcggcgccagccaccgcccttctccccaaccaaccacgcgcttcccctctccgcttccacctcctctcgggttccctcccgtcgatgccaccgcgccattcctcttcttctcctcactcgccctgcggctgaagcaatggagctcccgtgcccgaggctgctgctgcttcttcgtcttcttgtgttcttggttgcggtttcttggccgctctgcggcgcagggactgaaggcctcggagttggagaggaggggttgagcagcattggtgcttcttctggttctaggaacgttagaagacttctgcagactggtggagtaaaccaaggtgcaccagctcctctaccactggaacattctncatcagcatcaggaccg

SEQ ID NO: 425771 - DNA, 70 bp, Oryza sativa
ggaattcataagggagaatgatatgttattctgtggggttgatttcaaggaatgccccctctaccagctg

SEQ ID NO: 425772 - DNA, 473 bp, Oryza sativa
ctctcctccgcccttgcgccgcctccgcggagccctcccctccccgccggcggcggttgcgaagcgactggattggatggcatcgagggttccgtctccaccgtgcgcggcggcgcggtccggttgggctgttccgttggtctccgtcctggtcgttagctccggcttttcttgtgtgtctgtcttttttctcttttttttttctcgttttttctctcttcttctttttctttctgtttttttctttcctctctcttctctttttttttttttttctctttctcttttttttttctttttttttcgtcttcctcctctcctcctttcttttttctttcttttttctttttttcctcctttcttctttgtttttccttttttttttccttgtttttttcttttttccttgtttctctctgtttctcttctttcttcttttttttttctttttttttctctatcttcttttttct

SEQ ID NO: 425773 - DNA, 499 bp, Oryza sativa
tctttagctctgtgcgtcgtcagctctcctgcccgggacagtgatgagggcaaggagccatgcttgtcaggttaggcgtcgttgttgtagcctccgtctcagctttaactcttaagagagccaacagtggctacagagatggccaagcaaggtaaggacaggataaaactcgctactctttacatggggagcatgaacaagagactggcgtggttaaaacatttaaaggaatttatctatctatcatggagctatgattcgtccgatgaatcaaatggttttgatctacatttagttggctttacttgagacccatattgtggacacttacaaaatatttcctctacctttgtagattcccaatatttgtcatctataactttgtcctgtgtaactttcagttttccaatctttcccttattacattttatatatgtatcttttctcattttacttgtcttttataatcctacttcctctatttactttttattttttc

SEQ ID NO: 425774 - DNA, 214 bp, Oryza sativa
ataattatttttaataattttagttttttttttttggctttagatatattcccaatccccaacctcccaataatccgatctctcccagttctgttcggatcaaggctgtgtcgatcgcaaaaaagaaaaaaaaaaacaatttccttttggggtggttcatctgttgaccacttttttgtttcctaccctcttgtctgcttttcctttttatatt

SEQ ID NO: 425775 - DNA, 290 bp, Oryza sativa
gctaggtcaaatcgatcgatctcgatcgatcgggtggtcgatccgatcagcagccatggagtaccaccaccggccgcattcgccgccgccgtcggacgacgacgtcgtcgtcatccagatgaacgccgccgtcatcgccgccgtcgacgagtggagctccaccaacgaggtggacgacgccgccgccggcaagggcggcggtctcacccgccggacctttagccaggccttcaagatgaagcaccggacgccactggagttcacgtggaggcaggtggcgttgctgagct

SEQ ID NO: 425776 - DNA, 120 bp, Oryza sativa
agtgccgctccgaaccccctctctcccatcggcgtcgtcttcgtcgccgtcacagccgctgtcctcgccgccgccgacgccgatggagatggccgtccccgtttcccccgcgccgtgctc

SEQ ID NO: 425777 - DNA, 94 bp, Oryza sativa
actaaactgccatgcccgtatggccacagccggtgccgccgtggaccggcttgtacggcggctagccgcagatgctggtcgtttgaagctgctc

SEQ ID NO: 425778 - DNA, 83 bp, Oryza sativa
taataatgctgacctcacattagttagtccggaaggtttagggaggttcagcgcttttatatcaacctcatgacttcttctcc

SEQ ID NO: 425779 - DNA, 69 bp, Oryza sativa
tagcgagcggaggaggaaaaatcaatctgccgctaccctcctagacggtgccgggctatttatacactc

SEQ ID NO: 425780 - DNA, 77 bp, Oryza sativa
ataactgcttgcgagcttgccaactccgcaagggggcatatatacaccgatcgagatcgatcggagtagagccacac

SEQ ID NO: 425781 - DNA, 321 bp, Oryza sativa
gtctgaaggaagaaacctaaccctaagattgcgattcggcggcagcgacgaggcgtgggcggagatgaggaggcccaccatagaagagaaactggcgacctactccatgttccaggttcgtcagggatccaccgtcccgatcaccgcgcgggagtggctggactctgtgatggctggagttggctcgatctctctggcggtgcggggtgctggctcgatctcggcggcggcaggagcgggagatggggcttgctcgagctcagtggcggaggcggggactgcttcgatctcggcggtggtagcggcagatgggccttcctc

SEQ ID NO: 425782 - DNA, 114 bp, Oryza sativa
taattactctgtcccaacgccgctgctcgcgggctccctctctcccacgaaagatggcgattcacattgctgggtacccccgcatgggctcccaagagggagcttaagcctgcc

SEQ ID NO: 425783 - DNA, 57 bp, Oryza sativa
tgcaggtgtcgctgcccatggcgaggaggaggggcagcagagcgtgcgcggccatgg

SEQ ID NO: 425784 - DNA, 254 bp, Oryza sativa
tttaaatcatgttttctctagtccttgggaggcagaggtaatttttcgtgttgatcagactggattaacactatgaggtacatgtaactctcaatacctcccaaggaccaaaggaagactctgatagaacatagaaatagggttcattgaaatatcataagcttctattgttgtaaaaagggagtcggatattttctttaaatgaatggcaggaaaaactgacctggtagttcttactacctgaccatacatat

SEQ ID NO: 425785 - DNA, 66 bp, Oryza sativa
ataaaatctccccgtctcgtcgtctcctccggtcgttgctccatctagcggttgaacaggggaggg

SEQ ID NO: 425786 - DNA, 153 bp, Oryza sativa
agtgacgcctctcctcctcctccctaaccccgggggtttcagaaccttctggaagctcccgctccccccccctagcgctccaatggcgaaggaaccgatgcgcgtgcacgttaccggctgcggaggacaaaacggataagcttttgaccccat

SEQ ID NO: 425787 - DNA, 80 bp, Oryza sativa
tgagattattagtcctagtagtagcagcaatagcaatttacctgttcttgcaacatttcttgtggttcttgtagagtatc

SEQ ID NO: 425788 - DNA, 83 bp, Oryza sativa
tatagcgagctagccagatagccatatcttgggtgttctttgacatcgtcgctgcttgaccaattcttggggaggaggactct

SEQ ID NO: 425789 - DNA, 100 bp, Oryza sativa
catgggcctgttcctggtgcctggtgctcaggcaggaagagttgattcagcgagccatgttcccagtggagtgaagagaacaatgtcaggcctgtaacat

SEQ ID NO: 425790 - DNA, 86 bp, Oryza sativa
ctggatcacgtacctgtgcacggaggcggagacggggtacaggtacgcgtgcgggtcgatatcaaagcggaagctgcggacgcttg

SEQ ID NO: 425791 - DNA, 110 bp, Oryza sativa
gtaagaacctctctgcagtgctgctgctgctggcttgcataaaaaaaaaactctcatcttttgcaggaagagacatcactgtttctgcatttcgtgtgcatttggattta

SEQ ID NO: 425792 - DNA, 147 bp, Oryza sativa
tcgtactctacctacctacctacctactctaggcgggagagatggtggggaagagcggataataaaatatttaaatataatatttttaaattatataattttatatgtttattaatatttattattttaaatctattatattattta

SEQ ID NO: 425793 - DNA, 152 bp, Oryza sativa
taaaagacccgcgcgcctcgtactaccagggggggcattaaccaaacctggcgtgttcaaaaatcaccaccaccaccatccttctcctcaccccaccgccaagtcaccctctactcccactcctccctacccccattaatcctctctcttcc

SEQ ID NO: 425794 - DNA, 165 bp, Oryza sativa
ttaaccgcgtcgagagtagacaaggggagccggcgccgtggatccaactggggcttctccgacgccgtcgccatggatccgaagctggtggaggtgactctatcttttttacgatttaaggaagtcttttgctggaacttctgccttcacctgagatgacctgtt

SEQ ID NO: 425795 - DNA, 55 bp, Oryza sativa
ggagagagaccactaacctacgggggacttcgaacactgcagaccacgaggagcc

SEQ ID NO: 425796 - DNA, 65 bp, Oryza sativa
tggtgcaaatcacaaaaccattagtgtatttgaggggaatgtgcaccggccacacggtgatacac

SEQ ID NO: 425797 - DNA, 85 bp, Oryza sativa
tgtgtttccaacctgagaccaacactgacaataggggccttgttaaagcttgcggggataaaaaaggttacagaataggactaaa

SEQ ID NO: 425798 - DNA, 137 bp, Oryza sativa
  unsure (1)..(137): unsure at all n locations
gtangaacctctctgcagggctgctgctgctaggttgcagaaaaaaaaaactctcatcttttgcaggaagagacatcactgtttctgcattcgtgtgcctttggatcaagccgtgctcttccctttttagtgcccat

SEQ ID NO: 425799 - DNA, 57 bp, Oryza sativa
atcactgaacaagatcaccaggtacagaacagaggaatttaagaagataactgggga

SEQ ID NO: 425800 - DNA, 162 bp, Oryza sativa
tccaagctcgcgggaaaagccaaagcagcagccaaagaaatccaccttttctagacaaaaattttagacgaaccgcgagactgatggccggcttccaaatccggcagccgggcgctttccctctcgattccccgctgcagatgagatgagatgagaggagag

SEQ ID NO: 425801 - DNA, 54 bp, Oryza sativa
gatcatgctgttgaaggtgatgctgattgtgacggcttttttgaggaatggggc

SEQ ID NO: 425802 - DNA, 59 bp, Oryza sativa
tgtacttgaggggaagaagcttcgcagctcgggctctcacttccctgaggcttccggag

SEQ ID NO: 425803 - DNA, 67 bp, Oryza sativa
tcccggtcgaccacgcgtccgtttcttccaactactacgccggcaagtccaaggggataactagact

SEQ ID NO: 425804 - DNA, 101 bp, Oryza sativa
  unsure (1)..(101): unsure at all n locations
gtaccgattgaccaaatcngaggtttgtcgaggatttttgacctaacctgggtgcccccctctccatggctgccatgggaagaactgtactaccttactat

SEQ ID NO: 425805 - DNA, 186 bp, Oryza sativa
tcctcacattgaataattatttttaataattgtaggtttttttttccgggtccagaggtctgcccgatgcccaacctagcaagtatccgatctgtgccagctctgtacgcatcatggttgtgcagatcgctatcgagaaatgaatataacacatttcttttggggtggccctcttttcctatttct

SEQ ID NO: 425806 - DNA, 240 bp, Oryza sativa
tcgtctgaactgagagtgagctctattgtactccatactgcgaacactgcagatcacgaggtgcggtgttgtagcttcgaccgtggaatgagcttgcattgctgtctggtgtcccgctccctctccctccgcgccgatcccggcgccgccgtgtccaggatcgccttcggctcctgcgccaaccagagcgcgccccagcccgtgtgggaggccgttgtggggtttgtcccgcaggttgtt

SEQ ID NO: 425807 - DNA, 145 bp, Oryza sativa
tgcaatcctcatcacacagcaaacccaaaccgcgagcggaatcctcagcctgctgagagagcctgagaccaagagggggattcttttttggttattgacgatggttcagcgcgacaagatggatcaggagtcctttgagctttat

SEQ ID NO: 425808 - DNA, 51 bp, Oryza sativa
tcgatgttggctatgcagagcgagcggatgcgggcggttctcgaggaggct

SEQ ID NO: 425809 - DNA, 102 bp, Oryza sativa
cgtaccagtagtagtgagtgctcagtgcgttccactccactccgagctaagcagcgaacagctcgccgccgacgctctctctctttctctgcagatatggag

SEQ ID NO: 425810 - DNA, 84 bp, Oryza sativa
gctgcagcagcagcatcaggggaagggtctagaagcttttagaagcttttttcgagatgaaggtgattgagaagaaacaggagg

SEQ ID NO: 425811 - DNA, 206 bp, Oryza sativa
ttgatgttattaagcatgcttatgtcgaacgggggggctcttttaaaaagcgccgccgctcgccgacggccaccctcccccctatcaaggaacaccaatgcttctggcggcggcaactgccacagaagcgccggtgttgtctagctctagatttttcgtcctgacgacaagagccaccaccagcacccgcttcactgcccagtctc

SEQ ID NO: 425812 - DNA, 491 bp, Oryza sativa
ctgcagtttttaggacagaaagaagcattcggagagaatattgaagtggagatcactggaagcacaaaggatgctcagatgtttgctcaacagcaagctaagcaggaaaatgctggcactttgtcaaatggtgattatagagtggttcaccatccaattgtatgatttataagaactttctatgattttcgctattggttactaatactgtcctgctctctgcttgttctgcttttcattcattccgtcttttttactctcttttcttctttctttcttctcttttctatcttccttctcacctttttatcagcttctcttcttttccttccttacttttctttcttatctctccatctccccatttcatttctttctattttcctctttctttaccattttctatctaccttttctcctatctttttctccttttttcctctctctctttctttccctcaatcttttatctcctctctcttttatcctct

SEQ ID NO: 425813 - DNA, 419 bp, Oryza sativa
ttgatagaaaagaaaaatcccctccgcctcctcccccaatccttaacctaaactccgatcccctccgccttccatggctgccatgggaagaactgtactaccttcctatgttcttctggatcgcatcgttcgatcggaggaggaagccgtcgaggaggagtcggagtgggcggccatggagtgcgcggactggaagtcgttcggttgccaccccggtgacaaacctttccccaggtaacccgctagggcgaatggcttgctgactcttgttgagccttttcgagcaccacctctatattttcattcacttctttattccttcttccatctcttattctctctccctccacttttcctcttttttcctaattcatctttcaaactctattttatcctatctttcaatctttccttctttc

SEQ ID NO: 425814 - DNA, 127 bp, Oryza sativa
tgatgcagcagcagcatcaggggaagggtctagaagcttctattagcttcttccgggatgaacgtgatcgcgaagatccagtaggcccgttcgccccattcccctccccctcttctcattacctttc

SEQ ID NO: 425815 - DNA, 103 bp, Oryza sativa
taatatttaatcctttttccgcagtgacacatgagcacttaccccttctgctcctcctcctcgccgatcccccaatccctaaccctagactccaacacctcca

SEQ ID NO: 425816 - DNA, 291 bp, Oryza sativa
gtggggtttttttatgtttttgctgggctatttttttttttttttttttatttttttttttggggaaaaaaccagaccctttaaaagattggttattggaaaaattcaaattcgggaatggggataatacttaaaggttcccccaaaaagggggtgaaaattggttacaaaccaaggttttatcttggggcaaacattcaggtgcgggttaacattatggttgcttattataaccggaaaaacagcgcacatgggggctaaaataaaaatttttcgcagattttgcttttt

SEQ ID NO: 425817 - DNA, 74 bp, Oryza sativa
gtacatagctagcgttagcttggttagttgtgggggtagcattctagctagctcaagggctaaagacattgagg

SEQ ID NO: 425818 - DNA, 59 bp, Oryza sativa
tcgtactagatcgcgagcgcacgcacccaccgacgatgtttctgaagcagccacccgcc

SEQ ID NO: 425819 - DNA, 276 bp, Oryza sativa
tctgtaatcgaccactctcttggtatctcagaataacaagaggatcattggtggtgatgatacgagatgtcatgtctaactttaggtgcagctgggatgttgttttctcttgtttttgtggaaacctcagtttgttttaaaccgtagcttgctacgttgttgtatctgataagttagcaaaccaggtacataatttctcgatagtcatagtcacattcatttgtaaagagaggaaaactgaaaggagagaaataaatgtcacctgcttcttgtcaa

SEQ ID NO: 425820 - DNA, 74 bp, Oryza sativa
taacactgcgttcttcttctcgatttatctggcttggtttatagatctgtagcttattagcagacatgtgcggt

SEQ ID NO: 425821 - DNA, 331 bp, Oryza sativa
ttgatataagcaagcaagaagagacgagacgagggtgtgtttaataataattgcgacgttttttttttaaattatttattattttttttattttttatttttatattttatttatattttttaatttcttattttttttaatttttatatttatttttatacttttttatttattattttttttttattatttatattatttatttatttactatatttctttattttatttattatattttttccattatttttatctttatttctttattttttattaaattatttttttctattatatttataaatatattctttttttttttctatt

SEQ ID NO: 425822 - DNA, 67 bp, Oryza sativa
ataagaagaactttcacaggaatcattagaaagacttgtggatactttcctggaatattgacacaac

SEQ ID NO: 425823 - DNA, 119 bp, Oryza sativa
tgagagagagggcgagagggcgccgcgcgcggtgcttaataatacactgccgcgtcttgcgtgccacgtaggccaccctaccaccatgcgccgccgcggtaggatgacccctgaggtgc

SEQ ID NO: 425824 - DNA, 330 bp, Oryza sativa
tgctcacccaaacccgccccctcgtctccgtcaaggccctggagggcgacatggccaccgacaacagcagcagcctcgccctcgccgaggtgttccgcgcgccgctccgccccgacgtggtccgttttccttctcaggcctgcttctcctttctccttgctctagccctactccatcgttcccgctcctcctgctcctccttctcttctttcttcctttctctctcttttttccacgttcttctctttcttccttattttctcttcttcttctcctttcttcactttttctttcttctcttctctctccttactcctttccctctttttc

SEQ ID NO: 425825 - DNA, 94 bp, Oryza sativa
tccttactccactcgactcctcactcatccgactcggtaactaactctgctctgctgcactgcaacgccaaggaggcagaaatccaagaaaggg

SEQ ID NO: 425826 - DNA, 171 bp, Oryza sativa
tcctgatgatgataaccaaatgaagagcgagaacgcttcctgcatagcagacacactttgctgcactgcctattatctcctatatgtatctatttatatctctctatctcgaatctccttgaagaagaacagagagaggattgggaggagtagtaggtagttgatttatct

SEQ ID NO: 425827 - DNA, 90 bp, Oryza sativa
tagtagggggagaaatcggcatgctatcagaggggtttaacagactactcaacagaagcaagtgacaatgaacaactcacagaggatgta

SEQ ID NO: 425828 - DNA, 90 bp, Oryza sativa
  unsure (1)..(90): unsure at all n locations
tcnatcctatcgatgtgaagatgacataaagggtttttttaaacatatcccaggaagctgccagaccattctgatgtttgaaacgtcaag

SEQ ID NO: 425829 - DNA, 159 bp, Oryza sativa
gtccctccgcatcgcttcctccgccgccacgggcatggtcatcaccaccaccaccttctcctcctcctccaattcccaaaaccctaaccccttcaacctcccgccatggctccgcagcctccgctgccccttcaccttcctctgcccgcccccaccgtc

SEQ ID NO: 425830 - DNA, 340 bp, Oryza sativa
tcttcccaccaatcctttgatccattcatcccaacttcttccatagtacaaatctcttgctcccctccctctcatctcctatctgtatctatttctatctctctatctcgtatctccttgaagaagaacagagagaggattgggaggagtcgtaggtagttgactcacttctgacgcgccgcgcgagacagcatctgtcccggctcgtgattcgatttccgctgccctgagcgctccttgtggctactgtgccacgctggcctctcgttcttgagcctttgtcgattcgattcccgccaacaggaggcgcctttctgtgagtcaggtgcggtgccttctt

SEQ ID NO: 425831 - DNA, 434 bp, Oryza sativa
tgcggaatgagaaatcggtgtgctatcacatggttgttactcactactcaacagaagcaagtgacattgatcaacctacagaggctgtagtggagctgtattttaatatagttataatttcttgatgtcgatatttatttcattttttatttttttttattttcttcttccttttttattttatcttttaattttttccttctaatatttttttctaatttttttatcttcatttattatttctctttattataatcatatttttttattctatatattatttctcctttattatttttttaatttatttatctttatttacattcacttaaattttttattttttttttttacatttatttatactatatttttttacacttttattattctatctttttattatatatactttattttttttctttattttt

SEQ ID NO: 425832 - DNA, 87 bp, Oryza sativa
tgcgaaacgagaaagcgccgtggtatcagaggggggcttggaggtacacaagggaagcaagagacatagaagaacctacagaggctg

SEQ ID NO: 425833 - DNA, 133 bp, Oryza sativa
tgcctcagcttgcaagaaattcatgcaagatcctatcgaaattgatgttgatgaggattcgaccaccaccgtccacgcactcactgaaacttataagaccgttgatggacccttgagcaaggtactgaggggt

SEQ ID NO: 425834 - DNA, 52 bp, Oryza sativa
cctggtgaagaagaacctcgtacacgacgagcaggcgtctacggtcaccggt

SEQ ID NO: 425835 - DNA, 52 bp, Oryza sativa
ttactcgagcgagcagctagctagctgcggcgatggccttcagagcggcggc

SEQ ID NO: 425836 - DNA, 94 bp, Oryza sativa
tcggtgctctgcctccctctcacattccccacgcggtctttttctaaatacgacgctcggtacccctcctataccgccgcgagacactaatagc

SEQ ID NO: 425837 - DNA, 87 bp, Oryza sativa
tcgcgactcggctttcctcgagttcaaagagagaggtttaggtacagtttggttccttactcctgagtacggaagaattccttaaaa

SEQ ID NO: 425838 - DNA, 78 bp, Oryza sativa
  unsure (1)..(78): unsure at all n locations
tantctcttctcatctggtcccttccttccggtgctttgcttgctcagctagctgatcgcacgtgggtagggtgagac

SEQ ID NO: 425839 - DNA, 278 bp, Oryza sativa
tcgaaatgctaaatagaggtagatgatcctggggaatgctgatggagaacaaccctaatgagagccaagcaaagagggcccgacaggtgcagcaacagttgcagtggaaagaaggatagttgtgagctgaactattgactacagaaatccatttgtcgtctgtggtgccacatatgtttccaatttgccatgtttcataatgaagattcctgcccatactgtggaaccaattggtgaagaacatgtcgaaggactatatttttatttaatataggatc

SEQ ID NO: 425840 - DNA, 473 bp, Oryza sativa
ttttggagataatcggataggggacaacgagacaggaaggcagcatggacgccgcactcaagtccatgagtaaagcatggggcagcagctggcaagatttgtttcacctgactggaacctactctctccgttttgttcagatttattgtactaagtaatatctcaacttatcttaggttggtttattttaagacggacggagtaaacgtcaacacagacatcgaggatcttgactcggatttgtcactgaacaattgtgtgggtgtgaaaattccatgaattcattgtctttgcattaaagcaccaacagtaagaaaatgatttcgatcttaaaccttgatgactgaactacaactctatactatgcagtatttcgtgctttcagaactgtattactaatagcttattaatctttttagctctatatggcactcataaataaacttgttaatcttgatcagggagatatatgc

SEQ ID NO: 425841 - DNA, 167 bp, Oryza sativa
tctttatgagcaagaaaatggacaggaagagggtgggcatcattagcgccggtgcgagcttcatatccaaatgcaaacactcactgtacaaattatttaacccaaattaattaaaagtaacctacatcatacattttgtttataataattccattaagtaatattct

SEQ ID NO: 425842 - DNA, 151 bp, Oryza sativa
actgatatatatgtcatccatccaatgcatgcagtcgcttcgctagctatcgatcgatcggtcgatccaagctgcaggcacaatattaattcaattcaattgaattcttcgaccatccatggcgactgcacattaggagagtatcatcatt

SEQ ID NO: 425843 - DNA, 88 bp, Oryza sativa
tcacgtattacgtgcgaaaaaaaaaaatcagtgagcactttatcgaggagggggtatcttaacaagggagatggcttgtctacttcta

SEQ ID NO: 425844 - DNA, 97 bp, Oryza sativa
atcaggaccaatttgtatggttgggaagaacggggatttacaagaacaaggagcgcatagaccggatttgaaggatatcttattaacttgttgcatg

SEQ ID NO: 425845 - DNA, 73 bp, Oryza sativa
gtgaaatattccccatctcgaagcgtagaaaactccttgctctcaagaccagccgtggctgatcaggggaggg

SEQ ID NO: 425846 - DNA, 533 bp, Oryza sativa
ctgaattagcaccaaccacgaatcttgctaagatcagtcatgggctagaaccccgtagaggctctactcctcctcccacggcggctagccagtgctgcgctcgagggcgccatgcgcatactacttcagcaggcagcgaccaacacccgacgaggttcgccataatccgacccccaacatcattgaacattggagcgccatgtttcctccaagacgatacgacatccaaggctgtgccattcatactggttgcataaccataactgtttataatcgtctgctggggaagaaaggtacgccagtgagtacataatccaatgtgtgcattcgatcactcgccttggtttcgagtgcatagggtaccgctaccaagtgactgcacccgaccgtccgtgagacgatgtgctaaggtacatacgttctacccagttgcactacgacaggctgcccgccaccgcctttcgtcagtcgtgtaacgactcccatgtaagccccagggcaccgggcgacgaacgtccgtcaaggtcccccgt

SEQ ID NO: 425847 - DNA, 57 bp, Oryza sativa
ttttgtgcagccgcagcgcgaggtggaggtggggtttttttttctttttctggccca

SEQ ID NO: 425848 - DNA, 193 bp, Oryza sativa
aaccccgccgataattccaaacgaatggccgccgccaagggggcatttataaacctaacgtggcatcccctacgccttccatggctgtcattggaagaacttgcctaccttcctatgacctttggaccacaacgctcgatcggaggaggaagccgtcgaggaggagtcggtgcgggcggccatggattgcgcg

SEQ ID NO: 425849 - DNA, 86 bp, Oryza sativa
taatgaacggtggaacgcgtacttacccacaggttatgtgcatgccatggcaccattaatggcctaacgcctcttcacaaatactt

SEQ ID NO: 425850 - DNA, 220 bp, Oryza sativa
tctatgcttcttgctcgcttgctctctactatgggtccttttgactcgtggccaagctgcagaggaaacccaaaattccaagaaaagcaacaggtcaagaaagagggaaagcctaggtgagaggagatgggaggaatcatgaaatgtatgactttaacctttcaatctcagactcactttacacccatgttcctactcttgcttacagcacttaaatatt

SEQ ID NO: 425851 - DNA, 139 bp, Oryza sativa
tcctgctgcagccgccgcggcgttattgcctggaccaaccacgccgatacacacctctgttcttctttcattgcttggggggcttactaattaatcaaccactttcacctctacatggcctatgaagccatcatcttct

SEQ ID NO: 425852 - DNA, 87 bp, Oryza sativa
atacttccacctgttccgccaccaccacctggggcaattactcagactggacagtcgcagcgaacattaccaatggcatctgatcca

SEQ ID NO: 425853 - DNA, 138 bp, Oryza sativa
ttcctccacctgtaccactaccaacatgtggggcaatttctaatactgggcagacgaaccgaaccataccaatgagcaatgatccagctgactcgcaatgtaccagagaatccaatcatcttcatctgaaccggccac

SEQ ID NO: 425854 - DNA, 146 bp, Oryza sativa
acctcaacccacccaccctctcgccgtagcagatccgatccagtaagagcttgccgctctctattccatggcgctctacttgtattatgactttatcctttattttttttttttatttttctctaatatatattatatcatatttt

SEQ ID NO: 425855 - DNA, 74 bp, Oryza sativa
gctgcaaatatttcttcctataacagaccaagagcagattgatcattacctttggatttttgattacaaaagta

SEQ ID NO: 425856 - DNA, 83 bp, Oryza sativa
actctggatttcagaaaatttgacctcaacttgtccagtttacctgcatcggaagatatatactttccctgccagtatgctga

SEQ ID NO: 425857 - DNA, 119 bp, Oryza sativa
actggtccaacttcgcaaactaccccaagggtgacgagtacgccgagatcttcgacgtccttggcaacggcattttcaacgccgacggcgagtcgtggcgcattcagagggcgatggtc

SEQ ID NO: 425858 - DNA, 95 bp, Oryza sativa
ttcgattcttctcactactgccgaccagtgtgggctactacactgaactgaacaccaaccgaagcagctgcctcaataatcattgagcaaactag

SEQ ID NO: 425859 - DNA, 54 bp, Oryza sativa
caagcaccccccgccggcacgcgagcccggacagtccccggctgcgaccccacc

SEQ ID NO: 425860 - DNA, 99 bp, Oryza sativa
caagcacccccccggcaccaccgcgcacagaaccgccgcgacgaacccccccgtcttatgacggccgccccccacacccacccgggggggaaacaaaaa

SEQ ID NO: 425861 - DNA, 91 bp, Oryza sativa
atactatcatacatacgatctcgaattggtagggaagtattagtagccagcagattaatctatcgatccgtacaatggcggccctgaagat

SEQ ID NO: 425862 - DNA, 95 bp, Oryza sativa
acctgaatctctctacccccccaccctcccttcggctatatgctgaagcggcagctcgtccgaggccgctgcggctgaggaggaggaggaggagg

SEQ ID NO: 425863 - DNA, 89 bp, Oryza sativa
tcgtactctctctccccccccaccctcccttggcctatagctgaggcggcggctcgtcggcagcggccggcggctgaggaggaggagga

SEQ ID NO: 425864 - DNA, 95 bp, Oryza sativa
tgaagctttgctccgccatggcaggcgacgcgctgcgtgcggacgatctccccggccgaggactagggcatctcgacaagcgcaacaatcgggaa

SEQ ID NO: 425865 - DNA, 373 bp, Oryza sativa
ttgtcgtggctcaaaattcttcgcctcccaggggaaaaagaacaaggaaaatacactcgaactttctgttcacccagcacaaattggtgtcatccttccctcgtccttgcttgcgtcaaacgattctgcgtcagtttaccgactcacgcgagttcgttcgtgttcgtctccgtttgttgtcgtgtttcgtggaggccaggagataatagttcttgtagttgtatccgatcagcatggagattgaagaagaagaaggctttcgcttctatcgccgaaaggttgctctctttttccttcgattcgagctgtcgaggttaaggccattggagaatagcaccaccagccgacctgaatccccccctctccatgctta

SEQ ID NO: 425866 - DNA, 226 bp, Oryza sativa
ccggcacgcgccgggacggaatggccggaccgacccagcgcgttctggttcgactctcacataaccattttgccttatatactgcagtcataaaaccctaccacggaaccacccactctgctctacaccagccagcctccatggcatcggattccgcccccaccggctacgccgactgaatggtggagaagatgctcataaacgcggtttacaacgtggacttctt

SEQ ID NO: 425867 - DNA, 65 bp, Oryza sativa
tctatggtctgaaaattggggaaggactacactggtatttttcaagtactcaagatctacaaaaa

SEQ ID NO: 425868 - DNA, 56 bp, Oryza sativa
tccggaagtcagaaagggggggaaaaggaactggaagtttttaacggatttggcat

SEQ ID NO: 425869 - DNA, 113 bp, Oryza sativa
ttgttatatattattattaataatatttagctctttttctatttggctttaagatattattccccaattttccaaccttcccaataattctgattatcttccaagttacagtt

SEQ ID NO: 425870 - DNA, 145 bp, Oryza sativa
aaagaagagagaagaaaaaggggaaaggaaaaaaaacaagaaagaaacgaggacaaaagaaaagaaaaggaagaaacaaaaagagaaaaggaaaagagaaacaaaaggaaggaagtaagagaaggaaaaaaaaaaaagaaagaaa

SEQ ID NO: 425871 - DNA, 165 bp, Oryza sativa
ttttcactaatcacagctcacttcagctcgctcgctctcactactactcgctggcaccattcaggcggatccaatgcccgccgcctcctcgcctcttcccctcccccttctcctcctcctcctcctcgccgtcgccggcgccggcgccgcgggtgcgggggcggc

SEQ ID NO: 425872 - DNA, 209 bp, Oryza sativa
tcgctcacttgccggtgtcgacacctggatctcatgagttctgtggcttagctcagatagaaatcacaaatggcgaagattaagaccgggatcaatggttttggcaggattttgagttatttttctcctcatctttttttttattattgtatatttttattttttttttctcactatttctttttcactttctattaaatacattgatt

SEQ ID NO: 425873 - DNA, 167 bp, Oryza sativa
atacatcctccccaaccactgcatccgggtcggcgaccttctcctcctcctcctccaagcagaaagcaataggcaaaaacaagcctataggctcacaaggaacttccctaaagccagctgatctagcgacacataagttaaccataactatatattttactcttacc

SEQ ID NO: 425874 - DNA, 86 bp, Oryza sativa
gtcatataaacccccacaccactgctcgatcgatcgtcttagtcggagtaactaaggcagagatcagatcaggtcacttaggagca

SEQ ID NO: 425875 - DNA, 75 bp, Oryza sativa
ttcatatagtgcatgggcaccacacgttagccctggcggtactcctagccctaacggacctaataatcactctct

SEQ ID NO: 425876 - DNA, 55 bp, Oryza sativa
ttcagtctactcccatgagctgcctcgcaatggtcgggaagttttaaaaacacaa

SEQ ID NO: 425877 - DNA, 65 bp, Oryza sativa
tcgatacaaggcccccgccgcacctcctcccgtactcctggctgactagaccttctcacggaggc

SEQ ID NO: 425878 - DNA, 345 bp, Oryza sativa
ctgaaatacaatgttgatgactagtgttttattgaacatcttgaggaccatgatctgatttattctttttacacgttttttagatgcttctatagaatttgtaggctatagcagaaagagggtacctgggcaaactgtcctggctatacttttgcggcgtatatgtcaacaaaaagtaactagatgttaatttgaattttaatatttctttaactgcaagagcagtgctgtgtaacttgtgttcctaaagtttttatgtgcaccacctgcatggggtaaaagtacaaatgactctcccccttgtgttgtcttggttgttttgacaataaattgtgtcattcattc

SEQ ID NO: 425879 - DNA, 77 bp, Oryza sativa
atgaaagcaaacccccacgggaccgacccggaattcaccccccgacttacccaacctttctttatacacccacgaac

SEQ ID NO: 425880 - DNA, 92 bp, Oryza sativa
agtaaaccctcgctgctctcctccccctccccctggtcctattgtcgccacctaagatctccatatccccgccaccaaattcccccctaaac

SEQ ID NO: 425881 - DNA, 106 bp, Oryza sativa
ttcttcattgaacagatatatcagcagccatggcagcgacctcagactcgacgccggctgctgctgctgctgctgctgcttcttcttcttcttctacacttcacat

SEQ ID NO: 425882 - DNA, 156 bp, Oryza sativa
tggcggcggcggcagagaagcccttctcatccccaagatgtacagccatatcttatcacctccctagattgctgttgtgagaatggacatcctattatcctacttctgttgcatcctgctttcatcgctcgcagtgattctactttaactcttatc

SEQ ID NO: 425883 - DNA, 77 bp, Oryza sativa
ttatgatctttccattcttcccaacccagcagggctggctagctagctatctagatcattatccccatccaacgagc

SEQ ID NO: 425884 - DNA, 468 bp, Oryza sativa
gtagctatatcgtcgtcattaattggagctagctaggtatggcagcaggcagagcgcatgtgggcggccgttctgcgagggatctatgtgcaaaggtgctatcattttcgcttccacttgttctttttgttgtttttttttattatattttttttattttactattttttttttttttttttttattttttttctttttttttttttttattatttctttttttcttttttatttttcttttttatttttttatattttatgtcctttttttctttttttttttctttaccctatctatcttttttttttttatttttcttaaatttttttttatttgtttaattttcttaatttcttatatttcttttttttatttttttttttacaatttataatattatttaatttcttctattattatttttattttttttctttaaactttatcttatttttttttttctttt

SEQ ID NO: 425885 - DNA, 59 bp, Oryza sativa
ccgggacctacccacgccgttcgatagaacacagagagataacgggagagaagccggat

SEQ ID NO: 425886 - DNA, 281 bp, Oryza sativa
  unsure (1)..(281): unsure at all n locations
atcncttttgttcttagccaccaaggagagaccatccatacacgaggggttctattataccctctctgccacgcgatgtggctgcctcgtcgctctctacgccacctgccaatctcctctaccaatcctaatcctaatccccatccccacaccacaagcaccaccaccaccaccaaaccattcgggcccccaagcccaagcccaagccccagtcaccgccgacgcaatcaccgcgatctcagcctccgccgccgccgcggcaccagacccagcaggcgccc

SEQ ID NO: 425887 - DNA, 378 bp, Oryza sativa
tcgttcctccccccaatccaaacccccaaaaccaaagccaaaacccctctcgccaccgatgggcgcccgcgcctctcgccaccgccaatcccccgaccaatcccaatcccaatccccatccccacaccacaagcaccaccaccaccaccaaaccacccgggcccccaagcccaagcccaagccccagccaccgccgccgcagcagccgcgatctcagcctccgccgccgccgcggcaccagccccagcaggcgccccagcaggcggcggcggaggatggggtggttctcttccttttcttcttcttctcatttccttttttctttctaaccttttatactttaatttcattattttttacctctacatctactctctt

SEQ ID NO: 425888 - DNA, 418 bp, Oryza sativa
ctcgtcacgatttctcctcggggtcctcttcgattcgtaagatatgatgagatttttgcttcatccgtgttgctcactttgcaactggtggcctgtgtgcgtaattgatcttttggatgctttccttccttgcaatggtgccatgagcattccttcatctaggaatcgtgatggtgatgatgtttcttgtttgatgattgatgtgctgctaattagatgatgtatgtccatatctcccaaccagaagataaggtaatgacctcggtaagctaatgcacatgtatgtgcatgttgtataatcatgttgtactatatactatgtatgatgtatctagatttagggtaggaaggcctttgccatgttgggtgcgctcgcttggcaggccacaagacaataaaaagatattttccttatgtt

SEQ ID NO: 425889 - DNA, 58 bp, Oryza sativa
aaataaagaagcatctccaactattacaggaggatggcttgtttaaccgtagcttaac

SEQ ID NO: 425890 - DNA, 183 bp, Oryza sativa
ttcgcttatcgacatggaagctgctaaacgccgtgtgagtatttaattaccccctcggtattaaaacagtaatctactttctataaattctaaaaactcttggtaaaaagtatgcctgatatttcaaagaaaaaatcctaacttggatatcctaatatccgatatgaaagcttgaaatagaaa

SEQ ID NO: 425891 - DNA, 330 bp, Oryza sativa
tcgataaagtgttagaaacttcagaaggctctctgaaggatgtaatttcctctcacgtttctgaaaaggctatccttacatcagatctagaaactcttggtaaaagttatgctgatatttcagagaaaaattctaacttggatatcttaatatctgatatgaaagctgagattgaaattttgagaacaaagctgacagattctgaagaaacctgccaggctcaccttgcaaataactcatttctttctgatgaaaagaacaatgtgttctcttacatgtagagctttacataggtttcttaagtctttcaattctttcacctcttttttt

SEQ ID NO: 425892 - DNA, 68 bp, Oryza sativa
aaatagcttcatctgaagaagctaagaaggcgcttgaattgcatggatgtgatctggatgcccacaca

SEQ ID NO: 425893 - DNA, 270 bp, Oryza sativa
tcggtagccgcgcggacggaaggggttgtgttttcgtgggccaaatggcggaggtgtgcacccctggcgccgccgaggcggagttgtggctccccgacgagttcttggacgatgatttcttcaccgtggaggagaaggcggcggttgcggccaagagcgagagcgacgaggaggacgggttggatggcctcgagcgacgcatggccgacctcctcgccggcgagggtggaaagggaacgggttccaaggtggaggtgatggctgggtcgt

SEQ ID NO: 425894 - DNA, 150 bp, Oryza sativa
ttggtcgatttgctccccggtggtggccgcccacgacgaacccccgcgccgcgcgcgattcgatcgctccttccggattctgctcccggactcggatctcctcctcctcgtcgagctcctcccgccactgcccgtgtaggtctacctgag

SEQ ID NO: 425895 - DNA, 83 bp, Oryza sativa
acctccagcagcagcagcagcagcagctgagcttgaagcattatagcgaggtagacattgcctctcccaccatggccctctcg

SEQ ID NO: 425896 - DNA, 424 bp, Oryza sativa
actatgtccaatttcctccactggccagcaactgggactaaccaggcccctgaaaaaacatatttcttacagttcagtccctccgccgccgctggctcgcttctccggccaccgcgcaccgatcaaccttggcctgaccaaccgccgccgccatcgccgccgctttctagctcagctccggctcgccggccggtgcccgtctgcctccgtgtttcgagaggaggcggacgagcttatagctaatatacgtagagagattatatatatatatatatatttacagtttgacaacgaggtggagtagagaggtgtgtacatgtgcagcatggacgactactccggccgcctcgtgttcagctccgccggcgccgcgccgtcgtgcagcgccgccggcgcgggaggcgggcagatgctgctctttggc

SEQ ID NO: 425897 - DNA, 153 bp, Oryza sativa
tttgtgaaaagatcccaccaccggcagaaatcatgggagtcttgctaccgcaaagccagctgaccaaaacccaaggcggacctaaagcctaagccttccaagcctgggccgaagccgaagcctcccaagccagggccgaagccgaagcccaag

SEQ ID NO: 425898 - DNA, 91 bp, Oryza sativa
ggatggtagcggcggccatgtctctcacgggatgggtccttattaagacgccacgcgtcgatgaggaggagaaccagtggaggaggagcct

SEQ ID NO: 425899 - DNA, 122 bp, Oryza sativa
  unsure (1)..(122): unsure at all n locations
ggtantgatgctcctcgcctcctccaagatctggggtcgtaggtcgtcgcccacgacggctttgccatctgctatcccgtacccagacgttggatgcatgatctcctccgtcggcacaatcc

SEQ ID NO: 425900 - DNA, 197 bp, Oryza sativa
cctttgtctacctccagcagcatcagcggcggcgggagctggatcctccctcccgagactgagagcacggcaagatttgcaaaattgcaaggcgagtagttgcgtgagactgagtttttgagtgagcgagttagccatgctggtaaggagcgcctccacgccggttctcggcgcgctcctcctgttcgggagccact

SEQ ID NO: 425901 - DNA, 100 bp, Oryza sativa
cgtaagtttaacccaggcgggacctttccatttttgccaccttatagagcttgtcggcgacggacacctacaggaacttccttctggagccattgcagag

SEQ ID NO: 425902 - DNA, 197 bp, Oryza sativa
tcgtccccgtggtcaccgtggacggcgcgttcgacggctgcgtggagttccgcgaggtgctcgccgcggaggagctcgacgccgacgccgacgtccaccccgacgacgtatacgccctccactactcctgcggaaccaccggcctccacaagggcgtcatgcacacccaacgcaaaatgatcaccagcgttcatcca

SEQ ID NO: 425903 - DNA, 220 bp, Oryza sativa
  unsure (1)..(220): unsure at all n locations
ggatcnnctctgaacctcgtgtacatcntgcgagtgcaagtnggctcttccttgaggttgccagactacctggaagcaggtcatcaaggattaancgactatctcagaagagccggtttgtcaatccgtgttgttggcccttcatgtttcaactactgttctctggcatataagatttgtccgtctcttggcttttgctgttcaagaatggacactcggt

SEQ ID NO: 425904 - DNA, 146 bp, Oryza sativa
gtggtacacccccctgtactaagctcaacttatgatgcatgctcgaaactacggactgaatgctaaggaaaaggagcacatcgaggcgaaagcatatagagcatttcctaagcacaggcagcttgggatggagggggacctgacca

SEQ ID NO: 425905 - DNA, 207 bp, Oryza sativa
attattttaagtgtttgccggagattatggggtcggtggctgcggaggaggtggtggtgttcacgtctatagctgcggacattgagattgacaacagtatcactgctcagtgagtacatatttctcaagaattgtcaattaccgacatactgcttctccagatctccttacagaccttgtcatccctccctatctctttcttttctg

SEQ ID NO: 425906 - DNA, 96 bp, Oryza sativa
ggataatatggtgtttcttgacgtggtttagggcttcaagaacgccgccatgatcgggacaaggtgtgagacgacatgggtttgggtggtgatggt

SEQ ID NO: 425907 - DNA, 104 bp, Oryza sativa
  unsure (1)..(104): unsure at all n locations
tcnggactacctggagctgcagcccgacctgtgggcgctggtccgcggcgcgcacacgttccggtgccccaaccttggcctcaccagctgggtccgattgccga

SEQ ID NO: 425908 - DNA, 448 bp, Oryza sativa
tgttagagaaatagcaccaacaaacaacaacgcctattgtctagtagagcctagagagagaaagcgcgaggagaggagaggagatggtgctttttttttttttttttctttttcttttttctttctcttcttttttcttttttttttttcttttccttttttttcttttctcttcctcttttttttttctttttcttttttctttctttttttttttttctcctttttttttttttctcttttttttttttttttttttcttctttattttttatttttttcttttttttctttctctttctttttttttcttttttctttttttttttttctttattttttttttttcttttttttttcttttttttttttctttctcctttttttccttttctctcttctttctttttttcttttctctttttttttcttttttctctcttttttt

SEQ ID NO: 425909 - DNA, 234 bp, Oryza sativa
tggaagaagccgctcctcctcttcccgcggcccttctcctcgtcctcctcacccaaccctaccttccctcctgccgcgccaccgcccaacgaccgcgacgacgcctcaccaaagcccagcgagggggagggatcttgagattggacctggagctccttaggttttcaacgttgatgttgagatcacaatggggagcatagtgaagcatgagcttgacaagacgactggaatgat

SEQ ID NO: 425910 - DNA, 197 bp, Oryza sativa
  unsure (1)..(197): unsure at all n locations
tcgttccgctgcacgagccgtcatctctgcgcctgggcttcccctcgcgccggcctctgcctccaccaccaccgccgccgccgncgcagcagccggaggacgaaactcgccgtgcgcgcgatggcaccgacgttgtnctcggtgtcgacggcggaggcagctcccccggggctgaaggagggcatcgtggggatcta

SEQ ID NO: 425911 - DNA, 119 bp, Oryza sativa
agtagtatgcagcgccaccggtcgcgagatctgctactcctcgtcgccgacgagccgcctcctcctcgtcgtcgccggaggcagagcaccggagcagccacccaatggcgtccccggac

SEQ ID NO: 425912 - DNA, 147 bp, Oryza sativa
tgcgcgatggccgacacggcgtcgccggcggcggccagggaggcgatgatcgagcccgcgtcgacgccgctgctgcggcggagggggtcgtacacgaggtccatgtcgcacgcgcgcgacgagctgggcagcttccggtcgtgcctg

SEQ ID NO: 425913 - DNA, 136 bp, Oryza sativa
tgccgcgcccccacacctcgcctcctcctcgggggggatctcgccgcatcatgtgccgccgacgacgacgaagaggaagacgaccgccatggggacggtgagcggggaccagacggcggagcaaaggcgtggaacg

SEQ ID NO: 425914 - DNA, 500 bp, Oryza sativa
ttctagcctctcccaccaccaccaccaccacgggcactacacactatgctcagggcatctccctccttccctcctataggaatccaaacccgccgcatcccggttcatgtcctgccgctccccatgtcgccgcccctcgagctcgactacataggcctctcgccttcgccgacgccgccctcctacttctccgccgccgacgaccgcgcggacgacgtctacctgaagggcaccgagctccgcctcggcctccctggctccgagtcgccggtccgacgccctgcggctattgcccgttgccgctgccactgtcaccacccttgagctgctgcccgccaagggtgccaagctccgtgttcccctcccaggaccctcttacgctgcccacttgtcgccatctttatcggctatggatgcttctcctcggctattctaccttaatcatacaactgcccaacttctaattcactattctctcactctccctttatctctataaa

SEQ ID NO: 425915 - DNA, 91 bp, Oryza sativa
aataatttcttcatctcctggtcgccggacacgtggaatgttatgagcaagacgctcgactcaagctacaaggaccgtttcaagaggtaga

SEQ ID NO: 425916 - DNA, 58 bp, Oryza sativa
aatggcgcctatataccggaggccgggtacaacccggggaagttgtgcgacaacgcgg

SEQ ID NO: 425917 - DNA, 63 bp, Oryza sativa
gtaatttcaaacccaaaccaaaccaccacctgaggggcgcttcaaccgcggcgagcgcccccc

SEQ ID NO: 425918 - DNA, 99 bp, Oryza sativa
gataacttccatgaatgcgagaacctcttccagagccagagtggctttaaggggggcgcgatgaacaagaagccttatgctgacccaactgtctgtagg

SEQ ID NO: 425919 - DNA, 219 bp, Oryza sativa
gctgatttgaagccctgaaaaacaacactgtcgacaggctttgatggaacaagacgggcgaggcgagctccactcccaggtgtcgcaatacaacaagagattggtaaagctcctgagataggacaagatacactccagagtacacagtgtcgactgatggcagccacaggcccaacaggtggagtacaaaaactgacgcatgcatcagctcatactggg

SEQ ID NO: 425920 - DNA, 127 bp, Oryza sativa
tgagagaccgagtaagactgtctactactcagtgaaatttatcaacaagggagacgggcttaccagaatccactcttaaagatgttcctattctagctcgacaatagaaccactaaattaaaatata

SEQ ID NO: 425921 - DNA, 177 bp, Oryza sativa
  unsure (1)..(177): unsure at all n locations
ttcactcccctcggttggttcgctcgctccccgggattatcagccatggggcccacccgtcagtctcactccctcctcctcaccttcctcctcgtcggcgccgccgncgncgccgncgnggnctcgccggaggacgggagccccttcctccgcctccccaccgtctcgggccttccc

SEQ ID NO: 425922 - DNA, 191 bp, Oryza sativa
  unsure (1)..(191): unsure at all n locations
gcatangcaggctcagattgctgagcttaaaggctgtgttaatatacaggagacgcactgcaccgatgggaaactgaactacagtattgcaacccgttgcttgagggagaccggttcgaataattcagcttggaatcagagatacctggtattaacaagttcaccacttcttggaggccttgcagcaatgc

SEQ ID NO: 425923 - DNA, 72 bp, Oryza sativa
gatacagaaatctctcgtctcgtcgtctccgttcgttgctctaagaccagtcgcggctgaacaggggagggc

SEQ ID NO: 425924 - DNA, 195 bp, Oryza sativa
tgcggctccgcccagacaagggactactacctggactccttcagctccagcaggaggcgccggagcgccgaccgaaagtccttctccgacgccggcgaccaaaaccccaggatggtggccgcgggtgtcaatgccagggtttcaccggccacagagttgacccaccagtgcgacaccatttcactatcaccagtc

SEQ ID NO: 425925 - DNA, 400 bp, Oryza sativa
tcgtagagccttgctgctgatcatacggttgcctgcccatcatcatcatcatctgctgctgctgctgatcatactgttgttgctgctgctggagcatgaacatatgctgctgctgctgcgccatggcggccatctgcacgtttaagggcggagcaatggcgttcgaggcgtagaacgggttctgcattggctgctgcatcattgggccagatgatgctggggctgctgcctcccaggggttgtagcttgcgttctgttgcgcttgtcggtgcgcctcgttgtataggctgtcaagggtgagcaagtccagcccaccagcctgttgttgaagtgaagtttcaggttaagcgtgtttagtgtggttttagagggttccaattagcaaattttagacaaattt

SEQ ID NO: 425926 - DNA, 110 bp, Oryza sativa
atgagtagcttgatgcgaagccagcaccaacggtgtcggctcatgcagacatcggaggcatgaacaggaccggagggcaggtcctatgataccgtgaggaggagcctaag

SEQ ID NO: 425927 - DNA, 405 bp, Oryza sativa
tcgatacgaacttgatgttactctaataataaccgtgaaaatctatatagttcaaacttagattcatgtaacaagggcacgttggattccttatttgtttatttctcgtctatattttctcctctgtgaacttgcaggttaccatacctaagctgttagaaaactgcaaaatatttctcctttgtttataccatattcttggaggagaccatggacaaaagaaattattggtgcttatctgttttgattatcaatgaaatagatattctacttagttgagtagtataatcacttatcagtcaatttatttttgacctgccaacatatataaactgcatggcactcttctattgcttttcaatatatatgctcgtcttagattgccaatcttcttttagcccccat

SEQ ID NO: 425928 - DNA, 71 bp, Oryza sativa
ttcgttaaaaaaaaaaaaaaaaaaaaaaaaaggaggaataaataaaaaaaaaaagaggaaacaagacaacg

SEQ ID NO: 425929 - DNA, 155 bp, Oryza sativa
tttcgtcgaagcaaagcgcaccacgcacacgggaagagttgagaggtcacatcgcggcggccgcagccaggatgccggctcctctctcaccaccagcctgtccttgatcctcctcgaccctatcgcagaggcacccgccgcggaagcctcaacag

SEQ ID NO: 425930 - DNA, 227 bp, Oryza sativa
ggtttttctatgcaacgaacggggacacagaacaagcaacgctggcacacacacacaaacccaacatggccaaaagaggacctgtaccacaatcaagggcgcaacatcaacgacacacaacaacgagacggagaaaaaaaaccagcctttgacctagacaagcaagccaggaagcaagggcgagcaaaaacaccccaaaggcactcaccgacaaggaacaacacaag

SEQ ID NO: 425931 - DNA, 407 bp, Oryza sativa
tttctatcctagtgctggtgctctactctactgtagacgtcatcttttgtatactaacccgtttgctagccgaggcgagtagagtttagttttcttcttttttcttctatctttttttttttttttttcttttctatttttcttttctttttttttttttttcttttttttttttctctcttttttctcttttttttttttttcactttttcctttttttttttttcttcttttttctttttttctttttttctcttctcttatctctttccattttttttctattctttttcttctctctattccttactttttctctcttttctttcttttctctcttttattttattctttatcttatctttttttaccttttttctttctatatctctcttttatcttttttt

SEQ ID NO: 425932 - DNA, 257 bp, Oryza sativa
ttaggtggcacaaggacggcagcggcgacgaggaggcgaaggcttgcgacaaggggtgggagtgcagcgggagccggttctgctgcaacgacaccatcaccgactacttcaaggcgtaccagttcgaggagctcttcgcccaccgcaacgaccgctcgctcgcccacgccgccgggttctgggactaccacgccttcatcaccgccgccgcgctcttcgagccccgcgggttcggcaccacgggagggaaggaggtt

SEQ ID NO: 425933 - DNA, 271 bp, Oryza sativa
gttgctatattagagacctaccgatcccacacatgggatgatctggaggggaggtggggtattaacccgctagcaaggtttggtgactcacaggatcactacgtgcctgtcgatgggcctgatttatatgaacaggttaaagactgctcagtcactgctggactagagcagtatcggcatgtatagggatgctatgcatgaagctaaggtcaagcatggcacgaccttatcaggccaattgatgtatacaatttgcagaccgctgactgat

SEQ ID NO: 425934 - DNA, 100 bp, Oryza sativa
ccccgttcctacaataccaacaccacatcaaaaaaaaggggttatttaaaaaccccagggggtccacaccccaccccacctccaacccccactacacccc

SEQ ID NO: 425935 - DNA, 234 bp, Oryza sativa
tcgatcaccccccctccccaccaccaatcccccacgcgattctccggatgcgcccgcccgacgcggcctaggcccctgcggttcaccggcggtggtggggtgagagagcgcgcgccggcgaccggcgaagaggagggggggggggtctatggtttctttcgtggtgtttttgttccgtcttgggcggtggctcgggtgcggcttgttcggggtgtttttcttctggtctttcgt

SEQ ID NO: 425936 - DNA, 169 bp, Oryza sativa
agagctagaagcagagagagaagaagaggaagcagaggaggaggagtccaagaattgaagcaggagaagaggaggtggtggtttgattcaagaagaaggagaagagcttgagcatggatgttgtgaggaggtacgatcttgctggtgattgtatattttttgacgtttc

SEQ ID NO: 425937 - DNA, 326 bp, Oryza sativa
ttaatgttgtatttggggaacgatgattctggtgctggtaccggtattggtaagtttagtcccgatagtaaaggaaaggctaagatggttgtggaagagagttcattgtctgttagctcaggtgcggatcaaatggatttgaactcagtgatttctgaagaggtgcagagtttcccagcagatcattgggaaccacgtcggagagaaagggcaagacagagagctattgaaatggctcctaggtttgcattcttcaaagcagatgaagatggacatagcgatgatggtgatgatgatgatgacaatgcaaactagttggaaccgta

SEQ ID NO: 425938 - DNA, 139 bp, Oryza sativa
caataaccttccagaaccccagagaggcggcgagatgcacggtttactcacctccgggtgcctgcacccccctcccctcctccgccgtgccttcccgagccctgtcacccgccttcttccgctccaaaccctagccctc

SEQ ID NO: 425939 - DNA, 302 bp, Oryza sativa
tcgtcgaagcggagggtgccatcgcagcagccatggccgactagcggctcacggtcactgcggcctcggcaacgtccggcgatcgtcgtcgatccttaccttactccctcacgccccctagctgtctcctcgagaagaatcttgcttaagttgatttacctccgggtgtttacggtctttcaaattgctaagcataatcttgaactttccaagaaaaaaaaaacaggcctgcattaactagtgccagggcagcactaatggatttgtgcgacgacactcatttcccttgggaggggtcccct

SEQ ID NO: 425940 - DNA, 92 bp, Oryza sativa
ttcctagcgggagcagcatggctacggccacgtagacggcgacgagcgtggcggcggtgctcctcctctcgctcctcctggcgcgcgcgcgg

SEQ ID NO: 425941 - DNA, 296 bp, Oryza sativa
gtaatcccacctcctccctcgccgccgccgccgccggtgacttttaccgcgaccgcgtgccccgccggcgcggtttttgtgtattctttattccttttcgcattcgtctgttcgttctattttctttttcatctctttcctttctcttcttttaatatcctcttttttttcattttttttcttcctactcttttttttttcttttttttttttctccaatttttctttttcctctttttttcctctttttcgttttttttttctttctttttctttcttctctatttctctctctt

SEQ ID NO: 425942 - DNA, 151 bp, Oryza sativa
tcggtatgcgtttccatttaagtataaaaggacctgtatttggcatgggctttaagtagcatttaaaccttcaaagcatagtttgacagcaatatacactacaatcggtgttatacttctgtcgaaaaagatggtggatgaggaaccgttt

SEQ ID NO: 425943 - DNA, 188 bp, Oryza sativa
ttcgtcactgatataatcaagctagctagcttaatgacctagctatccgtcagtttagctagatatggctgcagttaactgcaaggtggtggttttctttatattctatttattttttttttaattttattaatctttatttttattttttatattttattttataaatatttttttatatttttttt

SEQ ID NO: 425944 - DNA, 290 bp, Oryza sativa
tttttccaatcgaacaattattcttgaatgcccagataggccatgcaatttcaaagagtcttcatatggtaatagcaggtgattgtacctatgaatatgttcctgaccaaatatcaggaattttctttggttgggccaagccagaagcaggcggagtatctaggtcggtgataagcattggatgggacttttcgctgcggacagttgaaagagtgatgcacatatatctccttgattcctgttgtaagataacaacggaggagcccctgaagccgcagtttgttggtgtc

SEQ ID NO: 425945 - DNA, 123 bp, Oryza sativa
tttgagtcactcactacttgccagccgacaaacaggagggtattaatttagctagaagaggggagaaactaaccaaacctagagctaacgatcagtatggctcttcacatgaaataacaattt

SEQ ID NO: 425946 - DNA, 122 bp, Oryza sativa
tcggtatcctccggagattcgtcggagcgcaaggcaccctccacggaagatgacgccgtcactgactgacatgatcatactgaccaaggatctcaaggggaacacatcctatcagagagtta

SEQ ID NO: 425947 - DNA, 153 bp, Oryza sativa
tcggtagtggccgcggatgcgcgcggccgtggcgcggccgcctccgccgccgccgcgatggctgagttgtccggggacgaggcgtgcccgctgtgcggaggcagcgggcaccaagcgcgcgtcgcgatgcacaagcggaggctgtcggtggag

SEQ ID NO: 425948 - DNA, 88 bp, Oryza sativa
tcgtgccaatccgctcgctcgctcgctcgccggcgacccgaatccggccaggagggggggcggctggccggagctagggtgggtgggt

SEQ ID NO: 425949 - DNA, 66 bp, Oryza sativa
tcgtaatctccccggaacgccagatccggacgcggaggtgatcgcgctgacgccggggacactact

SEQ ID NO: 425950 - DNA, 275 bp, Oryza sativa
ctaccagtagtttcgccctttccccccttcttgcaccattcactaacccccatctgaacgcaaaccaccctctccgccgcgcgcgcgaggcagatctcgacggggagcgcagccgccgccgccagatcccgccccgatcgcccccgcctcgtccccacggtcccgtggatacctctctctctctctctctctctctctctctctcggatcggtgcgactgcctttctttttgcgcggcggggatcgggtgtgctttggggacggccgcgcgatgc

SEQ ID NO: 425951 - DNA, 130 bp, Oryza sativa
cttccgtctccggcgaccctcccctcacctcctcgccgcggctccccccgcctgacctccgcgcgccccccgtcgactcccccccgcgaatccggatcccgcgcgcgcgaggaaggagggggggaggagg

SEQ ID NO: 425952 - DNA, 157 bp, Oryza sativa
atcggttctccctcacacactgaacaccatggcggcggcggcggcggctccggctctatccttggccgaggcggcgccggtgacagcagttatgacgccggggtcgacgccatggaggatctttgctgtgcatatatgttttaagtttataattaat

SEQ ID NO: 425953 - DNA, 133 bp, Oryza sativa
tcgatgagagaaacatctagagtgaataagaaagatggggttcgtccgtgccctgttcctgctggcgatggtgtgcgtggcggcgcacgcgaaggactaccccaaggaggagggcgcgaaggcggaggggccg

SEQ ID NO: 425954 - DNA, 298 bp, Oryza sativa
cttacatacctcaggtctcatctctctctctctctctgtctctatatctatctctctctctctctctccacctggtacttttgctggaatcgatggcttacatatgtttttagaggatcttagggatagatataagcatgcttgttgcaggccaaatctttcttcatttttggaattaatactgcacctgaactttttttggataaaaaagaaagtgtatcagctttgaatgaagcctactagctctttatgagtagtggggggtcatttttcccctggtaaaatgtgggatggatgt

SEQ ID NO: 425955 - DNA, 384 bp, Oryza sativa
gtttttagaagctgacgaggaaaacagaacaaaacaggggagaaacaagcctacagatgatggctcggtctatcccgccggagtccggtgacgagaacgtctcggcttctgccgatggcggcctattttagggacagaagatgacaaaagaacatcaaggaagagggcgtacgtgtagagaaagacggtgaaatattttgccagccagccggccggccggagtccgacgatcgagcacattccgatggacactgcaggcggtacaacaaaccacgcctaaaacctcctttacttaggagggcatggaggaggaaggtgaacgaccacccgatcgaggaggtcccgaacactgtgccggtgaccgatgacccggcggagccctgc

SEQ ID NO: 425956 - DNA, 205 bp, Oryza sativa
  unsure (1)..(205): unsure at all n locations
tttcttaccactcgtttcctccacaaagagggagggaacaagggaagggtgtcgcccgccccccaccccgatctgcctccgccgctccgctcctccgcgcctgcgaaatctaccaacgctaactcagcaagatgggtgccggcggcaggatgacggagaaggagcgggaggagcagcagaagctgctcggacgntccctacaagg

SEQ ID NO: 425957 - DNA, 121 bp, Oryza sativa
  unsure (1)..(121): unsure at all n locations
tcggtagcgatatgggttgcttttcatgctgcggagcggattatgactgcaggaggaggaagcacaacnatccttacatcccgatccctgatccaggtggtaactatggacgtatcaagcc

SEQ ID NO: 425958 - DNA, 289 bp, Oryza sativa
tcgctgacgcgtggggggaccatgaccttgaaaccctaatccctatttccccaattctccaatccgagcacctagtcaaatcggtgaaattcaacggcgtcacggcgctgaggggagcgggcgcgccggcgtgcggcggcgcggcgggcttgctcgcggtcgcggagggaagcggcagccggcagccgtgcggtgtggcggcggcgctgccgcgcagggcggcctcgaggaggggagcggtctaacggccgccggtagcccgcatgccgcagggcgggtgcggctgggt

SEQ ID NO: 425959 - DNA, 308 bp, Oryza sativa
tcgttctgtactaactagtaaagtttttttttttgggcttcgctttgcgctctctgtatctctctctcttccaaaaccctaaccctagcggcgggcgggagcggcggaggaggagggcgcggcggcggtggggtggtagtggtggtggctacaacagccataagtggggccccgcgcccgcggtcagggcccccacgtacacctacccacagaacgggttctgcgccgacaagccgggggccgcccgctcggctccggtgatggcactgctggaccttctgcggcgaggtcgattaccccaagaggct

SEQ ID NO: 425960 - DNA, 237 bp, Oryza sativa
tgtcgttaatccccatatctccgtctcaaggtcgtagggtgtccttccacacgaccggggcgacaccgaggagggaggagacgaggcacctggcacatacatcgtgagcccgtgatcacccagagctataccgagtgctggctgatgctgcagccactcgcttcacaggcgcccgaacagcatctacccttagattttacggacctaagtacgagtcgccggagccagggctgaccg

SEQ ID NO: 425961 - DNA, 231 bp, Oryza sativa
tatgaaaatcatcaaaactttagctactgaatgagatgggtgatgaaatggctcaacaatcacatggtgagccaaagacatgtgcaacagccaacagtgcaaccattgaaaaaaagggaagatattttttttctaacatgtaagaacccgaaagatgaagctttctctcactattctaatttcttgttaagatgcgattttgtgattcatttatatcctgtaggatcaaga

SEQ ID NO: 425962 - DNA, 213 bp, Oryza sativa
ttatcctgatcgtcgccgtccttgaattgccggctcccatcccacgaattccggccctcccaccctcctgagatctctctctctgcctcacctccgtatttaggtaggcggcgggcgcatcacgtactattgacctctgctgcccgccgccgccgccgtacagtcggctgattgagcggaattcccattccttttcgcccggtttccggcgct

SEQ ID NO: 425963 - DNA, 444 bp, Oryza sativa
  unsure (1)..(444): unsure at all n locations
tttatacagtggtgttcttctttttatgtagttcaaaccgtaaaagataatcaggctattttttaacagtagcttgtagacatacccagcagactccacgaattttggctaaattttttgagtctttgcatcatggtctaaaaattcataaaacactgcatagtcccaacctaaaaacagtaggtaacctggttgtcgaatttgtgtagcccaatctagatggataaaatcttagttcctttagggtagctcaaaaggttacccatcaatctctctgattttctttttaaaaatttaacttttcgtgagctgcacattttgttgcttcattttccatcctttcatttaaaccatatgctnttcgttggatttctttatttttgaaagttttatttgactaatgcttttgacatgctattttggactttaatcaattattttgaa

SEQ ID NO: 425964 - DNA, 251 bp, Oryza sativa
tcttccgcctcctgcattcttctccttgcttctgcgtaacctcgcgctttcttggccgcttcgcccgcgacgcaacgggggggagaggccttcctccgtttccttggataggataaagctcgcggatctccgctcaatccagttcttcattctcctctcccggttctgttcttggttcttggaaagccggtggggtgcgggtggctcgtggcgaccagtgctcgctcgatagatccatcctagatgctgag

SEQ ID NO: 425965 - DNA, 359 bp, Oryza sativa
gttgggcttgatgacttaaaaggcctcaggaatgtgtagtcacttattatgagatattgtgacatcatagcagattcaggtatcacacacttatcagatctgacagatgtgaaagaattgctattggcttgatgtagaaacactgatctggctgttaatgatcttagaggcttgtccaagctaacacagatgaatgcggagggctgcccaaagactgctgcctgtaaggaagctatatcaggataggctagtgtggtggtgctgaacatgagtcagtgtggcatcatcagtggaagcagagaaaactatccaggtgatgacatagaggaggaccctaacatgggagcagctcctgttgc

SEQ ID NO: 425966 - DNA, 316 bp, Oryza sativa
atttttgcatgcatggatcgctagctaagagcgcgtgtacctattggggtgagtgccaactagagctccattgacttggagatcatggaggccgatgttgctcacagtgcggggcacaccgactcagttgatccatttggcgtggcggctaggccagaacacgcgatgagatgcatccatcggaagacaggagggagggcaggcccgggaggcgacagcgggatcctggccttccccgcacaacgcccacaggcgccggaactgcacaggatacggacagggcacgctcgatccttggaatctgtactctactacc

SEQ ID NO: 425967 - DNA, 443 bp, Oryza sativa
tcttgggaatgaaaggatcaccatcaacgagcgagtcttcctcctgcaatctgcaccatcaagattgcctctgttcagcgttttttctcacgctttttcttcgtcttttcgtgcgcacttttctgacttattttcttttccgtggcggcgaggcctcacgaacgcgatgagatgctcgatcggtagacaggagggagggcatgcggcggaggcgacagcgtgttcctgcccttcgccgcacaacgcccacaggctccgtaactgtacacggtatggacatggcacgctcgatccttgtaatttgtactctactaccgtgtggcgttggactgttctcgctgtcaggtgtcaggcccgaccgcccaactttgagaggacctactccccactcgtagtatttgtaccgtctcataaggctatttacaatgctcataggtgacgtt

SEQ ID NO: 425968 - DNA, 314 bp, Oryza sativa
tctacctctcgcctcccgctccaccaccatcgggcgatctccacctcgccggagttgagagagacgacgctgcagggatcgagatcgagatcagagaggttggcaatggcggcgcgcgtggcggctgacctcctgctactgttcggcctcgccggcgcggcggtgacggcggctaggatcatgccctgacgacgactgtggcgactcgtcgaacgaccgcagggccgacggcgttggggatgccaaggcatgaaatggctgcagaggacggccctataggcttcttccgctgcggcgccaatcagctcagggtt

SEQ ID NO: 425969 - DNA, 341 bp, Oryza sativa
tctatttttcgagaaccaaatcacacctcgcctgcagtgtctcgtgtcccagaacgcgattgcgtttttttttttgcacgtttggcttccatatccctcgtctcttgtactcccttactcacatgacggtctagccgtaagccctggccagggcccagggctgctcattatgggctgccaggagatggaggctctgccttcagaatatgattcacgaggctaaggcactgtaggtagatgaatgctctacagaggattacattgacattggtggtcttgagaaacttttcgattaggctggaagtagcattagtattgctccatgactcacaaggaccggt

SEQ ID NO: 425970 - DNA, 448 bp, Oryza sativa
tcggttcgatcggaggaggaagccgtcgaggaggagtcggagtgggcggccatggagtgcgcggactggaagtcgtacgggtgccaccccggtgacaaacgctaccccaggaacgccgctagggtgaagggcatgctgctcctggcgcgcctcgcggagcccccgggtctctccgagctctccatccgcctctccgccgccgccgccgtgcccaggccgccgccggccagcttcccccccggcgccgccgtcccgcccattcccaacttgcccgacgcgtcaccgtacgacgacccgtcgctcacctacgtcgaggcggtaggcgacggtctcatcgccctcacctcgtgcttccgggatggctgcagctgctacctcgtctacgacgtcgatggtatgtttgtcttcatgatcccgggcctgcccgagacctgccatattactgcag

SEQ ID NO: 425971 - DNA, 468 bp, Oryza sativa
gtttcatctctcaatctctctctctctctctctctcaaacacacataatattcccctttctctctctaggcattattcctctgatttcttttactgcctcttctctctctaaccttattcccccctacctggacactgtaatgctctctctctctctctaaccttatagtagtagcatcaagctttctctctctctctagaggcctttcctttctcatctctctagttctctagaacacacacacacacaaacccccatacaaaaatgatatgctactcatgacctaatcacccaattcccactacctctcttctcctctccttcttctcctcctccttttcttggaaccaaacaacaacaacaaacttactctcccacacttagctagctcacacaccaccattgttggctagctagctaagcttttaatttgttgaagcaatgagcacaactactgctactactac

SEQ ID NO: 425972 - DNA, 507 bp, Oryza sativa
ctcaactcgacataagagctccctggcttctctgggggacactttggccgatggagggggggacgaagaaagccttcacagtggcggtggaggatgtcaagcccagcacggacgcccactgctacgacggctgcttcaaggactgcatggtcagagagaacaacatggtcgactactgcagctacacctgcgacaagacgtgccagccggacaagcccacgctgtactcctcagataagccgacccgcctcgccggcgacatggagtgccaactcttctgcgccttgagctgctgccaccgactccttccggacggcaagggcgccgcggaggcctgcttcgggcagtgctacgacggctgcaagaccacggcggcggccagactgccgaggcctctccgcgccggccactacgtgctctctagtccccctgatgacgtagaccatgatccggaccacccgttcgtgttctctagcccccatgatgacctaaaccatgatcccgacc

SEQ ID NO: 425973 - DNA, 344 bp, Oryza sativa
cttcttacggggaattgcagcggcacaaccgtatgacagctgttattgctattgggatgtgctatactgcctgctggaactccgaggatgcaagcttcacatcccctgcaagcagacctatggctatcacactggagtcatcaaccatcaccgctgagaccaagaccatatatcctgttgattaatgagctgggcacaatggaatagtgtgtctattagacacacattagggggacaagcatctaaagtaagagcccttcgtgacgcttacataaagtgctcactctggtgttcaacaagctcaaactactgtctacatcggtgacttatgagcacacacaagg

SEQ ID NO: 425974 - DNA, 209 bp, Oryza sativa
tgtatgagctgtagtacacgtgaagcttttcttgattcgggtgtatccatggcgcgggatgacgacccggccaagaaattagctgtggatggcggaatacctaccactgtacaaggtctgcggatgcggccgactcgtatgctgtcgcgttcagcgccgttaaggtcgtccttgcaattcatgctgttgagatctacgattttcttgac

SEQ ID NO: 425975 - DNA, 337 bp, Oryza sativa
tctaaaccgctctagcaactgaaagtctgaaacggtcgtctcctcgagtctgaactctcgagtctcaaccctcgtcgtcgtcgtctgcacccaatctctcccatttccatttccatatacatttcctcccaaaaaaacacacaagacgaaaaaaggagaaaaatcgcaactttaccattcggtccaaactggcgacatccctttctccctcccttgtgcagcatcaaactcgttcaaaggttagccttttgggggttcctctcgtttgactgacccggcgtgtagtgcagacgtgaagtcgtaggtgtctggtccagcatcctcgctcttcttggct

SEQ ID NO: 425976 - DNA, 489 bp, Oryza sativa
tctcgagctaaaaacctcactaccacaacaagcatcttggtttctgctaaaacaaagacttcattatatttcaacaatggatttaacaacaggagccatatggttgttcctggctcaactgttcgtcgctgcaacaatgttgagtaagattgcaacaagagaaagaacaagaaccactggcacaaaattctctagaccaccgcctccacccttggcccgtggagctcctcttgtaggggttttaccatcggtggtcgtcaatggcccggcggaactcatcctgccaccaatctcagatgatggtttgtgttttccctgtctgctgccttcatcagaaggcgtctcttcatgtcgttcttttggcttttagtctcttttttatcttatatcgattccctactcattttgttttatttccttccctattctcttttctttctacttcaactttccttttcttcttctatctttttacatctacctcttctc

SEQ ID NO: 425977 - DNA, 577 bp, Oryza sativa
tcttctctctcctcccctccccatggcgcggcggggccattaccaccacctggcggaggtggtcattcttgcgttgttctataagttatttttttttttttttatatattttatttttgcttttcattcttatattttatcattatttttttaatatttattttattattttgtttaattcatttattttagattatattgtatattattatattttattttttgtaaatttggaatttttttattttattatattttcattatttttataattaaatttttttttttatttgatttaattatttattatttgctttttctattttattttgtatttaatattcaacattatttacttatattaattattttgatattttatttttttttatttattcttgattttctatttgtattttttctcatttggattttttttttttttatttatctaatttttttttcatttatttttatatatatttaatctttttttatattatcttttatctgaaatttattttattttttttattattctatttttataatattttttttttgttcatttaatttt

SEQ ID NO: 425978 - DNA, 338 bp, Oryza sativa
ctttctccccgtctcgattccccaccagcggcgaaaccctaaccctagagcggccaccgccatggagaagcgcgcgaccaccaccagggcggtggtgctccgcctcgacgacctctcccttccgccgcgccgcctcaccgtgccgttccgtctcccggtctcccacctcctccgcgcgctgccgcagccgctgctcgagtcgacgtcgatgtactctcaccgccggacggccgtctcgctcctgcagttcgcgccacgtgtattctttaaacgctcacaggccactggtccagtgggtttgcccttgcttgccctagagacatgaaaacagacacata

SEQ ID NO: 425979 - DNA, 220 bp, Oryza sativa
ttctgctgcggcggcggcggccaacgaggggggagagagtatagctcctgtacccatcccttcctatgacatcttctagctttcttctcttcacactccttctcttcttctctccttttttaaccttctactctctttgtattcttcctattctctttcttcttttcttttccctccttctctcttctccttctttttctctttttctctttccttctct

SEQ ID NO: 425980 - DNA, 528 bp, Oryza sativa
aatagactctgaactgaactgattgacattttagactgatcattcattcaagctaatgatgagtgatgcgtgccaaggaaaaccaggccttctctaaaaacaaaaggtaaaatgctaaacatctcagatcctaccactactgcataattttacataaccatacggcaaagacatatccgcacagcacaatgacaccatcacatcacatgcatagaagaatggcaagttcctatataagcagttgtacagaggtttataatcaaatactcaaatccacgggccagtgggtttgcacttgcttgccccagaaacaagaaaaaagacacaaaataagtaactaaaaggaataattggtcagtgatatgttttatccaatcctgcgtacctagtggacttctccggcaaggattttctctgtttcctcattagccttcatgccatcttttttcatacgatcaagcaagtctgacactggttttcctgcattgacatatgtcttcagtaacccatggtaaatgtcccttgttg

SEQ ID NO: 425981 - DNA, 271 bp, Oryza sativa
tctgaatattttttttgcttcggttaaagcaacgctaattccccgcgtcgcaagcatgcgtttctaggagaaagtaaagcttgcgtttttgagactaaagcttgcgttttttgttttttaattgtggagtttgggaggaggagggaaaaaaatcgcgatcaggaaaaggcatctcgagaataattatttaagtccccagagcgagcagtgacgcgaaattccccaggagagatctccatctccacctccactgctcaggcgaggatgtcgt

SEQ ID NO: 425982 - DNA, 546 bp, Oryza sativa
gttatagtcaacaatagttcattttcaggtaccgatttcctctgacctgtcattcagatacttgtatgcataagaaagctggcgtatgcatttgggtgaccgctttatagaaagttttgaattaacaatgctagttaactttatgatttgtttgcatagcaccctatgaatgctatactatattttgttcatcaatttttgaaaaatacataactagataccaacagtctaatttctaaccacaattatttatggtaatagaaatggaagaagtttccctctctttcttaaataaaaaagtccacaagcttaaataaaaattcatctatgtggtatcagcatctatcattattatgcacatgatgtttatctagcttattcttaggtttgttatgattaacaaatagtctccaaaatttcgtactgttatgcataccatttgcatgtgcacaacctgcatcactatattctgtttaataaagtgtactgtctgtacctttctgcccttttgtttatatagacataatatttactgcaggttgtatg

SEQ ID NO: 425983 - DNA, 170 bp, Oryza sativa
atctatcatcaagtgattgttgccaaggcaatacgctaagggaacatttgctgtcttatataataagaggggatgactattaagctttaggctcttttgtgctcattatctacataagtgcatgcttaagtgcttgatgtatccatgctcgttgacctaggatcaaactt

SEQ ID NO: 425984 - DNA, 395 bp, Oryza sativa
tttttacatggctttcacaggtatgaagactctggcgatgatgatggattgctgttgaaagatacctttacaggagtaccctcccgtcacattttaggtgataccatcaccaatgcatgaccgaacatcatacatgacaacagtccccatcttgaaatgcttgaggagctgctctgcaaagagggaggcatgtatgagaccctgccagcaaagtgtgccagattcgggttgcctatgttgaccggtgacttagaagatgactatgaaaagcatggtccagctttgctgttgaggcaaacaaggatgtacctggtatggagaaagtcggttacatggttcctcgcctggaacctagcactgggagctctatttagtcagcaggtgttgagaacact

SEQ ID NO: 425985 - DNA, 254 bp, Oryza sativa
taatcacccgccggagaggaaggccgccgccggcgccatgctcagggtcgccgggaggcgcctcaccaccgccctcgcctggcgccccgccgcggcggccggcgccaggggcccgctcgccgggggctccctccccggcgactacgaattctcgcgtgcgccccaagggccgggctaccccggggagtcctcgtacttagccgcttctaggggcttttcctcagaaactcttgttccagggtacccggatgtta

SEQ ID NO: 425986 - DNA, 201 bp, Oryza sativa
ttgtattaacccaaactccctccacacacattaaccactgcacaaacgcagccagcgacagcgaggatggccggccgagccagctgcgtactcatcctcctcctcgccattgccggcttcgccgacgtcctcgccgccggcggcgcgacgccatcgtcgtcgtcgtcgcaggtgagcacgacgacggcatccgagtttgta

SEQ ID NO: 425987 - DNA, 391 bp, Oryza sativa
gaaatgaaataccatttctttccactgttgcctcagtgtaaagcttctaattaatttaaacagtttacagcatacagcatacatatttggtgcttttttataaaaaaataaaacaaaaattggacaatttccgagcttgccaaggaggaacatcaagctggaactctaattgcacatctatatgtctgcacagttatccacatttcacacacaaacataggaacatctgatatatttcgagtattaaatcctttggattaaattttgtataccttcattggagcatgaaatgaaagaattttggggacaaaactcaccaaatgtaaccatccatataatccagggtagaaacctttcacctagggcacctgcactgatatcgaaatcgggt

SEQ ID NO: 425988 - DNA, 358 bp, Oryza sativa
tttttttttttttttttttttttttttttttttttttttttttttttttttttttttttttttttttttttttttttatttttttttttttttttttttttgggggggccacttcaaacgggggaatgtaaattgttactataaaaaaaaaaacggggttttttttgggggggaaaaatttaaggggttaaaaggaatataaaaatggaaccggttttttaaaaaaacggagatggttttttttatggggaaaaaaaaaggggatacactcccgtgtttaagggggggaaaaaaaaacgttattttattttattgttcgccccacagggaaaaaaaactaaaaacttttttttgggtc

SEQ ID NO: 425989 - DNA, 323 bp, Oryza sativa
aagcaaggccctgaaaccccattccagggggccaaaggggcccaaggggcaaaagaaacatggggggctcaacaagacccccactaaagggggacaaaaaaggggggaaaaaaaacgccccggagggggcaaaagccgcattttggaacaaaagaaccccccaaaagcccggggggggaaaggcccaaaaaaacaagccttttaagccgaaggggtctcgacctcgccataggggaaatcccgggggaaaacccggggggccttggcggtgacggggcacccaacggtgacccagggcccaagggtcctcctggcgggcccgg

SEQ ID NO: 425990 - DNA, 309 bp, Oryza sativa
aaagatacaagaccgttttctcgaattagtaaatataggcaataaatgcaaagttttataaaaggtacaaggagcctgcaaaaaaagaaaaaacacacctaaattaaacattccccactccttaccccatccgacagtgacctttcctgcatacctggcttggacctacatgccagggacacttgatctcataccccatccaagtgaggaatttcacatgaagagttttcagaatttccacaataaatacgataagctttcagaaaaaagacccaccacattgcaagtcatggatttcccagcagttct

SEQ ID NO: 425991 - DNA, 390 bp, Oryza sativa
caacaaatatatatagttagaaggaaaggaacacccttgcattcttacattgatgttgcagtcttgcaggaccttataaattatatagcgacatctacatttaccaattggaacagttagtggttgcacgatgttacctacctacaatttgtacgtgctcgcacaagacacatttgtgcactatcctaatctacaaaactactgccgccttatataaaacctggatacctcactccaatttcgcatccagttttgcaatgcttctcaggagttgtttggagcagacattctgcgcctgagctacatatcgcccacgatttgctttcacccatgcaggttccttgggaacaaagtgtgagaaaccaaacttgattaagaagagagcatgct

SEQ ID NO: 425992 - DNA, 390 bp, Oryza sativa
caagccttctattttggtaatatgcatttcacggatttactatcttgtcagttgtcatatcaccacagaaactatttcacatcttcatttcttcacaataatgaagattaagctgactcagatttacaaaagaaaataaaaggaggaggatatctgcctcgggaagcaaagatgagcagggctgaactactgtagagaattgtagaaaagaatcaacacgactgatattccaataatgacaggaaaggcagttaacagatatagagcagaatatcccactgcggagggcacttcagtttcatcatcttcctcctcttcatcatccaaatcagcagcagaatcccaatcaatgttaagtcttttagcagctgtctcaggatcaatgcctgt

SEQ ID NO: 425993 - DNA, 341 bp, Oryza sativa
agcaaggaacaatgttcacctttattttttaaaatttcttgggggggggggaaaatgtttcacaaatttgggccaagcagcacacatttacaatttacagacattgaacaagccatgcagggacctaataaaactggagtaccccagtccccccctttaagtatcaactcaacatacacagtttcccgggaaccgccaaatttaagattaaacaagggtgaagatgcaacatcgcaggccctttgaactattctgaaaaactaagtccccccgagtttccccccttaagggtttgatgagaaccgattgggattggggaaaaaccggtcatcctccattgg

SEQ ID NO: 425994 - DNA, 261 bp, Oryza sativa
aggaaaaatgacagggtttttatttctagaatccccggtttggcctttgcaccaacaggttcccaaaggggttttggccccaaagaacaaaaagaatttctatcccccccaaagcccaactaaaaaaaacccccatttgattccaccaaatttaaaagggaaccccacccggaatgaacagcaccccccttggaagaacccgggcgccccaaagaattgcaagttggagcccaagccccgggggtaacccggggaaactgg

SEQ ID NO: 425995 - DNA, 393 bp, Oryza sativa
aagaatgccaaacatggtattatttatctaaaaactatacaagagcgcgacataagtctgtgaccaactaaactcacatgtcgcataattttcaagaacttcataaaaaacagacgctgaaataaaaccttgaaacttctcagtccggtttccagtagtgagataaatcatgaaatctttgttcggatatattaccatcatcaagatagggccaacttctgtatcacaactatctcagctggaagatcgtgttctaggactcgagaaaattactgaatactatggagcagagtcctcaggaccaagaatcatcaattatgatgcaaatgctacagcgctgtcagccacatcgaggatccatcaaatctaaaaaacgaaaagcaagcaaaggaa

SEQ ID NO: 425996 - DNA, 367 bp, Oryza sativa
ggatcacaacacaccacattgcaacatgcctaaaaacgatggaaatggagagaatccttacactacttgcaaataaagctgggctgatatgtgccatttcttacaagaaaaccagcttccaagaaaacagaaaaatacagaacttgaataatcttccggatggcaaaataccattgttccaggacttattaacaggatttaaagcattatgcaattacagaactacagtatccaaaaaaatatagatatttgagaaaacctgcaatcacggattcaccagttgtgcagcatgcagcttcatgttcttcagatccatgcaggactatactgaattaggaccactcgttcacacgaagcttagtgacat

SEQ ID NO: 425997 - DNA, 142 bp, Oryza sativa
ttttttttttttgttttttttttttttttttttttttttttttttttttttttttttttttttttttttttattttttttttttttattattttttaaatttactatataaattaaataaaaaaaatttatttctaattaac

SEQ ID NO: 425998 - DNA, 246 bp, Oryza sativa
gggctcctccttggcggcgccggcgccggcgttgtcgtaggcctgcgccaccggtgtcgccgtcgccggcgtgctgctctccttagcggccgtggccgccgcgggcgcgccggcggcgttgtcgtaggccttcgcctccagcgtcggcgtgctggtctgcggcttggcggcgtcttcgcattcctttttccaacgccgcccgccgccttctgtcgtcggcggcctccgtcgccggcttggctggcg

SEQ ID NO: 425999 - DNA, 117 bp, Oryza sativa
tttttttttttttttttttttttttttttgtatttatttttttttctttttatttttttttttttaatttttttttttttttttatttgggccccccaaaaattataagacacattt

SEQ ID NO: 426000 - DNA, 119 bp, Oryza sativa
ctacgcattatgaaattgaattaattaagccaacacaaacacgtacgtacacgtgcagcaaaagtttcatgcagatgctctaccgttcttttgtagcatttaaaaattttgaagccatg

SEQ ID NO: 426001 - DNA, 262 bp, Oryza sativa
gggcgttcaaaaaaaaaaaaaatctcacccaaaataaaaaaacccgaaaacaaaaaaagcccttaacttggaaaaccacccattccaaattccaaaaagccggcccaaaaaaaaatatgccccccccaaaaaagcaaaaattgggcaagccagctcgggaaaaaactcaaaaaaaaggggccacacaaaaaaaaaaccccccccgtggttaaccggacccaaacaagaggggggggggccaaaggggcggaaaaaaaaccag

SEQ ID NO: 426002 - DNA, 381 bp, Oryza sativa
aaactctctttctcattttttatgtgggcatatgttatcttcaaatatgtattaaagtgattatatataattgtggatgttcttaattattatttttccagacaatatgataattttgcattgtcttaaatctatttttatatgacttgcactgaatttccgctcaattggactgattctaagaaaattaattttactttcatgaaatttaatgatttattaaccaaatattatgccaccgttgcgtagcacgggcatgttactagttaataaaaaattaacaaccaaatgtatcaattatcattaattaattactaatgattaagattattagtaatgaaggatattcttaatttcttatccggccaatttgaccaattt

SEQ ID NO: 426003 - DNA, 348 bp, Oryza sativa
aaatgagtgcaaatgcaccacagttttttgagcttttgattgcatcaaccaaagagattttggcaggaaaaaaaggcattgccagaagttaaggcaagcagggggtgatctcatacaacctatacatccatctgccacagctatagatgagatcacttctgcgaaaacggaagcaaagaaaggtttgagctttattctgactaaaggaacctagtgttgggtgaaactgactgtacatttgaatgtacattgaaccactgaaaatgtgatggtgagcctaagagagatcagtaactcttgagagatggctgccatggtcatggtcatcactggacctgtggcttgaca

SEQ ID NO: 426004 - DNA, 332 bp, Oryza sativa
ataggcgccccccgcagatcaacaagtacttagtaatagtggagtaggtaattacagagcaacaagaggaggagggtacaatcacacacaaagactcttgatgaatgaacaaagaatcacatcagcgtctccaaattacttaggtacgtacaaaacagatcgatcggcaatgtaaactccgttattgcatgctgcaatcgtagattaatttacttctacacgggcggcggcggctccattttgagcttcggagaggcttaaatttgaaggaacgtttgatgcactgcttaggagaaacatatttttgatgatgatcatggggtcttgggggc

SEQ ID NO: 426005 - DNA, 284 bp, Oryza sativa
ggaaagcaagcagtctagtaggggaccaatccggccttttgcacgcatacagtaacttaaacgctactacgctttttttacatggggaacattttcatttttggggacataaaagggcatttgacatataattagggggcacatgtgtgcatgctgttgctgaatgcagggctagattattcgttcgcagcagggagcgaaattgggggaacaattttttcagggtgggtccggtttaccaggaagagcttcttgaacatttgggggggcagttattacatggg

SEQ ID NO: 426006 - DNA, 397 bp, Oryza sativa
aagcagaagaaacactgaatgacaggtggattcagttatgttcactatggtcgtttttctacacatgtaaataaatatcagtttgtcaccaaactgtcaacaaaaaatgagagaaagaagaaaacaaaaattgcgtatggccaacaagaacacgggccaaaattccaatggacatttcttctaacaaagatgcagctataagtgacaggtatcttgccacacaattatcccctgaactacagcaagcgtgtccgaaaagaacttgctcaatcagtagcaactttcctcctggcagcccttgcgttatcatattcaaacttgagcacatctggaatgtgtgaagtatccttcatatacaaccacctcgctattgcactctcctcaatcattggaaaat

SEQ ID NO: 426007 - DNA, 298 bp, Oryza sativa
gaaataattcacacgattgataaatttatttttgaaatttgataacaatgttacaaatgtggcgtgcatgcgatcaatgggtgggaagcaagtatcacaattaattaattgaaatacaaaagtatgcacgatttaatcgacggtggtgggtatccaaaaaaaatttagcgtaaggcctatatttaagaaagaaatgaggaattgtatgtatgaagttgaatgaaaaaatgatttataatgtaaaattgagagttgggaatttttgaaatcgaaaattgagaaaaacaatgtttccaaa

SEQ ID NO: 426008 - DNA, 60 bp, Oryza sativa
tttttttttgtggtttttttttttttttgttttttttttatttttttttttttttttttt

SEQ ID NO: 426009 - DNA, 374 bp, Oryza sativa
accaatctaatcaggttgacagatataaatacaagagctacaggccttacttagactcaaaaactacattctacaagtggaatatagccgtaagaaatgccgagaagagcagcacttaggtgtattacaagtttccaccatatgaatgttgcaagaatttcccgacaacagtatcgcgcctagagctaaacaaatggaggctacaagtttgtatctggcagcaacacagcatcaatcagtctggacataatacagcagcgaccgatgcgcgcccttcgtgtagtgtacaacaatagaatgaaaaactccctttggatggcccccaagtatcaaacaagcaatttgttacatttgaagctttttttaccacaacc

SEQ ID NO: 426010 - DNA, 133 bp, Oryza sativa
aaaaaagcaaaaggaaataacttttccatcccaaaaaaaaaaaggtttttgggtaaaaacgggttccccccaacttaaaacaaaatttgggagacttttttaaggggacaacccacggggttttctaactctt

SEQ ID NO: 426011 - DNA, 397 bp, Oryza sativa
aatattcagagatacacggctgaacaaaatattcacagttttaaaattggacaaagagtccaacttacaagtattcagttgacagaagaacacgaaaccttcgaggagaaaagcaagcaagccactctggtacttagaagcagaacctctttttctgcatataatggatgaacacatatgaattggctagctcagtgttatgagatattctttacattttttttcctaatactatatgatgttgttgacttttagatatatggttgaccattcatcttattaagaaaactatgcaagtattatttattttgttatgatttattttttttattaaagatactttaagcataacttatattttttatatttacacttttttttaataaaacgaatggtt

SEQ ID NO: 426012 - DNA, 379 bp, Oryza sativa
ttttttttttttttttttttttttttttttttttttttttttttttttttttttttttttttttggaaccctgggaaaaataaaatagatttttttattcaattccagagcctacaagtaaaataaacataacattttataatccaaacttggtccccgtaaaagttacccgtaatttagcacattaaggaacaaacaaaatttgaacagggtcatccctgggacgggatgacgggcagggttattagccctgggattttcttaattgaatggggggaggaaactctttttttcaaaagggctttatttccatttgaacaagggtcaagtagtcccttttttttaagaaatgggggtttaaaaaggtaataattgctct

SEQ ID NO: 426013 - DNA, 312 bp, Oryza sativa
aaaaaataaaaaaaaaaaaaaaaaaaaaaaaaaaaaaaaaaaaaaaaaaaaaaaaaaaaaaaaaaaaaaaaaacagaaaaaaaaaaaaaaaaaaagaagaaaaaaaaaaaaaaaaaaaaaaaaataaaaacaaaaaaaaacaaaacataaaaaaataaaaaaaaaaaaaaaaaaaaaaaaaaaacaaattaaaccaaaaaaaaaaaaaaaaaaaaaaaatccaggaaaaaacataaaccaaaataaataaacaaaaaaaaaaaacacaaaaaaaaaaaaaaaaaaaaaaacaaaaaaaaaccaaaaagaaaa

SEQ ID NO: 426014 - DNA, 299 bp, Oryza sativa
aaaagcaaaagaaaagccatccctgggcttcagagaagcccctaaacagatccccttttaacaggtaaggggattcccaaaggggaaaaaaaggggaaaatgggtgaacattttaaggggttttatcaaacataattgggggaatccgggaaaaaaaggggtttttagattccacaagtatccggggggaatctcctttaggggggttttcattttggggaggggccaaacgaaggagggactgaacccgaaagaaatttttacgggtaaccccccgacggggcttttgaaaaaccaac

SEQ ID NO: 426015 - DNA, 396 bp, Oryza sativa
acacggtggtcaataaataagagtgcatgtacaagtcaaaaatatagtagtagtatacataaggtccacaacatcagctaattaagttactccttttttggcttattatttcatatgcactggtgttaaaattcctgcggcggaacaagacttttgctttttcggctggaaagattgagctttccatggagcatcagcagcacaacacaattgaacagctagctattctttttaagtcgatcttgaaacatacattactatgatgctgggattaaagagctggagaagagcttctgtgtctctccatttttttttacatcattgagggaatgatcttggccgaaatgaccggcttttactttaccacaggggaagaaaaccttttttagtcaggtg

SEQ ID NO: 426016 - DNA, 344 bp, Oryza sativa
cttcgggggaacaaaagggatatatatttagggatattgctcccacagggcatgaatcatgaatttgaccttggcgaacagtttgctaatgggcccatcagcacatacatatgtaactttttagaaaacccaagaaggtttttttgggaggcatacaaaaaaaaattgagggggattaatcgcaatgggcatgccctttacccgttagaaaagggttaacatacatgcatgccaaattttttagctttatggaccacttttaattgatgaccacctcattgtcggcgttaaatctctccatggggcttagaatccttggaactgagggggcggaagtaaagccc

SEQ ID NO: 426017 - DNA, 369 bp, Oryza sativa
cctcgacaagtcttgcaatcttggtaagaaactaaaatagaacacggactttggatttgttcatatgtaaacaatacaaatttttcgcaagaggacaaacacgggatggtattcaaccatgtaggaaccgttaaaccagaaaccagatttaattttacacaacttcccacgaattaatgcagcgccgccacacggtcaaggcagagaacacgtacagtatacgttgtcagttcacgaggacctccggcagcatggcgtccttggccgccggtggcggctgcacgaagcgccgccagtaccagtgccgcgcccagacggcgcccaaggcctcgagcggcacccccttggtcttcggcaggaacgcccaca

SEQ ID NO: 426018 - DNA, 69 bp, Oryza sativa
gggtggcggaggaggaggaggaggaggaggagccggggtgggggcggctagggttagggatccgttggt

SEQ ID NO: 426019 - DNA, 350 bp, Oryza sativa
ccaacaagcctactgccttttcccaaattaatatgtaaccttttgggaaaacatcctcacttttttgggaagaaaaaaaaacctacaagtttaaaaaaaaaaaaaaggccccaaaaaagaaggcaaatccttatttgctcatgcaaacaacatatttgcaatggcaaacccagggaaataagggaccagtttatatggatggcctgaacaattcgcagaaaaatcactctttggggttagaaaaaaaaccccgggggggcggggggccattgcccctttgcagccacggggttgttttccctgccatgctcacgtttttgggaatagtaagccttgtttttttgacgggg

SEQ ID NO: 426020 - DNA, 314 bp, Oryza sativa
ggaaaacgaaggcatgactgggctataaattagttcctattacccccacaagcatgacggggccacgtttgggaataaatcccaaagaacccttggattacagggacattaccatactttggaagggccatttagggcccttttttttccatttgcaaaaagccaacacccctatgggttcaagaaaaacaagggcaattgggtttaaacaagggggaccaccgcagcaattcccagggaccccccctggaaaaaaacccccagttcgtcaaacaaaatgggagggggcccaccccccccttttggggctttgg

SEQ ID NO: 426021 - DNA, 389 bp, Oryza sativa
aaaagcatggcaaaagaattttgcctaatatatttatggagtggaagattgataataaatcaaaagattacatcagcaaagaatacattaggagaatttgcatacatgtttcattctgcgctaacaactgggacaacgactttgctactatcattctgttcgattagctatatatattctaatgtacagaagtaacaggccgaggccgtccagtaacgttcacttttttgtgctttaaagaatgggaaacagtataatctccacagaaaaaaaaaagctaataaacccccagccacaagccgcagtagccagccatactgcaagttcttctcctgcatgatacggcctccactccacagtcatcatcggtcctgcatctgtgggtaggt

SEQ ID NO: 426022 - DNA, 325 bp, Oryza sativa
atcaaccaacataatattagcttgcaaaaagaatttaaaatcgccatatatatggctttacgaacctcccccaaacttcaacaaatgcacaaacgtttgtcctacttgatatacatatatttatcgaattatcgcgtaatttaccatgtagaagtccaaggaccatgcataaacataaaatcaaaaacatgcgtggataatatatctaagaaaacaataagcaaccaagccaattcggagaaaggaaaggattaattaggagaaggttggaaaataggagggaatatgcttggcttcgtgcacgccattcattataggcaacctc

SEQ ID NO: 426023 - DNA, 349 bp, Oryza sativa
agcaatctagaatcggatatgtcattttatagtataacgtctgaacacccttctattcagattcattgaaatatctcatctaattctagattgccatattatgagtctgagggagtactgaacaatgcacttcagcggcagccaatacggatcagacaaatttatgtacaacgaaaggagagtctcggtagaacgaccaggcataatatgtacacacatgtcatgttgccatgcatattcacacgcatatgggacgcggtttttttgcacctagcccatctgccgttcgatcgtttccgtgatgcgtgctgtatttctccctcgtgacgttgtttttccccacctgagt

SEQ ID NO: 426024 - DNA, 396 bp, Oryza sativa
gaacaaggtaacattttattaaactgaacatggcttcagtgaagaagctcttattcttgctgtccaacaaaagccactgcaaaaacgcagttacatgactaagtgaggtagttgatgaactcgacagctgttgcaacagcgcctccggtgatggcgtccttgatgatcttgtctttgtggttgttgctggcagcagagatcagagcaccacttaaagcaccttcaatcatagcattcttctgcaaaaatcccaggaggaaacggaaaataatgaatcaagatcaaataatagcaccaagcataaattatacagtacagagtaataaacactggagttcataaatctaaatattgcctaaaacaaactattcatggaaaatcagtttaaggcttact

SEQ ID NO: 426025 - DNA, 92 bp, Oryza sativa
cttcaccttcgtgaaatgcagggcgccttacgcggccggtctatccttggttagaccgcccaccacccaccccgatgtgtgaaggaagttcg

SEQ ID NO: 426026 - DNA, 240 bp, Oryza sativa
attccaatgttttttttttttggcccccgtaaaattgaagaaaattccctgcctgttttcggtcccaaagaaatatctgaaggaggtatttttatagatcaaagggttttaaaaaggtcagaaccaagacgggggtcttttttcggacaacgaccttggcctatttgtttggggggctttaaaccactatcccgtgtatatttgggcattcgagggtactcccggcccttgttttttggg

SEQ ID NO: 426027 - DNA, 287 bp, Oryza sativa
agtacagtacttgcataatttcagtttgaaaaaaataaaaaaggaacaaaatgtaaacacgatgtgaagttgtatataactcctacttttctacatagtacacaatcttaccaaaacataatgataccaaagggatatataactaattaattaacctccttagcacttggttaggttgaaaagaaggcgttgacactcgacgactaaacgagggcaacctgcgaagaacaccgaggttggcaagctgaccatcaagaacacggtgatccccacggcgacgcccggcc

SEQ ID NO: 426028 - DNA, 342 bp, Oryza sativa
tttgccttcctctccttttttttttttttttggcacaagctgtaacactttcatttcgttgtattcagggcatggatccattgaacatcgagctcgacaaaataaaaaatcagtcttccggagaaaggcaatatgtatcatactcggcccctatgccaatcaaattgtacaagcatattgatcgctcttacgataagaaggaaaccagccagggaggttacctcatactgacataggtggcagcttaaacaactaacttacatgaccagaaacacatgctacacatatacggggaagcatatgcaatgggaattgccttagggaaaaacaattgctggatgt

SEQ ID NO: 426029 - DNA, 223 bp, Oryza sativa
gccgcgacgcggcgtgggcctgtggttgctttgtcgccctttttttttcactacggggagaacattatcgattgacttcttcatagtacgaaacacatatggccatgaagtgcagacagttgagaatacggtgccaacgcacaggcaatcaattcatgacgatgtgggcagtattctgcaggcacacgagttctggactgagaagtcaagtgtactacttggt

SEQ ID NO: 426030 - DNA, 99 bp, Oryza sativa
gggcgaaatttgtatgtttttttttttttttgaactgaacgcaatatggtcattaaggaccccccgcaaaaaaatgtactcggtttgtacacgccatca

SEQ ID NO: 426031 - DNA, 315 bp, Oryza sativa
acccgcgcagcatgcattttatttaggcacgggccaaaattaaaacatgtataggggataccttttggcgggagacactcacggtataaaaggggaggcgggggtacagggatatagtcatatttgggcgttttttaatgccggtcggtgacttcggtcaaaggggcagggtcgggtaggcaaaatcgagggggaccccccaaagggcggggccaccgacgttggggagaaaccggatgtagccgggcttgccccaagactggccccaagaggtcttgaagggccaaaacttggcgccggaagacccgttggtgc

SEQ ID NO: 426032 - DNA, 365 bp, Oryza sativa
agtgaaaactttctttctccagatcggacggtaatcaataccacttcagaacttacaaccacacaaggtcatattgcgcggggggattgaagtgaagtgatatactacgtctttctactctcaagtgaagtgatccgccattattggacagagatccgctgcaatcaccgcaaaacatattgccgcttcccaagtcagcctggtaactactactgaaagaggccaccgatcccctagccacgcacacatgcactgtttacatccttttttctactcctgtttttgtaatacaagctctctctcatccgttgtccttgcattatcttagaacttgagaacctgctttggttggcttccatgtttgc

SEQ ID NO: 426033 - DNA, 365 bp, Oryza sativa
gcttaaaaaaaagcaccactcaatcaagccaaattaaggaacactgatattgaaatattcattcaaaaggcttacaaccaaacaaatgttgcactcaacaaggagctcacaatttttgacgaaaggctggcataaacatcatgatgagaactaaagcaaccagtagaaacttaaatgggactaatactaaattattcggggaaatagacttaggatgtcttcagcttgattaaatagacttctggagatcaacttcatgcattctaatggtcatctgatggagatcgtgaggatgaaacaccattggaagaagcgaagcgtgagaaatatatggccatttgctcatcaagtttttgttgtaccat

SEQ ID NO: 426034 - DNA, 268 bp, Oryza sativa
ggggaaaaaattaaagggattcggcccaaaaaaaaaattggggaaaaaaaacaaaaaatggggggggccccaagggaaaaaaaccatgttttaaatggagggggaaaaaagtttaaaaaagggaaaaaagccaaatttgggaggggccggtttgttaggaagtgacggggttaaaaccttttctgaactgggcggggggccccgggaaaaccccaaatgggcccaaggccttgaggggatttttgaaaggggcaaggaaaaacccggg

SEQ ID NO: 426035 - DNA, 323 bp, Oryza sativa
acacaaattaccaacttaacggaacaacacacgggaacacatgtacttttaccatccaagaaaaaatcaacttttaactacgtttataaattcatagggaagttaattttttttagacagggggggtccttaattaacacacagtaggggggcacgttatattaagccgccggggtacacacattgggggggggtgggcaacggtttaacttaacgacgggatgggggctcgccggggttgattaacacctatgggacggggggaacgacggacgggattggggggtgggggtcttcctgcacggggggcgacgaccccgggg

SEQ ID NO: 426036 - DNA, 270 bp, Oryza sativa
ggggaaaaaaaaaaaggttttttaaaaatgaaaaaaaatttttttaatttcccccaaaaaatttaaaaaaaaaaaaggggaaaaagtttttaaaaaaggaaaggggggaaaaaataaaaaaagggggggggaaaccgaaaaaaaatttggccggaaattttaaccaaaataaacggtgaaaaaaacggggggagggcaactgaagggaaaaaaaaggggggaataaccaaggggggcgcccaaaaaaatctaagggggggctcccgggga

SEQ ID NO: 426037 - DNA, 267 bp, Oryza sativa
aaaaaaaacaaaagggaaatttggggggggtaaatgaaaaactttggggggaaaaaattttcctcggaaccaaaaaaaaagggggcaccctttggaaaaaaaccctaaaaaaaaagcgggctttttaaaaagggtaaattttctcaaaattttaaacttaaaaaaaagtttttatttttcccacgttgggattggggacaaatgggggttttttttttaaattggggtaagggggaaaaaaaccccaaaatttttgaaaaaagaaac

SEQ ID NO: 426038 - DNA, 392 bp, Oryza sativa
ttcggccttcctttttttttttttttttgttttttgtttttttctttttttttccgccaaccgctgaattaaatcgaacttttacagatcaggtacgcagttgcaatagacaagtcacaagtttcgccaccaaagggggaaagaacagttgaacaaattttccaacaacatccaggcactggaatttttaacccaggccgatagacacctcaggcctcagcccccaaaatccagaccaccatgctaaaccggggggggcttgattttaattgcagggagggggctaatattcgcaatcaagatcctaacaaggaggggcactttttaatcaccctgggggaagaatattgggatcttcctgagttttacacaattgaacatttcttctattt

SEQ ID NO: 426039 - DNA, 233 bp, Oryza sativa
aaaaaaaaaccggaaaaaaaaaaaaaaaaaaaaaaaaataaaaaaaaggggggaaaaaaaaaaaaaaaaaaaaacaggaaaaagaaaaaccggggaaaaaaaaaaaaccctttttaaaaaggggggaaaaaaaaaaaagggaaaaattaaaaacttttggggcaaaaaaaaaaaaattttaaaaaagggggggggaaaaagggggggttaaggttaaaaaaaaaggggggggg

SEQ ID NO: 426040 - DNA, 368 bp, Oryza sativa
gcaaaaagacaagcaccacactttcatgttcataatttatacaacagttgatgagccacacataacagttgatggcagaaacgggcgtgtaagttttttcattgattgtacagctattgctgaatgggaggctcactctggtacacaatttcagctgatatttgacaacgaaacatccataaatttagcagcagaaggtctggagtaatgtatagatctcagtggtgcactttaagcagcaacaggtgcggttacggccagaccttgggcttctgccggagcaaccaactgactgatgttctccacggcacgaatcctgccactcgccagcccagcagtcaggtcctccacttccactttcagcacat

SEQ ID NO: 426041 - DNA, 130 bp, Oryza sativa
gggcccagggggggtaaaaaatccgtttgggcactcaaaaaggggcttaaaaacccaacccaaaaaaaggggggggtggaaaccaaaatgttaacatggaaaaaggaaagggggaggggggttttttaaa

SEQ ID NO: 426042 - DNA, 361 bp, Oryza sativa
aaaaaaatggagggagtgtaagttaattaaaagtctgacttaaagccaaagacagcaaatctaagcctaaacaaaatatctcagtctataatattaggttccaacgaaatactgtcactagctagatttatctttgttcctacgtagaagaaaaccagctgtactttgcaaacaacttaacgagataaaaaaaaagatgaaaagaaaaaaaacaaagcttgctatgagcctcggaaataattagaaattacaagaagataaatgattgataagttgcagtgcgtgcgttgagagaggtgctagcttagttggttttcttggacaaatgatcatcctcggaggaagaagcagcggcgttgtc

SEQ ID NO: 426043 - DNA, 78 bp, Oryza sativa
gttacttacatgtttttgtaatcaaattttgttaatataccacaacaataagttgttattttgggctacaataaagaa

SEQ ID NO: 426044 - DNA, 370 bp, Oryza sativa
ggcctagaaacttggaatctttattcccgcttataacgctttttatttttcatactacttcatttcatgatgtaaattggcccctcataccttgcagaactattgacttatatacatcacaacagaacacttctttcctcactacactaaaaaaaataattacaatagcaaattctcccaatcatattagtcaaaactaatcacagactgccatttttaatgccacgggtgcagcgcgcgtcccacgctagtagcattaactttataagaaattgagaataacataccagctagaccaaaccaatctttttcgccatatccattttttttgccgcatacccacacatggtctgagtgtgatgaaattctc

SEQ ID NO: 426045 - DNA, 288 bp, Oryza sativa
ggggggggaaaaaaaattttcctttgaagggaaaaaagagggaaaagaaaaaacggggggggattccataaggttttcttaagaaaaagggaaaaaaagaattttttttttaaaacccaggaaacccccttttggaagggtccttaatggcccccatttgttgggcccccgggaaaatcacaggggaaaaggggaaaaatgaaacaaagggaccgttaattgccccaaaaaaaaggccttgttgaagttgccataaaaataggacccccggcccataaatgctgtttc

SEQ ID NO: 426046 - DNA, 103 bp, Oryza sativa
gtgattggtaaatgggttgggtatcttttgccaaaaatatgtggagttttttgatggaagacacaggaaacttgcataaggaattagctgagaaaaatataac

SEQ ID NO: 426047 - DNA, 348 bp, Oryza sativa
gaaacatggaagttatctgtcacaatttcatgctgattactgggatttacaagatgaagcttgcacgagattctcagccctgctttaccacaggctccagaaaatgacttgggtccacatttataaataataggcactatcatgatggcaaaagttattaacacgaaagttattggagtaatcagttcaaccagaagcaaaagttccccttgtaccaccggatggtccagagtatccaagcaaaatgagacatccaccattacaatttacagccaggaatatgggatctttagcattgtatagataccggtggacagcccatatgcgtcaagggattcaggggcaagc

SEQ ID NO: 426048 - DNA, 371 bp, Oryza sativa
aacttctacaacaatgctggttttagtaatgacttgagctgtaacaggtgcaaaaatgtgtggatgctacctatctggttaagatattatcctgtgatatcttggttgcaggctgaggagtacaactattctgccctaccaatctcaatctctcccctcactccactcccaaaatcaaacagggcagatctttttcctggttggtgaggctgtggggcagtgattgtttcactgtgaccaaaccctagccttgtggtcacatgggaagcactatgagcagagaggctggctagctaggtcttggccattaagccaagtgggggctgcaatgcaattgcaatgcatggagtggtggccagtggtcacaccaa

SEQ ID NO: 426049 - DNA, 83 bp, Oryza sativa
atggggaatataaacggacattcaatttaaaaaataaatagagggcttttttacaagtgagtttaataaatcctggtaaaagc

SEQ ID NO: 426050 - DNA, 346 bp, Oryza sativa
tctctccgatggaagaacgatcacagcattgatcgccgaagcgctgacgctccctctgctaccgtccaaaaacgcggggaaccgacccttcgagcatggagccaacttcgcgacggccggcggcacggcgctggaccgcacgtactttggggccaacaacttcacggtgatgccccagttcaacatctagatcgaacaccagataggttggctcgacgggatgaaaccgtgggtctgcggcgtgaagacaggtggccagccaggtagcacttgtggcgagcaccgtgaagctactatgagcagataggatggaacgacttggtccggcgcgctgatccaagggagg

SEQ ID NO: 426051 - DNA, 356 bp, Oryza sativa
actgatgcaaaagttacatttgccgaagagggctatattacaagtgagttcaataaatctggcaaatgcagatctactgagcaatgcaacttatccaataaatctgtaatcagatcattactggtacaaaggtgtatctcccagaatacatttacaatggcggttggaagccagcagcataagcatatagtttcgacaaagcgcattgaggcaagcaaatatttacccattttttctgtcgatgtacagagcaatgtttttgcagatacccgatcgtcgcgatgcttcggtgctgaagatgaacagcacagataactcatggatccatcaggttttctcttccacgaaactgaaat

SEQ ID NO: 426052 - DNA, 363 bp, Oryza sativa
ggtatataattgtacattatatggaaaaaataaattaattcgttttttccccatccagcgcctgtcccagttaccaccttgctgaagccggaaggataataacagtggtgtgcggtgctaaaattgcctacgtaaaacgaaatatgaacgtggggttattgaactttcatatgcttgcaagattcctgaaacgtttcattacatataatagaaagaatatagctccatatctgcatagccagaaattagaaggcatcatttttcgcctcatttttcgctcaaacaaattctttttgcctcatccattttgtagctgaccatttctccccttccagaacagggcacccaccatgaatgctgttt

SEQ ID NO: 426053 - DNA, 365 bp, Oryza sativa
gtgcattggttaaacacgtggtatgtatattaaacgctttagattaggggagccaggggtaccacatacattgaatcgcaaagaaaatttttattatacaaattttttacaaaattaaagttagagtttgatcctgggctttaaatgaggggaacccccggtggcaaaaaaactggggggccatcaaaggggataattttggaaaatggacccgggaaacgggagggataaatttgccctttagtagttgtttttttaaaaaaactactggtaggggcacgcaaaaaccgggttcaagttttaggtccttcagccgggaagatttccgcgctcccttgaaagcagggggtttttatgggggtacc

SEQ ID NO: 426054 - DNA, 264 bp, Oryza sativa
gatataagacagtgacatgcactcatcaccgtaacgctaggatccactacgtatcggtcgcccttcctttttttttttttttttttaaagttaatattattgtttttttttaattaaaatttcttttgtttttcatttttaggtcatttattaaactaaaaataaataacctttctaaacgtgggatcccaaaatgaatgatacaattacaacagaacgagaaaatctcatacgtgccccctaaagtcaaaacattataaaaga

SEQ ID NO: 426055 - DNA, 372 bp, Oryza sativa
gggagaaaatttcgtgcgtaacattataagttaattaactgaaaatccttccaaccgtacaaatttgataattttactgtcgaagaacctgcaatctcatgaaatttacagttcggtaatttaggtaactacagatgaagctatgatcattcttagctgaggtgcaagcgaagcgaaaaccctgacgtgtacgatacagaaaaatccctggaggttaagccacgaacaagcattcaagaaacacaactggcaaaaggttcacatgtaaaactagtcgtcctcccttcatgggcttactttggctttagagaataacatggacagggaagggttgtaacaccaacaccacggaagctgttgtctgggagcatg

SEQ ID NO: 426056 - DNA, 337 bp, Oryza sativa
ggaccaaacatccaaacccaactaaagggttattaatttttgcctgtcaaaataaccctccaaattaccctgtggtacaaacaaataatcagtgcagagcttgtccggccataactgtaaatggcaccgttgcaagcacgatgcacaaatgcgtgcagaaggaagctacattggcacttttcccaactttggcctgcgtaaggagcctccaagcgaagcccgaaacaatggccgacgcttcaaagatgaggaaccactgggtggacgtgctgagcgggccacggatggtcgacctggcagatattgccacggtcaggaacccggtgaacgcgacctt

SEQ ID NO: 426057 - DNA, 371 bp, Oryza sativa
cagtgaaaatttcgtgcgtaacattataagttaattaactgaaaatccttccaaccgtacaaatttgataattttactgtcgaagaacctgcaatctcatgaaatttacagttcggtaatttaggtaactacagatgaagctatgatcattcttagctgaggtgcaagcgaagcgaaaacccgacgtgacgatacagtagttgcagtgttctgaacgacctaacaagcaagcacgtcagtcaaaggtccgatagggcgtcgaaacaaagcctgaaccgaagtagcagtcgaaagttcagtaaactgaacgcgatggaattggacgagatggaaaaatctgaccaaggaagctgctggcctgctgcttgctg

SEQ ID NO: 426058 - DNA, 344 bp, Oryza sativa
ggtcgcaaaaacataaggatagacttttgtcatatagaaggattacgcacggtaacaaaacaacctgtgcatgatgtaatttaaaagtggcgtagcctgaacgggcataattacttatcaattaaagaaaaagaataaaaacaagaattgactccgctaatgaaagtataattataggaggatagagagcaaagaaagaggactacataaatcaaggagaacaaatgggaaaagactacctgacggttcatcagaaccaagccgactggagtggctgcttactatttacacaagatgatgccagatgaaggccaatgatacagctaatattaacaaatattatg

SEQ ID NO: 426059 - DNA, 55 bp, Oryza sativa
ccatgttagggttgggcgctgattcgaccacagaacccagagaaaacatcacagg

SEQ ID NO: 426060 - DNA, 315 bp, Oryza sativa
aagaaaaccagaatgtttaaaggatcaccaccagggcaggggttgccattgtttttcacaaacaaaaacagggtttgggagcccaaaggcatacttttacagggtacatgacaacgggttatcagtactacaaaacactggggagctgagcaaactggaacatttggaacttttgggggtggcacaaaaaactactggcaaaaacatgcaagcattttttttttcttttccaccctaaaatggggagacaccggaggtggcgaatcggcgcgaaatgcttttgccaacaatggggactggccccatggttgacct

SEQ ID NO: 426061 - DNA, 330 bp, Oryza sativa
ggccaaaagtaggattttactcggggatttttgattaaccatttgtcttgcttccatatgttgctatgctgcataaaaaccttatgctaaacacaggctccagaaatggggatctagcagcaactttttttaggtatcgttttagtatgagcatttaaacctaaaggcatttacatataataggggggtatcagctcatacagcagctaagctataaagtattcaaagggtagcaaatgccacattttggggggccttaggcactcgatgggtaaacaggggaacaggattggggatccattgcgccgcagattgttgtcggagagatcc

SEQ ID NO: 426062 - DNA, 367 bp, Oryza sativa
ggaataatgagatataattgcattagagattcactatttccaaggtgcaattgcagctgggaacggattacaaatatacaatcccttcaaaatcctgtggcatctttatgccagcagtatgcctatgtacacccaaactccaaagaatgaacttcctctcgatcacaaccaacaaaaagaaatggagaaagatgagagaattcagtcatctagctaagtagctattgaatctgtagccttttgtatgcattttctgtgcctcactaacgaatgaatcccctggtgtagagaagaatgagcaaagaaaccaaagtgacaacatttatcagtctcttcaccttctccaccgtccagcttccatccgaca

SEQ ID NO: 426063 - DNA, 74 bp, Oryza sativa
ggggggattaaaacaattttgtgaacaaccatttgtaaggatggaatggatttataatcctttgaccacaaaat

SEQ ID NO: 426064 - DNA, 365 bp, Oryza sativa
aggggaaaacacatttttttgggaccatatttttgcaaccaaaacacacgttagggatttaggggaaaacacattattttgcgtccatatttttggaactgaaacacacttagggggaagcacactttttatcaaacatttttataggggaaaacacatttttttggggatatacacattcttggaactcaaacccactttaaaccactaatggattccctccggttcaaaaaaaaacaacctaaaactggatgtgattggttagattcactgtattgggacatgtcacatcccgttctagaatcactttttttgggccagaggaagtagaacccgttgttttggacatttataaccctccaggt

SEQ ID NO: 426065 - DNA, 310 bp, Oryza sativa
gggaacaaaactacatttaaatgatcccagacggcctggagttcattcctggttgaacaacaaagggacagagatcatcctaaacccccagaacactgaagcacttgccctgccggccgcactttacctttatgaaaagatgatacacaccattactagccgtggtccaccaccaccgtgtacaaccaccgggcaccgaaacattatcctatggcaaagctgtgaggattgcaagggggctctcaaccctgaaggggggcccccaaaactttttttcaattgggggaacaagggccaccctggtctttgg

SEQ ID NO: 426066 - DNA, 316 bp, Oryza sativa
gtatcaaaccaaaaaataacttccaacggaggggatgagatttatatttcctacaggcaaaaaaggaaaacgctttggccgaccaccggtaaccttgaacaacaaaactggcggggggtaaaatggtttttccaaagggcacaagagctctattgcgctaacgggaaaccaccccccaggggaaaccccggaaactgaaaaataagcccacggggacatgggaaacctttccacgggggggggaaccccgggggaaacgccaaaggcccccacttttttcaggggacggtagaaaacatccaaagtggggcccggg

SEQ ID NO: 426067 - DNA, 343 bp, Oryza sativa
gggattaccttttttttttggttgttttttattttttttaccttccccaaccaaagggaaaaacttctaggaaaaaaaaagggcccatgatccgccgccaagaatggcacgcttaacaaaacaaccaacaaaaaaaacactagatcccccgggaccaaacggcaacgaacggagaaaaaacaggggctctttaaaaaaaaaaaacacaaaggggaacgacccaaaaaaggaggagtcagggggaagaaagccccaaaaaaaaagggcccggccacgaaaaaaaaaaggaggggggaaaggagggggcgaaggaaggaaccccccccccggggggaacgggcaa

SEQ ID NO: 426068 - DNA, 351 bp, Oryza sativa
ttttttttttttttttttttttttttttttttttttttttttttttttttttttttttttttttttttttttttttttttttttttttttttttttttttttttttttttttttttggggaaaagggcccaaaaagggtttttccaaaaggaaaacccgggggggttaaaaaccataatttttaaaaaaaaaaaaaaaaacaggcaatggtttccctaaaaggggggaaaaaaaaggggggggtacttttcaccccccgggaactttttttaaaaaggaaaatattcccccccttttttggataaaaaacttaaaaaagtcccaaggtgggaaaagccccggggcttttat

SEQ ID NO: 426069 - DNA, 176 bp, Oryza sativa
atcaaaacgctgggtattgaaaaaagataagccacaggaacaaggcaaaactgtgtttgccaaaaaacaaccttcccaactggacccaaaaacgccattttttatgggcaaaaggaaacgggtttcccaatccctcccctttaccagggttaaaaaccataaacccgcacaaacaa

SEQ ID NO: 426070 - DNA, 312 bp, Oryza sativa
attaaatagaaaggaaaagcaagcaacttaattaaagaatacaagacaaatactgactccactaaattgcgcgtgcaatgaggcagccgggcaccaccattataacctgggtttaatgcaaatgacctttctccacaatcctaatcatcccacataagtagacacacgtatatagctgcattaactacagatgtatctaaagttgtacaggctataagtccagtctgatggacaatacagagagctacgagtgacgtgcctaggacgctgcttcctggacgaaattctcaaaggtgcgcacatagaggagtg

SEQ ID NO: 426071 - DNA, 402 bp, Oryza sativa
aaaggtcaatcaatccctatgtatgtatggctgtatagttaatcttaccgaaaagaatcgaaagaatcaatagtctatggtccaggttccagcttgatggacatgccaaacaaatttgtaagtaaacatgcatgtatagggattaatcccccagaaaaaaattaagaagaagaagtgaaaaaaatgatcaattgatcagtgttaatcacgaaaagaattcttgagcttagctttgctcatgtcatgtcaataatggcagccgaccagcgcggcggaggcggtgagctgcaaaattggcttcttgccgtcgttgaactgcccgccgagagccaggagcaccggcggcggcggctgcgggggaagagacacggactcctcgccggacggccccggcaggttgag

SEQ ID NO: 426072 - DNA, 200 bp, Oryza sativa
agagataccccgtcatgcgcacgcgcacgtgcgcttgtcccctatattgcgcgcgcccttttttttttttttttttttagttgaatcaatttgactatttgaaacaaccttttttcacacttttaaaaccttgttttattttcacagggggggtaagactataaccgcacaaagggagtcgaacaagagtttcccaaaaa

SEQ ID NO: 426073 - DNA, 183 bp, Oryza sativa
catggaatatgtgcatcacaatcaccttttaccaatgataccagcatcagaaagcccccaaaaaactacaaaatattaacacccacaacctgccacgaaaggaattcacaagcccgtgtcatataaaagaggactcatgacatgcatccaaggccgagccggcacaccagactgagttaaacc

SEQ ID NO: 426074 - DNA, 464 bp, Oryza sativa
gtcatgtgcacgcgcgcgtgcgcgtggcctctctagttttgggcgccctttttttttttttttttgttttttttgagctaatttcccttccaatcaattacacttgcggaaatttctttttccaaagattacagttgcaaatcgaccctccaaataaatcaaatgttaacacccacagcaaaagacccacccccgaggatccaattctctccaacgggggagtccgtccttattacaccccccattaaccaattctgatttctgacggccactcgtaatgcaaattcccttgacgaatccaattccaaactccgtgtatcaatcagatcagaggcccttcctcactagcaaatctcccgtttaattccaactcctaatcaatttaaaccctcaggttgagcgtgtgcttgaggtcgccgacgtgcagcgtgtggctgcccagcgccaccttccggttgccgagc

SEQ ID NO: 426075 - DNA, 211 bp, Oryza sativa
ataaaaaaaagggtgcacgaccctcaagggcttttaatccactgctgtttacatgtccactcaagtgtccaatgcgcaaaaagtttataactcatgtacactagaacaacactttgcctgtgccccttttaattagcatttagcttggctcctttttaattgacgcttattctattatatgaatcatgagtcagaggcgagtggccaactc

SEQ ID NO: 426076 - DNA, 161 bp, Oryza sativa
gcatgtgcagcgcacgcgagcgcgtgtcctctatatttggggcgcgccctttttttttttttttgggtctttttttttttagtgggtatttatttttttttggaattaatttccttgaaaagaatgctgaacatgacaaaactttatcgctcccaccacat

SEQ ID NO: 426077 - DNA, 136 bp, Oryza sativa
ttttttggggtttttttttttttttgggtttttttttttggagtaatccataagtacaggcaacattttaagacaaccaaaaatctttataacataatcaaattttcaagaccccttagtaaacagcccctatggg

SEQ ID NO: 426078 - DNA, 187 bp, Oryza sativa
attcaaagagtttgtttgcaggcaaaacgaatgatgtcccgcccgcttatttggatcagaaaaacgcagaagttttactttctgtacaggctgatatgcaaaaaacccttattttaatcaagttatacattggtctcctttttacccgttccaggtaagaattccctaacggtgaaatttaccatga

SEQ ID NO: 426079 - DNA, 151 bp, Oryza sativa
catgcattctgtttgtctctttatccgccaaggaaccagggaccaaggggcacccacaggtagacccccgcccccagaggttagacttatacataaaactccccccaaaaagaaccaaacggaagcttaaaaggggccctgcaaaagagaa

SEQ ID NO: 426080 - DNA, 90 bp, Oryza sativa
gggggcccatacatatacgtatgctttttctgtgaaaatccaaaagtgaccgctggtactcgccgccaaagttaaaatggggccaaaagg

SEQ ID NO: 426081 - DNA, 191 bp, Oryza sativa
actctatatgagagctgtcgcggcatgcgcgcgcgcgcgtgcgcggggcctctatagtgggcgccctctttttttttttttttttttttatcaatgatcactgtgaaactattggttatcacaccctccattctaccgcaaaaaatgagtatggtggagattttcaaaagatacatacagggtttcagtta

SEQ ID NO: 426082 - DNA, 103 bp, Oryza sativa
tttttgtgggaagattaaagaacacttagaaactatagaaaaactgaggtcaagaacaatattaattacatgaccagtgacattcaacacaaaagcagtaagg

SEQ ID NO: 426083 - DNA, 411 bp, Oryza sativa
agatcaaagaacactttcatactatagatgaactcacatactgaacaattccacatgcacagcatgtcacatttaacaaaaaaacaataaggatctcgttactgcacaggttcaactaaaacacagctctgtttagctcattggctgttaacaatcagctactgtccacttctctcatcatttacaccatgcgtactcttaactggtttagctcacgcccgtcagaaatcagcagcaggtcacttcttctccttatcaatttacaccattgtatgctcaagttgtaagtcagcataatacgtggcaatgaacatcgcttcaaaaaattcatcaagaagcccagaaaattgttcgttgaccatattcccgaaatctttttcagagaagagtagttttctgccctttaccacc

SEQ ID NO: 426084 - DNA, 237 bp, Oryza sativa
aaaaagccattatttttccgaccaggagcttgaaaattacattagctgggcgaacgagtttactactccggggaacatttgaagatttggaattgccgggcgctcattgggttacatggcggatgcatccttcggggcgaaaagcatccatatttcggtgaccctgccggtgaactcgaacggggaggtgtactgggccaccgggtaccacgacgttgggtcggccctgggcccgtc

SEQ ID NO: 426085 - DNA, 415 bp, Oryza sativa
acagagaaatcgattggtctgtgccattcattttgtacagtctacaaaaataagcgaaaaataaataaatcattacaagggtcgaaacaaatacaatcagcgaggaaactgtgaagagtacatcatctctctctccatggtatagcacctagagacaacctgagattctggattagcaacaaggcccatttcaacattcttggtgctgttcagggaagtacatttgtacttcggagttaataacggctttatttcgctgctcctttgtaagtcttccttgtatgcccttgatcttgcagctcttaggagttgcagtcttatctccacttctttcattttaggtctctttgctcctttagtctttaagcacatctctgcaactgaggccatttcatcaatctctctatggctagct

SEQ ID NO: 426086 - DNA, 276 bp, Oryza sativa
gaaaagcactagtaacattcacttgggttcaagaatattttcacaaacatacggaattaatctacagcatacacacttcgttctcttgtgatttgtctctttggcgtactaattaattataatcaacaataccaatattacaacacaatcaataatcggtggccaacagtactaataataatggctaatgcaattttcaatgatgatgaatgaatatttcaataggcccagagggacgcgtcgtgatgatccatgcgttgctgccgcgacgacgac

SEQ ID NO: 426087 - DNA, 104 bp, Oryza sativa
tttttaggaggtatcaaacccacttttttttcttttttatttatttattctttctaaaattgaaaggtttgaaatttttgtaaattggaaattttgaagggcta

SEQ ID NO: 426088 - DNA, 184 bp, Oryza sativa
tctatatgagcgactgtcccggcgcgcgcacgcgcgcgagcgcggggcccctcgagttcgggcgcccttttttttttttttgggggttttttttcttttttggttttcagctgttgtttttattgattcaatcatgaaatggtgtgcaccctgttttggggtactctgaaggtgcacagaagcc

SEQ ID NO: 426089 - DNA, 128 bp, Oryza sativa
aaaataattatgcaaaaacaaaaatattaatacaaggggaagaaaaaaaacaatgagcacaggaaactagtgaaaaggaacaaaaagggaacactaaatggaatagcaacctagagaacaaccctgag

SEQ ID NO: 426090 - DNA, 88 bp, Oryza sativa
gttaaaaagaaaccctaaaatatgggaggggcaaaacttatgtgcgggaaattgcattgatcaaccccaataaactagcgaaagtccc

SEQ ID NO: 426091 - DNA, 190 bp, Oryza sativa
aaggcattaaaacacgggcgggggtttgcatagtgtttaagcatcaccatcaaagtttcacagcccaagggaaaaagagcacaggaattcagtggaaggaacttgtaacaccacaacatcaaagggttttctagcccatacaggcaccacagggaaacgttccagatgtccgacagacaaagactataca

SEQ ID NO: 426092 - DNA, 418 bp, Oryza sativa
ctggagtacaatctgtgtgttcgattgctgtctacttcagccgtcattggtacttttctcccacaacccctttctaggatattggagcctgacgcaccacattgtcgtaaaatcagagcttggctaccgccgccgacagcccatgccttcgggatccaagcctccacgtcctcgagcagctcttttggcttctccatggcggcaaagtgaccgcctccatcggggcgcttgtagcgaaccaagttggccaaacatccagcccagctgccagggaccgggaacagctctttcgggaagaaagagtagccaagaggcttgacgatgtacggtggaggaggcctttcgctcgcgaaaagcttgatatcacaacggcgaggcgactctttgctgctgccttgacccctgtacgggtagatgc

SEQ ID NO: 426093 - DNA, 365 bp, Oryza sativa
caaaaacccgggcctaattttattcgggaaaaaaatgctcaggcccgttccaggacccctggggggaggctaacaggttaaaacgggcacgcccacacatacaattctttgggccaaactggaacagggggcaggccccctggggattatctaagcccactttacgatgcctgccggggctctgggggccaaaaaatggtattggcaggcccggaaataatccccggggggccgcaatttaggggccacctagatgggcccagggacgggggcggacatgaagttggtggtggggccccggttgatgggagcaatcttgtcccctgtcacaaaagcttgcggggtcaggatttacttgaagcggg

SEQ ID NO: 426094 - DNA, 387 bp, Oryza sativa
aaaccaaatttgccatcatgcatcacaaatcagggggcatcatgcaacaatcaagtattggtggtcactacaaaagacatggggggccactaccaccttaacaaggagctaaccaatatcctacaaaaaacatacgggggccactacccccttaaccaggaaatattatacaaaagccccattggggccactaccaacttaaccaatagttaaccaatattccataaacagatgaaaaaaaaaagggaaactaagccttttctggggggatcagtccaatagcttgggcaaaggttatcttctttttgatggagtcatcatagaaccgcggtttatccctcagctttttaactgggtttgcaattagccccagaacttgatcctttg

SEQ ID NO: 426095 - DNA, 106 bp, Oryza sativa
aggggaatgatatatatttatgacaaattaatggagtgaaggatgaatttctacatgaaaaggcactgccataaggcgtgatcttttgagtgatctctgagttccg

SEQ ID NO: 426096 - DNA, 165 bp, Oryza sativa
gagctacgccgtatgctgcacgccttcggcaggtaggctcctgtttttcggccgtccttttttttttttttggggataatttgtcgagaagaaagaaacaataacattgtaatactaacaactaacaaggcactctttttagaataggatttacagagacacatt

SEQ ID NO: 426097 - DNA, 101 bp, Oryza sativa
ccaaaaaggaacatgcttacatacaaaaaccccctcccaaaggaatatgggaaaaaaattctaatgcccggaccaagaaccaccgaagggtaaaaagtctt

SEQ ID NO: 426098 - DNA, 147 bp, Oryza sativa
tttttgttttttattattattttatttttttttattttattgaattttagtattaaaattttgtgggtaaaaacaaatgatcttattgttacagggtcagtttcgatgggcagagggaaacagccattatatgtgctggcaaagaaa

SEQ ID NO: 426099 - DNA, 262 bp, Oryza sativa
ggatagaaaattattttattttcattcaaagcatattattattcagactgataagcgtcgaacaaaggtacgtagccaccttggatacgttcccctacacctgcacctatacacacacggacacggtacacgtgaggagtataaaaagaaaaataacaagcccgatccgatgcaacggttgcgatgacttggccgggggcacttggggtcggcgggggcttgtggaatcgagtggagcccctgggcgacgatcttggcggca

SEQ ID NO: 426100 - DNA, 241 bp, Oryza sativa
ttttttttttttttattttttttttttttttttttttttttttttttttttttttttttttttttttttaatttatttttttttttttttatttttttttttttttttttattattaaaaaactccttttaaaaaaaaaaaaaaaaaaaaaaaaaaaaattatactcaggagtaaaaaaatatatgggggagaaaaaaaagttggacacaaaaaaaaaaaaaactaaaaagggaactaatt

SEQ ID NO: 426101 - DNA, 267 bp, Oryza sativa
tttttgaacgaatgttttttttgaattttttcattggacttggcctatttaatttagaaacccaaaacaaagggaccagtccatgccatgttaattggatttgacctgacaaactgatggaacaaatggaatggaccaattaccaatgttaccacgccagatcaaaagggcacaattcgagggggaaacctggggtctttttaggaggctactgggtcacatgatttgggggccatattttacaaacacgggcggtgcaaataacaa

SEQ ID NO: 426102 - DNA, 164 bp, Oryza sativa
cgggcaaaagaaaaaaacccggcaagaaagaaaaatggtttcaaggtttgggcaccaaaatccaaaaaaaacataccaaaaagaattggaaaagtgtaaaaaaaaaaagacccaaaagatttttttaagcccgaaaaaagggggaaaaaaaacacaaaaggggt

SEQ ID NO: 426103 - DNA, 255 bp, Oryza sativa
ctcaattatcagaactcctgaatcattactttgtcaagagctacatttctaaccattgtaattaagcagtacaagatcgctgattgcacatatgacacatcaacgcattatgttatcagacacatgagatgtgctatgacaagtttatgccgcctaaccttcaatccttcagttctttccttcaagctggaaagcaggccttccatcaccatccgccacaacaggctgtatgtcttgttggtcgtgaatcttgtc

SEQ ID NO: 426104 - DNA, 114 bp, Oryza sativa
gcaggaacactgaatacaagctgtgaattgactaacacaagacaggagacaaccccggctccttggacaaaagttgcaacagaaaaaataacgtgatcgagtccacaaggctaa

SEQ ID NO: 426105 - DNA, 256 bp, Oryza sativa
catctcttacttcccaaaaaacttctgtaaaaattcaccatttagaaggtgcgaacacttttaacaaaccaatggccaattgggaatatggaacagccggtacccttttattaggccgtttccatcattcggtacaaattgggcaacacaaagaacgatcggccctccaaaacagaattcacaggtcccaacaaaacggtacaaggttcttccaaatttttcaatcactcatggaggaagaaggcaccttcaatcg

SEQ ID NO: 426106 - DNA, 130 bp, Oryza sativa
ttttaaatggcaataaagagatttacacgaagattgaattagggcctctaatattcgacggaaaattaattacgtgctttaagcacattaagcttttgtaagacacgaaaggtaaaccatggatacaaca

SEQ ID NO: 426107 - DNA, 257 bp, Oryza sativa
gataaaatagtgggttacacaagattaaattaaaacctataatattcgacgtataattaattcgtgcattaagcacattaaattttgcgagcactcagagattgggtgacgcgacccacacgtacgtacctggtctgcactgcacagtgcacatcatacacacacgattcatcagtacacaaattaccaacttaacgtaacaacacacggtaacacatgtactcttaccatccaagaaaaaatcaacttctaactac

SEQ ID NO: 426108 - DNA, 118 bp, Oryza sativa
tttttggggggaagcaagaaagaaatggcatatcgtgtatctagccaattcaataaattaaactttttaaacatcatattatcataggtgcatttttaaaatcttgaaaggttaacca

SEQ ID NO: 426109 - DNA, 225 bp, Oryza sativa
accttgcaaccgaacggttgtcaaggtcaaaacaacaagaaccagacgcggcgaaaaaagctgcggcaggaataacgaacttaactggtcaaaagggcaacccacgaacagtgaaccccgaaggggggcccgaatgcaaaagcccctatgagggcaacaaaaggcgatagaaatggcctggtaaggtagaattccccccggaaaaatttttccgcgaggaaaaag

SEQ ID NO: 426110 - DNA, 256 bp, Oryza sativa
atgtgtagattgcaaatcaataggcaaacttagctcctttataaaattcccaacaaacataaggttagggatctaccagaaagcaaaatctgccgacgtagaccctaaacacaaccgtggagtaattactcgtgcaattaacttagcttaatctccctctaggctctagtagtttcagtttcagtagtactgtagttttttcaccagctgaatctgacccacagcagcaacgaaccagagcgcaagaacacaacgc

SEQ ID NO: 426111 - DNA, 251 bp, Oryza sativa
gttagcatcaataaagaattacaaatgaagatgaaactggcttgtctgacagagatcaaagactgtacttaacagcgccatcttaagcaaagatgaatcgctaatattaacctattctatacactgccaaatgtggcactatgctatggactacctatatatatatggggcactaacctcttttctgtggtctacactagagccttgttccaggcattcctcagtcatacaggtgcatatatgggctaact

SEQ ID NO: 426112 - DNA, 141 bp, Oryza sativa
gacctgaattaatccttgttacacactttgatgatcgcacttaatccttgttaacacattttggcttacattttggcaaaacacaataagcttaaaccctttttactaatttttgccttagcacaaggttaattaggtaca

SEQ ID NO: 426113 - DNA, 67 bp, Oryza sativa
gggtgggtaatttttcttttgaggatctttttaccttgcaccacaacagctgtaaaagccaaaacaa

SEQ ID NO: 426114 - DNA, 100 bp, Oryza sativa
cgccctccttttttttttttaattgaactgtaaatgtaccaggggatatattatagcaagacagaagtgcttctggggacactttacaataacaacatgt

SEQ ID NO: 426115 - DNA, 63 bp, Oryza sativa
ttttttgggttttttttttttttttgttttttttttttttttttttttttttatttttaggat

SEQ ID NO: 426116 - DNA, 65 bp, Oryza sativa
aagctacagccaaggaaaattttcatatctgtaagatctatgcttacatattttgttcaaccata

SEQ ID NO: 426117 - DNA, 248 bp, Oryza sativa
tttttttttttttttttttttttttttttttttattattattttttttttttttattatttttttggatttaatgaaacacatgttcgaccaaatcgtggaaaaaaaaaaaattaacatgcaacaagaaaagcaaggggggaaaaaagatgaattaacgcagggaggggtaccagcattctgacgaaagacgaccaaaaacaagaaaagaggtgcggtgtagacgagacaaaagaggaggattaccat

SEQ ID NO: 426118 - DNA, 87 bp, Oryza sativa
acgggggtaactttaaattataagtgaaaaaccggaaccaccaaaacaaacttctgcgtcaatcgcaccctttctaatcaaataact

SEQ ID NO: 426119 - DNA, 258 bp, Oryza sativa
aataatacaagttcatatattgctcaaatattcaactgcaagaattaacgagcgagtttttttttcctcactcgatggatggatggatgcaacagcgtgtgtcaattaatcatcatatcaggatttatggctagcttaaccaatcaaatcaaatcaatttcaatttctccttcttggcatggatacggcgttgccgtcgaagagctcgtcgatgatggcctcgaggtcctcggcggagagcttgatgtacttttccgc

SEQ ID NO: 426120 - DNA, 234 bp, Oryza sativa
ttttttttttttttttttttttttttttttttttttttttttttttttttttttttttttttttttttttttttttttttttttttttttttttttttttttataatttaattttttttttttttatatttttttttttttttttaaaaaaaaaaaaaaaattaatcatgggtagaaaaaaaaaaggagttttattttgaataagatagaaaaaaaacatagttacttaagccc

SEQ ID NO: 426121 - DNA, 82 bp, Oryza sativa
acataaatatatattagggcgtatccatgaatagagaagcgattgtattggaccgcatcaacattttgtgaccgtacaacag

SEQ ID NO: 426122 - DNA, 239 bp, Oryza sativa
caacaaccatttcctgcctttttattatgctctcggggttaatgaaacacatgattgcccacacggggcaaattatttagaataacatgctacaagctaatctagccttgaaatagtatttatgtagccggaaggtactccccggttcttaggcagggggccaatgccatatatgagtctccctgtggcaggaccaaacgggtttaatgcgcttttggagttccgatccctgcaccttt

SEQ ID NO: 426123 - DNA, 136 bp, Oryza sativa
ggcaacctatcagaaacagtaactttttggctagggagtataattctttacataactcatagttctatgttacacgcaaagagctgaaacgccaccacatttgggaaatctaacttgaggaaggaagggctaataa

SEQ ID NO: 426124 - DNA, 115 bp, Oryza sativa
catatcaagaatatccttactggccatttatttttatgttggggacgccaggaaagatgggactagcccatgttcaaaaactcttttgttcaaaacaaaacacagtgacgcccag

SEQ ID NO: 426125 - DNA, 112 bp, Oryza sativa
gcaagcaaacattacgtaagtcacagtacataataatatatgcccaacaccaagctgaaaagaaattggagcccaaattgtccttacaataaacaaactcctcaccagtaag

SEQ ID NO: 426126 - DNA, 219 bp, Oryza sativa
accatacctttttatttatcccttgctacaaattttttacaacaaactccttacagtttggttttaggggtcactgatcaaagaacacaaaggctagacaatccctatttatattattattattattacctccctaattaacatccttatcaaaccttttcacaattttcagatgtcataaactgttgcataatcctggaagatggagctggtttcagg

SEQ ID NO: 426127 - DNA, 254 bp, Oryza sativa
ggaacacaatagtgtatatgttggatatatctatcaacaatgtataccaagtttttccacataaccttatctgaagcatcctttaataattcaactcatatccctgatgatatacacattggttgttcttattatctgcttttaggatgaactcccagaaattggcaatttgccagagatatcgaactgaatcaaattagtgagctatgtaaactttgagataagccgtcggtcaaaagggatttcttcagaaa

SEQ ID NO: 426128 - DNA, 282 bp, Oryza sativa
gctgcgtcgcgtgcccacgccaatcccgtggcggcggaaggaggaggagcaagcgcttgggaggagctaaaccctagaggcggagctctagaatcgaatccccccccttccttccgctttgcggcgatgagtcggcggcaggagatttgccgcaacttccagcgcggaagttgcaagtacggagcgcagtgcaggtatttgcatgcctcccctcaccagcaacagcagcagcagcagcagcagcaggcgaagcccaacccgtttggatttggcaccggaagc

SEQ ID NO: 426129 - DNA, 51 bp, Oryza sativa
acaaggtataaaaagctagaacaaaaaattatggcttgtgaaataaggcca

SEQ ID NO: 426130 - DNA, 266 bp, Oryza sativa
aaagcgggtgaactcataattccactaaacctaacaggatcaatcaaaatgcatcattcacctaaagagaaggatctacagtcgtggccgtacatcagtggctgtttttccaagcataaaatgctaacttaatcatactcctgtgctgatggatatgtatatacttactaacagctgagtggtgccgagaaggttaaataaaggtcacttctgtgctgactacggagtgagtgagaaatcatttagggctgtacaaaaatgtgagg

SEQ ID NO: 426131 - DNA, 178 bp, Oryza sativa
taggtaggcggtagtggtggggtagggcgagcgaaaagcacgcgcgaggaggcggcggcgtagggggagcggaaaccgtggacgtgcgctccaaaatagcgttaaacacaatactggatacacattttccccgcgaactttcttgtttacacatattcctaagtggaaatgttttaat

SEQ ID NO: 426132 - DNA, 265 bp, Oryza sativa
gagctatcatcagatcaatcagcaacttcagaacaagctgttacccaagcacatttattgatatggtacaaaggtagatccactgattaaaagctgcacatcccattgttagagcaaggcctgcaagttcattcatcttctgaggtaacatcagattggtcagcctcttcttgctttggcacaggagagacaattgcggcccagcaaaaagaatgaccggtccttcaggcggaggaaagttgcaccggagttgcctgaaacgcac

SEQ ID NO: 426133 - DNA, 52 bp, Oryza sativa
agggaaaagttcatggcattcctatattattcagcgcgtcaaaggcaacatg

SEQ ID NO: 426134 - DNA, 268 bp, Oryza sativa
ttttgtggtgtttttatgtttatcattgtgttttgtatattttttaaggaaagcgcgttttttgatttggtatcagggtggtgataaactaatcaaggatccattaaccacggttgggacacaccagggtgtgttttaacacattaaagaagggtaatgcaggccaattagagtatggagcgtaacaggtcaagggggctcctgcccagaaatgattttggccaaactttgcaaccgggggaagcttgtgctgggtttggcggaaaca

SEQ ID NO: 426135 - DNA, 102 bp, Oryza sativa
gttcacagtgaagtatattgtttgcattttacaatattaacagcggcattccaagtaatgagcacataactccaaactggaagcagtcctgtaaataattga

SEQ ID NO: 426136 - DNA, 122 bp, Oryza sativa
tttttatcgtggatctttcctttttttatcttttttctttatttttttattaataattaatgtttcatgtaatagaaaacaagaagacgatgagacagaaagggacagggcaaaaaaaagac

SEQ ID NO: 426137 - DNA, 259 bp, Oryza sativa
gataaataactcgatcttactggataatatcttattacatgctagtacgtaacattatcttacattgtgcatggtgtattatatggatcatataacattaattgtggcacacccagcccatcatgatcaaagaaaaaaaattccaaactaaaaatccttagcttcaattcctggcacactagtaacatgacaacactatatattccataaatttctagtacaaaagcatctaattaaccaacgttaaccggagcaatgt

SEQ ID NO: 426138 - DNA, 490 bp, Oryza sativa
tttgccttttagatcgaatttcattcctaaaatggaccacctcattccgaattgaagtttagaactctctagaaaaggaccacattgcacacatttgcatgtcctacctcacttggcattttgccctttagctagacacagcacagctgttagttaggtaatccccatcgtccattctcatctggagtacagattgcctttccactaagctccctttccaaatcctttttatcgcaacttatcagaggcattcattgtgttgcatgctttcgtacatgtaatagtttggtcccaaattaacctctcaaatatgacaattctcaatgctacaatgggaggccatggaaagagatcaagcagagcctgctctgttcctggcaccaaactgacatatatagttttgttaattaggtatatgataaaggcagattggttatttgattattacaattgtaatgaatctttagccaacttacatagatcagagatg

SEQ ID NO: 426139 - DNA, 354 bp, Oryza sativa
ttggccgtggatggacacgtgtcatgacatccaaggctttaaagctggcggcgcatcagagggaaccatttattggagtcgccggccgtcctgttggtggtgaccgagcggttgcgccggtcgacggcgaacatgacggccgattctcctggctgacggtcctcgggtttgactttctaactttcaattcatgtatggcgaactaccggtcggacggggacctcgccgacgcgaccttcgggaccttatactacatggacctacagctgctgttcggctggtagctcatgctggagaaggcatagtccaactatcgggagagggggaacctgaaggcggacgcgtggatcctga

SEQ ID NO: 426140 - DNA, 555 bp, Oryza sativa
  unsure (1)..(555): unsure at all n locations
atcgacgccattggcgagagctcgagcgcgcaacaccaccacgcggtagcctcccccaacctccacctcctcctcctccgcccgccccagagccaccggatggcctcgcttctgtaggagtagaggcgtagagcccagcgcgagggaaggcggcgattgatttgatttgaccaagattggtcggccgtgccgtctggtctgaggagcccggctctgggggatggcggcggtggcggggggatcgcgcgcggctccaccggcggattccgctgccgtggcggcggtggcgaaggaggcggaataccagaagggcgtgcagaagctggtggacctgctgtccaagctgaacccggctgccaaggagttcgtcccctcgtcggcggcggtctcgtcgccgtccaggaaggcgctgtcggcggacgcgccggtgttcgactacaactcgatcggaggctggaacggnggcggcaaggaatccggcgccgacgcctaccagcagcgtcggaggagggatggatgcctcagtcaagggaggaggaggatgaacgagagagc

SEQ ID NO: 426141 - DNA, 152 bp, Oryza sativa
ttatcttaatttctctcttcatcttctcgctctcgatctcctacagaagctatagtagccagcaaatcaatcgatcgatccgtacaatggcggccatgaagatgaacaagattgccgtggcggcgctgttcctcgtcgccgtggtggtggcg

SEQ ID NO: 426142 - DNA, 431 bp, Oryza sativa
tttaaaggggaagaaaaatttctgtgtccgctccatcctagcccttggcaagtcttctcaagcaggaggaggacttgccatggtgttgatttggggcggtaagaagcatcggtctcgccgtctgctcctatgatcggcctcctcagttgacacagcaagatttggtccggggggaaggggagcagccgccatgtttgggtcccgcgtccaggatgaggtggagatgcagaggaggactaccaacaggatctttcctgatgagagacaggaccagattaagctaccgtttcaagctgcacgggctgacagatttggggtaaacaggatagatgcaaagactactgagaagattaaagtgataagtgaaggcaacataccatggcaccgccgcattctagaccctgggagtagcatggtgctaatgtggaaca

SEQ ID NO: 426143 - DNA, 275 bp, Oryza sativa
ctctttctctatgcaggggagggaggggaggcgcggataaaacatcgagagcggcctgttgccagctacctaccgtccatctgtgcagatccattgctgtacggcttcttgattttttttttatttttgtttctccggtgatcggagaggtggtgtgttttggaacgggaggggagagaagtttgtaacttctaatgttattttaacttgtgttcatgaagttcacctagcctgtattttatctgaattttgatttctagctgtaatgattattc

SEQ ID NO: 426144 - DNA, 213 bp, Oryza sativa
ttgatacaagccggcatccgcaagcacaagaagttttgtctgctctttcaagaggacagctccttctatatgcaccactggagagagggtatactctcgatcacattgctgctattgaccacgagctctgggcaaagaggaccacggcgctgcatatagactacacgctagaaataatgtaccaggtagataacggaaagtatgagaaggaag

SEQ ID NO: 426145 - DNA, 251 bp, Oryza sativa
attatgtaagcagcagagggtagccaggacgcggtgcctttcatcgggaacaccggcaatccgcctagcctgcccctgaccatgggtcatgcagaaaagagatgccgaatggcagaagctaaccgaatcaacgcgagcgaggagaacaaaggcaaggatcttgagcacgtgcagtggtcaaaagctttaaaaagttcatcaggccctgattgaaagactatgagaagacaaattaacttacgtgaccatga

SEQ ID NO: 426146 - DNA, 334 bp, Oryza sativa
ttttggtcgtcttcagagcccaacaaactggcttgttggtgataggacacatgttccaatggccgaaaaattgtgatattactcttctaaaatgcggtgtcagaaacaaggctgaccgagttgaacagcaaattttaaggtatatatgggactaacgctccacatagctgaattaacatcgttgattggaatgggattatccagactgatacgacaggctatgtttgcttgaacaagatggcatgtgcatttactcataaagaggtttaattgctgctgaccttgttataaaactgattggagtacactgtgtgagcatggaatctcagcacga

SEQ ID NO: 426147 - DNA, 522 bp, Oryza sativa
ttaaagcatggagattatgttggttctacctctggctcgagtgagggtaaaagtagggaccatgttgactcatcctcccgttcaactgaacagttgtggcaagccttctttgctaatccttttgactggtgggataacaggacaaataaggtaactttcttcttattgttcatttagacattcaaatgcattatcttgtaatatatattacatgataaacggactaatggcttctgttcttgggtaaaccatctacctccttttaggagggtcatatcctactaagtactgctgcaaagatttgagagcacttctaatagtccaaaacttctcagataattaaaatactactatatgaagtattaatggttcatggagtttggctgaacattgtaaaacagaaacattgaaggtgtcaaatactcaaatgtaatcatgaaggaaaaaaaaaaaaggaagttgcaacatagtcagcatagcgatgtggctattttgtatttgagtcatgcaatatgtttttgg

SEQ ID NO: 426148 - DNA, 375 bp, Oryza sativa
gtacgccacccgcctcgtcgtcttcctcgcgagctctccacccccaccaccatggcgatggcgatggcgatgcgacgcgcggcggcgctcggcgcgcgccacatcctcgccgcctcgtccacctcctcctccggcgtcctcctccgccgccacgtactctccccctctgccccccccccccttcggatgtgggtttagggcgcttgctgtgaattgggaggtttgtgcagatgagcgtggacgcgggggcggcgatggagaaggtacgggcggcggggctgctccggacgcaggggctcatcggcggcaaatgggtggacgcctacaacggaaggaccatgggggttcaaaatccaccacttggggggactttgg

SEQ ID NO: 426149 - DNA, 554 bp, Oryza sativa
ttacgacttgccaactaggaaacaccaagccggcgcacatgagacacggcggatagagctacagaatcattgatgcctcctgtccaatcctgctatcccatatcggagttggatggagcactaccgaataagagaagagggcgggctgacaaacggttgaaccaaggagtcctaggtggggaaggtggggatccacgacgcagctatggcctccccgcccaccaggccgccagccacaaccagctgactaggtcgcatgcatcatcagatttcaatctcccttcgttccctgtccctaatccaataccaatagggagcaatcagctgctcctcgacggcgagggagatgtcgtcggccgcgggccaagacaacggagataccgctggggactacatcaagtggatgtgcggcgccggtggccgtgcgggcggtgccatggccaacctccagcgcggcgttggcttcctcgtccgtgacattggggacccctgtcttaacccatcccccgttaaggggagcataatgctcaaaccgaaaaaatggccacatgttt

SEQ ID NO: 426150 - DNA, 433 bp, Oryza sativa
ttatcatgggaactgagaatgatgcccagacagacactcccacaaaatacgaaccacgctgttccgatggagagagatagagtgctattacgcgctgagcagtcattacagtcgtaatagtcgaactgcacaacatcttctcctatgagcctgaggaaggaccgtagatcactggatggagagtccagggctggcaattctaaaatcgaaccagtgcgtattcatccagtataaggaagccctgcaaactttggaggacagccacctacacatactgttgggatcacacgagttaacaaaatcatgacatcatatgaggaccttaagaaccctacaattatatgttgcaatgacaacaacttcagatgagcggaatacttgtgagtgctaaggtgacagggtggaccgacttagttttgatcctaatgatctt

SEQ ID NO: 426151 - DNA, 535 bp, Oryza sativa
gtcaattttgggtgttcagcctcggacacatggtgctgaggatgcagatgcagtcaaacccaagagtcgaaccacaaagtctggtcttgcaactgttggggaaatcaacactactgcagcaggggctgttgccaagcatggccatgatgaaaatattccacaggagcaaacaccgtcatctctggctagaatggtgaatggagtagcaacagatactcaaaatggtttccatgatgttgatcgaactgctcgtagggctgaggaaccatcgaatactgccgtaaatggaagagtgcaaggtgcttcccctggaactaatgaaattcccgctgttagtacccaaaacatgcctaccgagaggtctgcagagaacattcctgttgctaggactgaacagcatggcaatgctaaagcaaatttggaaccaacatcaggtgtgaatgcttctagaagttctcatgctggaaatgacactgctgctgaagcccgggctggaaatgaaacattaccattagtagagggtggagaaacagga

SEQ ID NO: 426152 - DNA, 296 bp, Oryza sativa
gtgcctcgctgccacgccgcgccgacgccgtcgccccgccgccgtcgtcgccgtacgccatccccccgccgacgccgtgcatcatctggcgccggtcccccccttcccccttcttcgccctcccctcgcggcggcggggtaaccggcgccagtatccccctcccctcgtggcggcgtcagagtcggctccggcgctcccctccctcctccatcccctttcgaccgcgctggggatggtggcaacgccctgaggggtggcggcgtgaggcgcggctagaaaggagctgacgacaagc

SEQ ID NO: 426153 - DNA, 382 bp, Oryza sativa
ctgacgcgtgggtttttgggatcggtgatccgtttgggttcttgttttgggggtgacaggatcttgtctgtgtggattcgcgggtttcttggatcggaaagggggaatgctggtatcaatatgctagcccgcggagccgtgcggtcgctgttcgatcgtctccggccgccgccgcatcaccggaggaggaggagtagccccgccgcgattatgccggccgccgtcgtcgcccaccgtggctgcttctgcagcctcagccactcgaatctgtgcggggagggcagtgtgattcagaggaagggatttcttgatcttgggatgggtcggaggatcgcgccgggcagcgcattgggatccaagggatgcctgaattggcaggatc

SEQ ID NO: 426154 - DNA, 145 bp, Oryza sativa
ttgcatgaaaagacgcgcagatatgactatatcactgtacacacgactaccctactataccgtgagtgtctgccgacgagacgtatccactatacatgtatgaattgtggaccgtgcctaaataaaatgcatgctgcgcgcgtcc

SEQ ID NO: 426155 - DNA, 510 bp, Oryza sativa
ttttgtacatatgctaaaagtactatagaaaacattggaattaccattaaattcttgaactgttgttgatgtaacaaccacaacagtgtggttgccaatcacatcttcattcaaagaatgagctaactgcccccataacgtcactctgattttagcaccactgtagataacattgtaaaagacttagataagattatgaaagatatcaaaaatcgattgaaaggaaagacagccatgtttcttactctaataatagaagttcaatctcacggataactttaggccatgggtttgtagagttcttcattatcattcttgattctatgggcttaattttggtaagcagtccgatgacatctgtcaccttggaatgttaattttgtgataatacaatttgaatagtgaagttaaatattattatacgcttacctgataaaatttatcttatttactttataaacaatgtttccttgtgcaactctagtatattcttgaatttgttgatgcttc

SEQ ID NO: 426156 - DNA, 440 bp, Oryza sativa
ctttgtcattgttgcgccgtgcaggatacacagcgaccatgatggcttgcgctttccttgtaaggattaggcgcttcgctcgaccaatatgcgccgagaggtaacagggacgctttctgcatgaatctgggaaggaagatagtacttaactgacttgtaatgaaaggagcacaaggagcctgcaatacttcagcctaacacaacagaagagaggatggtgctcagagaatgaggtcaatttacacagaaatcgctgatgcacacgctgaccttaatgagatgttaggtcctgtgagcgaacaacaggtatagaaggcagactcagatggaacagctaactgggctattgaagatttcacctactaggtatacttgcaagacactaaataacactcagaggatactatcgtggatgctagcttaaatgaggacatacatag

SEQ ID NO: 426157 - DNA, 146 bp, Oryza sativa
accacagcgctcgatccacccccaacgcaacgctactcgtcgcatggtcttgttctccagccaagccgacctcacccgtcctcctcgcggtgagcccatggcggtgccattaggccgccgcccgagcgatgaccgcaccagaggga

SEQ ID NO: 426158 - DNA, 132 bp, Oryza sativa
ctgtgacaacacattatcacccaccctttccatgtgcccgtcctcacgtcacgccggcatagccgccgtcgtcgattatagccttggcgcatctcaggaggcatcggcgatggcggtgaccgcctcggaggg

SEQ ID NO: 426159 - DNA, 485 bp, Oryza sativa
tttctcattcctgctttatttctaaccttgtcatttctttgccaatttatatgtgcccttgattcctcgtttgctcatctgctctttttcgatatatatctatcttgttgtatcttcttttcgcatgacgagcgattcggctttttgcggctttcgatctatgctaccctagatacctgccaagaaagggcacatacaggttgattgattagccaatactgaattcattacaagagcttttagcctctcattgcctatgaaaatgctcacctacttttgtagatataaaaataaacccatcatatgagctaatgaagcacttcaagaaaaagtcaatttttatagcagattagagattgggctacagctagcctaaacacatgattgtggaggatgtttcagagtcctctatgactccatgctccatgacaaatgagctataaaatagcttaattctgaagcttcatatgaccccctcatggatg

SEQ ID NO: 426160 - DNA, 181 bp, Oryza sativa
acgcgcgtttttgcttgccttcctcgcatgcctcctcctgttccttctctgtctccgctagggtgtccgcgccgccaacggcccgaaccgagatgccgccggccgccatggctacccctcccccgccgcagggttcctacacaggggatccgatctacgacgagctgaggcacgcctgctc

SEQ ID NO: 426161 - DNA, 233 bp, Oryza sativa
agcgcgcgtttattgtcaatcagtatagatgcttgaacaagggctgtagagatattgccaaaccgcaagctgccaataatgcgaggctctaccaggtctgctcggaccaaggctagtgtcgatcgcaaccgagaaaataagatgcaccttggccattggggtggcttgacaggctgagtcacgatattagtcatcccgcgtttacgttagtgaactcgaagctggggcacgat

SEQ ID NO: 426162 - DNA, 167 bp, Oryza sativa
cgggaccgggccgggaatcccggggcgagcccacgcgcgcggttataacaccagcatccacaacacactccgcggctactatagcaacgtgtgtagacacttaccgcccccctgcggagacgcgaagagctactctaacaagccgatggggaggcccgccagcgaca

SEQ ID NO: 426163 - DNA, 337 bp, Oryza sativa
cgtgagccgaagcttctagaaccttcgaggccgcggctcccacgggcggcaatgcagagcgcggcggccgtcgggctcctccggccatgcggcgccaccaccgccgccgccccgctccagctccgcaaccctagcccccggggcttcggcgtcggagtcgggcagccgctgctcccgccgagggggctccgcctctccgccgtggccccgcgcgcgggcatctccgcccggcgcatcgggctcgtgccggcctccccggagcaggaggatgagcggcggcggggcgcacgcgacgtggccgtggcggcgacagcggcggcggcgggtgaggcagggg

SEQ ID NO: 426164 - DNA, 244 bp, Oryza sativa
tgacaacaacaacaacaacaacaacaacaacaacaacagcagcaacggcggcggcaactacggcggcaacggcggcgacgtgaagagctacttcaacaagtcggtcgggaggccggcgagcaacaacaacaacaacaatagtaacggcggtggcgggtactactgcaagaagggcggcgacggcgccggcgggaagaagaagcacgccaagaacagcgacagcggcgcgcaagcgttggacaag

SEQ ID NO: 426165 - DNA, 313 bp, Oryza sativa
ttctgtgggtaggccggcgccgcctgccgacgggtggcgaggagaccgactgggctagacggtagaggaggtccggcggccggcggctgcggggaccgcgacgactcgagagcatgagagcaaggcggctgtggccgcgacgactcggcgccgatgtgcacttgctctcgttgaagattgggaggctcgccgtctcgtctgagtcgtgcctcccgactatgcgcctggcttgccgccagcgcggagatcgtcttcaccatgtagttcttctcggcgcccgcggggccagcgggcttgggcgccgtcatgctct

SEQ ID NO: 426166 - DNA, 357 bp, Oryza sativa
tatatcaccgcatcctccatgggcaacgccgaggccgtcgtggtgctgcccgcgaacggcggcgcgcggcggcgcgccgacaaggtcgtccacccggcgccgatgccggacagagcagctggtggcgcgatggagagggaaggcggcggcgtcggcggcggcggctaggtgggtgggtggaggaggtcctccttatcttcattcttatttcaaacacatcttccttttgaccaactgtatgtgtgccttcgccgctttcgctttcgtggaggaagaccacgtaacacgtggggttgggatatcgtcattcttcaaagcaaatccaagaaatcctttgttgttccacccaatcccagt

SEQ ID NO: 426167 - DNA, 218 bp, Oryza sativa
cgctttcttctgcttcttcttctgtcctcacttcgttcgcttcctcggtcgctcgggcgtcatgtccgcccaaggagcaggacgaggggtaggggacccggatgtgttcgcgtagctgtggcgaggcttcccgcagacggtatccgatgtaccacaagctgacgagcggctgttctacttccttcaggaccacctcgagcaggtgcaagagccgactg

SEQ ID NO: 426168 - DNA, 429 bp, Oryza sativa
  unsure (1)..(429): unsure at all n locations
gtcactcagttcatccacagcaaagcgcacaggcatagcagcctccttcccctcttcttcttcttcagtagtggagtacatgctacctctgcttcagcagcacatgggaatcacccatgccaactccatcaccaccgagccttctccttctccccgcccgccgcttcttcgcctcttgccccagcctcgccgccggcgtcatgctcatgccaaacacatcgccctcttgaccaactgcaagtgcgcctccgccgcttccgcttccgtggaggaagacgacgtagcaggtgggttgggatatcgtcatcctccaaagcaaatacaagaaatccttgatgttccacccaatcccagttaccttatttcccctcgcagagatcggatcatgttcctacagcgcacagncatgcctncattatctgagcttac

SEQ ID NO: 426169 - DNA, 402 bp, Oryza sativa
tccggtgacttgcagaaaataattccagatacttagaaactctagctgaagaaaataattccagaggtctactgtctacatcattacagtaccaaccaccgtcaacttgtaaatgtacaggggaggaagacatttcaacactaagagatataaagctcggagaatctgaatcaatgcaagaaaatttattccctgggcttgaggaccaacagaacattcaaaaagagagtgaagggagagagatagtatctcaagatgggcttctcgaagagcatcaagatggtccttcaaatagattgttggaaaaacactggaacgaagagatgcaagagtcctatcctatggaaaatggaggcagagaatatcagataatagatgcgttatcatttgacccatctcatc

SEQ ID NO: 426170 - DNA, 261 bp, Oryza sativa
gtggagaggagaggagatcagggggaggaagggtggccttttcagcagatcggggcggtcggatttaggggaggagcgcgctagcctggatcggcggtgatggatgaggagtacgaccagatcctgctgtggacaggattcacggagggtattatcaacgagctcatcttcgtttatatgcttaaggaacatgacattgacaataactattactatctgggaatatgtacatgagttactgtaactaatatctgtgtgaga

SEQ ID NO: 426171 - DNA, 195 bp, Oryza sativa
tttttagtgaactgaaggggcgggggacaagcatgattgcgacgacctatcatctcctgatccagcgacttctagaactggggacgtcgaacaagtccatgcctgtcttagatcaactgttgcacagtgatacggtctcttacatcacctctttctggttgttgaggatggttttcatggaaattaactaccacc

SEQ ID NO: 426172 - DNA, 393 bp, Oryza sativa
gtatccagcaatctcatggtgaatcgctcccagtgacttcagttgataaagtgcatacttcagatgcatcatgcgaggacaacaaactaaaaaaccattttatcacaagcgaggtgtgttcagacgcaacaaatctttctgcatcaggcttgctgacggaagaagaaaatatccataatgtggaggatcagtatgaaggcccattacctagtgaagaatcatcaggatgtctagattacccacatgatgaccacaattcggagaaagaagacatacaccagccagatgggtatgcagcaagccctggcaataataaccactttgatagctcttatgaaggtggctatttacatgccgagcagccaccagtcatgggctggactgtgagacccc

SEQ ID NO: 426173 - DNA, 381 bp, Oryza sativa
ttttcgcccttgaaactttgacatacttggcatgaaatcatccaaatgtggctaaactgtggctatttcttgagtgcccttgccccccaacttgccatgctaaaacacctgatcagaggcgtggcaaggctgttcttatggaaggtgacagtgcacagaacgcttatgcacttgtcctacttttaaccttgttgaatgaggcactttatatgaggagcgtatctcatcttgaacaggtactaaaccttctcgaaggtgttatgctcaatgccgagaatgaaattacacaagctaagctggaagcaatctctgaaaaaccatctggacctgagaatgcaacgcaagatgcccaagagggtgcgaatgctgctggatcatcta

SEQ ID NO: 426174 - DNA, 376 bp, Oryza sativa
ttctaagccgctatcccatcctaccgcgcgcgtgcgccatcgccatgtcatccttcgactccgtcgcggccgtcgccggcgacggcgacgccgacgacgacgacgtgctccctcccgctcccttcgaccccgccgccgacggcgcccagggcggcctcggcgccctgcgccgtggccaccgcttcgccacgtcctactcgtccttcggcaccgccgcctccgaggacgacctggctggcgccggcgccgggaccgacggcggcgtcggcgccggcattcccctgggctcgagctcgaacggcggcgccgcgtatgggtacggcgggtcgggggacgtgatgaatggccacgtggaccagatcggcgacctcatggg

SEQ ID NO: 426175 - DNA, 67 bp, Oryza sativa
gtggattagtttaagtgtttgccggagattatggggtcggtggcggcggcggcggtggtggcgcccc

SEQ ID NO: 426176 - DNA, 266 bp, Oryza sativa
  unsure (1)..(266): unsure at all n locations
tgctctctctctctctctatccctcttcccccgcaacccccacctactcgtcgcgggggggcccgtctcggctgcggcggcggcggcggagtaggccacggcggtggtggtggtggtgagtggacgnacaaaanacaccttacgtccgagcaatacaagcgactgtccgacaacactgaaccacccaatggtcaaagggagcacgagccatctcgatcaagaagaggcaacgactagatcaccgcggcctgctaccgacaaagaat

SEQ ID NO: 426177 - DNA, 277 bp, Oryza sativa
tttggcctcagaacctaagctcatcagatagttcaccacccgtcggacacactcacaatacacaccataaaaacatatacaaactacatcaaaaccacgggtaggagtctttacatggagaacgggaagggcaactggcttggcaccaccaagcagcagcggtgtgtcatgggggagccaacacgacatgaatgatatgactcctcgaagggggcacctagacccatccttgacgtgctggccaagcgactagcagcagatcacggctatacatgtg

SEQ ID NO: 426178 - DNA, 365 bp, Oryza sativa
tgttatgatgcaaagcaatctgattcttgggatggctggaagtctgctggagttgacaaagcaattaacaaagacaaggaatccttgggcaatgtgcctgcatctccatcatttagtgcgtggaatgctgctccagtttcccaagggaatgaacgtttagatgcaaagcactctgattcttgggatggctggaagtctgctggagttgatgattcagttaaagacaaggaatcctggggtaatgtgcctgcatccccatcagatagtgcgtggaatgctgcttcagtttcccaagggaatgaaaggttcagaatgcaaagcaatctgaattttgggatggttggaaagtctgctggaagtgatgc

SEQ ID NO: 426179 - DNA, 345 bp, Oryza sativa
tcgtatctctccctcttccaccttcctcccgccggaacttgacgaaatctgggaagcgagccaaggaggagggggaggagaaccccgccgccaccgcccgatctccccgtgcggcgccgggcgggggggtgcggagcgggagcctcgaccgcgccgatccggacaggggccaccagattcgccccgcgcgtgtgccgtcgccgagcgcccaggcggctttagatctccgcgtccgggccccccacccttgcctgtggcatgcatagggatcagaggccacggttatagagtgatacatatatcttgctgctgtgcttttggtgcctactgtcctgcttagttaga

SEQ ID NO: 426180 - DNA, 208 bp, Oryza sativa
ttagaagctgattcagcttcgaagcaagcggagatcgccatcgggagctagggagagactgggacagcctgaggagagcatgatatggactgcttcgcgcagacaggagggaagagggtgcatgaccctttgaaccatattatctcaggctgatgcggccaccaccgtaacggaggtgccggtggactacgtggacaaggcgcaggac

SEQ ID NO: 426181 - DNA, 313 bp, Oryza sativa
tctgtcaccgccgccgccgccgccgccttggtcaccaaatccgcctacggcggcgccggcggtggggggcatcgtcatggcgtcgccgagcagccgcgcggtggccgtcggcggcgcgctcctcctgctcctcgtcttcgccgtcccaaccaccttcctctacctcacctccgcccccgccgcctgctccccgagcctcctcctcaacctcaagccgttcggcgcccggtgcgcgcccgccgccgccgccgccccgccgctcagggtcttcatgtacgacctgccacggcgggtccacgtcggcatgatggac

SEQ ID NO: 426182 - DNA, 184 bp, Oryza sativa
tatagtatggaaccggagagcggagtacaacgaggggtctgtttgggcgtctgcccgtaagtttcagagccccctatatacggaacgggaaaacgagaggagtgcagctgctgtcagatgagatgagacaatgggaatgatagatcagtagtaagaacaaaaggcggtagtgccaatgggggca

SEQ ID NO: 426183 - DNA, 325 bp, Oryza sativa
gtaatatcccccgccgggcccaccaccgccacctgctgcttcccccccccccccaattcgccggccggttcctgagacctcgccggcggcgagccggcaccctctcgacacccacgatgcgctgcctcctcctcctcgtcctcgcgctcctcgcggcggcggcgggggatgccgagcccgttctccgcacggtgacgggcgtccccacgggagtgccctccggcggcggcggcgggggtggagaatcttccgacgagctgcactgcgacggatggaggctgtccgaggagactgggaacgcggggccgtggaccgccatcccccg

SEQ ID NO: 426184 - DNA, 312 bp, Oryza sativa
attggaagggagagacatgcaataagggtaggtcgggaatacatacacgttaattattacactataggaaagcgggcattaatcaataacggaggattctcggtgctttacaggtacaggaaaggatcaagagcgctaggtaggacctccgcccccgccgactccctccctgagcctggtcctcaacccgaagtaccccggcgcccggtgcgcgcccgtcgtcgtcgtcgaccacccggtcaaggtcttcatgtacaaactgacagggagcaaacacgtcggcatgatggacgcctccgcctcggggtttcc

SEQ ID NO: 426185 - DNA, 398 bp, Oryza sativa
gtacgacgagccgcgggacgagtggaggatggtcgccgggagcggggtgccccccgaggtgaggcgcccccacgtcgtctccggcgaggtcgaggaggtcggcagcggcggcaggcggcggatatacgtggtgggcgccggcctcgacgtcgccataggcacggtctccccttctccggccatccacggcggcgacgacgagagggtggactgggaggtcgtcaagggccccgccgagttcgccggcctcgccccgtgcaacgctcaagtcctctacgcctgaacttcccgccgccgccgctgacgctcgccggtggggcgttacatcgccggggaccccgcttttttcgggcccacctgtcagtgagaccccttcacccacgcgggcccacctggca

SEQ ID NO: 426186 - DNA, 237 bp, Oryza sativa
cgatctgcacgcggaagcaagtgcaacccaagcgggcagtatatgcaattcctcacgtgctcatgtgcatgtctgtttcgagacttcctactgcttctagccatggggctactactcctccgacactgagggagctttgctggggccactgccctcgcagaacgaagcgtctagctcgcactctactgatgtgaaggctcgtcttgcggacccagggacctcacggtcgggtactac

SEQ ID NO: 426187 - DNA, 312 bp, Oryza sativa
gttaaaaaaaacgaaaaaaaaagagaaaaaaggggaaggtctcgccaccccggcgggagaggcgtacggcgcaccggccggccggcggatctgcgccggcgacgcgcgcccccgccggatccccgctgcccgaggtggacgaggcggcacttcggccatttatccgaccgggagcgcccacaaacgacccggcggatatttgctggtcaatttgccataaagtgcttccagttgaccccgagttggtggagaccccctgctctttaatctattctccatttgctaacaatgatcaattggaagaatctggcc

SEQ ID NO: 426188 - DNA, 231 bp, Oryza sativa
attcaattagccgcacaccgatcccctcctgtgtgttcccccccttctcctctctactctatttttcctcatccgtgcgcgatactgcgcttagattgtgggtggggggagtgatcatcaccaaacccacaaagggggcgcggagagacactatatcatctttgggaaagcgctggatgagaactactcgcttagggcgtcccacccagagtaggacagaacatgcgccaa

SEQ ID NO: 426189 - DNA, 150 bp, Oryza sativa
tatgacactctcactctcctatctctcctgtgtctctctctctcactctgtctgtctatcctctggagactgcaggttcacaggtcgaatctactggaaggccaccaaaagaacaagccgtggacttcaccaccaccacctggtgaaaaa

SEQ ID NO: 426190 - DNA, 80 bp, Oryza sativa
atgaacagtgggaagcaggcatcttggctcattgcttgttgtattccgccgccttcttcattgacaagcccaggagaagg

SEQ ID NO: 426191 - DNA, 127 bp, Oryza sativa
tcgataaaaaagaaaagaaaaacagagcgcgtgtctcgcgcacagtgcacaggacgtcggcgcggcggcggttagcggttagcggtctattgctgactgtggtgagatggactaggaggccatgcgg

SEQ ID NO: 426192 - DNA, 122 bp, Oryza sativa
cccacgcgtttgtccgtcgccgtctcccctctgacgcgtggggcccacctgtcatccacctccgccgccgccgtcgccgccgtcgatctcggtcgccggtcggtaggggctccgaggggggc

SEQ ID NO: 426193 - DNA, 56 bp, Oryza sativa
ttccgggggtggaggcggaggtggagactgagggagaagaatataaggcaagaccg

SEQ ID NO: 426194 - DNA, 105 bp, Oryza sativa
gtacggaggaggagaggcggcgacgactgtctcgaacggtgccgacgcgacgacgacgatgccgccggttgtgggggagaccgtcggatggaggaggagagccat

SEQ ID NO: 426195 - DNA, 73 bp, Oryza sativa
ttttagagatggtggagatcccggcgatcgacctgcggctggccggcggcggcggcggtttgcttgacactgt

SEQ ID NO: 426196 - DNA, 106 bp, Oryza sativa
tgtgagttgttgtaaagttgcgagagagagagagagagagatcagttagtttgttgagtggaagcagatcaggaagatgctggagaagctgtgggacgacgtggtg

SEQ ID NO: 426197 - DNA, 482 bp, Oryza sativa
tcgcaccaacatggcctcccagaacgctctgcgttgtgccagggtcgcactccagggcacctctcctctcttgcgttgccgccgccgcgctgaccccaacacccgccaccgctacggcttcgcccccctgcacatggccgccgagaacttcagcgtcgacatggtcaagctcctcttccgctgcggcgcgtccgccaacatccgcaccaagggcgacaacgtcattgagggcctcctccctctccatgttgctgtggagaatgccagcatgcacaagtacattgaggatcattgggctcatggggaccatatcatcaacctcatcttcctcctttgtcttcctgagatgaaaatgttcttggacacgactagattaattgccaaacagacggacaacattgtcgacgaggtatggaattacattcagcatgaagagaagcatgtccaggcagcaattttgctgctcgctgctgaaaagcagc

SEQ ID NO: 426198 - DNA, 346 bp, Oryza sativa
tttgttcacctcccccatcgccggcttcccctgggcgcacggtgccactacccgagccctgccccgaccgtcgtggtcatgctccttttcggaaaatgcaataggcaaattaagctatctggtcacatggcagcctcctcaagtctgctgttctgcgacacatcagtgctgcctaactacttatattccctgccgataaattaacctccatgccagtattatctgcttaaatagaggagagtggatatgagactgccactgtggcaggcttcatttacatcattggcatcaaatactcttagaacttgcctttggtgcactactgaagacctctgtcctatgatgc

SEQ ID NO: 426199 - DNA, 222 bp, Oryza sativa
ttatactagcgacgcgaggtgaggctctcggaggagtactatcaccacccaccgccggtggggaggaagcagattatggaggattcttactttctctctttgtttcttttattatttttttatttattgtctatctcttttttcctttctttttttattatatatttttctttattatatttttcttttatttatttttctttatatctttcttcctttttt

SEQ ID NO: 426200 - DNA, 83 bp, Oryza sativa
atcatatgcatccaaaaccagacccatactcgtgttctccaccggagcagagccgcggttttccctcaggacttctatctttc

SEQ ID NO: 426201 - DNA, 169 bp, Oryza sativa
tccaggcagcaagcgtaagcaaggcagaggagagggaaagaacctctctgcagtgctgctgctgctagcttgcagaaaaaaaaaaactctcatcttttgcaggaagagacatcactgtttctgcattcgtgtgcatttggattaagctttgcttatccctttttagtgg

SEQ ID NO: 426202 - DNA, 106 bp, Oryza sativa
ccgggccggaaaacccggggcgacccacgcgccctgatatgcccaaaaaccaacagagaccacaaggggggaacgtaagacaccacaacgccccacaacccaacgg

SEQ ID NO: 426203 - DNA, 83 bp, Oryza sativa
tctaggagctccaggaaaggaaaatcacgcataggcatctgtcaataccagatgcctctgcataaacacacggctatgatgga

SEQ ID NO: 426204 - DNA, 83 bp, Oryza sativa
gtcgtatgcgcaaaagcaaagccacgcttttggtgaggttgatatctacatgccctggtctctgtcacactcgttcacggagg

SEQ ID NO: 426205 - DNA, 109 bp, Oryza sativa
  unsure (1)..(109): unsure at all n locations
gctgnggctcgctggacacaacacacacccacacgcacttcctcactctatctccggttcatgtcctgctgctccccatgtcgtccctactcgagctcgactacatagg

SEQ ID NO: 426206 - DNA, 83 bp, Oryza sativa
gtgattactgttacaacccaaccaaatggaggcgcaagttttacatttgaggaccatttgaaagcttcccaagagctaactga

SEQ ID NO: 426207 - DNA, 117 bp, Oryza sativa
ttcttctcctcctccatttccatatctccaccgaccaccttaacatctccggatccttcgctccatccttctcctaagaagagcccaagaagccagcaagatccaaagatcaagagc

SEQ ID NO: 426208 - DNA, 55 bp, Oryza sativa
tctcacgcgtccggcacaggaggcatcattgggaccatacatatctctaccccgc

SEQ ID NO: 426209 - DNA, 77 bp, Oryza sativa
gtgaaaggaaatccagatgagcgcatctatggtcgacttctagcgagttgcccaggttgcagcccctacacaagcct

SEQ ID NO: 426210 - DNA, 75 bp, Oryza sativa
catcactgcacaagcagcttcctcgccttcgcatctactactccccccaaaatggcgcatccggcggctgaggcc

SEQ ID NO: 426211 - DNA, 64 bp, Oryza sativa
gtcatgccagcctgcacccggttgccttcccgccgatcttctaatacggcaaaccccttctttc

SEQ ID NO: 426212 - DNA, 53 bp, Oryza sativa
cataaatacgggagaccgaactcacaacgacggggagatttatacagacaaac

SEQ ID NO: 426213 - DNA, 195 bp, Oryza sativa
tccatactatacctagcttgccaccaacaacagtacaccatgcccaagaagaagctgtcacataagctgctctctgccttggtatccctactccttcatgggaagcctatctctagatcatcactcaacacctacaccacattgcctcaccctatcttgttgcacatgttctcctcaagcttccctcctatggag

SEQ ID NO: 426214 - DNA, 62 bp, Oryza sativa
tttatgcgagagagatctctcccgagctcgagcgcgtccactttgacacgaagacgaccatg

SEQ ID NO: 426215 - DNA, 538 bp, Oryza sativa
ttcaaaacatatatatcccatgatggattagtggcaaccaatggtgtatggaaaggacaccgtgacgtgatggaaaatcacccactcggagtatattcttcaagccatgccaggcatccacaaatggagctgcccatgacatgtacttctcatgttctactgcctcctccaaacctgtccaacaaccccaactcatcatttgtcagaggaacagagcttaagaaggccgagctaatgggagcatacagcactacagagaattacttggatcttgataattctgaaaggaagggcatcatctgccctaaatcttctgaacaaaatgttgccgagaatatttgtaataaagcagctgaataccaatgtaatgattatagccaaattgtttgtaatcagcacacagttctactcccactgaataaagcttcacatttcggtggtttgccaacgaagaagtttgatggtaagctggtttcacggcaataacagcggaaaagggcaacatgtcttctattgtggcatgcacaagttatgtctg

SEQ ID NO: 426216 - DNA, 316 bp, Oryza sativa
tcgtatttccaagggctatgattctctggcaccaaaaggtgtgccggaaacttctacttctgtcggccccgtacatggggcttctccaagtgtggaacccaaagtgagggattctcctatacaaaccgttttatcaggaaacattgctactgattgtgccaaaaggcaagatccattggtatcaagagtggcacctgtagctcataatggcctcttaaggatgccatctggaaaattagcatctctcgcagcgcaagtctgcaactctgtcagaccatgcacaggacctttaggctgagctttacagaaccaaata

SEQ ID NO: 426217 - DNA, 232 bp, Oryza sativa
  unsure (1)..(232): unsure at all n locations
ttgtangttgccgaccggcagcagtccgaggagggggatgtataagtggagctggaggggcacgacgacaacgacgtcatggacgacgacgaggactggtaccagcgtcgtctgcggcgcgaggacttctacctgcctgactacgacgaggaggtatcccggggttagggctatagccactgagacgcggggaccgcggcgggcgaatgaagagctcattgagaaggacaat

SEQ ID NO: 426218 - DNA, 262 bp, Oryza sativa
tttgcttagccgccgagatttcctcaccactttgtcctcttaccccgccaccaccgccgcctatatatacgcgcccatccctgcgtccttgcacttgcgcacccacagtggttgttttcttggatggttgccgctgcgccctgacctcacctccctctcccccatggattactccgccatgccttctccttctccttcttcttctgccgctgcggcggcggcggcggcgtcggggtgctgcctcgacaggctgtggagggcg

SEQ ID NO: 426219 - DNA, 424 bp, Oryza sativa
tttttctttggctcttcagagttttgtccatctctatcttcagagttcttcagagtttgcttaccatatgatcgtgatcaggtatcggaattctctttatttataactacaatgcaatcgctcattttacccgtaacaattaccaagagcttgtttagttgacaatagagatatcaaggcatatatggctgtttgtgttacacaagataccgatgaattttgtagtgatgcccttctattgggaattcataaatgctgccttgatgagatactacagctccaataagtattttttaatgcctagaggttaatgaaacgtatagcatatggtccgcagggctaaccaacagtggatcatcccaaacgaaaaaaaaaactatgcatgtctctccacgcgcattatttttcaggtaacatacatgag

SEQ ID NO: 426220 - DNA, 484 bp, Oryza sativa
ttcgaagtgacttgggagatatgaaacagattgtcgtggccttcatccagctagcaaagaaacttgagaacccaaggttgatttctgatagagatgggacagcagttcagaaggacagttctgacatgagtcagtattcttcagatctgaaactcaaaaagaaacagagtaaaactatgtcagaaagaaggggagcaaactggactactgctggagcagatccgtcatctcgtgcatttgaccgtgaaatcaaaagaagtctttctaaattaaagaaaagggatatcgattctggtagtgaaacatctgatgatgatgatggctactctgaaggtgatgagactgagagtgaaactactgtttctgatacagagagtgatcttgatgtaaattcgggagcatgggatttaaagggaaatggtatgaagttatttgaatcaagcgagtctctgacggatgatcgtggatggggtgctcgcatgac

SEQ ID NO: 426221 - DNA, 425 bp, Oryza sativa
tgttttagggttttttttttcccttctcctccccattcgccggcaagcctccgctcccacgcggcgacggtctcctcccatggcgaagaagggcgcgccacgcaggcagcagccggcgccggcggcgcggcaactggccgtggcgaagaaggggaaggcccccccgaaggcggcgaagagggcgccgaagaagaagcaggagctgctcgagccgtcctccgacgactccgagctggagcagcagcaggagcggctccaggaggtggaggaggatgagtcagggtcggacctcgacgccccctcggactccggcgccgaggagctctccgactccgacgatgcctccttggagggaggagacagcggcgaccaggaggacgatgacgaggaggaggaggaagatgaccaccaccccctcgctgacg

SEQ ID NO: 426222 - DNA, 175 bp, Oryza sativa
agtcctccgcctccggagcggcgcaactggggctggtagactgatatgatgaggctgtctagctccttgccgggcataacctagaagctgcctcgcactatttgaaaattcgagaacgataataagcaataccgacgcgaactccaagccggcggaagcgtcaaggagcccgtgt

SEQ ID NO: 426223 - DNA, 305 bp, Oryza sativa
tacccttatcatatcatcgtcgtcgtccccactttccgctccaatggcgatcgaagccgcgcgcctctccccgtccctcgccgccgccgccatcctcggccgccgcggcgctcctcccgacgccctccccctccgccgcgccctcccgctcctgctccccccgcgccgccgccgcctctgcttcctcgccgccgcgggcggggacggacgcgccgacgccctcccctcgacggagctccgcaagcgccggggcggcgcatcatcctactcctccggtgatcctggtggtggtgaggactagaagc

SEQ ID NO: 426224 - DNA, 80 bp, Oryza sativa
ctgacgcgtgggggcggaggtggtggtggggagggcgagagatggctgcggcggtggggagggcgcggcgggcgacaagc

SEQ ID NO: 426225 - DNA, 473 bp, Oryza sativa
ttcttattccctcctctctcgcctccgacgccacttcgcctcctcctcctcctcctcctcctcccgctcctcctcgccagcttacaacaccacacaaaatactactagtacgttcatggaggctgctcaggaagtccttaagcatggttcgacacaaggtgtccatgcagccatcagatctgaccaaaagagttataaccttgtccagctcattgcatctgcactggatgtctacaatattctgcgcaataaaaatatgacacagaatggaagtacaggctcatctgtcaaaggaataaatggaactggattccttggtggagctcgtattggcatagtggctaaaccttctcctgaatctgctgccgggatatttggaacctggctttctggtggagttgcagtggctctagcacttagctattctgaagctgaactccttcatgtcatgaatgactcggacatttcgctga

SEQ ID NO: 426226 - DNA, 444 bp, Oryza sativa
tgtctctctcgccacggatcttttaggcgcaggaccaacggacaacaacgatggctcgtggcctcgccgctgcgtcgctgctgctggtcgccctcgccgtggtagcacggccgccgctcgccctggcagtgaaggattacccggccgacgcgtcggcggtggctaagaaatctccagccagtaaggctgacacgcctaccacgggtaaagaatccgtcgctggcaagaccgacgtggtcacggcggctaagaaatctccagctggtaaggcagacacgtctgccacatataaggaatacgccgctgcaaaggccgacgcggtcacggtgactaagaaatccccagccgccaaggctgacacgcctaccacgaagtaggaatctgccgcttgcaaggcccacgcggccaccgtggctaagaaatctccagctggtaaggcagaca

SEQ ID NO: 426227 - DNA, 414 bp, Oryza sativa
gttttccctgggttgtggttaggggatcagcagggcgcctgcatgaggcactgtgatgttattacaggctggcttggccaaagggattcattggatcggcttccgttctgcggttgtgcaattgggacagccgacgggtgcatctatgttttaggtggattctctacaggctcaccgatgaaatgtgtatggaggtatgatcctgtcagccatacgggtccggatgctcggtcgatgagcaccgggcgcgcgttctgcaaggctagcctgctgaacaacaagctgtatgttgttgggggaggcaccaatcgtcaaagacgggctgggtacgctgcacatccttccaggtgaatgacccaacgacaggaattttggtggaagagcctgacatcccgttctcgaaagcgcaagctc

SEQ ID NO: 426228 - DNA, 463 bp, Oryza sativa
tttcgccaccgccagattcccatgggctgcgcaggatccacccccatgggcgcccccgaatccgatgctactaaaaaaatcaggaagcctaagccctggaagcacccccaaccgataacgatggtccagctcacgaagatgcgcgaggagttttgggacacagctcctcactatggtggtcggaaagaaatctgggatgccctgcgtgttgcggcagagtctgaagtgtcccttgcacaggcaattgtggaaagtgcagccataattgtttctaatactgatctgactctctgctatgatgaaagaggtgcgaagtatgaactgcccaagtatgtcttgagtgaaccaaccaacctgattcaagacagctgaagagcagacctactgatgtaaacaactgtaaatgagaacaaccccttgagtgtcctggtagctgaagcatgcttgataaaagatctaagca

SEQ ID NO: 426229 - DNA, 343 bp, Oryza sativa
  unsure (1)..(343): unsure at all n locations
tgcgggcggcgaggtaccagtcgacggcgttgtaggcgccgcacctgaccggcttgtctgtgagggccttcgtttggctcatggcggcgaccatattcggccggctgctgacctccgttctcaagtcgaagaacaacatcacaaggatgctgaacgacacggtgatccccgagcgccccatgtacactgcccgagtacccgtcgtaagagccggaggatggagctctgcttctggaggatgacagggaccttgtggacagagcagtggatgcacttcagtgtcttccgcgctatgatccagttctgctttggccggacagngacacaccccctcaactctact

SEQ ID NO: 426230 - DNA, 213 bp, Oryza sativa
tcttacctctctctcttctcggaggaaacccccaatttattccttccccgcaaacccgcagccttcctaaaacgaattaaatctccctcccttatccgccgctgcaatccctccccacaaaatctcgctgcgccgcgcgctgttttagggttcgagctcatggcggtggaggaggcgcgcagcagcagtggcggcggtcgtggtgggggtggc

SEQ ID NO: 426231 - DNA, 433 bp, Oryza sativa
gtgcattctccctacctgacccctactggcatgtccttggctgccgccacagccgtgtcctcctcattagctcaagctggaatagtctacaagcgtggaaccccatgactggcaaccggtatgctgtaccagttacacctgatgtgaatcctcgtatcaattatggacgtgtgcccgagagccatgctgcggtgctttgcgcagctggccacaatgaccatggtgactgcagctcatgccccttcttcatagtatgggtattcaccaatataggctatgcttatatctctaggtactccgcagagaaggacacctgggacatgatggcatcttcaccagcaccatcggaggttgattccaggcctagcattcttggtgggaatgtcatatattggccacttaagtcaaagcatattcttgcattcgagctggg

SEQ ID NO: 426232 - DNA, 504 bp, Oryza sativa
atttatctgattatgcgtctcgaaacatggcagaaagcgagggggaacggtccttgcgacactggttgctgctatatgagcttctagttactatatacccgtttacatatcccttgctttcttagtatttctgtttggctttattcattagttatgcctatgtgttgtgatacatagttttgtactgtggagattgtacgtctgtcaaactacttaatgaaattacagattattggaccgaaagtctgaaactactatagtatattagactaaggttatatagtttgtttacttggaattgctccaaagtttgtctgattgctgaatttgtactccgtttgtttgctgtttttcgcatgaaacattaccagtcctgaagatatttatcatacatgaggtttgtgtatgcagcttctgattttttagtgcctcttatgcagatgccaagcgtctcatcggccagagatttactgatgcttttgtccagagtgatattatgctctg

SEQ ID NO: 426233 - DNA, 447 bp, Oryza sativa
atcccatctcccctccgccgcttttgctcccgccgtccgtcccggagccgcctctctccggccgccgccgccgccgccgctgcctctcgtgacgtgagggatgagtcaaactcagtgctccaaagttgtgcgtggcagaggcaggaacaaaaggaaatggacagccgatgaagatgaggagcttgtcaaagcattgcgcgaggtttctcttgatcctagatttaaggtcgaaggagggggattcaagaactgttattctcaagggatagagaacattcttgcgcaaaggctgccaggccgtggtattagatccagtcctcatgtcgattcttcggtaaaagtgctgaagaggaagtattatgcgatcaaagatatgttagcgctgcccaggttctcgtgggacggcatgcggcagatgattcagtgtgaaaaagagtatatgatgct

SEQ ID NO: 426234 - DNA, 377 bp, Oryza sativa
  unsure (1)..(377): unsure at all n locations
ttccaccgataccgatggacgcggccctcgcctcccgccgccaccgtctcctccttgccgccgctgccgccgctgccggcggctacggcctctaccgcctctaccgccaccatcgccgccgcgttgctgccgtcctctccctcgccgacgccgtctcccaggtcggttccgacctcgccgatttcctccgctccgattccgatcacgtgccccgaaccctactccagctctccaagctcgccggctgcgaccccatgtactacgatggcttctccctcttccactgcctcgcctccggcctcctacgcgccctcttcgactccacctncacctcgaccacgaccacacccgcacaaatagggctcaccgatcggatc

SEQ ID NO: 426235 - DNA, 412 bp, Oryza sativa
tgttataagaggcctatcgccaccggcgcgcgcggccccgagggaagcgaaggtaaggaatcgctcgcgtcgcgtcgcctcgacccccacccaccgcacgccggcgacgggaggcccacatgccgaccgcctcctgcctccgcccgccgctgccccactcctccgccgccgcctccgcctcggcggcgcgggggctccgcgtgcccctccctccgccgccgccgccgccgcagcagcagctgttccaggcggcgctgcggctgccgcgcaagaggctcgccggggtagggggtcgtgggcggcgtctcgcgtcgcccttcgacgagctctacgcgcgggggaggcccgcccatggctccttcaagaaatctatcctatggaacccgatccaagacatagagcctttggatct

SEQ ID NO: 426236 - DNA, 464 bp, Oryza sativa
ccctctgtttgtcccaatggatggcaattgatctggacatccgggaactagacactctaagctttgagctatcaattaacagatgcagcgagaagcttgcaaacttagcaaatgacatcctgctcaaagaatcagcatcagaggaccagaagaccaatacctggaatcaaactggaccccagaacaatctaaagcttcagcacagcttggcccttcctgcacagcttccttctggtgctgatcttccatcatgtacagaatgcaacgatggggaatctcaaatcagaatgtcaaaacttccagggaatccaaagcataaagttggctctaaacataacagaaaaacgtgaagacagtccattgccgtctcctagtcatcgcccgatgggtcgaactccaagtggaggtcaactaaggaagatgttcacagaaatccaaaatgggcgatcgagctttccggaacc

SEQ ID NO: 426237 - DNA, 321 bp, Oryza sativa
  unsure (1)..(321): unsure at all n locations
tttcattgaggaagctgcggaggtagactcctagctatctaattagctagggagggatcgatcgagagcttcttcttccggggttgcgtccatgcgggacagaatagctagcatcagaatggcgacgacggcggatgcacagtaggcgtgctacttgccggactacctgcaccaccatggcacgatgctgtcgtctgatggcgtctacgcgcgggaccatatgagtgagtacgcttgccctcaaaatggggatgacttagctcagnttgcacctgtaccgaaacaagatggtcctcagcgtccacttccccttcgcctatt

SEQ ID NO: 426238 - DNA, 320 bp, Oryza sativa
tttctcctatgccaggggacgtgccactgagctctcgtcgctaatattaacaccttgacttctttgctagctgtgactactgcctctgactatagacagtttaatgctgccatctcagctgaatctttgtctgacgctccagcctcggctcctgaatccatgcagggttcaaaggggaagatttgccaaaatacgattgtggccatgcattttgaacggtgagactgctgtccaaatttggatgtctggacatcaatattcccggggaggttttgctataatactctctggaatcgggtcatctataaggggtggttgtg

SEQ ID NO: 426239 - DNA, 263 bp, Oryza sativa
gaagcaaaagttaggtatctctcccaacaaagcagaatgatgacagaccgcaaggacacaatattaagatgtccatgagcgaatagacacaacagcaaattctagggaaaccaaacactacagtgccacaacaagaactgcaaggtcagagaaagcaaacaacaaaaggacacatgataccaatgggtagaaccctaaccaagaataggaggaagataatgaccacaaatgaaacttaacgagcttccagaggtgaaaagtga

SEQ ID NO: 426240 - DNA, 239 bp, Oryza sativa
tttttatccattggcagatggcattctacatgagctctgtcaaatattatagggactgtatcactttgcttgtgctggattgcagtcaaagacatgtatttagtgtgtctgtgatcaggccgaccctaactgaattcgggaaagttgaaatctcaatgttcttcgtgttatttaaacggaattggtagaaaactttttctgttggctgacggcaaggatctttttcaagaacaaattct

SEQ ID NO: 426241 - DNA, 202 bp, Oryza sativa
tctttggccgccgcctccgaaccctagctctgggggtctctatgtctcactctgtggctctctcgcgccccacccagatctgcgccggcgacagcaaggatggacggcggcggggctcagctccaccaccgcgggcggcgcccaggtgcggtggagtccgccgcgcgaacgccccggggctggggctgctccttcgctggcg

SEQ ID NO: 426242 - DNA, 440 bp, Oryza sativa
ttcaaacccgaaacccaaaaccggcgagctgcgccgccgcggcgaccggcggagctcgcgactggcggcggcggcggctgctgctagtgccactccaagcctccgagcgtgatggaccccatcccctcccacatgtcgtcggtccaccccacctcctcgccgtcgacgccctccatctcgccgtgccaccacccgccgccgctcgcgtctgaaaccaagccaccacgccgttcaaatttccgtcacaaaatcgagagagcgaacgagagaggggagagagattacagtggttgtacgcagcttggtcgccgccctcctcgccgcggccggtgggccccgcatgccgccgcccccgccgctgccttctcgtcgtcgccgtcgtcgtcatcgtcctcgccgcgggcctcggcttcgggatcgtcgccgagcaccaccacgcg

SEQ ID NO: 426243 - DNA, 381 bp, Oryza sativa
tttcgaccaaacctcgtcggttccgtctcgaggtcggcgccgccgactccaccgccaagaggtggggaagcaacccgtaaccgccgactagtgagatgaacaccgacatcaccgcgtctgtgaagtcccagtacccggtgccggacctgtacccgaccttgaccaaggtctgttgggagtatctccgcgctctactaccgtgcggctctccaccatctccgccgtcttcgacaccgtcttctacctctacctgatcaagacggggatccacaggccattgatggtgaccgtatgcctcatcgcggtgctgggagggttcatgtacgcgctccaggagctcgtcatgcgcctcatggtcttgttcgcaacgactcccaggtc

SEQ ID NO: 426244 - DNA, 530 bp, Oryza sativa
ttacacagcgtgggaaaaataattgacatcgagagtgatgggctactcataattgatattcctaaccgggctgtacattggcaggcagatccatcagacatggaaaagatagaaaagtttaaggtcggtgattgggttagagtgaaggcagcagtaccatcccctaaatatggctgggaggatgtgactcgtagcagtattggggtggttcatagtctagaagaagatggagatatgggtgttgctttctgcttcagaagcaagcctttttcttgctcagttgcagatgtggagaaggcacagccttttgaggtaggagaaaaaattcatgtgttaccttcaatatctcagcctcgccttggatggtcaaatgaaactgcagcaaccatcggggctatctcaaggatagacatggatgggactctaaatgtcaaggtgtctggcaaaaatagctttgtgaaggtagctccagtgatgctgagaggctttcggcttttgaggctggagactgggtgcggttgaaatctaat

SEQ ID NO: 426245 - DNA, 345 bp, Oryza sativa
ttatcaagaaagctggtgaacgatctctctgcgatatttctttggagaagaagccaaagagtcactgggaatttgccctggaggagatggcttggatggcaaatgaatttatgcaggagcgcctgtggaaaagtgcagcagcttcccagatgtgccactggattgccttaagtggtcgagcaacatttgaggaagcaaacattcaaaggaaacagaaatcaattgctagaatcctagccaagagtatcatgaagttttggtgttcagctgagactttacgagctaccagcggtgaaatgcgtcaagagaagcaagcacaggagtcaattgggattggggaaacaa

SEQ ID NO: 426246 - DNA, 258 bp, Oryza sativa
gtcttttcccccattccatcgcatccgcatacaaaccccaaccctagccgtctccgtgctagggccgccgccgccgacgcgcgccgcgacccgagcgtcgacgtatcgttagtttaccacccaatcccccgagatcggtggcgtacctggtgattggcggaggaaactgaagaggcggcggtggcgcggagggcatatggagctccatggctgaggatgtctgtgctgcgtattgcggagaggagggcccgtaaggcg

SEQ ID NO: 426247 - DNA, 226 bp, Oryza sativa
ctctgatgaagatggcgataacctcgaggcgagcagcggtgacgaccatagggacgagcagccggacaccccgagcggcggcggcggcggagtcaagggcgacttgtcggagctgaccgactccctcacccgcggcctctggggcgtcgcttccttcctcgctccgccgcctgcgcccgccgccgaagccgcggagacggctacgggggcggtgggggagggggga

SEQ ID NO: 426248 - DNA, 353 bp, Oryza sativa
gtgtgcggccgacctttcttttctttttcagtatgaagactcacgatttatagcgtaccaaaatacaaggatctacaaggtataataccagaattacaaaatagtagtttttggacgcgagtatccaggactattatgactatgaacgaaggaaacaagagacagggaaagaactctcagtggacctaatattacaacatgacaacgagaccgtgggtatcagaactctcagggaacctacatcacagcatcacaagagaccgaagtatgagtataagccgggagcacagtgaacaaactttcagtgaacctagtatcacaacatcacaacgagaccggggctatcaaaactc

SEQ ID NO: 426249 - DNA, 494 bp, Oryza sativa
taaacagatatttcccttcccgttccggccggcctcgccgcaccgcctcttctcccccctcaccgccggcctccgcgccgcctcgctgccgccgcccccgcgtctcctccctcccggccgactagccggcggccatccccgcttcctacctacgcgttgcataccccgatacccgccatcccccaagaagaggcttccatctgatttctgattcgatctgaccccccgtgtggggcggggctggagttgatggagaagggaagtccggtggtcgcagagctcgcggcgtcgctgagagatgtcgaggtcacgccgcgccggaagccagcgagttcgttaccggcagcttcgttctattctccaacaaacaaagctagacctcggaaattggttagtttgtgccttggcatcctcggacagcatcttgaagatatcataactgatatttccgaattttctaccttctttccaccccacataaagctgggcatttt

SEQ ID NO: 426250 - DNA, 358 bp, Oryza sativa
tttttgatcttgaattcttgctttactacagatcctttacgaagaagcttatgtggtttgcatacatggcgaccactatagcgtttgcaacgggtttatacaccgtgttggccccacgaatgctgtggttagctgttggaatttgtttcctttcggttttactgcccattctcactaagctgctaggtgagtggcctgtcgtgaagctcaaatttcgtttgggtaagactttcaagactgatctccttgatatggtatgacgtcatcaaatttatattatttgttctgctttccaacactacatataaagttcatgcagaatgtatgttgcaatatatacattttattttggtgatat

SEQ ID NO: 426251 - DNA, 427 bp, Oryza sativa
atccgatccgatcccgacaccaccgtctccggtggtagatctggatcggagccaccccgccgccggcgatccccggcatcctcgccacccatcggtagcccctccgtcgtcgcagtcgacgacgacatggacgctggccccgccgccgtcgaggcgcacgacgggcagagggagcggttcgacctcggggtgttggtcggcgacctcgccctcgacgaggatgtcgccagtgatgaggacgagtcgctggaggggttgaggcaggagctcgacgactgcaaggacgacgaggaagtggcaaatatcctggctaacggcatcaaactgcgtgattacacaaaaggcgtcgagaacaacattcgccaaattgagctggattctatacaggattacattggagaaagtgaaaacttggtatcgctgcatg

SEQ ID NO: 426252 - DNA, 397 bp, Oryza sativa
cttctctgctctcttctcccctttcttctcgattctccacgccagagggggaggggcgggcatggcgcgcggcggggtgccggcctagcacggcggggtgccggcctggcgcggcgggcgagacggccggcgccctccccctcccaaatccagcggcggcgggctggggaggggccggtcgtggccgggagcggcggcggcggcgggcgggagcggcgcggcgcggtgtgagcggcgtggcagcggcgggggatctccggcggctccgacaacaacgatgggaggggcagctttggtggcggcgacggcgaccactaggacaaggacggctgtggaggcttttagcgacgtcgatagcgacaacaaggaaggcgttcccggcggtgtcttgcaaagc

SEQ ID NO: 426253 - DNA, 422 bp, Oryza sativa
cccatctctcctcctcctcctcctccgtgtctccgccggtggtgccccggcgagctctcctccgccgcctcggcgcgccacctctcctctcctcgcgccgcgggggagaagccgaacgggcgccggagacacggcgcggattgcctcaccccccttagtggccgtatcaactatcacccttggtgcgcggcctcctcgcgcgcgcgggaacggcgatcgtatcggggtcggatcggattggaggggagaaaaactcatcaagtaattgaaggtggtgaatacacttttacggggcattatcatcgttcctaggttcagctgcaaaaagttaaagcaaattgccaaagaagacatctgaagagaataaagctgttgcacataatgaaccactacccatggagcagacattaagctctggtgct

SEQ ID NO: 426254 - DNA, 241 bp, Oryza sativa
ttgttttatcaaaatatgaagcagcagaaattacaaaaatagaaaaagtatgtgagaataataaaaaatgatgaaagggttgaattggggaagagctgaaagatttaatggggggggtggttttaggggatctaggtttaatcagacgggcttgcgacttaatagtttttttttggggcaacttaaattaaagttatgggccgagagtttaaaaggggtagattgggaaaaccttggggtt

SEQ ID NO: 426255 - DNA, 89 bp, Oryza sativa
ttgttcgcgtgggcgcagccgcagccgccgccgccgacgcctaccaggagaggtggcgaggcaacgctactgggacgtaggtaggtagg

SEQ ID NO: 426256 - DNA, 427 bp, Oryza sativa
ctcctctcctctcctcccctcctccgccgatggggaggattccttccattccatccgcgcatccgctgcctccgcggaatccgagttccgcgtactgcgctgatctccggcatcggatttcggagagggtggggtgttctctccgctcggggttgttccactcggttctgaactgggagtgtgagtgtgcagggcaaggttgttgggatttcacgtcgggtagagactaccgcgactgtcctagttatgtcagtgccgttgtatttttatacaaagcggtagatctggtggaaggatatgaactgttgcagataattgttgattctgatttgtactggtgtgacatgtgcccccatgtgttcaacttgggtagaacatgttttctgatgcttggattgtttattcagtctgcaattctacttatggt

SEQ ID NO: 426257 - DNA, 102 bp, Oryza sativa
agtcttgctcggttgcttgttaatttcctccgggttgtatataccacgatgatgatgatgaaaacttctgttacttgagtaaaaggcacaggtgtggttctt

SEQ ID NO: 426258 - DNA, 278 bp, Oryza sativa
gtttgacgtgcgggctgggaaactgactgggatagtcaatgatataggctattctggcggcattgcttgcatcatgacatgcattgaggaggattaaaatgatgattaagatgggtattgagatggtaatagggctgaggaaaggctgatggatgttatacttcaagatactttccagaaagggggccacagaggggatgccgctggtgatgcagttgctgtggaatgtgctaaggattgttttgcttgtgcttgaacttgtgttggaattaagaggt

SEQ ID NO: 426259 - DNA, 473 bp, Oryza sativa
caccttttcgctccatccatccgttccgtttagtttgctccaagcgcaagcgcaagcggcggagaggaagccatagccaccttccaccacgccttggcctttccattacctacgccttcccttcccttcccttcccttcgcgcgctacttggaattggattagccatagccatggacgccacgctgctccgctccgccgatgccgccgtcgccgttcgctccaccaccactgtgcctccgcctcgccctcgccttcaccgacccagtacccttcccctcccgtccttctgcgcctggggggccccttcgtgcctacaccgctttcgctggccccgggcccgccgcgggataattcactttatttatttgacccccctttttcctttctcccccttctcttaccaaataacaggtttccttatacaaaaaaactcactgctggtgcttttttttttttttgggggggggggggg

SEQ ID NO: 426260 - DNA, 366 bp, Oryza sativa
gtcatcttgaagaagaccagcgcggggcaacgcgaaactggtggagggctcccagacctaaccggcggcggtggcggcggccatgggaggagcctacaacctcaagctgctcgccgacctctccgagctcgtgctccttctcggcgcctcgcgcccctttctcccggggctcctggaggcggcccttcgcgcccccgtcctcccgcgcgacctcctccctctgctgccctggccggtgggccagtcgatgctcctgcgcctcgcgctggcgcggcgccgtcgacctgctcccgtgcttagttggcgtcgcgcgggagccagggattgggcggcgccccgcccgtccagtggaagggcgcctgcttt

SEQ ID NO: 426261 - DNA, 436 bp, Oryza sativa
  unsure (1)..(436): unsure at all n locations
tgatttggcagtacatactcaaacaaaagagcccctttctcctagtaggcaatttccatgcaaactgaactgtcttgaagtttgatagtcgaatactacaatttgttggcttaattcaaacatgttttgagtgggaagcattagccaatgcctatgatatacttgtagtgcataacaagggtagacatgaacaggagtaaggtcggatagcagtggtttgaggagcaagagctgcaatagctcatccaatgggagagccaagcatgaaaacgagttgagacttgagacaatacttgatactgcatcattatttatgtgtgcaactcgtgttataatatcttcttatataggtgatacctagtaaagggcatttacttttataaagcangacatgcaagaagccacatcattaacaattttaagacattagatcaca

SEQ ID NO: 426262 - DNA, 338 bp, Oryza sativa
gattgatcaaacagaacagctcacaaacagcccaggtttctccttagaaggtagcgaaaacggtacacctctggaatccgatagaaccatggagggggaaacatgtgacatagacattgaaacagcacgtcataatctggaaatcactaattcccttcccagtgaacaaagtactgaacaaggtgaactgcatggcaccaggacagaacttcagtcaaactttagactagagagtaatcctcttaaggcacaatttccttcttgtgatgttttctccaaaaaggggatgactgacttttttagaagcaaaaaggtatatccaaaatctgttttaaacc

SEQ ID NO: 426263 - DNA, 173 bp, Oryza sativa
ggctaaggcgccgcgggcttggcttggctggcaccctctccttctcgtcttcggcttcgtcttcccccgtcaaacccacccacgccggccgccgacgccgccgtcgttgcggcgggtgcttcccccgctcgcgtcggtgccggggggctgaggggaagagggggagggggagg

SEQ ID NO: 426264 - DNA, 321 bp, Oryza sativa
ggttagaatacgcccatagtctaccgttatcacaactaccggtacaagctattcttgcttaacttttgttgtattgtcatttgtacgtgattcattgtacattcacaacacatggtctgaaattgtagactaaatcagacccactctttctggatgttgagctgcattgagttgataaatgcctgctgtatgaatttcttttcatggtggacagccttagcttacaaacaaaggaataataaccacctatggaccttttatggccttttgattagcagtcaaacatttaggcagtttgcaattatgatatgattttctcct

SEQ ID NO: 426265 - DNA, 285 bp, Oryza sativa
ttgctttttcagaataaccaagttctccgccggactgttctccatttgcttagagctgccgttccgcacgcgtgcgcgcctcaacctttatgtgaggaatggggagcaatacacgttccaggtgagaaagcaggatgtattagtgggaggcatgagcacgaactagctacttctcgtcgctgagtctgacagcattttggccggcggatgtcgcccccagccgactgtggtggccgagagtgagacggggctgctgatgccaggcaagatggctgcggatcatcc

SEQ ID NO: 426266 - DNA, 132 bp, Oryza sativa
  unsure (1)..(132): unsure at all n locations
ttgatatggggttcacattacttcttagtcaataagataaactcgtcccatccgcgcgcggcctcaacatctcaaccttntggtcagctctggtaattctgctggttatatcggcggctgggaggaggtgat

SEQ ID NO: 426267 - DNA, 370 bp, Oryza sativa
ttgtttgacagcatgtgttcttgacgagagttcttcttggctgggtccaatcccaagattgatctatattatatagatggctctttatatagaatcttatcttgagatggaattgtcatcctagcttcatggaactctaacaagaacaatttattacaagatgaagctctagcatcatgctgtcctaggttattttggcagtttctttaggttagcaaaacagtcttacatagtagagatgatgccccaattctccatgaggagatagaattgtaattacaccagacttgtaatcttactaggaaaaactttagctgtgccattagaagtgaaacagcccacaattgcattgccgttgcgaaagacttgc

SEQ ID NO: 426268 - DNA, 464 bp, Oryza sativa
gagtagaatggcgctatgctatgctatgctacgctatgctacatcgtgtacttccaattgattcacagctcgcacgcttcaatctttgtagatcagtggtctgcttcactgctgtgagaaattgcgtgtggttttgcaattcatcggtgcttttttccccctttctttctaggttttgtgtatctaccgtctacagtcaccatggttggcaagctaatgggggattggaatataaatctctttttggtagttctttttttgtatgattgattttggcatgtctgtttgccatcacctttttttttaattaggaccaccaatggatagggttgttggtattaaactcgcaccatatcaaatcatcatgttatctttctttttcaagttttctggactcgtggcctgcccgaaggaacatgggaacttttagagggtttcctttctaaaaagctggttttttttca

SEQ ID NO: 426269 - DNA, 448 bp, Oryza sativa
cgctcctatccctccctcccccgcgtccagctcagagatgagctctcccacctgtacgcgcgaatctagaaccttctagatcctctccccttcccgatccgcccgcctcgcctcgtctcccgccccaccccgatccgatcccccgaaggtctcggggttgggggggggggcgaatcctgatggcggcgcacggcggtggcggcgtggaggaggatcaggcggggtcgagctcgctgtgcccacctgctgcggaggcagaggcggcggctgcggaggcagaggcggcggctgcggcggcggcgatagcgagggcggcgcggccttcgaggccgggcagggacaagaggctcggcgtgcggcacccgctgaagcaccggaggttccgcgcggggggcaaggcggcggtggcggccggcgctagggaggtcggggaggcgaccaccgtggc

SEQ ID NO: 426270 - DNA, 447 bp, Oryza sativa
ttctttccgcaggaggccgcatccgcttcgggatcgggatgcggaggagaggggaaggatgggagagaggcaggcgacccggccgcgcagcttcccttgcttcctctctctttctttgtgcgacatcccagcttttgctgttccttgagaagaacagcttgggacattcttgtgttgtggtttgatttctagggcaagaaagcatgaggctatggcttctcatacctcttgttctctgtttacctacattgattccatccgaggattacttggatgtgaccattgttgctcggggtgctgcgacgatcgcttttaccagcaacgtgttcatttgcgctacccttgattggtggccttcacagaagtgcacttctgaccagcgtccatgggggcatgcttgtattttaaatcagtacttgactaatcctctgctagctaaagctattc

SEQ ID NO: 426271 - DNA, 408 bp, Oryza sativa
ttttcacctccccggagccgccgcgccgccgccggagcgagccagtgagcgatggccgggacgggcggaagaaccggcgagccggaggccaccggagtggaggcagcctccgccccagagcgctccgaatccagccgatgcatgccgttcgaggactgcgtcgccggcatcaagtggtctctcaaaaagttcctcattcgcgccgtgaacgaatccagatccgacggtgcggttcctgatggagcggatggataaggccggctgcccgatgccgtcggggatgatcacggcgaggaactgcgggactgccgattagaatggttcctacggttcccggatcgggataacggattgctgtgaagaaatacgatataaagatgagataactgaactattaattcacgaatt

SEQ ID NO: 426272 - DNA, 557 bp, Oryza sativa
cttgggcttacaccgtcgttttcgctcccttttggctgcctgtgctgccgcgttcaattcgccgctgcttggtctcgtttggttccatccgctatggcagggggccgggatttgcacggcgtggatcgctgcttccatggttcttgaacctgttcatcagcacagcaaaggtcttccgcggcggcagctcgcgtgcggacccccctatctttccttcgctttctggatcgactcgttcgtgtcttctctgtctcgtcctcctctcgtacttgcttcgtccttgttgtcccacggcgttcgcgggcctcttcgtccgaggctgcgccgcctggcgcttagcgcggctttcatgaacaagacatggccgctcttgtacataaattttgccataaatatgttccatctgtatgtttgtactatatactcctggctcactatagcgtatatccttatttctcagcttctgtatggagacatcagcaagcagatcaagacacggctctctaggctatgggattccacgatatcaatgatgaagaaaaatatatcacactgaa

SEQ ID NO: 426273 - DNA, 364 bp, Oryza sativa
ctttgcttcgttttttttttctcaggccaagtttgtgtcctacctgatcaccgtgttcatggtggccatggccgtcttcttctcgtccaggatggctggctgggccgtctgccccggcgccggcggcatcaccggaggatgcgtctccggcggcgaggacgtcgccaagacctgcctcgccttcgcgctgctcacggtggcggcgcaggctcacctcgcgagcgtgctgctgatggatgagaagaagaagaggaatccgccggcggcgagctgggtcgcgtggctgctcgccgtcagtacctgtgcgtccgtctccggcatgttcctcgcctacatcagctacggcggctttgtggcggcgacc

SEQ ID NO: 426274 - DNA, 397 bp, Oryza sativa
cttcctccatattgctagctagctaccaccataagctgtagctatagctatagctagctaacctctctcgagatctcggagatatcatctctggccatgaagccgtcgccgtcgacggtggcggcgttctacgggacgctggcgagggggctggacgagctggagcggtcgctggcggcgtcgtcggcggcggcggagttcgtgtcggcggcgtcgctgcgggcggcgctggcgctgatccgcgcggcgcacgcggggctcgcccggctcgtcggctcgctccacctccccggcggcgccgcctggctcgacgagtacatggacgagacctcccgcctctgcgacgcctgccgcgccctccgccttggggccgcctcccttgagggctactccgact

SEQ ID NO: 426275 - DNA, 282 bp, Oryza sativa
gttcattcttgtgctaacaagcgactgtgatgggccagcggcagtcattcttctcctactgattgattaggcgatgcgctaaatgagatacatacgtgaggatgcaaagtatgtgacacctacgctggtgtgggagacatgccatttcaaaatccattgatgggacctagcgcatggctagggctcatgcagggtctgtctggacagacagcggagggtggcctatgaactgcggcagtatgagctctagggcacgcacaaaggccaaagggatcgaggact

SEQ ID NO: 426276 - DNA, 345 bp, Oryza sativa
tggtttctttttcttcatcgcgctactatcctatactttttgctgtcgatctgctgatgggtgagacagagatccatgtactccagtgcgacggaggtatgaacctaacaaggtcagagatagccaactgaagttggatggcactgattgttttctttgatacatgcatccaatccatatagtacgaatgctctctctgaagaagcatgtatgaacaacaggatcatgctagcaaaagaacttgcttaagacttatcatcagtgctcgcgagagcgaggaggatgtgacagccagcacgcttataactgaagcatagaacagtggacggagtcttggaaaacgct

SEQ ID NO: 426277 - DNA, 269 bp, Oryza sativa
atttgttcatggtgaagcggcggtacgaactcataaatggcgggcgagtagctcaccaagatgcgagaagccgatgccggcctctcggcaatcactgacagcgcaaagtccgggccaatcacactgccaggccgctacctcagtggcaagcaggagcatgtgcatatgggcaaagatccacacatcgaccgactaagtggcagggccgtacgactccctggtagccccaccggacgacttgcaggagaccaatactatgctcaacaagc

SEQ ID NO: 426278 - DNA, 72 bp, Oryza sativa
tcccgggtggacccacccacgcggctaatagttcctttgcacaccatggtacatatgagatgagtgtattag

SEQ ID NO: 426279 - DNA, 242 bp, Oryza sativa
cccccttcgctcctcccgccgccagcccgtcgcagctgcagcccgtcaggcgtccctgacgagtggggcgactgctcgccctccgcgcccgagccgccctcccagcccgaccccccaatcgacgacgacgagtggggccgggacgacccctcgtcctccggcaccgggtggggcgagccgggtgtgtccgaaccccaatccacctccgccgccgacgacgagtagggtggggaactggggat

SEQ ID NO: 426280 - DNA, 207 bp, Oryza sativa
ttgatttgcaccaaaattgctctctactcccagaagtgcccccacccctccgggagaattccccccctccgccggtcgattcggggctagaatccggcgtctccgccgccaatgaggtcggtccggcggttcgttgatccactctctcgattgtatgaaattggactaccttcttgacgcggcgactcggggagtatgagctcggtt

SEQ ID NO: 426281 - DNA, 323 bp, Oryza sativa
tgttttcctcaccgagctaaccacgggacatacgtagccgtggtacttctacgcttaacaaatcacaacagactgacatacacctaagagacactattgttcttgatggtacatctgacagatcgagccgaggttgtgctgagctgagctatcgcagagacagggggatgaacattttgaaccaggcgatcaagcctggtggtcactcggcgttctcgggggcaagggagaccggacagctggtgcgggcgtaagtgcgttatgacggactggagactgaaaagagcacggacgctcgccgtgggcggtcgcacgccgggcag

SEQ ID NO: 426282 - DNA, 451 bp, Oryza sativa
ttttcacccgaaccgaattcccgcaagagcacgaggcatcgcggcggcggcggcggcggcggcggcatctccgtcgatctccggcgaacacttgtgcgcagtcgataggggttcatcctgtcctgtccggggtgaggcggggcgccggtgaaccacgaggccgacgacggtcctccatctacacctctgccgtcgccggcgagcttcgcgatgggatacaaccggagacgcggccgtggatcctcctcctcctcgtcgtcgcgccgcaccaagcaggaagccgcgtgggatgatggtcccgggacatcacttccaaggcaggaagacactgaagaagaaccaaaaggtccaaaaattcagcttgctatgtgggactttggccaatgtgatgttaaaagatgcactggtcgtaagctttcaagatttgggctattaaaggagttgcgagtga

SEQ ID NO: 426283 - DNA, 409 bp, Oryza sativa
gtgtgtgctgctcagcagtggctcatccgaggcaggagcggcagcagcaggaggaggaggaggaggagacagcagcggaggtcggcgcggccatcgaaggacgccgagctattcgctgggacatcacaggaagcagagcctgtcgtccatctcgaggatgatcagaatggggtcgaccatccatgaaggcgacgagagcgagaaggtgaaagctgaggagctgcggttgccagcggtggccacatcgtcgtcgcctctggagaacaagttacgcaaggacatcgacacgctgctggaggagaacctcgagttctggatgaagttcagctcgtccctgcagcgggtgcaggagttccagcgcaagcacgacgagctgatgcagcagctgcagccggcggccaccgaccgc

SEQ ID NO: 426284 - DNA, 272 bp, Oryza sativa
gcaaaatgttcctttgcacaccatggtacatatgagatgagtgcatcagagccttggaggggatgcactcatctcatatgtaccatgaatgacaaagttcctttgcacaccaatggagcgatcttttcaaagatggaggtagaccttccagctatgatggtacagaaagacatggttgaggttcgtctgactaaggggatctgaaggtctatccaagacgaacaaactgacgtatgtcaaaggctttgggaaacttgcttccctctaaaggt

SEQ ID NO: 426285 - DNA, 104 bp, Oryza sativa
ggtgcacctaacgaggagacagcatagatgaggcatgaggatatatctgctttagcatattgtgtggctctgcaagattaaaaagtgctgtttgtggcccttct

SEQ ID NO: 426286 - DNA, 456 bp, Oryza sativa
ttttcttctctcggtggtgtgatgtccactgtgcagctcccgtgcaggcgttccgctttgatggaaaccgccgcggccgtggtgtgccgaggcggcgggctgcgcgcgccggcgcgtcgcggtggcagtgacagcagcacgacgcgcgcgggtggcgttgctgcctccccggcgccctccaccaccgcgcgacggaggccgctgctcgtcgcgtcgctcggggagcccctcatcacggcgcaacccttgtcgtcgtccctgggagatggcgccgcggtacacgagacgctggctcgctccgattcggtgatcccgtcgctgaagccgtctactgcgttgatcactcggtccaggttgacgccgacgaggagaccggcttcaccaagacactcccacctcctgatgacgttcctacgaagacagtgcacgtcaaattcgtgctgcaaaagcggtgcg

SEQ ID NO: 426287 - DNA, 381 bp, Oryza sativa
cattgatacgccattgccatacaccgctgctgccgaggtcgtcgttgacgggcgccgccgtcgtctcagccggcgtcggctccgtcgccagccaccgccgccaccgtcgtcggatccactatagatgccaaggtcgccgtccgctaccgtcgtctccgaggtcgtcgctgccagatgccgacgtcgtcggcaccgtcgccagatccgtcccgcgtccacccaagtttgaggtccttgccagaggctcgcttctaccgccaccatcacctgcccttgacgccgacccctaaacgaccttatacttcatatgtccaccccgcgcgcgcgtgccacaatatgatggagtgcacacttacgagacagttcaagcaccacaagcca

SEQ ID NO: 426288 - DNA, 577 bp, Oryza sativa
catacttgattcgtgcgctcctgagctaccccgatggccgcccaatcttccactccctcgccgcaagatggttctggtagaggtgaattctcagacaatttggtacttcaaaccccacagccaatgcgggaggattacatacagaatgctgttaactttcttggacatccaaaagtgaagggttctccagtattttacaggcgctcttttctggaaaagaaaggccttacaaaggaagaaatcgacgaggccttccgtcgggttcctgatccacagccaaacagtacagatgttgcagctgttgcttcacaacaagccggcatcgcaaatcaatctgctggagtacaaccttacgagacagttcaagcaccacaagccattaacactggtcctatcgttccacatgcgcagtcgcaacttagctggtcccgtactctcattggtgtaggtgttctactcggagttggggctagcgctgctgtcatcctcaagaaattgtttgttcctaggatcaaatcttggatccaaggagcccatgttgaagggatgaaatttctgggatgaccttaaatccagt

SEQ ID NO: 426289 - DNA, 484 bp, Oryza sativa
atttctatccaaggcttattaatctgttgtgtgatgaaggctcattagatgggagaaaagcgatttatatagaacacaagttgtgcacatgatgtgaccatgaggtagaaaattgagccacatagatcattgttgaaactattttctattgcccattaacatattgtatagtgtttattcatgtctgcaaggtcaaatttgccatatcagaccttctttgttaatattttacagtttaaagtcagttgccactctttgatgtttgttattcacacctgagcactacgattaaatatgctctgcctgctatatgttttattgatttcttcttattttcaggttttctacaacactgctcagtactatagggcatactatggtcataaaacggtacagcttttctacaatgaaatggttgagtatgaagcgtatattctctatactgctttagctaaatgcttcaactatttgtgataggatcctc

SEQ ID NO: 426290 - DNA, 198 bp, Oryza sativa
gtttcacaaacacggtgggctctgatggcgggtgatcgtccatgcggcgacggggcccatgcaagcagaccccagggactggctgctctgcattgaccataggctcctacgtcgatacatcgcgactctcggacttataaggagcgatgcacaggcgaggtactacactaggcaagttgcacatggtattccaacatg

SEQ ID NO: 426291 - DNA, 123 bp, Oryza sativa
acccgttggatgtacaacgaccaaggagcagcacggtgtgggggacctccgggaggttcacttgaaacctgcaatagcccacagccaggggcttttgaaacattggctggtggaaaatttttg

SEQ ID NO: 426292 - DNA, 181 bp, Oryza sativa
gtccacataccctcaccctcccgcaaaaaccctaatcccacctcctcctcctccccccatggcggccaaggcggcggcgctctcctcctccccgttcgactactcccgccgcctcttctgccccgcggcgtctatccgcgcccgcacgccgaggtgcgtgatggggagcgagcaggtgagg

SEQ ID NO: 426293 - DNA, 85 bp, Oryza sativa
ttcacgtgtccgcccacgcgtccgagcccgccgcccgctgtgaagggagcttcgaggccgcccactacgagccctagacatgcac

SEQ ID NO: 426294 - DNA, 77 bp, Oryza sativa
ttgatattacctaacctaaccctagctttgcaaggagacgggcggcggggggcgctgcgtgcggcgtgcggtgcggc

SEQ ID NO: 426295 - DNA, 201 bp, Oryza sativa
tcggactcctactgcgactatacttgacagtcggacgctatcttcttcttgtgcccaccaccaccaccgctgctatggcggctaccgtgtcgatcgacatggtggacccgttcatctggcgcgcgtggagaggctgaatggacagccccaatgtcatcaaggtgccccgcttgtggtctcaactagcgcagcctttgttcc

SEQ ID NO: 426296 - DNA, 78 bp, Oryza sativa
atcgtttgattacacagcctcagaccgaataggctaagctcgccggagcttccctaatcccaactgcgaaactgcgaa

SEQ ID NO: 426297 - DNA, 96 bp, Oryza sativa
tcggtagaggagatcagggggaggaaggtcggatcctatccgcggatgccgctgccgctttcccacccatgtccagcatcttcgtttttcacggtt

SEQ ID NO: 426298 - DNA, 473 bp, Oryza sativa
gtcgaactccgcgagagagtttcgctttcctcccgatcaccgcgacgcattctgctttcgtctacagaggcagacaagaactgtggcattaacagggacaaagatgtcaagcatggcaggcttggcagcgtctcagactacttcatctcgcacggggcctgagacgctgacctcatcgggccacaaggggctattgccatgaagatgctctacctcggaacaaatcttcgggaccatcaaccgttccaagggggctcccgcgccgttcgcaggcacccccggcgcttgaaccaccccgccggtacacgacctaaacgtgccctacaagggcacctgggagggagaccgccaccccccagtggaccatgctggtccccccgacccccgatacaaacccccgatccagaccccctcttccaggaacatgatcgggtgatgtccaacattcccactgggcctttaaactatgcccc

SEQ ID NO: 426299 - DNA, 60 bp, Oryza sativa
tcggtggatggaaaggagatcgctgtacctcatggcattataatgggtgctgagcgaaga

SEQ ID NO: 426300 - DNA, 266 bp, Oryza sativa
tcgtcttcttccacctaaacacatacaccttttattcccaatggatctagccggggaggttgccaaacaactgttggaatgtatagcatgtgtgtgcacagttccttctgttactcttattaccacactaattagcagatatagattattcttccataaattgcaggctgttatcagttgatagctcatgctttattctttgcttcatccttttaggtatacctaatacctaacgggcttttcgttgtctctttaatctctctttt

SEQ ID NO: 426301 - DNA, 178 bp, Oryza sativa
ttcacttggagcttcatctgcgccggcaagtacccgatcgaccacccgtacgcgaacccgttcgcgctcccggcgtcgtcgtggcagcgcctcggctgctcccgcgtgctggtcaccgtgttggagcaggaccgcctgagcccatggcagcacgcctactacgcaacgttctggagca

SEQ ID NO: 426302 - DNA, 508 bp, Oryza sativa
tttgcatcgcctccggatgagcaattataatgtactgcttgcctgccccagtgctgactctagtgtattgtgcagtgcagcaacgattatgtggccatgggatgctttagttaaagggttggatttctcaccaaaacattttaaccaaccacctgatggtatatccttttcttggtacggtcactataggggaccccttgatgacttgttcttgaactcagagtcagatgactctatggcagagtcagaggactccctggcagagtcaagggactccaaggcttttcaaccacataccaagtcagtgaaaccacctattttacccaaatctgtggccaatggggttaggcaagtactgtactcctttcctgaaggtatcagtcttccaaatcttcgagcagagcttagaaagaatcatgtgttcatggataaaggattatttggcttcaaaaacttctcttctcttctccaagccatgcctgatgttgtgaagtttatagatcctcta

SEQ ID NO: 426303 - DNA, 58 bp, Oryza sativa
ctaacgggagggaaggcaggcccgcagggacggggaccgggaacggactggaccggac

SEQ ID NO: 426304 - DNA, 88 bp, Oryza sativa
gttgagtccactaagaataggaaatctgaagagactaccttgaggtctggttaacaaaagtctaagaatgtggttagattgcagcaag

SEQ ID NO: 426305 - DNA, 218 bp, Oryza sativa
tcggtagtgtgcactatgaagaccacgacaggagtgactaccctgagcactgcatgaactatattcaatagtgctgtgtgtctaagagtatatgcccctggtgagctttaaattaaggtattgtatacctacacataacatttgaactaacctacttaaatgaatattcttattttgaaacagctactatcagggatcctatttaagattaagttctt

SEQ ID NO: 426306 - DNA, 91 bp, Oryza sativa
tcggtgtggttcaaaaagtaaaccatcagacatgccttctcgggcggtattaggtgccaatcactattttgatgactagtctactgtacca

SEQ ID NO: 426307 - DNA, 109 bp, Oryza sativa
tcggtcgtctcacttcctagggactaccaaggggggttataatttacccaccccaacccttatttttcactctatcttatcgtcagcttaaaaaatagccgccccaacc

SEQ ID NO: 426308 - DNA, 119 bp, Oryza sativa
ctcttctgttccttcctcgagtcgaaacctcgcgaagccgccgccgccgccgccgactctcgctagggctagggttttcctcccgccgtcagaagacccctaacctgcaaccgcacaag

SEQ ID NO: 426309 - DNA, 198 bp, Oryza sativa
ctacctgcgactgcgagcgaggcgagtagggcggcttcgtcgttcgtcctgctgcttccgccgcatccatcctgatatgacttgttgagtggaaagaatcaatatagtacaatctattttctttctcaatgcgaagaagaaacagttctgctacacatacataccttattaatcacctcttgcgacatactagacatt

SEQ ID NO: 426310 - DNA, 67 bp, Oryza sativa
ttagttttctctttgaatgagatgttagaagaaagttgcatgagtcctgttgaagggtagcctaaca

SEQ ID NO: 426311 - DNA, 79 bp, Oryza sativa
tcgtttgtgtcttctttgtattgctgctactaataaacttaccttctttatcttgcatgtaccatctaaggaatggtag

SEQ ID NO: 426312 - DNA, 78 bp, Oryza sativa
tttgggtcctgtatgagtggcaggtccggcgacagtactttgagctttcgataagtaaagccaaacaaataaattgtt

SEQ ID NO: 426313 - DNA, 84 bp, Oryza sativa
tcgttgaaataccaagagagaaaaaaaagagagaataatttcccccttttctctcttccgtgccggagaatcgatggagattag

SEQ ID NO: 426314 - DNA, 117 bp, Oryza sativa
tgtgttttacaacaacaacatcatcatcatctattacacacactattagggcaggtgatcgaatagctaggaagcaagcaagcagagagttgtctatcgagtgatcggaggatgggg

SEQ ID NO: 426315 - DNA, 82 bp, Oryza sativa
gttgtttcttctatgaatagcagctctgaagacagtagcctgagctctgcataagagatgccaaacaattggtttgaatgga

SEQ ID NO: 426316 - DNA, 265 bp, Oryza sativa
tcggttgtgtcttctttcaatgacatgtttgaagacatttcgctgagtcctgtttaagggttgcctagcaatttgttttatagcatccagatggggcactataggatgtctgagtacttggattcggggtgccaacgacctgggtatgatactaccaagggataagatgtctgatcttgcaatagcttttatttggtaccgcaaggggtatttgatgactgagcaggtgctcaggaccgaggcgacgaggttaagtagcgatgtg

SEQ ID NO: 426317 - DNA, 87 bp, Oryza sativa
tcggttgggggctctgtgggggggaggtcgggcgggggtgccttgaggtctcgatgagcgatgcccatcaaacggattgtagtggag

SEQ ID NO: 426318 - DNA, 102 bp, Oryza sativa
tcgtttctcctttctcccttccctatctatctcttttccgtttccagatcgccaaaaataagattccgcgtagcggctagagggatgtattctatcttttat

SEQ ID NO: 426319 - DNA, 135 bp, Oryza sativa
cgaatggaattctcgacccaagcgacccgtttggttatagacataggcttaccccgcgtggcctcgccgatggattgagctcacgccgccgctgtcgcctcgtcgcggattccaaggttcaatgagaggaggagg

SEQ ID NO: 426320 - DNA, 236 bp, Oryza sativa
tcgctcaattcacaagtgtagactgtaggatggccacgctctttttctgcagccgcctgagttccggcggtttttcctgggaggagagattttttttttgtcttttttattctttttttttgtctttgtcttatttattcttctttattttttattacttttttctttttatttttctatattctcttttttttattttttttcatttatcttttcttttttatctttttttcttt

SEQ ID NO: 426321 - DNA, 75 bp, Oryza sativa
atcggtcattcaataagtcataactgtagcggggcgactttgtattctactaccggacgtaattcctacctacac

SEQ ID NO: 426322 - DNA, 504 bp, Oryza sativa
gtttccatcgagggagcagtaaaaaaaccattccccggagcgctcgaggcgaatcgcgaattcgacatttcgagtttccacgcgcgccacctgttcgacgaaacgcctgcctgcgcggtttcgaggttccacgcgcgccacctgttggacaaaacccctcttcgcgcgtgctcgggccgcattggagggtccacctaccaggagcaggggggtcacgggcccagcgcacactgacgacggggactggttcagcgacgtcccggacgacatcattctcaatatcatgtccttcctgaccacgcgccaggctgtgcagacgtgtgtgctgtccggcggtggcgcaacctctggcgctccgtgccctgcatcaactccgacatagacgagttcacgcgggactccgactcggaaggatactatgatgaaaagacggaattggcgtcattatgttcatgggagggtgatggagctttttgcccttgttgcctttgatagacgtttcat

SEQ ID NO: 426323 - DNA, 88 bp, Oryza sativa
ctgtataccagatccgcaccgccaccgccgccgccgcgcgatcctccgccgcgcctaccggtcggggattggtggaggaggcccgcca

SEQ ID NO: 426324 - DNA, 140 bp, Oryza sativa
ttctctttctcccttcctcccctccttccttcctccccgcctcccgctcgttgccttcgccgccgcctcacgccgccgtgatttgagttaggttttttttttttttttgctatgaccagacttgacggcaaaggaaccac

SEQ ID NO: 426325 - DNA, 281 bp, Oryza sativa
tcggtattagagcgcgagcgaacaaccattggccggagcgtttgaggcgaatcgcgaattctacattccgagattccacgcgcgccacctgttcgacgaaccgcctgcctgcgcggcaacgaggctccacgcgcgccacctgtatgacaaaacgcctctgcccgcgtgctcggccgcaatgtagggctcaccctctaagagcaggggggtcacgggccccacgcacaccgacgacggggactggatcagcgacgacccggacgaaatcattctcaaaaaca

SEQ ID NO: 426326 - DNA, 276 bp, Oryza sativa
tcctctccgctactatactgtcctctctgtgctccgccacctaaccgcactacccggagatagagagagtgagagagagagagatccacatcactcacagcatcaaatcacctcccactttgtcccagatgcaagccgtctgcaccacccattggccctcctcgcagacccctccgggcgatctgatgccctcacacacagcggtggtggtcatggccaatgcggcgtaagcctatgtcgtgggattacaaacgcgttcctgacaaagacgccaac

SEQ ID NO: 426327 - DNA, 438 bp, Oryza sativa
ttggtatattccaagcttgcgggactagccactagccagcccagccaggggaaggggaggagctgcaagcccaaccccctgctcaaccctaaattgcttccgccgatcgcccagggactagagtgttactatggctagagcaaatgagatggtcagggcagactcaaggatgatggatgtctttagtgccctggcatctaaatcagggccactgacatttgaagactcgctcagatttgtcaagaaagtgaaggcttgtaactacatgttgcatttgccattgtttgacattcttggaagaatggagctatcccggcttgaggcctaccgagagttacagctgctgtttcaaaattacccggatttgcacgaagagcttgaaaagtttagaccttcagtgcctataaaacatccagcaaacaacatttggccctggct

SEQ ID NO: 426328 - DNA, 78 bp, Oryza sativa
aagctggtccgcctgcaggcgccgcggcagtaccggggggacccacgcgtccgcctgcttatactacagatgaccggc

SEQ ID NO: 426329 - DNA, 295 bp, Oryza sativa
tgtttcctcatcgagcataggtcggagtgcaaccggagtgccatggtgtatttcatggattcttttctacatggcatggatgctgataaacaccagatttttggggagcgtggccctatgattgagacaaatatgtgtgcatctgatggtcgttctgatgttggacaacgatgccagagacttgggtgttacaatggtgccgaaggacagacattggtctggaaacgccacaagctcatgcagccatgccaaatgctcggctgtcctcatattgtaccagatgggtcaccattat

SEQ ID NO: 426330 - DNA, 395 bp, Oryza sativa
cgtgtgctcgatctccctatttctctctcccgtgtggtcggatctcactgctgcggcggccgcggctgcgaacgaggggggagagagagaggtcgaggtacagaggaaaggcacaggagggctgaagacgaccaacggctacggcttgctgcaggtccgggtggtggccgccatccgaccgaactccttctactcggagacggtggccaagatgctcgtctccaccacgctcacacggtgttgatatcctcacacgtaccttcaggacagcaccacgaccttcagaccaagttctctcatgagccccaaccgattgactgggagtactacagaaaaggaattgggtctaaagttgtagatatgtacaaggaagcttatgaaagcattgaaatccc

SEQ ID NO: 426331 - DNA, 269 bp, Oryza sativa
gctttgcaatctaatttggggccgaacacaccagggtctgcgactctggcgaaggccggcggtcgggaggcggcggcggaggaggaggtcgtgttgtggagggaggacgcgaggaggttcgagacgcccgacggcgaggcctaccttcagtaccgcctcctcgccgccgcccagccgcgctcctcctcctccggcgacggcggcggcggcggcggcgcgacgacgccggcagcggtgatggagatggcgcacacgtacgtgccggggag

SEQ ID NO: 426332 - DNA, 372 bp, Oryza sativa
gaagctgcgccggcctgcacgcggcccggactgcctgggtggacccacgcgcgcgttgtgtcttgggtggcatgctcgatggcaccggatgcggattcattgtgctaccaccccctctgtaggggtggccgctggggagtacacaactcccgcctgctccctacgccggccgtccccaagcccggcgggggactcgccggtcccggtctgtgtgtaggactgcatactatggacggtagccatgtcggcgacgtgaaccggtcgcttggcatgatgggcaacggcccaagcggcagccgccgagaccgcgactcggtgcgacgcggtcgggaggaagagaacgacagtcgctgccgcagccacaacctggac

SEQ ID NO: 426333 - DNA, 258 bp, Oryza sativa
gttggcgacgttgattgcttttggtgggcacagaggtttgggtagcacttgtccagtgtaagtgttagaagctgctgtaccagagcataaggattgataccccttgaaaccggtacttaggggacacactgcgagtagataccgcacagtgtgaccggacacagccaatgagcggacccaacactgatagcttcgtgggtgacaacaaagaggctggcttgtgccccctggaaccgctggatgatcatagctttggag

SEQ ID NO: 426334 - DNA, 236 bp, Oryza sativa
tcgttcaagcttatgcaaaccaacgcgggcaatctgtggtgacggtgaccgtgctcgatcatcgcggggaaggataagcacggaggggattctcgcattcatgcgagaggaggtgcctggcgaaatattacacacctggctaatcccttgttaaactgcgcaacctatctatggaatggccttcaccacactttcagaggatatgtgagtggatggattgcctgggagtgtagcat

SEQ ID NO: 426335 - DNA, 441 bp, Oryza sativa
ctggtggtgctgggggcagggaaccgtagattagagcaagtataatagtacagcaggctatcagccaaatctggcgagaaaattgcatatctactcgctagaatggcatcacttttaactggcattcgatgtaatgccattcgccgccgccgccgccttcttctcctccttccaatctctcctctgatcttctcttcactgtgtacgcttgcgtgtatcagtttgacgctctacaaactgagctataagggcaagcagaaattatggggaaatttaactatttgccattggatccatgccattgtaactggagtatttgctactcttcgacacttcggggccgcctccaccatgcggctggttgcctggatgctcatccatggccgtgcggcggcgttgggggccgggaaccgtaggctggtattgcctggtgtggcatca

SEQ ID NO: 426336 - DNA, 468 bp, Oryza sativa
ctgacgcgtgggttttgtttgcagttagtggaactgagtttggttcttcctattcagatacattgtttcctgcatgatcaatgactcaaatctcaatgaagataggcatattgctattccaggttggttatctgaatgtgcgcaggtttgcaatttgcatatcattggatgtatatggttgataacttgatatgggagtaattgggaaatctgcgataaggtatgaaccttcccttttgaagcatttctacagcactattgaagtaccacatagtttttttggccatatttatttataaccatgcaaggaataataactcttcctaattagggctaatttttttgtacaaactctatgattaacagaattgttctaatttgaaacagagctctctggcttagagcttgatcagtgagttaaactaattgtagaatacgtgagtaccgaacatgttataatttgaagca

SEQ ID NO: 426337 - DNA, 279 bp, Oryza sativa
ctctccgatccccacgtatggcggctgctgcggcatctgcggcggcggccactgccgctgtggacggtgcgcgtctgctgcagctggaggagcaggcggtgcacggcggcagcatcgcatgggagtacctctgactggacggaaggctacgcgcgcgcctagcgaaggccgtcctacggcttggcctgggcgtcctgaacgactcctccgcccgctcccgtctggcctcagaacagaggacgctgtatgatcatgtggccatagcttccatggattggc

SEQ ID NO: 426338 - DNA, 161 bp, Oryza sativa
gtcctcccgtggaaggaacaagggcagtgctatggtactggtcaatgccatgctcttggggcacatggaccaggtgcgacaatcgctattattaggcagggagaggtggttgcactgatgcaagcattgagctaaaaaacgaaagccccaatggacaagac

SEQ ID NO: 426339 - DNA, 270 bp, Oryza sativa
gtctgtttgagtccctttatccggacaaattgcaggtaaatccaaagagggcaacggggttgtaatgcttccattttggatgtacttgtgacaatatgaacaaactcggcaggatgcattaacatctaaaagagggggtcaatacagctctgttccctgttatgatggacatatgcaaagcaatgtggtccttggcaacacaaaattcaacccttcctttgctgtcgtgaactcatggacagtgcggattggcaacaactttggaaaaag

SEQ ID NO: 426340 - DNA, 479 bp, Oryza sativa
  unsure (1)..(479): unsure at all n locations
cttctccctctccatcgccgtcgccgtccaagaagaggggaaaaggagatggatccggtcgcgggaagcaggtacaggtttggtccgcacgagatagccgagcggcaggtgttccgcacctcgcccctctccttcgccatcgtcaacctccgacccacccgccctggtcatatcctttatttctgccaattatgtgtatgcacagctgctctactcctctctctaatttagtgccttctagtatctacttcacattgcggtattatctgctctcaacttctcatactttattattattattattattattattattattattattattattattattattattattattattattattattnattatttgcaaaaaaaaaaacttctcttgctattcatcaatgaaatgtgcctctgtttcaaaaagaaaaaaaaaggaaagaaagaaagactctgcactgaactacatatgtaatgta

SEQ ID NO: 426341 - DNA, 191 bp, Oryza sativa
ctcttttagttgcggcggcggcgccgtcctcctgggctttcccactcgcccgcctcgtctcccgccgtggcctcgccggcaccgcaagacggcatgaggctgcacgggtcaacatttgacaagaaccgatcaacccatttaactggcatgctgaaccgagggccctaccgcgctctcccacttgtggaggc

SEQ ID NO: 426342 - DNA, 327 bp, Oryza sativa
ttttgtctgccaagtgacgtgctaccaatgtgggcgcttgactggacacacagcccaagaatcgaaaccttccagggcttactacatccacaatcggatgattcccacagactgcgcacctaaggacagcgcgacgcgtgtacaacgcaaacaagggtctcttaggaggagtacagcagcgccatcaaggtggaaaacagcaaggtctgcaagttccaggaggagagtcgacatccacgccaccgttcacggcaagtctccgagaaacgatacggccgagttgttcggagagcaggtttctgcatttgccttcactgccaacagctg

SEQ ID NO: 426343 - DNA, 323 bp, Oryza sativa
ttttcaccgactagtccaggcgtgatgactgccctttccagcatgtactgtgcggcaggaatgacccaccacttgataccaaggaaaatggaaacgaaatcaccacgtctgtgaatactgcggggctggggaatatatacaatttgccatccatcggagcaatggtcggactcgctgacgctgtatgcatcatggccaactaccccaagaccaacgagagcgtgtagattcatggctcacggacacatgctatatgcgtctgaggaacatgggctatcaggacacatattctgccacactcttggacatcaaggctcccagat

SEQ ID NO: 426344 - DNA, 413 bp, Oryza sativa
atcgaacgccatggccggcgccggcgccggtgaaggcggcaccgtcctggtgggcgtccgaggctacgacagcggccaccgcgagaaggagggaggcagcacggccacctccagaacaagcaacgggcgtcccatcgagatgacattctggaacgaggcccctcccgcgctctcccacttctccgcccacggcttcgatctgccgcccgccgcccatggcgatctgctcctggcgcccaaagtcatcgccgccgcctacggcttgctcctcctcagagtccccgtcaaccccgtgcccggcggcaagagtctcttccgtcaggacgactacttcgtctaccatcaccatcaacccgccaggctagatctgctccccaagccgtgccagcaatattgcttacgcgacgacgatt

SEQ ID NO: 426345 - DNA, 132 bp, Oryza sativa
gcatgatcgcccttactttatcgcggaggcatatggtggcaattccgctgattcgctagaggaattcacggggatcaagccttgggcccgggtcatcttcctaccaagctactagaagcggacccaagcttt

SEQ ID NO: 426346 - DNA, 167 bp, Oryza sativa
ttttgtggcggtgtacgctctcatcttaatgatcagatctattgactctcttagcggaattagatatatgagagacataggctacggactgctgtcaatgatgattaaatgaaaagagaatggtttgggaaccaatgtctgaacaaaagagatttcggagtaccaat

SEQ ID NO: 426347 - DNA, 407 bp, Oryza sativa
tgttattgcccttcttcctctcgcttgcgccaccaagccattcgcgaaccttctagaaccccccaaaaccggacacctgggggtcacgctgctcttgcggtccgctgccgccagcgccgtctccctccgcggcgcccgctcgcaccacatactgtcctcctgcctccccaaggggggaagagcctgatgggcgcgcgccggccaggagggcgcccaattccggtgcagggcctgggtgcctgctgcactggctggcgtcggttcattcggaatcactgcgcgctgcaactccacctggaggtcggccgcttcggagggtaccaccgcgctgacgaggactgagcccgtggtttctgccgagtggctgcactccaacctcaaagaccccgatgtggaaggacttgatg

SEQ ID NO: 426348 - DNA, 476 bp, Oryza sativa
gtccggatccgccaccatattgagcggcggcggcgggcggcgcggctacggcggcggcgggcggcggcttggcggcctcagctcggcggcccgccatctcttcctcaccgacgacgatgaggcgaccctccctcttcctcaatgccaccgctgcaggggcggcttggccgcctcgggtggcaccgccgcactgcgcggatccggtgccaccgatgacggcgggtggcgggggtgacggatccgccgccggcgacgacgccgggtggctggggcgacgcatccggtgccgccgccgacagatccagcgggggcgacgacggcgggcagcgtgggagacggatccggcggggcgacgatggcgggcggtgggggagacggcagcggcgggggcgacgtcggtgggtcggctggggcgatggatccggggctgccgcgacggatccgcggggcgacaccgctggcgggcgggggggggg

SEQ ID NO: 426349 - DNA, 404 bp, Oryza sativa
gttcccgatatggaagcacccgaccggtcagttgcagcatcaccatcttaaaagggggctatctaaagaacatggcgcacgtgctgacataaaccaactctcaaccggcactgatcaaagtgtctgtacttgaacagaacacttgtctaatgttctatcactcgatgctcaggactacatggttttcacagaatcaaaaaacgcaaatggcgaccctatcacattgcggcctgacgcacgaagcacatctgctcataaccaatacggatggggcagcatgcaccatgactgccgtcttcttaccacttaaaatagcgcaaggaacgcaacctgactattaaaagatccagctgaattcatgcccattactttagaagaggcatcagaacctctgccacagcaca

SEQ ID NO: 426350 - DNA, 278 bp, Oryza sativa
ctggataagttctgcagataggacatacatacagtgtccaaagaagcatacaaatgaatatacaaaaaaaaaaggcatagagatgcatatcaaagaaaagaagcattgaaatgaaagagagcgccatctgtcctagttgctagggtaaaattttgtttggtttaagttttaactagtgcctgaacaacttgggtcagatccttttggccatgcaaaagtattgattcttcaatagattggtgattcttttggtcccaaattaatattggaaaagaatg

SEQ ID NO: 426351 - DNA, 189 bp, Oryza sativa
atattatatagagaatctgttgtccagacactgaaagagttgtctggtaagcctgctgagcaagtctttgtaaacagggtaaaactaccaagtgattccattgttgaattcttcactgctctttgtggagtttctgccgatgaactgatacagacatcttgcttgtgtattttgcttacaaaagtttgt

SEQ ID NO: 426352 - DNA, 380 bp, Oryza sativa
ttcccgtttccacccgtctttctccaacccggagccgagctagagctccacctgcgccgccgccgccgccgcctccggcgaggccccaccgccacagatccccccgcgacggcgctgcgccggctgctgtacgccgcagagcgccgtcactccgccgccgcggcggcggtagcggggcccggcaatgcgcgcgaggcatccatcgcggtcgtcgccgtggggcccggcgtcatcgaacccgacgcggacccggaccagcccccaatgatggtggacgaccgcatcgacgaggccgttaacgccaggctccgtcagttcttgcagccggacccccgcttgctccggtacgcgagaccagtccccgtccacgccgaccacac

SEQ ID NO: 426353 - DNA, 85 bp, Oryza sativa
tttgcaagtgcacgctttcccacagcggacgggtatgaagttcaattgtgagacgtatactgccccttcgctcttgcacgaactg

SEQ ID NO: 426354 - DNA, 71 bp, Oryza sativa
tttcaaggaaggggagaacttaaaggaggagtcttgattgtgaatatgcgccatgtattatttgaaatggc

SEQ ID NO: 426355 - DNA, 252 bp, Oryza sativa
tatatagtaaagcccctgcacctgccggtaccgaatcccaagtgtcgacccacacccaccctttcgcttgtacctagccgcctgcctcacacgggcggccacgccgaggcagatggcggccgagtcgtcaacaacgccgtcataagggagtaccacttcgtgatgcacgtcctcaagaaccggtccaactccggtgtgcccgcggctgtagtatagcagtcgatctgggctcagactcatcaaggcatcttt

SEQ ID NO: 426356 - DNA, 170 bp, Oryza sativa
ttagagatagggaggaaagctgaactgaagcggccggccccgccggggagaagggaagcccgtcgatctaccccaccgtggagagggagcacctcgtctgtgagcagagggggaggatccactcaatctgccctgccacgaaatgatgtgtggacctcgcagccggggat

SEQ ID NO: 426357 - DNA, 183 bp, Oryza sativa
ttgaggcgtggacggacacccctgccgacgggtggagactctacaggtcggggggctagcctaccccgaaacccaaatccgccgcacggcggacgcgcccggaaagggtcgagcgcgctcatggctcgcgtgtacgcggtgaacctcagatccacaccatacggaccgtgataacgctcacca

SEQ ID NO: 426358 - DNA, 362 bp, Oryza sativa
gcaattccgggctacgacccacgcttccgtttaaaggagggggagaacttcaagtagcagtctagattgtgaagatgcgccatgtatggttcgaactggcagtttcaagatcagcagaattgatagtactgacaggggtagacatgtagagactatagtatagtgctattcgagaacccttcagctgatcttagctaacgcaatcagattgttatgaatgagcacagtgatgttgctagagatgccgcgagcataaagataggatctattaacaaaaacgggaattatctcaatcaacaatacctgtctgtaccaaagaaagctagagagttgcttgtagctgggagccatgctagcaattt

SEQ ID NO: 426359 - DNA, 172 bp, Oryza sativa
tgatttactagctcccacagtcccaactgaacctgatactctggcctgattctccaggtcaagcttttgtgtatcagtgtatgcatatatgcgtgtagatctatcactaactaaacagtatgagcggcatgatcgacaggggattcagcatctggctggccggggttttcag

SEQ ID NO: 426360 - DNA, 185 bp, Oryza sativa
atcacctctacgtccacctcgtccaccatcggtgcgggtcgactagcaagtctgctctacacgtcctccgaaacagtgccgaacgaccatgggtgaccatagggaaatccatcactgctcttgctggagtggaaccggtatggctaaggctgacaccgccggagatgatgcgcccaggagctgct

SEQ ID NO: 426361 - DNA, 87 bp, Oryza sativa
ttggaagttaaacgggccgtacaaaagctaggggcggttttagagataccgtggggatagcgaaacaattgtttaggaccgaggaca

SEQ ID NO: 426362 - DNA, 266 bp, Oryza sativa
tgttagaacatgccagccctccccgaggggctttcaataattgccggtcatggctgcaaagctctacttgctacttaccgtgacctgcttcatgcttttagttctgcatgctgaacatgcggaggcgcgtcccaaacctgccgctataggcgactccgacaacggcatctacacgctgctcgtgttcggggatcagaacggcgacaccggccatctacgcaagcaccgactgagagagcagtgagccgaatggtactacacttacg

SEQ ID NO: 426363 - DNA, 197 bp, Oryza sativa
atttttatggaaaattccagctgcaatatagctgattagactgattgcagatccagtcttggtctggcgaaagcgaggtcagtgcggaaataggacacatgtaaaacggggctaagaggaccactttagaaagcattagcaacaggtgtttcaaagctaaacagacctgaactcgaagccgcttgtgaggacttcag

SEQ ID NO: 426364 - DNA, 114 bp, Oryza sativa
aagagattgggaggagagctgaactgaagtgggcgtccccttcttggagaagcgaagcccggctatctacccgaccgtggagagggagcatctcgtcggtgaggagagggggag

SEQ ID NO: 426365 - DNA, 177 bp, Oryza sativa
tctaaccatacattgaacgcgctagcgccacgcgagacccgagaggtttgcacccttgcagatgcggggtgggaggggtgattgtcatcactcgccgctagaccacgcaccaggtgaccaaggcttttagcgccgcgctgaaatcatcatttctccacacagtcttgaatcaggcac

SEQ ID NO: 426366 - DNA, 219 bp, Oryza sativa
tttccgtttgaacaaggtgggcctccctagaggaacatacagaagctgaagtgcaagaagcatgtttgacagcttactgcttaactgaactagttgtctatgttttaaatatgctctatgctatcatattgaaatgacctgagtagctgtaatgaatgagagaaagtattgcctggggcttaagagcctgaggagttcaaagggagagaaaaggatctt

SEQ ID NO: 426367 - DNA, 326 bp, Oryza sativa
cgcaggttcgagcccagacccacgtttgcgtttgcgcgtggacctacacttaagagcgaatcctgcgttgtgagagggcgaaatgggaagacttatcagagcggggagaggaactagctcacagtgaattagggactaagaagacaatcacagaaggtgaacaccagacccatctttttttgctggattttgtgcacatgacattcatagactcaaagacaggccttcagaggacaatagcttggattgatgagaatgggaagcatgacttgccagaattttttattgaagataagacactgtataggaaaaaagaattgggaaat

SEQ ID NO: 426368 - DNA, 315 bp, Oryza sativa
ttttcattcattgttggaaggaagcaaacaggtgcatacacctgcaggggctggggcgtaaatcacatacagtggaccataataggcacaagcaaagggagaagactgtcctatgtgaagcaatggctattccttctgcctagctaatcgcgaaggggaactgctggacaagggtgagcatcagcatatattcaacttcgacatggatatcatgagcttatatggcaaagagagggtaacatctggtggctcacccgatgttcatcactgtgacgacactagcatgatcatatatttgactagaggacctttact

SEQ ID NO: 426369 - DNA, 252 bp, Oryza sativa
ttagtaactgcagttcaggctgtttgtgatcttggacatctaaatggactaacacaaattcattgttatgcaaaccggcacttgttggagaaagatatatgctctggtaaaaacgtgttacttgattacgtcaagagttgcctgacattgatctgtcttacatgtatgttgataatgcatcaatgcacctcattttgaatcttaaccatattgactcaatttgtcacaaacaattttttctgtgacatatta

SEQ ID NO: 426370 - DNA, 148 bp, Oryza sativa
ttaacgtgtcgagcggattgtttatgtgcgcgtaaaactcaagaggcggacccccaaccccactccgcgatggcaaacgacatctactcaccctttctgctgttctcatactatattactatgttttttatcttttctctttcatcca

SEQ ID NO: 426371 - DNA, 234 bp, Oryza sativa
gtagcctcgagctgaactgaagcaggggaggggaggagagtcaagctcaacatgctttcttcactgcctactgttgaactcaactacatccatttctgctgcctgttctctatgctatcatgtcttattcttctccgttgctatcctgcctagcaacaagcagttgcctgaggctaacgatcattttgatctacaaaagaagagaacatgcattcgtccattactcaactgtaa

SEQ ID NO: 426372 - DNA, 508 bp, Oryza sativa
  unsure (1)..(508): unsure at all n locations
ttagctcttcgtcctaccttcatacagctgaaaaaattccctcatatacaagataaaggtaggaggagggccgggagctcgacggatttcgatcaattgtggtttttttttttgtggnaaccgtttaagagaggagattttgtttaatgcatcttgatcatatttgaatttttttttttcatttttaatgttttcttttgtctgattatttattcttttctctcctctctttttgcttttcttcttctttttttctttctttttatttcttctttttattttatcactcttttacatttttttcatctctttatttttatatttcttctttatttctattatttatttctcctttttttctttttatttctctatttttcttttatttttatgtcttctttaattctttttttttttttctctttttttatttctttttttcctttattattttttcttttttctattaaattttattctttttatctattattttttatttaatttc

SEQ ID NO: 426373 - DNA, 93 bp, Oryza sativa
tctctttttttctccatccctctccccggcgtgcacggatctggccagatgctacggtcgtagggcggaggccgcgacggttaccggcggtgg

SEQ ID NO: 426374 - DNA, 121 bp, Oryza sativa
tcccattcggggcctctgcccggagccgaggtccgacgccttatcgactcactcaccaagtgctcgacgcaattccccaccggggagcccgcccgccatgccggagagcaacggcgccttg

SEQ ID NO: 426375 - DNA, 73 bp, Oryza sativa
tgattatctctctctttctctcggggtgctgggaaactttaacagagacaaccctattttcactctgagatgg

SEQ ID NO: 426376 - DNA, 125 bp, Oryza sativa
taaaaaacccctacattcctccctcttctttgccgcggtgccgacatcgatctatccctaacaaataacacgatgttgtgcgccacggtcgtcatcctccactacatcctcacagccgataatct

SEQ ID NO: 426377 - DNA, 163 bp, Oryza sativa
tttccggtaagctcgcccgtatccagctctaccttcgccggcggtgaaacggaggcaggataggtctcctagcaaaggttctaaagaccatatctcttcaaactggataggaagcttacttaatgaagacacaatttggattgacttttagtgacctaaaccc

SEQ ID NO: 426378 - DNA, 485 bp, Oryza sativa
tggacgcttgggttttgccgccggcgtaaatgttttcgtagtagtgtaccttttcttttctgaaaaaaacattacattatttgaatgacttgaaaaagatgagtgtacgtgcacgcacttaggtcgtaaagagattgtctccattttaaactcggtcactcggaagtatttatgatgttggctgtttgttgttcattccatgagtgcactttcagggaacgtgcagtttttttttcttctgaacatttcaaactgtgctatagtcaaatacaaagattttttttcccgttttattcatccttcaagagtacacaacagatcatgctcaggatttaaataggtttacattatcccgccaagaaaaaaaaaggaaggtttacattacattggttttcgatcttgacgagtacaatctctgaaatttctctcattgaacagtcgtagtcatacataaacataatgtgtactcgcttcatcccataaaa

SEQ ID NO: 426379 - DNA, 91 bp, Oryza sativa
ttccgagcagccacgcacgcggtatgaattggtacgcttgccgagatgatctccctccactccgcccccttaaccctcctcgtaaagcttc

SEQ ID NO: 426380 - DNA, 64 bp, Oryza sativa
  unsure (1)..(64): unsure at all n locations
tgcagcgacctcggaaggtatatgggtantgggtaactttaacacggcgtaacgtgaaccccac

SEQ ID NO: 426381 - DNA, 74 bp, Oryza sativa
tgaaagccagtcttggcttctttgagccccgacggactgtgacggcggttttctatctcttctcttcttgaaga

SEQ ID NO: 426382 - DNA, 77 bp, Oryza sativa
tttccgtcgcatctccctcctcgcctctcgctgccgggcgcgctttaacaagaggaacaaggagaggctcaaaaaga

SEQ ID NO: 426383 - DNA, 54 bp, Oryza sativa
ttatggtgagtccgtccaggagctggaccgtctcgtgctgacggtggtgaacca

SEQ ID NO: 426384 - DNA, 98 bp, Oryza sativa
ttagcactggtctttgttccttaggggccataacaatgaggtagcaactgcattgggatctcttactgatgagatggctttgttgagtgcaggtaagg

SEQ ID NO: 426385 - DNA, 339 bp, Oryza sativa
tatagatggcagggataacggcagtggcactgaagcgcagagctcatggacaaagcgcgctgttgagattgacagtccacaggctatgtctccagatcaattagctgatccacctgatagcacttgtgcacaagtgatccacctgaagtcagatatatgcagcaatagatggttaccatgtacaagcaacaaaaattccaagaaacaaaaagaaactaatgatgacttcaaggggaaggacttggaaataggttctcctagaaatttaaacacagcttatcaatccttttcgaatgagagatccattcttccaacagatagccggattgaatatccact

SEQ ID NO: 426386 - DNA, 638 bp, Oryza sativa
ttttccttttcgcttctctagtctagaccaatggaaggttaccattcgagatgcgaggcgtgtagatgagatgagaggattctttcctcccctctctctttttttcttcttttcctttttttttttctttcttctctctttttcttccttttttttttttttctctctcttcttctttttttctctttttttttcctttcttttctcttttcctttctttttttctttttttctttttttttttttttctcttttttttctcttcttttttttcctttctttttcttcttttcttttctttatcctttttttttttctttcttctttttttcttcttcattcttcttcctctctcttttttttcctttcttctttttctcttttttttcttctttcctacttttcttttttctttttctctttcttctcttttttttttccttttcctttttttctctctttttttttcttttttccttttattttttttccttctctcttttttttttttcttctttcttctttctttttcttttcttttttcttctttctttttttttttctcttttttctttcttctcttctctttctcttttttctctcttccttctctttatttttttttctttcttttttct

SEQ ID NO: 426387 - DNA, 83 bp, Oryza sativa
  unsure (1)..(83): unsure at all n locations
acctacgttcacccttacaagctgngcgaccaggtgtcggacgcggtgatttacaagtgccttgcccatgaccccgactcaag

SEQ ID NO: 426388 - DNA, 93 bp, Oryza sativa
  unsure (1)..(93): unsure at all n locations
taaataatatgaaggttctacagggaagttgggctggttctttttcattagcctctccttaggatgctaggncagatctcaaagagttcccta

SEQ ID NO: 426389 - DNA, 169 bp, Oryza sativa
tttagttttggcgccccaccaccatacctttccgactccgggcgagcatcgccaccagcccaccaccgaaccagtagtagtgagtgctcagtgcgttccactccactccgagctaagcagcgaacagcttgtcgccgacgctctctctctctctctgtagatatggagc

SEQ ID NO: 426390 - DNA, 518 bp, Oryza sativa
ctcaaattagttggactgatagaaaaatattgcttttcaagattgtaaaataaccaactgactgggaagttgatgtcatatgttggaagcaatctgctaaaatgttaaagaagtgcatctaacttttgtacccagtgaattgcaaatctctatctcgtttttttttgtttacagtttctttggttttaaagtaaaataggttgacatgggaactttactagcagaggaattggcttatattcttggaaaaaatacattttttcatgcagaatgtgattacaataatgatacttgctggcatgatttttatcactcatgcccgcattgtccttgatgtttgtatgcagctgggatattatctttatttactacttttcttctctttctttttattttttctttttatttctttttatttacttttctcttatcatattcctttctttttacctctcttttttttcattttattatatttttcctctactttcttcattttacttatcatattttttctt

SEQ ID NO: 426391 - DNA, 558 bp, Oryza sativa
  unsure (1)..(558): unsure at all n locations
gtccccatttccctgttcgtcccactcgtccgctcatccttccgatccaagcaaatcaagcaaggacaagttatttttttgagagagttggccgatctaacagagaagaggaggaggcaanntcctctccctcccttcttccttcttctcttctccttcttctctctccctctctccactttcctttcccctccccttcttcctctctccctttttcttcctttccctctctttcctccctttctctcctctctcctcccctttctcttttctccttcctctttcttccttccttttcctcctcctctctcttccttttccttttttctctctctcttccctttctctttctctttccttctttcctctttccttcctcttttcttctcctttcctcttctcttcccccttttccctttttttttctttttcctatttctttcccttttttcttttttttccacctttttcctctcttttcttctctcttctttcttcttctttcctttctcctctattttttttccctctttctcctctcttcttttctttcctctt

SEQ ID NO: 426392 - DNA, 181 bp, Oryza sativa
ttcgtatctcacctccgaccccgagccgcggggccgcgtataacgaccacttgacgtgccctatctttctccgcctcctcgctcacgagctcgttctcctcttcttcttctccttccacggaagactagggtcatatcttctctcctgtcctctcctcgagcgccaagaaacccaaaccac

SEQ ID NO: 426393 - DNA, 142 bp, Oryza sativa
ttgaaagacacgaacaaaaaaaggggggactggtcaatttataaaggcggtggcgcctccccccagccccgagcagtttctcgaaaccctcgcggcctcgattccggcgatggcggagcccaacccgcaagtggagagggag

SEQ ID NO: 426394 - DNA, 180 bp, Oryza sativa
ctactactgaggttgtaagagtacagcgcacctgcacccccagttgcgtgtgtctcgtagtggcacgcgtgtgccaatgcgaagacctgatggtggaggctcagtatcgaaagccaaggtcaaattgttggtgaaccattctatagttaagcacctacaggcatttatctgtcttctact

SEQ ID NO: 426395 - DNA, 58 bp, Oryza sativa
gtgcgagagctgcgggaagattgatcgcgaggactattttttcttggagccgtatcaa

SEQ ID NO: 426396 - DNA, 77 bp, Oryza sativa
tgtaaccaacaatggccaccatggctgcaaggttgctcatttgaagcgcaatccaaaaattccaacaaatcaaaaat

SEQ ID NO: 426397 - DNA, 117 bp, Oryza sativa
ttactactgctgctactgtgttcgtgttcctctcttggcctctctcttggttcgtgttccttccttctttctttgcgagaaagaaagatgggattctgggagcgctaggttttcctg

SEQ ID NO: 426398 - DNA, 143 bp, Oryza sativa
ttcgaaatccccaacacacacaacgcgaaccccactccgcgatggcgtccgccggcgatcgccgcggcggcggggggcctcccggctccggcgacgactccgggggtggttgggagactgttgagatgagggtaaagaaacca

SEQ ID NO: 426399 - DNA, 394 bp, Oryza sativa
gggtaaacattgatcacaggccaagatattaactttttttagggggagaaattacacccaattacactggcaacaatgccagaaagaccactcccacgccaaacaaaaaaaaaggctgtgggcacacaggaacgaacaccctacagcaccagaggcagtgcaatgcaccacacacgaaaaagggtaaacatggacctccatggattatacgcatgattatgaaacatgaggcagctttcttaaagctcgaaaatcactacaggactgataaggcattaaaccagttctaagggttccagctaagtcatcaaaaagaaaaaagaaagaaggcaccggggggccctcacattcccccttgaaagtgaccagatgcacaaaatgcttacgatcggta

SEQ ID NO: 426400 - DNA, 297 bp, Oryza sativa
tttttgtttttttttttttttgtttttttttttttttttttttttttttttttttttttttttttattttttttttatttttataaaaattatatttaaaaaaaataaaaaataaaaaaaaaaaaaaaataaaaaggaaaaaagaaccaaaaaaaaaaaaaaaaaaaaaaaaaaaaagaaaaaaaaaaaaaaaaaaaaaaaaaaaaatgaaaaaaaaaactaaaccatgggaaccaaaatgacaatcaacgtaaccaaagctcctgaaaaaaaaagcatggaaaaatacatcccttc

SEQ ID NO: 426401 - DNA, 114 bp, Oryza sativa
taccgtgccgctcgctccagcatggccgccgtgccgttgtgccacctacgaccacgacatgaccggcacggatgcaagcggaaaagacggcaacctattcacctaaattggtta

SEQ ID NO: 426402 - DNA, 447 bp, Oryza sativa
ggggctactctaacaccacaaaatcttccccttgagttgggattcttactatgaacatactacgtccaaaccgagataaatatacacgtctaacagaatatctaaaccgagagaaatcagaaattagaaagagaattcacatcaacattgacacgggtggttttcgcgctgcaccaatcacgaagcacccaagcacgaatctcggagcgccgatgcctaaacgcatttgagaaaccgttccaagctcgccgccgacgacccggccggaccctaccacgccgccgccatggtgcgcgcgatctgccccgacttcctcctcatcgcctcgcccttctccgtgtacccgattaccgtccccacggcctaggtcacctccccactttgcaccgacgagctgtacaggttcccgggcgccacctgcacgcacacccccgagtgcagcaccac

SEQ ID NO: 426403 - DNA, 419 bp, Oryza sativa
tgttatttggggtggttgataagctcaccaggtaaaaaggtagaaaccatgtaaagaaaacttccttcaatttagtttgtatgggcattaataagttacctaaaacaaatactaagaattttgggtcaaaaggtatgctttctccacataattttgatgtaagagtgatatggttcaacccataactctttttgatatgggtgttcagttgctacttttcttcttttttgcagaaaattaatttggcaagcacttcattttactgctctgcaattgcttcacaggtaacattcatgctttcaagtatgtactgttcattcatctatgcacatataaatgtgaattttatactgcagaaatagctcaccattcagtttcaatagtttatgttaatgtttcccgataacattggaaccatg

SEQ ID NO: 426404 - DNA, 350 bp, Oryza sativa
actgattaatatatatcattaccagcagttctagcaaaagcatcagccattcagccccagcacatcatttctaatacctgtgtgctccaccgtccaaatgagcttccaaatatctatctaaattattcttctattaacaggacagaaaagcatattacaaggctacaattgccactgaagcaaaaactaataagagatgacagcaaataaaaagaaaaaaatgtgtgataagtagctctcattggatcgcatctaaggtctctttcctcttaatcctcctcttgatctccttctccagcttcttaatcccacccaccttcttcagctccttgggaccaaggaacagccca

SEQ ID NO: 426405 - DNA, 263 bp, Oryza sativa
ttctgtccttgcttagtcggcagaggagcggaccaaggcagagcgcgcgctggagggcgtggcgccggtggtgaacatccggcggtcggaccggtggtggagggcgttcttgccggagggggccgaccggaaccacccggcggcgcacgtcaccggcgacgcggggccggagcccgagctgcaagaagcgttcccgccggcgatggtggtcgtcaggggcctttacccgctgccagactgggaccggaggtacgccttcatgc

SEQ ID NO: 426406 - DNA, 202 bp, Oryza sativa
ctactgcgcactgggccgtgtactcatccacactagtgtgacaaagtatctgaatttcaaggctgacaacgacatgcttgtgtacaacaatggctagatccccaaagtctccagcaaccgatgtactgtactctcctcccagcggtggccccgccacaagaagcggtcctagtcccccgcctgcgttctgccactctccggc

SEQ ID NO: 426407 - DNA, 385 bp, Oryza sativa
tgtaagagctgcattagacactcttccgcatcaacctttgcctacaaaggatgataaaagctcacagaaccgcacgaaggatggcagctcaggtgatgatttcaacaaagattcaattgaacgtgatgataaacgacttgtagagcttggctggaagacactggaattttttgccttggcccatatattcagccgaatagaagtggcataccaggaggcagtggctttgaagcgccaagaggagctcattcgtgaagaggaagctgctgggcttgcagaaattgaacttaaggcaaaacgtagtgctgctgagaaggaaaaacgcatcagaaaaaagcaggcttaacagatgaaaaacaagtcggaaaataataaagggaaaaat

SEQ ID NO: 426408 - DNA, 148 bp, Oryza sativa
ttagagttttttttctcggggctagagatatatcccaaaccccaaccctcccaataatccgatctctccaagttttgttgggatcaaggttgtgtcgatcgcaaaaaagaaaaaaaaaaaaccaatttccttttgggggggttaatct

SEQ ID NO: 426409 - DNA, 468 bp, Oryza sativa
  unsure (1)..(468): unsure at all n locations
gtggtcgccgagactacggctttaaagccagcgaggcgaggaggagttcccccaaacacttcagtagctgctactgtagccagcagcggcggccatggaggacacggcggcggcggtcgagacgccggtgacggtgtccacattcggtgtatccaggcacccggacacggccaggctcgtgctgagcagccccaagccgccaggcgtgcgcgaggagttcgtcggcgtcgtccgcaaggcgttccggccgcgggcgagcggcggcggaggagcaggccgtacgccgcggcgcgggggngggtgggccctcacggcgctgcagaccgtgttccccgtgctgcagtggngggaggacctacaacttcaagttgttcaggagttgacgtcatggcaggcctcactcttgccagccttggaattcctcagagcattggattcgccaatttggccaagctggaccctcagtat

SEQ ID NO: 426410 - DNA, 298 bp, Oryza sativa
tcccgaatcgaaaccccaccatccgccgccggtgccgtcgtcgccgcgacacctgacgccatggaccccggcggcctgcgcccagcgccccagtcggccgacgccgtcgccgtcgccgtggctgcgggggcgggggcgggggcgtccgcggcggacgagccccgcgacgcgcgcgtggtgcgggagctcctgcgctccatggggctgagcgagggggagtacgagccgtggttggtgcaccagttcctttgactggcgctaccgttacgtctgtgacttgctcggagacgcccaattt

SEQ ID NO: 426411 - DNA, 75 bp, Oryza sativa
tgccgttcttgcgtcctgcagctctctctcatcacagtttcgctttggccaaaaaaacaatactgcaggtggttc

SEQ ID NO: 426412 - DNA, 134 bp, Oryza sativa
gtactattttagcccactagccatcatggagcagaagcgttaggtcaatcgtcggcgccggcgcgagcggcctggccgcgtgcaagcaactgctggagcgcggctgccggccggtggtgttcgaggcggacacc

SEQ ID NO: 426413 - DNA, 88 bp, Oryza sativa
taccgtgcacattctgaggagattcccctgggcccctttttattttaaatacctttctcttccccccccccccccttactcctttcta

SEQ ID NO: 426414 - DNA, 103 bp, Oryza sativa
ttcttcttcatcttctacctttgatagtttgattgaggtgttgttcctttgagtgcagcaagaagctcaccattttgatgatagcttaaggatcttgccaaac

SEQ ID NO: 426415 - DNA, 370 bp, Oryza sativa
  unsure (1)..(370): unsure at all n locations
ggangggggggtggagggggctaaatcagcttaaatttccccttttctgaacccatcctttacaaaacacaagctgccttccccaaatccaggccacgggggttacatttttccttttggtacaccagccggtttacaaactgaagaagatcgtcatccctctggaatcctattaatcagcctcttcatggggattccccaagtactggaatatccacctttaatgcagctgcacctccttttcaccattcagaggactcaaaatcggttcttgcagatactcgacgatattcttggccacctctttggccttctctagattgactgcatgcccagcttttttgataaccaccaatcgggatttctcccc

SEQ ID NO: 426416 - DNA, 57 bp, Oryza sativa
atgaaataagcagagagagagagagagagggagagagattaatattaaacagcaatg

SEQ ID NO: 426417 - DNA, 105 bp, Oryza sativa
taccgatcacagtgctcaaccgtcgcgtccggtctgggttcttttacacagcaggtcccactactcaaacagaagattaagatagccaaagtccagataatgaat

SEQ ID NO: 426418 - DNA, 53 bp, Oryza sativa
ataccacttcaaattggtcggagaagaagaggtctgttcgtgcatggggaagg

SEQ ID NO: 426419 - DNA, 78 bp, Oryza sativa
gtcagagattccaaagaaattggtggttattggagcaggttacattggtctggagatgggttcggtctgtatccctct

SEQ ID NO: 426420 - DNA, 227 bp, Oryza sativa
tttccgttcagattccggcgagccctcgcccccgacccccaaattggccgcggatccgagcccccctcgccgccggcttccgatcggatagtatggtgttttcgcacaacaaaaattccaaccagtttgaccctcttttttatgttaacctgagtggactagatgctgacagtcaatctgtttcatttactgacatgaactcaagagatgctccttcaaattcacat

SEQ ID NO: 426421 - DNA, 146 bp, Oryza sativa
ggtagcttcccgcggcaatgcaacgagtgctccgcgcggcggcggcggggattggccacgcgtcgggccaccgcgcgccgaggtggggcgcggcggcggcggcggcgaggtggctgagcgggggcagggaggcgatgagctacgac

SEQ ID NO: 426422 - DNA, 99 bp, Oryza sativa
ttacactacaggtacaagtcaaaagggtcgaggcagcttcaaaaagaatggagaatcttgcagcatttcctatgggtctggatcaatcgctggcttctt

SEQ ID NO: 426423 - DNA, 124 bp, Oryza sativa
ttacatgttacttgaacttcctctaaaagccggtcccagattctcatgggagaattcatattaccgaggtatatgatgatgatctccaatgaaagcccccccagagaaccctaaaacgggcgaa

SEQ ID NO: 426424 - DNA, 90 bp, Oryza sativa
taaagatattcattcttgctgttagaccttgtgagcataatgtggctagccgtgactccagagcaccacatgcacacacatttgatggcg

SEQ ID NO: 426425 - DNA, 82 bp, Oryza sativa
ctgcgccgccgctgcacgctcccgttgcaggacgccgtcgtcgactccaacgactcgctggccaccgccaacagcaccaacg

SEQ ID NO: 426426 - DNA, 88 bp, Oryza sativa
ttcgcaggggcgtacggcagggcggacgcgctcgtcaagttccccggcggagaggcgctctccgtcgccgccatcctcgaggcgccgg

SEQ ID NO: 426427 - DNA, 537 bp, Oryza sativa
ttcgagaggagaggcgtcggggcggggggaatggcgtcgtgggaggagcagctgcgtgacgagctcgccggccgagacctcgtcgtcgcctccgtccccggtaagggccttgtccttttcgccgttcgcagtttcttcccaggagaagtcgttttttcgtaagatccttactctttctacatcattctttatctcctctttttctttctgtttcatttttttctttttctatatccttctgtttttcttcttctttctttttctctttattctttctttttttatctctttttatcttctcttttctcttctttttttttttttttttctactttttattttttttcttttttccttttctattctttttcttttcttttttttttttttctttttcttcttctttttttttttcttatcttttctttttttttttctctttttcattattctttcttttcttcctctcttctttctttctctctttctttttttatttttctattatcttctttttttttctatttcattttcttt

SEQ ID NO: 426428 - DNA, 79 bp, Oryza sativa
ttttcaatctttctttggcttggggcttggcttggcgttttcttttatcgagcaggttcccccaaatcttagggctagg

SEQ ID NO: 426429 - DNA, 106 bp, Oryza sativa
tcctccaccgcctggatgccgcccggggagcaggagtagcggttaatggccaactaccttcctccgcgggagcgtgcgtcgtcgtcaccggggatccccacccacc

SEQ ID NO: 426430 - DNA, 103 bp, Oryza sativa
ttttcgatcgtgtcgccaggcgcgccagcactggaccgtgttattttatatcctagacatgctcatacccgacaaagaacatcatttcataaatattaaaagg

SEQ ID NO: 426431 - DNA, 151 bp, Oryza sativa
gtttctcatctcacctgctcgcaatggcgagcaagaagagctcgacgcaggcgtctcccatggccgccgccgccgccagccttctcctcggtctcctcctcgtcctccccgtgccagccgtctcgtcgtcggacgcggatggaggcggtgg

SEQ ID NO: 426432 - DNA, 150 bp, Oryza sativa
gttgcctgagccgcttcgggatcgggaagcggaggagaggggaaggaagggagagaggcatgcgacccgtccgcgcagcttacctcctttcgtctctgtctctctatccgacgctcctccctatactctaccaataccactacttccctt

SEQ ID NO: 426433 - DNA, 135 bp, Oryza sativa
gttatctttatacagatgcgttcctaaaatcccggccggagtgccacttttacgcgcggattctagctccatgccgccggtgagggttgtaagatgcagacagacgcctcccgtacagtagaattgtataggcag

SEQ ID NO: 426434 - DNA, 223 bp, Oryza sativa
cttgttttcaaacgagtgagaaatggacggagccgaaggagacatacagacctggggccggccgccctcctgaggttggcccctctgtccgtcgtgctctcgagcatgatcctgtccacaacaatctacgccacgcgaccctagaagttcctctgcggtggctcggcatccatcgcccccgtcaacaacaagaacaacaatatcgacataaacgcagaggatg

SEQ ID NO: 426435 - DNA, 349 bp, Oryza sativa
tttgtttgattcactttttcaccactcaactacgggggggcaagtaaaagtaaggcggcgtggttcgatgcaccgataggcatcgccttcttatcttgcgtttagagccacaccctagtaccttgagatccgagacgagtggtctctgaacctggaggcgcctatggttggcaatccgggactagatctaccggtgctcttcccacaccatgtacacagcgtttctccgcatggtgtgctgtccagaatgtacattaacaccacttaaagattctctactccaacactctatgcaaccagaacatgctgcaagtgcagcacaatcggactcaccctctgcgaggagggc

SEQ ID NO: 426436 - DNA, 128 bp, Oryza sativa
gtttgcttcagtggctacgatctctagcccgggggggctataccaagcactacggtagtctcctaatccaaatactatatgtcctatcgtgtgcgtttctaaaacgaaccttccgtatggcaatcctg

SEQ ID NO: 426437 - DNA, 486 bp, Oryza sativa
  unsure (1)..(486): unsure at all n locations
tcggtttttaaccccgtccactcgccgactcgggtgtgctcctcgctcgccggcgccggggcgggagactccggcgagcgcgttgacgtggccatgtcggggacggtgtgcttcccggcgggggagatggcggccgtggcgagggtgtgccgggacggggcggcggcggcgaggctcaagacgggctccctgctcgccatcctcgtggcgagcgccgtcggcatctgcctccccgtggcgctcacggggtgcgttccgcgggaaggccgggtacgcgcgcggcctccttctcgtcaagtgctacgccgccggggtcattctcttcacctcgctcgtgcacgtactacccgacgcgcacgccgngctcgccgacccaccaaccgtactccccaatccccaccaccaagaagtcccccgtcgtcgagcttctccgcgagatgagcctcaagaagcgcgcgcactcagacgacacggaccgggacgacg

SEQ ID NO: 426438 - DNA, 122 bp, Oryza sativa
tttttatatcactggtcactgcatcaattaccgggggggagaatttgaaatcttccgcggttataatccaagcaggatccaatacctcctcctaactctatcgtgaatcactccattaacat

SEQ ID NO: 426439 - DNA, 320 bp, Oryza sativa
cttaattctccaccgaatcgaagcccccacacacgctgagctggcgcgggaggcgggcgacgcgagcgcccggaagcgcaaggcggcggacggcggcggggagggcgacgccgcggcgacggtcccggaggaggcggtgatgggggaggcggcggcggcagccgcggcccccgagccggtcgtctaggggggaggaggggggggggattttttttattctaaccctttcggctgtgtgggagggggtgtgtgatggttctttttcttttttttgttcttgtttttttttttttatttactttttatttttttgtcttttg

SEQ ID NO: 426440 - DNA, 156 bp, Oryza sativa
tttgcttcgaagcttctctcctctctctcaactccggggagaggaggaggcggcggtggggcgttcgtcgggagagagaccagggccggggggctagggttcggccgttcagagaggcggcggctgaggaggaggaggaggaggaggagggggtga

SEQ ID NO: 426441 - DNA, 260 bp, Oryza sativa
  unsure (1)..(260): unsure at all n locations
gttccgatagcttctctcctctctctcaactccggggagaggaggaggcggcggtggggcgttcgtcgggagagagaccagggccggggggctagggttcggccgttcagagaggcggcggctgaggaggaggaggaggaggaggagggggtgangatatatttctactcctgctaggaagcggctgatgcgggacttcaagcggctgcagcgtgagacccctattaaccaagggagtaccatcactattatctgctttt

SEQ ID NO: 426442 - DNA, 101 bp, Oryza sativa
atcagtttaggcacacggttttttttctatcccagtctattggttcatttaattgggatggcatgtcatctcttaagggatattcataattcaccgctgtt

SEQ ID NO: 426443 - DNA, 463 bp, Oryza sativa
  unsure (1)..(463): unsure at all n locations
aaccatgagtgggtaaaacagtaatttgactgaacactgctgcttctttatgtctatattatacatcataatggatctcacagtagcctatcaaatggaatcaatatcaccaggactacagtgagatacagaagcagcaatgctccagctggcccacaaaggccaacctgatctttttcttcagtactgtagtgcatacattacaagttaccctaaaacaagagaaatgaagcatggaaatactcttggaattattccttggattaaattctaggcttacaatgttttccctattcggtggtcgtggcaactctagatcttctgcttgagcacttgccggagctggaccttctggctctccatccgtgcctccatgagcttggatttcaggctgtgcttctgggatgtccgtgggtactccatgcagcccttgaagccccngttgaattgcatgctcattgaa

SEQ ID NO: 426444 - DNA, 482 bp, Oryza sativa
  unsure (1)..(482): unsure at all n locations
ggatgaagtcggccgtgcaggcgcggaacgcgtgggcggcggcgcactcggcgtacgccatgtcgctgcgggacacgggcgccgcgctctccgagttcgcgcacggggagggcgtgccgccgccgccgccgccgccccaaccgccgccgctcccggagttctcgccgtcgcccgcgaagatccaccggtccaagagcatgcccctgcccccgcagaccaagggccccgcggtgctccacagcgactcgattagggaggatgacgaggaggaggcggagatagaggaggaagaggacgaggacgagcatctcgatgaccggcggcgganggctgcgtcaccggccgcaggtaccgccgctcgtgtcttcgcccgcaccgggaacgccggtgacgcctcagncgncgtcgtcgncggcggcggcttcaccggactcgaagcccggagttgacacgtgggactatttcttctccatggacgaggg

SEQ ID NO: 426445 - DNA, 466 bp, Oryza sativa
  unsure (1)..(466): unsure at all n locations
tcgctgggctccggtatctggaggcggtgaacggtattgtgcgcaaggacagcgtcgcgagcctctcgtcgacgcagaactccgatggcgggccgcctccgccggcgccgacttcgggtggtggcggcggcggcggttctccgaccgcgctctcccccacctctacttgctcgaatgatgccgcgagatcggcgtttggtgtggcggcgccgccaccgcttgtcgatgtgttcagcaatgccgctgctccggctcctgtccctgtgaagccacaggagattgctgctgaagtgagggctccaccgcaggcgaatccacagccggaagcagcgaggtaccggcagccgctgtcgcagctaccaccgttgccgcctgtgttcatgaacgatcatagggaggccatgcaaggtctgaatcaggcgatgccaggaaatggnggaaggctggaagactgcaatatgtgctt

SEQ ID NO: 426446 - DNA, 94 bp, Oryza sativa
gttgatgaaggacctgaggtggtggtcgaggtggaggtttttaaatttgtgggggggttaaaaccctcaataacaactgcaagcccctgcacta

SEQ ID NO: 426447 - DNA, 430 bp, Oryza sativa
  unsure (1)..(430): unsure at all n locations
gttcatgctgatagcaggaaacgacgccccattaggcgccttcctctaggtgcatggaagaagctaacttttgaggtgggcgcgtccgaaggaaaggatatagatacagctgttgtttcagaaagggtgcagaattagcctccattgatgggaaaaaaaagggcaccgtcaatcctgctggtgctcagaggacaagagcttcctatatgaaatagaagctacaatttcacgccatcggtcttcactggcaatggacgcgtttgaatcaagtccttagttatgtgctctgctcttgttctgtgattcttgttcacgcgaaggtcactgactttacggtattggagttggagtagaagatcagctgctccatcatcgacgatggcctgatccacaaagatgaattntggtgctgatactttcagggagatac

SEQ ID NO: 426448 - DNA, 458 bp, Oryza sativa
atcgaatccaatccgaattccccccccccccgcagctctcctcccctcctccagaaatcctaacccccactccccatcggagagagatcgagaggtggttgccatggcgaagtgctcctcctccgacgactgggtcatgctcgactccgacaaccccgcggactcctccgacgacgacgactacgtcctcgcgctctcttcctcctgcaacacccccgcctgctccgacgaagaggaggacgacgacgacaaggtggggagcgacgctgacggcgacgacctctacggcggagaactcgaggaggaggactcgccgcgcccgccgccgccgaggccgctctcgggcctcttctaccacaccgcctccgacaaccagcccgggtacctcgccttcgacgcgatccgcagcgccaagcacctcatccccgacccgcgcttctccgccttcccggagcacg

SEQ ID NO: 426449 - DNA, 544 bp, Oryza sativa
  unsure (1)..(544): unsure at all n locations
ggttctcacctcctccccccttgacagtgcggacgccaaaaccaccgctaactcccacctctcgcccacacctccctgatccgatcccttcccccctacaaccctagccgaattccgcctccgccgcgatccgctcgtcccgcgctccaattccgtccttcatccgctctttgttttttttgcgattgtttttttgggtgcgattggtttggtgatccgcgtgttagggttcgggagtcgccggggcgggggtttgggtggtggattggaccggtaggtggccgggagggttggcccttgtggtttcggggtttggtttcacccgccgcatgtggagaatcggaggacctgngagaggttagggttagggttatggggagcacggtggagcccgaccggagcggcggctcagtagctccgtcgcgcccggcggcggggcccctgtttctcctgccaagcggctggcggntgcacccacctccgaagataagaagctcgattttactgtactcaaatacaaaaaccaaaagctctcagagcaact

SEQ ID NO: 426450 - DNA, 328 bp, Oryza sativa
gggggaaaaattgggaagattttgtttaaaacacaattttaacaacaatttaaggccccagcccgtttaaaaacaaagggcaaaccggccccttttggcaaggggcttttcccgtttaattgccccccgaaaaatttttttggggccgcccggagggggcccaatttggcttaaaaaagaattttttagggggtaaaaatttttaggggacttaacaaaaaaaaagcctcccggtttggtacttaagggggggtccccctcttgtaaacagagccggcccaaaagctttgggggatgacattgtcaaccacccgggtccccccttttt

SEQ ID NO: 426451 - DNA, 374 bp, Oryza sativa
cagacgagggttgatattagatcaaacagtctgactaactgatgcttcagttaatcagttacactttttttaagaaaaaagaaacatagttttctcacactttggctaataactgactgcatggcccatccactcatccagtgccaagttagctcaaagaattgacaaggcatccaacctatccccaaataatagccagtgcatgtcactgccttgcccaatactgaactaattggagtttgttgtgccctacttttttatgttgaagtgtaggcatcaatggagattcaagtactacaaatataaccaccacttcaaattcttccctataaagttaaagcatcccctatatctttatagagttggtatacata

SEQ ID NO: 426452 - DNA, 67 bp, Oryza sativa
aaaaaattaattgagttcttctctacaccaacagtgtaaggcttactatacggtatacctgcattct

SEQ ID NO: 426453 - DNA, 200 bp, Oryza sativa
ttttacccggacccaacctaccatgaagaaatgaatacaccaaaatatacgcgaaaagaagcaattggtgtacaaccatggcagctgaagctgctacacctattagggacttggggggcaaactttcctaaactagaaacacgaaataatcattttacctgcaacatgcatgaacgtaccatattccttattgtctcaag

SEQ ID NO: 426454 - DNA, 52 bp, Oryza sativa
cacaaagaaggggcacataaacaacacaggtttcagcagccgaaagcttcaa

SEQ ID NO: 426455 - DNA, 90 bp, Oryza sativa
ttttcccccgcgggaggaagggtcaagctctaatggggtgatgttaatcctgtaaccggtgattgactcgacttgctgactaccgaactg

SEQ ID NO: 426456 - DNA, 213 bp, Oryza sativa
gtggcatagcgacaacattttggacccccacccttttttggccaaccccaaaaatagggggggtttgggacaatggtatttttagggggctgactttattgtcatcaggaattgttttggggggtggcctcccttttgggggaaaaaaaaaaccggggggggccgagaaccaaggccaggggggggaaaaaagcgcgggtttggtccccgggg

SEQ ID NO: 426457 - DNA, 102 bp, Oryza sativa
tttttcccccggggggaatggggctaatatttttgcttcaacgaacaccggctttgccgaaactaacagcgcccacttggtttccttccaagaaaaagggcg

SEQ ID NO: 426458 - DNA, 93 bp, Oryza sativa
tttttctgtttttcccctccggggttatatttttatttttgttctggtctgcttatattcttcattgctttttttggtgactcatgcccccat

SEQ ID NO: 426459 - DNA, 83 bp, Oryza sativa
aaaaaaattgtgatgaaccacttatgatctaaaaaacatttttttactacaccggcccacaaaataagaacgaggcaaaggtt

SEQ ID NO: 426460 - DNA, 92 bp, Oryza sativa
ttttcccgccacgggaatttcataattaaaattgttctgatcagcttatgttccacctagcttttattgtataaccaagcccccaaaggggt

SEQ ID NO: 426461 - DNA, 223 bp, Oryza sativa
ctttctggttttccccgcagcgaaaaatactactagaatgttacaacttgcgggcttggattattgcgttataagacccctacgctatagccgaggcacagcaacttatctgatattctactggcccctaccttcacaatgacctgatgatatcctagtttacaacaacgcatgaagcctttttagtgtcttttactatacaatgtgaaagcctgcactgacc

SEQ ID NO: 426462 - DNA, 323 bp, Oryza sativa
acaacttacggtcggcaggtttgttatgcactgaggtaatgccaatctcctttgcagtggtgtatccctgttgctgacgaccaacctgggcacgcccttcctcatgggaattctttccgggaagacctcgtcagggatgtctgcaagcataggcgatgtccaaaatctagggctgccctggtaaaccatgtttaggtcctagcttgctaagacatatccaatggatcaagatccttcactagtcagatccttccaagctcttgtccagtagatactttataagaactttttccgaaacttgagcagcctgctgcctgggtagg

SEQ ID NO: 426463 - DNA, 107 bp, Oryza sativa
atttatgaaacttctacaataggactagaggaacaccttacatggagggattgacacttttcacagtaacaggagtctggagatcgaggcacgaacaaggacaggca

SEQ ID NO: 426464 - DNA, 116 bp, Oryza sativa
tttcgcgtttttcccccagggggccaaattattctccataacggattcggccctgattttcaacacaattttaaaagggggaggccggatgcatcccggggaccatctaaatgcac

SEQ ID NO: 426465 - DNA, 141 bp, Oryza sativa
tttttgcgtttttcccctccgggtttatataaagctgggtttggtattatgcccacaaaggtcattaatctctttaaggaggggaacacccgggtggatttacacaggggagaagttttacacacaaacgacacttatttg

SEQ ID NO: 426466 - DNA, 117 bp, Oryza sativa
ttttccccacgggggaaaaacatttttaattggtcaggtcaacatccgtcccaaaaagccttttttcgggaccaaagctcacattttgttcaaaactcgaccatccatacggggggc

SEQ ID NO: 426467 - DNA, 165 bp, Oryza sativa
ttttccggtttttcccggaaacggaattagagttttaacagtactaggctctgcctatacgacaaacaccttttgcacgggcctgaagtagaaataggacgccacgtttaggtcggacatgccggtgccagacccgaatatgcaaacgcttgaagaacctttagt

SEQ ID NO: 426468 - DNA, 118 bp, Oryza sativa
agggggataaaagactgcaaaagaggatattggaccgatgctacaccatttttatgtttgatacggacactctcatcctaaattacggcactgccaagtgcgatacactttgtccccc

SEQ ID NO: 426469 - DNA, 125 bp, Oryza sativa
tttttcccacgggggtttttgtatcttgttttcttttttgatgtacacccggttatcttttttttttttctttgatcagtcttgcatggggcggcccttcctttttttttttggtgccaaaaggc

SEQ ID NO: 426470 - DNA, 305 bp, Oryza sativa
tttttgccgtttttcccttttcggttttttttttttttctcttttttttttttttgtccaataattttttatcccatcccatgaccggaccatttacacgaagcggtttaagattttgataaaccgcctatgtgaagagtctcagcactcttgatgctcttccctatcccgggagagacaaaatcaacgtggaacaagggggctttggtcccatgctgtggtctcagggggccatgtccccctggaagaaaatgccacgggggcacgtgaacttgcactatatgatggccaaggggtccatagaa

SEQ ID NO: 426471 - DNA, 149 bp, Oryza sativa
aaaaagtagtcgacccaaatcacggcctcacgtgctgtaaacattgaagccagatgtcttcagctgggaggagaacgtacttgctttgcgcgtaaacattcttgtggttctagtcctcttactagtaataactttcaagctagcaaggc

SEQ ID NO: 426472 - DNA, 115 bp, Oryza sativa
tttccccccccgggggtatagaatcataacaggcaccatatgcttatgttccaccaagctttatttgggtaccagagctcccaggtggcttgtggctcctctaatgaagattggg

SEQ ID NO: 426473 - DNA, 248 bp, Oryza sativa
taaaatttcccctttttccccaaaggggttaacaacatttaatttactttccactgattcatcccactactgttctgtaacgcaaaaaccttcaaaaaagcagcacttgtgcatgaaatcccttggaattgcaatatggatgcaaaactgcatctttagatgctagcatatctgacatagtgcggcaaacagtttagtaccagagcgctgaccagtagcaatgtcgctgagacagaatgaccgaggct

SEQ ID NO: 426474 - DNA, 117 bp, Oryza sativa
gggggagaaagaccatgaaaggcacactaagcctgcgggggtagtaacttaactttggcaaaagataaccggctgcaaggagacctgctccatggtcagggggtaacagcacctttg

SEQ ID NO: 426475 - DNA, 193 bp, Oryza sativa
tttacccggagcatgaaggtgccaaaggattacatgatagtttatttttttgggtgcttgtttcattggttctgaacagaattacattatgcagtacagtctcaatggtagcgtacataatttacatacaggtttcttagggggtagtacaaagtacgtgatactagtgcatgtagataaccctaacacactg

SEQ ID NO: 426476 - DNA, 272 bp, Oryza sativa
ttttgttttttgatttttttctttttttttttttttttttttttttttttttttcttttcttttctttttttttttcggggcgccgatttatgggggggttaaatttgggggcccggaagcatcaaattttgccctttaagggggggtttggaagcttttggggatctttgacccctggaaaggggggtaaaaaagtgttaagggtgaaaacgtaaaggaggatacgatcgggaggccccaaaatgcccgggtgggcttactagggggcccc

SEQ ID NO: 426477 - DNA, 411 bp, Oryza sativa
ggggggacgacggtccttgcccgtacgaatatcccggttgcaccgatctgcctgctctcctagatcctgtacactcttaatgaagacctccagcttttgcttgaactgctcaaccccaaactatgaccgcctcctcatactcgctcagcgaagctctacgcagaacgatcatgggggctagatctaccaactggcacaccgggtgagtgaggcactcctgtatacgtgtaccaatatcctctgagggcaagtgtaatcgtgccccgacctgtcgttgccgccttacacaccctgccttcctgtacctacgtgagaggcgcctctgataacccctttcagttagaagaattcgatccactggccccataagaatcccaccggaaatggaagcaggctgcggccaatgccggc

SEQ ID NO: 426478 - DNA, 72 bp, Oryza sativa
  unsure (1)..(72): unsure at all n locations
aaaaatncctttttttttccttttttcttttttttggccttggaatttggccccccccatggggggttttcc

SEQ ID NO: 426479 - DNA, 100 bp, Oryza sativa
aggggggggaagaatatgaggagacccataatgtatttagggtggggagaggactaaaatgttagattagccccaatgacagttacaactgaaaatgaac

SEQ ID NO: 426480 - DNA, 219 bp, Oryza sativa
attttgccctttttcccaccaagggtaattaaaatacgtacaccccgaattctatctagacaagaaaaaggtgttcaaacattcataagaaaaccgtacaactaggctgacatctgacaaagcatgctaaataagcataccggtttgagaaaaataataatttagactatccctgacagtgccacagccatgcgcctggagctactctaattagattcc

SEQ ID NO: 426481 - DNA, 374 bp, Oryza sativa
tttccccctccagggttggattgaccgtattgcatacattgaatgatggactgctatacttgtacatattcatacaccaagaacatagtttatattgcagctgctgccatacccatctggtacctgttggagatgatggtcctcaagatccttgaagaggtcccttggcacttggagctgcactgcgaacgcgagattctcgggtacccttcggacttggagatccgacgcacgacatccgccggcgacatagctccgggtaacgacgcctttgctcctgcgtccccgacgccttcgctcttccggtgcctgtaacctgcctttgctgaagtctgagtgttggccatctccccttagctgccccagtcacgacc

SEQ ID NO: 426482 - DNA, 209 bp, Oryza sativa
tttcccctaggagggttattcaatgttcaggaaaaaaaggtttagtgctactaatgggtaatttgcatttaaagggcatttcacagagggggttgcacgtgtatatgatcccggggaaaatttcacctgtctctgagccctttatataagaaaattttcacatgtatgcataactttgtgtccttcatacacctcacttgttcatgaaa

SEQ ID NO: 426483 - DNA, 109 bp, Oryza sativa
ttttcccccggggggaaaaaggacctttggtgacaaatgcaccggttaccccgatcggggcagtttaccacagcctaaaagcttacctggaaaccgtcggcccgagggg

SEQ ID NO: 426484 - DNA, 76 bp, Oryza sativa
agaatccagataatacatcaagcaaaatcacacaccagccataagtgcttccatctttagcatcacagcctgatag

SEQ ID NO: 426485 - DNA, 393 bp, Oryza sativa
ttcccaaggggaggagggttattacatcgatcaaatcacatctcttttatacggatcctcatttagcaatgtgccattggatctgtttcccttacatgtggcccagtcagtccctattaaggccactcactcccgtgataggccggaatgggccgaccgttcacgacgcgacatttctgaggcccatcttggtgccgccgaagaagctgcatacggttgactaatcaggcaacataaggtgacgatgccctcgaccattctcgccctgttgagacgaaactttgaccccaagcttcagccaatggaaagcgatgacccatctcttgagcattctccgaggtgatcacctgaacatctggaccacaccaagcaacctggacaaactgcaccatt

SEQ ID NO: 426486 - DNA, 126 bp, Oryza sativa
tttacccggaggggggagcaaagtctacagcaaaaaactattggccgtacattgcaggtacctgttgcattaacttcccttcaaggctggggggacaaggctgtactttgcgcctaggttttgcca

SEQ ID NO: 426487 - DNA, 230 bp, Oryza sativa
tttttcgcctttttccttttacaacagaactggagaataaatgtttggccagctttatttgctcaagataagccaactttaagggaaagaacaatggagaagtcattagatgtgacataagatcttagaggaacagctaaattaatcataacaaacgaacagcaattttacaagtatttcatatagagatatgacaatatttataagaatctacatgagcaggaagaaag

SEQ ID NO: 426488 - DNA, 130 bp, Oryza sativa
ttcccgtttttcccaggcgaggaacatgaaacaataaaatcaacttatctggggatccgatttgttccagattccatatgcaaacttgcttacattgcaagggcgggctatggcttttgaaaggaaggac

SEQ ID NO: 426489 - DNA, 158 bp, Oryza sativa
ccccaagaggaagacagggggcttactgaagcagattgaaaaataaatacaacacctatctggttcaagctggacgctaatcatgaaagcatggaggttattggcccaaatgggcagactaagagggctttgtgctggggggattaaaaaccttgaca

SEQ ID NO: 426490 - DNA, 63 bp, Oryza sativa
  unsure (1)..(63): unsure at all n locations
ccccccagggggaantgtttctttttgaccaccctctgcttatgttcttccaagcttcattct

SEQ ID NO: 426491 - DNA, 121 bp, Oryza sativa
aaagatcgcgatatcattcagctccaaccatttagactgttacaagacctatcccaagagggatcggtgatccaacctgatataaatatgaaacgtgtctgaaggcttttgccaaaccaaa

SEQ ID NO: 426492 - DNA, 250 bp, Oryza sativa
acaggggggcagaatggcaatattgccacagatcaatttcatccctctaaggatgatgttaatctcatgaaaagtttgaacttttgaggcctaccggttttcaatctcatggcccaggatcattcccatatggtggagggacgagtttaaccacagaaggctgttccattatttacatacagatcttatacaatctagccttctgcagcaaagtgcatcaactccgttatggacaatgctttacgcacta

SEQ ID NO: 426493 - DNA, 212 bp, Oryza sativa
atttaaccacagaaggtgggaaacattacaactctgaacattaaaccttttaaaccaggacacttgtgaaaaaacaaccctacaaggcttacataacttggctgtagaatgcaccgggcaatgcaacgagcccccaacacgaggcattcacataaggacctgtaacaaaaaatcaaccctgtatgacaccatccaccataccgaaaacatta

SEQ ID NO: 426494 - DNA, 67 bp, Oryza sativa
aagagggcgagaggaacacattatcgggggggatttgcctcaattttacagcatccaggagtcttgg

SEQ ID NO: 426495 - DNA, 78 bp, Oryza sativa
tttccccacagggggacccgactccttcatagctcccattgcctttggccccccccgacttaatatggccccagcgca

SEQ ID NO: 426496 - DNA, 317 bp, Oryza sativa
accaaaaagaggctattactgatgacaaaccaattcatgatgctctaaccaaggactaaatcactactccgtacggtacaataccctgaagaatcataggaaatcatgttcacctaactagcaactacgacccatcaaacgctcaaaccggggggaactaaacgaggctctccggtgcaccgcactgcctaatcctttccatggcacgccttgcgcgccctatgggtgctcattcgtcgtcgtcctccggggggctcgccgcccgaaccagctcgttggagacggaggccaagccctgcattagcctgacgacctcc

SEQ ID NO: 426497 - DNA, 68 bp, Oryza sativa
actcaatctttacttaaggggaaaaaaaaaaatactcccccttggataatcccaacacggccaactgg

SEQ ID NO: 426498 - DNA, 201 bp, Oryza sativa
tactgtttttttcaacacatgataagctaattgcttttcattcatccatgttttttttgggatggtctgaacaaggtttgaaatcactgatactaaactaacctagggatacaccgatacctgtcgggggggccttcttttcaaaaaagggcaatttttttgctgtccaaatatttggcccctactccaagcatcaaaact

SEQ ID NO: 426499 - DNA, 236 bp, Oryza sativa
ttttgcccttttccccaccagaagctttaacggttaataaagcttttattcctaaaagccgccaagttctaaaggaactttcgctcaaagggtgtgaaacagaaaatgaaaccttcaccattttactctaaatacaagggctaagcaggcatgtggcctttttgtatctgcagaactttccctttgccacatcggcatgagtgctagcccattgaggcaatatgtagaacctatga

SEQ ID NO: 426500 - DNA, 367 bp, Oryza sativa
aaatacggggttttccgcctgggaatgaaacaaggggaatgacatatatgacgttccagattcacaactcaaacggcagccggaatgaccaaaccggcagattagaacataatggccctcgattattagccgaaacgacccgaaaaaacgagagggactatggcactggagggggtgatctgcaacgggtggtgtggacaggggaaggtgggaaaaaaaaatcaaaccacagtgaacccgatgcatgcccggagggggctagaaaaattgcatatggatctaggaaagggactcggttgggtgagccaaatggtggatgaaatgtgggaacggtgcgcgacaatggatgtgaacgatcgatccacag

SEQ ID NO: 426501 - DNA, 91 bp, Oryza sativa
ttttccccccacgggttttttctttttggttacaggcttgtaattcttttgtggaatttaagaaagggaatttcgaaaggccacttttttg

SEQ ID NO: 426502 - DNA, 390 bp, Oryza sativa
ccccttaggggggtttttttttttttttttttggaagggcaatggcattaaacaaattcttcccttcaggaaagcgcaatacagggcctccttgcccttttgggcccagaattcctggcaaaagatgtttttttatgggaaccccgggtagcataaatctcttcaataaggttccccaataaaaatctcccccaattttatgtccccctggtgtataaacaacatgccggaaatggcctcccattgacagcgttggcctgcccccgactaaaagggccaagtgccggaccgaacccaccgaaagggttttaacccctttttttggggaagcccaggagggcaaaaaccgaggcaaagaagctgccctttatcagccctctaaggaacttt

SEQ ID NO: 426503 - DNA, 54 bp, Oryza sativa
tttttttttttttttttccaaatttttttttaagttttgttttaatcctttttt

SEQ ID NO: 426504 - DNA, 119 bp, Oryza sativa
atgggcgtaacccacggggacccccattcatatcaatcttaagaaacggcttcccaggcaattaattggggctggtttcaacacgaaaaaccctggtttgggttcggtccccccacaaa

SEQ ID NO: 426505 - DNA, 86 bp, Oryza sativa
aaaaggccaaatttttttttaggccaaaacagggggaataaattcagggtccaaacctaatttttaccttaatctttaaaaccctt

SEQ ID NO: 426506 - DNA, 139 bp, Oryza sativa
tccagtgaaggaaaaggaaaatttgttcggggcccaaaacaggagtgaaaaacccctagcaagaaatttggcccacgctgccttggttggggctttgcttttaccgttattaccatcttctaaatcttcaaacttgaac

SEQ ID NO: 426507 - DNA, 90 bp, Oryza sativa
ccttcccaaaaattaaatgaagggagttttttaaaaacccctttttaccaaggccaaaattccaataaccgggggatttgtagaaacccc

SEQ ID NO: 426508 - DNA, 67 bp, Oryza sativa
ttttttttttttttttttttttttttttttttttttttttttattatttctttttttctcccccacg

SEQ ID NO: 426509 - DNA, 196 bp, Oryza sativa
ataacagggggtaaaatgtaaccaggaaagagcttttttgtaccccgacatacaaatgtaaaaatgtgtttccagaatttgttaaaggggattttataaaagattgagcccttggtgccccccacgttctaaaaaacaccagctccctcttgaaatggaaacgggtcaaaaaaagaaccccccctggaaacggggg

SEQ ID NO: 426510 - DNA, 296 bp, Oryza sativa
tttttattgatcagggtcaaaacccgcccagaaataccccctaccgggccagatctcaccttttttccaatacttgtacatccatccacgggggccacacgaattcgtccatttatacggtacacgttcgtacattttctggaccgggtacacacacgcacacttttttggagagacccgcattgttgaaaaccctatttagctttatccgaaggcaatgcgttcccaggggagcccggtgggcggcgggccttacttgccggggacaaatttggcggggttggcccaagcgttgt

SEQ ID NO: 426511 - DNA, 365 bp, Oryza sativa
gataagaacaaaggaaaggtacagggaacagtttgcaaatataattagccagatacatccgagatgcagatcaatgcatcatcattatccacatgacccggaaaacaatactttagtggtgctactgatcggtaagaaaacaatactttagtggtgctactaatcggtaatttagttcactgacggcagattttcccaagattaggatcgtttgttacttcagtgtctctctgctgcttcatacagaaagaaataagcattaaaatgtggaaatggtaagataatgaagtggaccggaagtagatgcttagatgcagcatcagcaccagattatataagggacattaagtgttcctgtacatggg

SEQ ID NO: 426512 - DNA, 206 bp, Oryza sativa
tgatttatgaaaataccccaaaacacaagaaggcatcaacatacatttttgaggattgggagccgacaattgcaaaggtggacccatattcttattgcggtaaagatccgattaatttcaaatgtaatgtaccattaaacccaaataagtcaaatttccaacacggttaaaaacacaaaggcttgtacgtacccatgttttggaaa

SEQ ID NO: 426513 - DNA, 297 bp, Oryza sativa
caagggggattcatcattttatttactttccactgattcatcccactactgcactgaaacgcagaatccttcagcaaagcaggactttgtgtttgaaatccctggtaattgcaatatggatgcaaaactgcatctttagatgcttgcaatttgacatggtggcaaacaattagtaccaggtgctgtcccgagcaagtccgttgagaagaatgaagtggctgtcctctcatggaaaaagcagcactgcaggcgccgaccgagaatgggaggaagatcatgtgtgggttcgagcctaaa

SEQ ID NO: 426514 - DNA, 114 bp, Oryza sativa
ggggggtaaaaacaatgaaatggacttcaacccttcagggggtgctttttaactttttcccaagataaaagtactgacggggacatgcagctgtttcatttgcttaaacaattc

SEQ ID NO: 426515 - DNA, 83 bp, Oryza sativa
ttttcccctgggggttttggacaacatgcaatttataaaacgttttggattacacgtacccacagatcgggtacatactgaag

SEQ ID NO: 426516 - DNA, 203 bp, Oryza sativa
  unsure (1)..(203): unsure at all n locations
aaggggggtttgnagctcaatctgaattcacctcttctcaaacttctccccttccccagtgttcaggttataacaaaaataaaagaaaagaaaaaagaaaagcaaaaatttcgagctcaacaaggatggtaactggacaagcaatacgaaccggtatctcataccaataggttgcagtaagaggttagtaagtagtagataca

SEQ ID NO: 426517 - DNA, 167 bp, Oryza sativa
aacccccaagataccccgctttggtttggatatcaccggttggttttgaaaacggcccgaggtttggggggtcccccaacgagaaaattcccaagatacaggaaggcgggttattcagtttcaaaaccggggggactcgaacaaagatttgccccataacagattac

SEQ ID NO: 426518 - DNA, 303 bp, Oryza sativa
gtttttacatcgttcaattcacatctcttctctgcggatccttatatagcaatgtgccattggatctctctcccttacatgtggcccagtcagtcactattaggtccactcactcccgtgataggccggattgggccgccgttcacgacgcgactttctgagcccatcttggtgcgccgaagaagctttatcgcttgtctaatcaggaacagaaggtgacgatgccgtgacattcttcccccgttgagacgaagcttgtccccaagctttagccaatggaaagcgatgacctaatttttgagc

SEQ ID NO: 426519 - DNA, 98 bp, Oryza sativa
aagtcacaaattaacattacatcgagttttaataaaacatcatgcgaaaagccagctaaaacaaaaggcagcatacagctaatgaagctctactggag

SEQ ID NO: 426520 - DNA, 127 bp, Oryza sativa
  unsure (1)..(127): unsure at all n locations
acatnntgcttactgaagcaaattgaaaaataaatacaacacctatctggttcaagctggacgcttatcatgaaagcctggggtttattgcagcagatggcagactaagaagggcctttctgctggg

SEQ ID NO: 426521 - DNA, 118 bp, Oryza sativa
ggatttacatgggtgagcacacaagcatggactgtttgcaaagtgaacctgtctagaagaacctgggaaggctgcaacattttcaaacaccaaaagaagttccatacaacgctttatt

SEQ ID NO: 426522 - DNA, 64 bp, Oryza sativa
gggaaaaccccgcacaccttttaaaaaaacatgggttttgggggaaaatgattttcccccaaac

SEQ ID NO: 426523 - DNA, 188 bp, Oryza sativa
  unsure (1)..(188): unsure at all n locations
gggggggtngaggatcataaaatcactcatcttactttgggacattcttacccctgtccatgccatgtgacaccaaatcgatcccagtgcatactaagcccaacagcagcatcgagatcatcatgcctgattgcctgacatcgcacccaagaggtggtcttttcctatttggagtattttggtaggta

SEQ ID NO: 426524 - DNA, 131 bp, Oryza sativa
gatattcccttataaatgggcaaaaaatttttaatccaatgggaaatatgccacatttttcatgtgtcaaatggtttggatgatacatatttcaattctttcttccctataccataccccgagttcacaaa

SEQ ID NO: 426525 - DNA, 327 bp, Oryza sativa
ttttccaacacaagagaagcaaattgcagtacatacaaccaagtttaaaataagatggtctggacgaggtaggaaatcactgatactaaactaacctaggtttacaatgatactgttagaggggttctcccttcaagaaaggcaatattttgctgtcgaatatttggcctactccaagcatcaaaactttagaacgcaacgaagaaaagaccagcaaatgttgcttgtccccatcagaatcaccaaacgtaatttttgttgatttaggagcaattgctttgattttctttgaaatgagatccctatttttgggatttcctttttttt

SEQ ID NO: 426526 - DNA, 54 bp, Oryza sativa
  unsure (1)..(54): unsure at all n locations
ggggaatttnttttttttttaaaaaaggggccgctagccccccaattatttaat

SEQ ID NO: 426527 - DNA, 52 bp, Oryza sativa
ggttggaattcccatacactttgattctcttaggggttttgtgatcgagaga

SEQ ID NO: 426528 - DNA, 104 bp, Oryza sativa
aatagtaccacaacaatctacgttacatatatattacctcttcgagcaaattaaacaggggaatttttctagcttcttggacatggatactgtagttgaataat

SEQ ID NO: 426529 - DNA, 354 bp, Oryza sativa
  unsure (1)..(354): unsure at all n locations
aaatactggacaagagcatgtttgacgcctcgcattatcgcatatagcggatgaaaaaacgtcaggccagctctgcgcgacaacngtctagttacagataagagcagnaactgcaagttcaaattacaactcttttttctgcttccatagttagnagcttttgagtcaggcgtaggccgggccaaacatttaaatttatttcaaattttattttaaatgnnatattgattcacttcctttgnnatcaatcttcaaccactatttaggaaaccaaaacttttcgcttaacccgcgattttttacctattttttagttttgtccaccaaacctttcaattgaggggtttggtttcg

SEQ ID NO: 426530 - DNA, 94 bp, Oryza sativa
aagcatacaaacaagttttattgcctattattatcttttcccttacttcccttactacaaggaggaatacctcgaggacaaccatactagaccg

SEQ ID NO: 426531 - DNA, 115 bp, Oryza sativa
aaccccaccttttccttgttcttttcttgcttgtaacacatcactgacaaacttaatattacacagggcgcatggacttagaaagaggaggaaagagtagcagagagtaggaggt

SEQ ID NO: 426532 - DNA, 78 bp, Oryza sativa
cgagtaaaatagcgggcaacgccacagttaaataatgctaaatgaaacaaaatttaaaacaaatggaatacaaaacaa

SEQ ID NO: 426533 - DNA, 91 bp, Oryza sativa
ggaaagcaaaaacaactaatacttagccattcttgtagcaaaacctcattacatatttacaaggaaaaccccaatggaatcaaaaggagaa

SEQ ID NO: 426534 - DNA, 105 bp, Oryza sativa
gctcccacagtaccaaaattaacactggatataatcattcgctgaatcacaaaatagtttttagtatatatcccatcaacaaactcagggaagagcaacggagca

SEQ ID NO: 426535 - DNA, 231 bp, Oryza sativa
  unsure (1)..(231): unsure at all n locations
ccacttccaagagcattccgtttcattcatgtaaatgaaggagcttttgctcaagactcgtccactaactcccacgaatatcacatacagacatacacangccttcgtattcatgggttcaacaggaaggcaacctcaacttgcacttgttatttacccctttattcnaatacgacacaatncnnatcaatttctttgattnccttcctaatacaaacatatagttacagg

SEQ ID NO: 426536 - DNA, 85 bp, Oryza sativa
ggttgcaaattaatttcattggaagacataaagaggaaataaagaactagccaggctagctaggcttcaaacataacttatacat

SEQ ID NO: 426537 - DNA, 56 bp, Oryza sativa
cccaaactaaagggggaaatcaatttaattaaacaaaaagacttgcttaaaaaaca

SEQ ID NO: 426538 - DNA, 82 bp, Oryza sativa
tttttttttttttttttttttttttttttttttttttttttttttttttttttttttttttttttttttttttttttttaac

SEQ ID NO: 426539 - DNA, 70 bp, Oryza sativa
cgaaaaatccagttgtttttgtttactccatgcacaaggggacacctgacaagccatatcatatcatacg

SEQ ID NO: 426540 - DNA, 64 bp, Oryza sativa
gtccaaataatgggttttcataaatctcagttactaagaaataatagggggtttttgttccaat

SEQ ID NO: 426541 - DNA, 101 bp, Oryza sativa
gcataacaatatatatagaataacactaagcatggccactgttatgatcttgtacagcaggcagccaaacttgcttagcgctggtttagcgtccaggccaa

SEQ ID NO: 426542 - DNA, 405 bp, Oryza sativa
  unsure (1)..(405): unsure at all n locations
cacgaagtgctctgcttcatcacaactactaagaacgtatacatgagcacatgacaccaggatctgagtgcaccaacaattttcaggagttccagaattatccttcacaaaaaaatcaaacctaatgtgctgtctgaaaaagcctagaaancgtatcaaaagagcctntggagaagaaatgcagtgcaacttgnanncggggccacttgttaggaaatgtttgtccgtggacttttgaatgctataactnnctctggttggcttcaaacttagtccaaaatttttcgtgataatatgnncacaacgatttaccatttacacctccctgttattccttgaccttggaagtttttcttccccagttgtttctttatncagccaaagtttgtttcccgagttagtgta

SEQ ID NO: 426543 - DNA, 81 bp, Oryza sativa
tttttgttttttttattttttatttttttttttttttatttttttattttattttttcttttattattttttttatttttt

SEQ ID NO: 426544 - DNA, 252 bp, Oryza sativa
  unsure (1)..(252): unsure at all n locations
gtacttcaaaacaagagaaaatatatcccatatttgggaagaaaatccatcatgcaaaggtttcatacaaatgctatgctccaggctagatctaagaaacantagcagacttaaccaaggaggnnagaaccccaaacaaattacgagcaggaattaaggaattcacanacagnaatgaanaacttannatttttgtttaccttgtgaaactatgngagttaaaacattttcaagggccttttacaccctcct

SEQ ID NO: 426545 - DNA, 302 bp, Oryza sativa
  unsure (1)..(302): unsure at all n locations
gcaaaatacagagtaccagtatagtactcttaaactttcttgtgcaaccataatgcagcctcaacagtatgtataagactaccaactaccaagaccgacgacacggttcaacaaaaagttcaaaaagatttagacaaccttgttgagtcctgttgnacttaatgnnagtctatgaaccttgagaatcttccacgccagttaaggaggttaaaacttaagnaacaagaggaggagaccccaccgggacccatgncggacggaaagggctgtncgttcaggattgaaagaacatgtttgttcca

SEQ ID NO: 426546 - DNA, 297 bp, Oryza sativa
atccgggccttcaaaaaaactcctgtaaaattggcccgtttaaaatctttttttttttaatagggcaaccgggaaacatgcctgaactgatcctcagtacatttttttaaaaaaaaatatttccccaacatttgaaaacgcaattaatttcgtgttgacaaataatagaaggcgtgctaccacttgtttagatattttaggcctgaagattttttagcagcagtagcagcggtcgttcattacatacgttttggattgagtggatttgtccatacccttatgacaggagtgtatttg

SEQ ID NO: 426547 - DNA, 302 bp, Oryza sativa
  unsure (1)..(302): unsure at all n locations
ttggttttttatttttttggggtaaaaaatttctaacattcatcctgcnatgctttgcacttccatttgctacaacataatggattcttcaaaccaaaattcccatacttcaatttccaactacatgaaaagataaaataagtaatctaccacgtcaatcgcacaatcttttctcatgcctaccaccatttctgtttcttatcaaggctgaatcagctcttgtcatctcacaaacacatcatccaccaaagcatccccttttacctcaactatcacatcttcgtaaattggatagcacagga

SEQ ID NO: 426548 - DNA, 332 bp, Oryza sativa
tctatttgaaggtcatggggatgctctgaactggcgtattgcgtaagtgctcattctaggggatatactaaagtaaagctgtcaggcactaatgaagtgcctgatacgccttgtggtctaaaaagggggcaccatgcatttagttcgagcgtgagaacctacagaagggcatagttacagagggacctgaaataccttagactggcattcaataacataagaagaccatgcactgtgctgagacagatggtgcataaagagtaaatacagcatatcaacttgctaattgcaccaacatgatgggtcaagctcatgtccacacatgtaaagaa

SEQ ID NO: 426549 - DNA, 338 bp, Oryza sativa
tcgtttttcaccttcccttcgccatgtccgtctccgccgccgtcggcgacgtcttcacttaccgtaccctcgtactcgcccgtcaccgatcgccgtcggcatttagggtcgtggctgacaagccgagggcgtccgtaatcctttggcccccatccccttgccgtttatcccgccacccgtgcccccgccatggccaccgacggcgccgccgtcgccgacgcggcagggtcgaagaagaagaaggaggtgctcatcttcgacgccgaggaggaccttgcggtgtccctggcgaagtacacggcggagctgttcgtgaagctcgctgccgagaggggcgc

SEQ ID NO: 426550 - DNA, 260 bp, Oryza sativa
tcgttgaatgaaaacctatggcctgatcgtagtcgccccaactcgactaggcattggtgaccataggtatggcgtcgatcaagataggccgaggacagcatgggaaaggactttgactacattgagagctgtattatagataaggggggcaccgagggttaagaacaccaccaatagggatgatgacatcatgaacagcaaggataggtaatgaacctcctgctgtgcgcatagcaataggaatttcgagacttgggggt

SEQ ID NO: 426551 - DNA, 180 bp, Oryza sativa
tcgttgaaaggaaacctctcctcttctccttcttgcgccgccaagacgagtcgcgattgaacacgcgagtggcgtccatctccatatgatgagcacgagcacgcgataggatcatgactgccctaaggcgtcattgatctcggagaagtgcattgtgtgataagaacgccacccacaggg

SEQ ID NO: 426552 - DNA, 443 bp, Oryza sativa
tcgtgcaagagcacaagagtgcacgaagacgagacgagagcgagctgttcatcctcccactccacctcggagctgagctctgcttctctcccgatctctccacccaccgcagcagcatcctttcgacctctctagggttccagcctcgagttggcctcgttcccccccccccccttcccacattcgctgcgaggtttgggattctcttccggatcggattggtggagtggcagggaattgttagatctggtgtggtttgcggttaagagaagggggaaatagctatggagtgtctgaccacaagttttactaggaatccgggaagggagtataacctcatatgttccggcgatactttgcttgaaaacaaaggattcaaagaagggtcttatgcttatttacagcttcacaaactaatgacgatgccgcaagttcacaactat

SEQ ID NO: 426553 - DNA, 539 bp, Oryza sativa
  unsure (1)..(539): unsure at all n locations
tcgtaaaattggaggaacaacgtactgaaatattgtcattgctccagaactctggacacgagttggccaattttaaagaacagaacaaggatcttactcaaaaacttgctgaacaaactctgaaggcagaagagttcaagaatttgtctatccatttgagagagctaaaagagaaggctgaagctggaaggaaggagaaagagggatcattgtttgccatgcaagaatccctcagaattgcattcattaaagagcagtacgaaacaaaggttcaagaactgaaaggtcaggtgtttgtttccaaaaagtatgctgaagagatgttactgaagctacaaagtgctttggatgaggttgaaactgggcggaaaaatgagattgctcttgctaaaagaattgaagagctatcaatgagaatttctgaaatggagttagagaatgcaggatgcatcagttgataaaagagacctgtctaatgcatatgacagcatagtaacagaactggaatgcacaanactaaactttgattgctgcatgga

SEQ ID NO: 426554 - DNA, 452 bp, Oryza sativa
tttggttaacaagaatgtttggtgaacatgaaggggcttgtacaagatgttacattttatgtatatgacacacacaactctacaactgatattccacatgctgagattctactgatatttacattacaaaaaaagtaattcccgtgctgtcgcggaataagtccgttttacgaactccgcgagatcttgaattttctgttcattttttcctctatgtttttgctatgatctcatgggtgatcggttcttcaggttcatctcaagcttctgcctttctccctcaacttcagcaaactgcacactgagctctgagtacctgccctgcatgtctttcagctcactttctactgccacttgccttctcttcagctcaatcgtatcctgtatcagttcattgatgtccctgaagctctggaatactgctgcttcatattatggtgctcaagaatgaa

SEQ ID NO: 426555 - DNA, 515 bp, Oryza sativa
ttcaggagcccagaaagacaaggaaaattgttgaattgtcaagctttgagaagagagacagagaggatgataatggtttttctggacaacctattcagatcaattcctcacatgatagggggtggggtctggtgggaaaaagaagcaaaggaataatggaaagtagtgaatcctggagagcttttgaggagcaacgagagagacaagaacagagactaattgaagctaggatatatgatgcaaggagagaggatgagctccagaaggcaaagaagaaaaacaagaaaaagaaaaaacatgaatttcgagatgatgacctacttgatcctaggccatacaaaaatgacagaagggtacctgaaagaggtcgagcggcaaagagacgtaccccagctgatatgacagaatacacaccaccagctaagcggcacagaggaagagaggttgagctctccaacatattggaaaaaatagttgaccacttgcggacaatgagctgttcattccttttccgt

SEQ ID NO: 426556 - DNA, 261 bp, Oryza sativa
ttatttatatcgctcttcctcaccccccccggcgccgacacactgatacacgattgaccatgtccctgatatccacttccataactacagtattggcagcgattgggtcaaggctgatttatggggccatataatcccgctatagttgtttgctccaactaatatcgctatccctagtaacacagttgctatcactaggaatgtgccgaaaggacccccacgttggccacctggtgctttcatagtagcaaaattattcac

SEQ ID NO: 426557 - DNA, 285 bp, Oryza sativa
tcgttgcgaggagctcattccccttctccctgctgcgccgtcacgcctgtacaagatggatcactcccatgatatctatcctccttgtctccagtaatggaactgatagggtcaacgctgctttctggagacattaatcccgcagggttgtttgtcgcaagattaacggcagcactaggcacactgttggtttgatcggaaagagccgaaaggacgcttctgttggacactaggcgctttccatgtggggtattttgaccgttaggtaacccctcgtgcagggta

SEQ ID NO: 426558 - DNA, 362 bp, Oryza sativa
tttgtttttttaataatttgggctttttatttatttttttttttttttttttacttatttaactttacaacttccttgtaaccccaaaacaaactaccaaaacaataaaaatccaccaaaccatagaccaccaactacaaatattaaacccatacctaaaataaaccaacactatttttaaaagcaacaacaccagaccagagaagtaccctacaatttaagctgtccttattaaataaaccataccaaaaccaacaaccacattaacgaaaacttcaagcacacatcgtccaacaaaataatcattaccccctttgactaacacatgaacccaaccccccttggtgacccactcctgaaac

SEQ ID NO: 426559 - DNA, 232 bp, Oryza sativa
ttgttttgaggagctcactccctttccccttgtggcgccgtcgcgccgagtcgagacggatcacgccaatgatatccacccccttgtatccagtactggaactgttatgaccaaggctggtttagggggacattaatcccccagggctgtatttcttaagaaggacggcacccctagggacattgttggcatgaccggaatgggacgaaaggactcttatgatggacacaag

SEQ ID NO: 426560 - DNA, 530 bp, Oryza sativa
tcgttgaagcccgcatcaagcggcggccggacggcgacgtctcgctggcggctgctgctgctggagtctctcgtggtattctcaactgtttgacttctcagtctcatctcctcgaaccgtccgcctcggagctcggaagcccccaaacccaaccaaaccaccgtgcacgcgcgcgatggctgtggtggaggaagaagagggctcgccgccggcacccgccgccgccgccgatcccgcctcctctggttcaagtgataatgagataactgtagaggaagcttcttttgtgcatactgaacctccgcaagatggctctgtcccacctgtggtttcctctaatatggaggtccttcatgacaaagttaaaaaacaagtcatcaaagaaggccatggcaagaaaccatcaaagttcgcgacgtgctttttgcactatagagcttgggttcaaggctctctgcataattccaggatacttggcaagaacagcatcccattgaactagttaatggaaaaagagaaaaaacaaatgt

SEQ ID NO: 426561 - DNA, 359 bp, Oryza sativa
tcgtttacgcgacggggctggcgcaacaatgctgactgatctcacattctggggacttgttgagccatgcttttaccgtgataagtgcggactgtccttggtcactgctggcatgcattgtattaatgctgatcttgcactgatagacacattagttaacaatatacctttccagtggtaccgcctggctttctttggattttggagctgcgcctatgtaaccatttaatggtgacttcatgcctgcggagctctatcctggtggccatacccatttcttgacctttcaacgtcaggtgctcctctatggtacctagtcatggccattggtcataacccttgcttctgtctgaattggt

SEQ ID NO: 426562 - DNA, 435 bp, Oryza sativa
tgttattctgatggagatggacccaactgcggagcagcacctgcatggcgggtacggacgttatcaaggacagcgttgatcaagccatgtatgaaccttccactgcccaggagattcagacgaactcatacgcctgaacagcagcttgattatatgaaactgaatgactcgcaaccattgctactaagcatatggactacagcgatatctgatccataatatagctatctaatcatataaagaattgaaaactactatggtacgtggatactaggaaccatagaagaagtgcaagatgaactaagcatcaaggcgaatgcgcgtggctaggcaatattgtttgctcagatctttcatgtggcagtataaggcataaaatagagtgctcacaacatttcaatggcagaatgtcaccttttcctatttcaagcccca

SEQ ID NO: 426563 - DNA, 398 bp, Oryza sativa
ccatcaaattatttctccattttattcagcaggcaacaaactaaaagaacccaatgggatcaatggaacaatcaggaattcagcagctagcaatatacaaacaatttgatccaaaagaatcaacaattgcatagatctgtcgttgctaatgctaaacaatcatcagttcatcaccagagagctaggcagttcaattcacccatgtcaccggcgtctcatcgtcgccgccaatgcgccccgaaacgccgatgcgcgcctatggatctcgagatcttccactccggcggcgtcgccgtcgtccgcccggcgctgtaccgccggcggcaagttggtcttcttcggcgccaacgccgagtggtcctctcttgcgagcaacacgttgtggagcattgcgcatg

SEQ ID NO: 426564 - DNA, 391 bp, Oryza sativa
tgggtttcaaggtaagtgtggtgatattgcctcaattaatcaaatattcaaatgggagcaaaacttttgtaatattccccaaaatctcaagggctccttgctatcattcaacctaattaataccaacttgggatgtgaacctgctatccttggctttctttggggccaccagactccagtctgatctgcatccagaattcatttgacactcaaaatcccaaagggaggcttctcgtctaggggacactgttaatcagttgaggcaaaaatgtgccatgtaggatcacatgacaatcttagcaagcatcttgctttcatcaagtcctcaaatcttctgacattgcggaaggtatacaatgcgttgtcagaatatcctgagtagccacctttg

SEQ ID NO: 426565 - DNA, 289 bp, Oryza sativa
tcgttgaggcatcagtgcaggggccggaatgggggttgatctcatgttttgtggactagttgagggatcgtgttaccgcgcgcggtgtgtactcgtcttgggcgatgctggcctaccttctattatggctggcctataagtaggacgacgattacttatcccgatgcgctgtgcttgggatggtgggcgtagcgacggatttgggaggggtgaactgtggaacctgccaacggggcctacatgcaggtggagaacgagtctgggaagtccaagacgaacattgagcttt

SEQ ID NO: 426566 - DNA, 406 bp, Oryza sativa
ttttctaccccgcaacccaaacgctaacgcaacaatccccttctctccaaatccaattccaaattcccatccgccgccgctaatcggaatcgcggcggatcaccctccgcctccgacgagggttcgacccgatcgactccccctgccccggcgggctcgcgggcggcgggcggggggctgagctgagagctgaattcgggttcgatctgtggccatggacatggcgagcattgagtgcgttttctacttcgaccgtatggatgactaccactaccatggcgtctgcgtctgcggcgtcttccacctgccacgccccatccttcgtaagcccttcttcggcgtctgcgcctgaacgtgggtcttgttttcctcggcaactgaaggggctctcttggaggaagaagaa

SEQ ID NO: 426567 - DNA, 68 bp, Oryza sativa
tgtttgttgtttgatccaaacaaaacaaaacacttagctagggccagtcttgcgaccacacctgacgg

SEQ ID NO: 426568 - DNA, 383 bp, Oryza sativa
ttcgttcgtctgtcgtctgttccggttgctttggcgggcagctagggtttaggcgcggggccctcccgaatccccgatgtacggcgtcggcgtcggcggcggcggcggcgggaactacgatggcgggggagggaacgccagctccctcttcggcggcggcggattcatgccctcgcaggcgaccaacgccgcggaggggaccagcggcggcggcggcggcttccccaagagtcggaacgcccaggcgctgctcccgctcaccgtgaagcagatcatggacgcgttccagaccaacgacgacaagtcgaattttgctgtcaatggcatggaggtgtccacggttaggcttgtaggacgcatgttaaataagcttgatcgggtta

SEQ ID NO: 426569 - DNA, 316 bp, Oryza sativa
tttgtgttttgaaattcttgggttttaaatttttttttttttttttttttttcacaaaatctttagctgtaagaatgcttataggttagaaaagacactaaacctaacaatattatttgctaaagagacaaaacagggaaaatgacgaggggatggggggaccaaaaacaaaaaaagtacgagggggggagccaacaaaaaaggcagcctgcctgcctatggaggcaagaattgatctcctttccccttaccaaaaaatccaaacttggaaaggctccacccgacaaccctagttcatgggaactagccaagcccc

SEQ ID NO: 426570 - DNA, 429 bp, Oryza sativa
tcgttctcgcgtgccctaatttctcgctgctccttgtcccccacctcctttacttgagcttgctcaccactgcctccatatacagagagtcttctctgtatttctctctctcagcgggaggctcacaagaatctttcagctcacatctcactgtccttgcctttctctagctaggtactactactgctagtactaaccactgctcgtgttcttgggacttcttcttcttcttgctcttgctcttaaaatcatttggggttttgagcttcagggaggtccaagaacagagcatcaggatggtgcagtggcgtttttgagagccgcatgagtacttgcaccaaccacctgggatggttggcgatggcaaacaccgatgcagtcgtcgtctatgagggagaggcagcttgtggcggtctgaggaagacgcca

SEQ ID NO: 426571 - DNA, 539 bp, Oryza sativa
  unsure (1)..(539): unsure at all n locations
gaatcacataaacggccagtatattaccttattaggctgtgagctagttgtttcgaaatttctgatgaattcatagcatgcgaagtaggttatgcttgtttgtggcatatgatatgttggagtagtatttgatgaaaacacaaaacaaggtttgtaggtttagcttccccaggctaccatcaactatcggttctaattatgttatccatgatatcatgatcttcagcatatttatcatcaactatcgattctgcttagtggcaattttagccaaggcgctaagcgctagttaggcagcagaccagcacctggcacctaattggtgatcatgtggacctaagcaggattggccagccacctagtcaggataactcaataggcaggctaggcgttcgtatatgcaaggaaattgtgcattttgatgtaagagcaaaanttttaattgttaggttaacctgaatcttatttcgttttgtacttgtttccgagatgctgggtgttcttgcttgagtgctgtactccatgaaatccgtgagatg

SEQ ID NO: 426572 - DNA, 409 bp, Oryza sativa
ttcttttatgtcgatccatcttcccgctctctgctgttgtgtttctcttcgttcgcaatgtgtggaggctgaggcggagctagggcgcggagactccggggaggagatgccgatgctcggtgtggacggtgctcctctgattccccacaccggggacggcgacggtgagcagggtttgagggaccgacctgcgaccttctcattcctggcttgtctgcctccatctggtgttggaaatatcataagtttttggacaagcaggagaggacatggtgctattatcacaacctgagccggtaattggtgttggtgttggccgatcacaagtgtacactgaattcctggctggaataacagtgcctacagctgctgttgtcattactgccggtttacagacagtactgttttt

SEQ ID NO: 426573 - DNA, 252 bp, Oryza sativa
tcgtgtttaaagatacacgagcagcgacgcgagccatctatgaaagccttggacggtggataatgtcatcaaatctattttactattttatccgcgcctggcgtgccactttcaacactaatcgtgggtggagaaggaccaccttctgtttgtggacagtgcagaaagactacgtcccgctcgttgacaagcatggtcttgcacgtggatactgaaggcagtttgaactcgcttgctgaatcaagaggatat

SEQ ID NO: 426574 - DNA, 261 bp, Oryza sativa
tcgtttacagatacacgagctgtgacgcgaaccacctatttgtgccgtgtacggtggattacgtgctccaagtgatcgacttcttatcagcgcttggtgtgcccgttctatcatgagcacgtgcgtggagaatgaccacaatctgttggtgacaagtggacaaagacgacgttccgcttcgtgacaagcagagcttgcacgtggagactgaaggcagtttggactcggttgctcaatcatgaggacattgggtcactgtac

SEQ ID NO: 426575 - DNA, 364 bp, Oryza sativa
tcgtttaaagctacacgagctgtgacgcgagcgacctatttgtgccttgtacggtggactatgtcataaaagctattgagatcttatcaatgaaaggtgaggactgttatcatgagtcgtacgtggagagagaccacatcttgtttgtgaaagtgcagaaagactaccttccgctcgccggctacatgggcttgcacgtgagagactgaaggcagttaggacttgcttgctgagatccagaggacattaggtcactgtacactacggcatcggtttgatttatcacccctactttaaatacattttttgtgaatttgattctacacttgcgcatagtagctcttctagttttagaaaccatcgc

SEQ ID NO: 426576 - DNA, 335 bp, Oryza sativa
tcgttcatagatacacgagctgtgacgcgagctatcctatttgtgccttggactgtggattatgacataacagctgattgacttcttatcagtgcatggtgtgccctttcatcatcaatcgtctgtggagagggaccaccttttgtttgtggaaagtgcacaaagactaccttacgcttgtcggcatgatggtctttcacgtggatactgagggcagtcaggactcgctcgctgaagcaagaggacattaggtcactgtacactagggaatcgtgatgaaagaacaacccaacttaaaaaaacattttttgtgattttgattgctcactgattaa

SEQ ID NO: 426577 - DNA, 306 bp, Oryza sativa
tcggtcaaagctgcacgagctgtgacgcgagccatctattagagccttgtactgtggactttgtcatcaatgtgattgacttcttaccaacgcctggcgggtcctttcatcataagacgtatgtggagagagaccacctttttgttagtgacagtggagaaagactacgtcccgctagtcggcatgatggtcctgcacgtggagactcgaggatggctggaattggttgcttaaacaagaggacataaggccaatgtacactacggcattcgggatgatagaatagccctacttaaaaaacatttt

SEQ ID NO: 426578 - DNA, 499 bp, Oryza sativa
ttgttcaaagatacacgagctgcgacgcgagccacctatttgagccgtggacggtggattatgtcatcaaaggtattgacatcttaccactgcatggtgagcccgttttatcatgaatacgaggtggagaaggatcacattctagttgtgacagtgtgacaaagactacatcccgctaagtgaatggatgtgcctgcacggggatactgaagacagttaggaatcggttgctgaagcaagaggacattatgccactgtacacgagggagtcgtgatgatagattatcctaacttaaaatctcttttctgtgttttggatggcacactgatgtatgagtagtcggctagtttcagagaccaacgttgatgcctattagggttgtcaggtcacaagagatacaaactatcgttgtaaaagaagagttccgctctgctgatatcgatgttcttgttcaagtttattttgctgacataactgtaagcctttaagaatactctt

SEQ ID NO: 426579 - DNA, 116 bp, Oryza sativa
ttggtttttggttgttgggggttttttttttaactatttttccacaacaccattatacagcatttgatttaaataaacataacggagcaccacaacatcatacagaaagaccaatc

SEQ ID NO: 426580 - DNA, 117 bp, Oryza sativa
ttggtttttgaaatttggggggtttttttttttttttttttataatatccatttatatttctataccaagcaacacaaatgacagttaaactccacctcagacagatccaacagaaa

SEQ ID NO: 426581 - DNA, 133 bp, Oryza sativa
ttggttttttaagtttggggggtttttttttttttttttttctcatatttttttcatttgcttttgttttcaatacaactatccgtaacactagacaataaaaagaacggaaatacgccggcgtaaacttact

SEQ ID NO: 426582 - DNA, 204 bp, Oryza sativa
ttgtttttttaagttaagggggtttttttttttaattttttctcatattctttgaaacagaacaagttgtcggcacaacgatccataacgcaaggcaacaaaaggaaggaacatacgcgggcgtaaacatacgctacgtgcagagagcacggactctgagtgcaactgactctccaagaacacgaacagagaagctgctgactg

SEQ ID NO: 426583 - DNA, 63 bp, Oryza sativa
tgggttttttgattacaaggggtttaaaattattacttcaaccaataacacatgctacaacca

SEQ ID NO: 426584 - DNA, 94 bp, Oryza sativa
ttgtttttgaaaaaagggggtttaaattttatattttattttattaatattaaaacattactttaataattctcaactacccaacacccatact

SEQ ID NO: 426585 - DNA, 115 bp, Oryza sativa
ttggttttttgacccacgggggttttatttttttctttttatttatacaaatatattttattttcacttccgatacaacggccaaaaaaaccagaccataaagggagtcaacaaa

SEQ ID NO: 426586 - DNA, 102 bp, Oryza sativa
ttggttttttaaggtggggggcttttttttttttttttctaaatacattctttttaaaagaccactatgccagcacatctgcacattaaactaactgtaata

SEQ ID NO: 426587 - DNA, 398 bp, Oryza sativa
ttggtttttttattttttggggataaatcattgtcattaaaatgagaaatttaatggaccatacaggtttttgtagagccagaaacaaagaggctactacttaacatcaaccaaaacgattgatattcctataaaatttggagaatggagcttttgtaaatctagtaaggccaatatgtgcataaaaacaatcttaaggccaatggtaaggggaacaaagtaacacagaccgaacaaaactttttgacctcgtaaaaaatctttgaaatgttccggatggttgaagcgcatgctatctgcgcaagaaacccatggctgggtatacgtcgttgagggggatgtctgctatctcagcagtttttcctgatccttttaagagaacaccatccaaataaccc

SEQ ID NO: 426588 - DNA, 187 bp, Oryza sativa
ttggtttttgaaggaaagggggttttatttttttctttcttaaaacatacaataaaacaacattacatcacaacacaacaagcgatgaacctaacaatcatacccacacaccacaaccctaccgtgacaacacatgcataccccgcacccagaccagtgacgaaaggaaactgcatcaataacaacg

SEQ ID NO: 426589 - DNA, 271 bp, Oryza sativa
ttgttttttaaagtttggggggtttttttttttattgttttctcatattttttgcaacagctcaagttgtcgacacaattgtccataatgcaaggccacataaggaatgaatacatgcaggggtaaacatacgttacgtgcgaagaccacggactatgagagcaactgactatccaagaacacgaactgagaagctgctgactgggacgctaagttagacccactatacatcggccatttgctggaggaaggaaactcggtcttctgacga

SEQ ID NO: 426590 - DNA, 126 bp, Oryza sativa
ttgttttttttattttggggggttttttttttttttttttttttttttatttatatacaacataatttttcatcacaattgtacattatgcaaggccatgtaaggaatgaacaaatcgggggataa

SEQ ID NO: 426591 - DNA, 145 bp, Oryza sativa
ttggttttttgaagaggggggggttaattcttttccaaggcagctatttgatttaatttgcatcttttttcaaaacatagaccacaccttttagccaacatagtataaacatcgtctgagagagtacaattagatagccagtttg

SEQ ID NO: 426592 - DNA, 127 bp, Oryza sativa
ttgtttttttaaatttgggggtttttatttttttttttttttttttaattatataaaaaactaaataattcaactcaattaaccataatgccatacaaaataccgaatgaacaaaaacgcacataaa

SEQ ID NO: 426593 - DNA, 127 bp, Oryza sativa
ttggtttttgacattcggggggttttatttttttttttttttttatattcatttataaaacactaattttcatcacaattatccaaaatgcaatgcaacataaagatagaccacatccataggtaaa

SEQ ID NO: 426594 - DNA, 97 bp, Oryza sativa
ttggttttttgaattaggggggttttttttttttttttttatttatttttttttatacataaaaataaaaaaaaacaatgaacgataatacaataaa

SEQ ID NO: 426595 - DNA, 113 bp, Oryza sativa
ttggtttttggagtgaaggggggttttatttttttttttttttttatattcatttgttaatcattataaatcaacacaacgggtgatggccctaaaaaaaatacggaaagacc

SEQ ID NO: 426596 - DNA, 238 bp, Oryza sativa
ttgtttttttatattatggggtttttatttttttttttttttttttttttttttttaaatttttttattatatttaacaaaaaaaataaaaaaaaaaaaacaaaaaaaaaccaaaaaaaaaccaaaacaaaaacccaaactaagaaaaaatcccactaaaaaaacaaacaacaccgcgctagagacaggcccaaaaggacctccccaagggtctccccacccagacacccccaacaac

SEQ ID NO: 426597 - DNA, 116 bp, Oryza sativa
ttgtttttttttgtttggggggtattattttttttttttttttactgtaacttgatacaaaaggtttcaacagaacaataaaatattttgacaggaggcaaccaagaggaccaaaa

SEQ ID NO: 426598 - DNA, 118 bp, Oryza sativa
ttggatttttttttttgggggggttttaatttttttttcattatactgttttgccatttaattatatccaacattaacaagggctgaatgtcaaccaacatacccaaacgatcctaaa

SEQ ID NO: 426599 - DNA, 101 bp, Oryza sativa
ttggttttttgatctaggggggttttaaactttttttttttctctttctattaactaaatacatacaacctaaaacactgggctaacgtccatggtaacat

SEQ ID NO: 426600 - DNA, 344 bp, Oryza sativa
ttggtttttttaggtgagggggttctctcatttgctatcactttgttctcagcagtcaataaaggagttcacctttaagcagacaaggccaaaggatatacaaacgctacacaaccctccctgttaaactgctgcatcttttaaatgacgccgactttaagttagatggttgctacttgctagaaacaaccagaactatacattaaagagcaaacaagactggatctactttgatgttatctctgaacaatgaactgggataatccactaacattgtaacacatgaactaaactaatgtcctgtaaggtatatgggtgtccattgctaatgaaaccatgctgaa

SEQ ID NO: 426601 - DNA, 113 bp, Oryza sativa
tgggttttttgatttaggggggttttatttttttttttctttttttatttattatttaaacaatttccatcataacacacacccaataaacaaaaatttatatacattcacca

SEQ ID NO: 426602 - DNA, 112 bp, Oryza sativa
ttggtttttgacgcgcgggggggtaaatatatttctttttttcaaattataaaaacactgcaacatacatcaaaacaaagaccaatcaaaacagccaacatagtgacagccc

SEQ ID NO: 426603 - DNA, 102 bp, Oryza sativa
ttggtttttgaattgtgggggtttttatttttttttttttttttataaatatttgtataacaggcttattaaatagaactagcgctttaccaatacagggca

SEQ ID NO: 426604 - DNA, 115 bp, Oryza sativa
ttgtttttttaaataaatggggtttttttttttttttttattatatatataattgcaaaaatggctaaaacaagagaaaaaacgctggtccccaatacaacactaaaatccaaca

SEQ ID NO: 426605 - DNA, 123 bp, Oryza sativa
ttggttttttatttttgggggtttttattttttttttttttttttttttttttttttattcattttttgccaacacaaaaaaccactaaaaaacaatatacaaagaacccaaaaacccctatc

SEQ ID NO: 426606 - DNA, 367 bp, Oryza sativa
ttggttttttaattttttgggtttttttttttttttttttttttttttttttttttttgggggaacaaacgtacaaacacccactactcatataacaaagcgaaaggagggtagcatacaggctatacatggattgcgtccaaaaatacacgggacttcgccccataaacccagatatttttcgacaccaaataagcgcgacatcagggacactccaacacccaaaaattggggcaggacccttggcttactcaacaaaaaaaaacttatggtcttttttttttgccaggaataggcgtatttatggggggcaaggtgaatgccgtagactgggaacccaaaacccttacttgcacttgaagccctg

SEQ ID NO: 426607 - DNA, 120 bp, Oryza sativa
ttgtttttttaattttggggggttttttttttttattttaatttatatatattgataatactggctattacggtacaaagggtggtggaccaatgaattacattgaatacccaccaccgt

SEQ ID NO: 426608 - DNA, 143 bp, Oryza sativa
ttggttttttaaatttttggggttttttttttttttttctattattttttaattatatattaaaaaaaacaaataaaattatacaaaaaaaaaagatataataacaatacacaaccctccctattaaactactccatctttta

SEQ ID NO: 426609 - DNA, 155 bp, Oryza sativa
ttggtttttgaaattaaggggggactcaacttttattgaatgcaccaacctatatgctataccaagagtaacctagtatcgccgcctaacaacacgccttaagaccaatatacggaacaatgtgtacatattacctagccaatgctattgccctt

SEQ ID NO: 426610 - DNA, 127 bp, Oryza sativa
ttgtttttttttttttggggggtttttttttttttttttaatttaaataaacttacaaaaaactcttatacaacacaaagacccaaaaaacaaaacaaggtatggaatgacaaaaacactacttgat

SEQ ID NO: 426611 - DNA, 372 bp, Oryza sativa
ttggttttttaactgggggggattaaaaaacattcttaatttgggtgactacacatatacttggctaaacaaagctaaatatatctttatcattgggaagaagttcacgcaagctgcaggacttaacctgcaactacattggtaacactggatacccagtcgaatcaaaacgatgacaaatgctgggtggttcgatgccgatcaccgtagcaaacctgcacggtattgggccgattatgaagaatggattctagcgttcagagttttacgcctggcctgagccacctgcgcgcttcagtaccttgtaaaccgatgagaaattcaggtcgcctaatcccaagcttgttgctttcttgaacgccttggtggaag

SEQ ID NO: 426612 - DNA, 81 bp, Oryza sativa
ttggttttttattttgggggggtttttttttttttttttttttttttgttttttgttttgcttttgtttacggtatatttg

SEQ ID NO: 426613 - DNA, 74 bp, Oryza sativa
ttggtttttggagggggggggttgttatttttttatttattattaactacatgtataaagcagattactacggt

SEQ ID NO: 426614 - DNA, 189 bp, Oryza sativa
ttggtttttttaattgggggggttttattttttaatgctttattaactacctgcataattaacactacaacagtacaataaatggttgcaccttaagcatgccacgatgcgtctgctgcggagcgagccaccaatcccattctcagtttctattacaggggcgaaaaacactggttaccagatgctagc

SEQ ID NO: 426615 - DNA, 362 bp, Oryza sativa
ttggttttttatttttgggggttttttttttaataatgctgtttttatttcctgtaatacttgctgcccccaaacacaaatctgtgatcgaagcacaagttcttgggagttcaacacggttaacaccacaagaaactccttgcaaaacagtaaagatgcatgtgtcctatgggaataaccaagtggggcttttttatatgctgggggaatgcatacatctggctgaacgtgtagtcatgtaaagcgcgcgttgctcaactgttacttttgtgggggttgattgacgcccggaacacctgaaaccccacaactggtgggttggttactgatgcttcttggacagaattttcaaccaaatcttt

SEQ ID NO: 426616 - DNA, 118 bp, Oryza sativa
ttggttttttatatcagggggtttttaattttttttttcattttttattttcttttaataaaaactaaaacaacataaaaaaaataaactaataggaattaacacaaaacccaacaca

SEQ ID NO: 426617 - DNA, 294 bp, Oryza sativa
ttggtttttgaattttgggggtttttttttttttttatactttttttgttttatcttttttaattcgaatagacaaacattgcaattaaaaaagggggaccttaggttccaccctaatgccggaaggattaaaaaaaactactggaactcctattttaaaggggcatgggactctgggacatgcaccttggacagggtttaagggccaaaaggagacataggagatctacctctttatctttggggggagcttaaataaaatgttttcccccctggaggaacttaccaagaaac

SEQ ID NO: 426618 - DNA, 234 bp, Oryza sativa
tgggttattgaaaaaaggggggtgttatttattaaaacgcttgcatatgatatcagataagtagagtcaacaagacaaaactagatttgtcaaagcacacctctctaattccacccacatacgccattatttttgggcaatagcaaacggctttccattcctcccttttaccagtctcaaaccataaactcccacaacaaattctcctaagtgacggccatattatatgtttta

SEQ ID NO: 426619 - DNA, 108 bp, Oryza sativa
gaattattggggtttttttttttttattttattttatgtaaattggataaacaggctttgccaaaacaaggaaagatgctaccaggtaaggtatggaaagaccataac

SEQ ID NO: 426620 - DNA, 346 bp, Oryza sativa
ttgttttttgataaatatggggagctaattttttatttgtttttgtttttttttattttttttttttttttttttttttttttttttttttaggaaacccggggggattttttttaaaaaccccgccccccattaggggaggggcccgggaccccggaggggccccccagggtgaaaggggccccccccaagctgggggggggcccccccaaaattgggcgacacggccaaccctggccaaccacgcccccggttttttttaagctcaaaaaaaaaggggagggcctcccaccaaaaaggcggggtcccaagggaagcaaataaaggcccctactaaaattttgta

SEQ ID NO: 426621 - DNA, 130 bp, Oryza sativa
ttggttttttgaacacggggggttttattattctaatctctatcaaaggaaaggctatactagcagtcattaacacaagccaggaggtcccaaagctgaaattacgaaagccatttacccacggagttac

SEQ ID NO: 426622 - DNA, 390 bp, Oryza sativa
ttggttttttaatttttttggtttttttttttttttttttttttttggttttttttttttttttttttttatttttttaaaattttttttttattaaaaaaatttaaaaaattaaaaaataaaaaaaaattttttttaataatttaccaacccaaaaaggggaaaaaattaaaaaaaaaaaaaaaaagcggttgtaaaaaaaaaacccacaaaaaagaaagccccaaaaaaaagggttttaaaaaaaaaaaacccaaccttatggaggggaagaataataagggggaagccccaaaaaatatttaaaaaaaaaccccccccttttttgaaaaaaaaaaggcccccttttgaacaaggggaaaaaaaaaaaccggttttaaccccccaatg

SEQ ID NO: 426623 - DNA, 297 bp, Oryza sativa
ttggttttttgagtaaaggggggttaataaattttatttttttttcttttttttacaaggtccaaccctgactccataataaggccatgtgacataatataatagaaggggggcataccttcgacattaaaactacggaaaactttcaggggttcttagggaacagcagttcaacttgcaaactcaacatgaataccgctcctttcaagacattttcagccagaagtaaaatttaagaggggtaagcaacatctttcagaaattgagattacctcgaaacaatggcagctagaggcc

SEQ ID NO: 426624 - DNA, 382 bp, Oryza sativa
ttggttttttaaatttgagggttttattttttttttttttttttttttttttttttttttttaaaaacaaacgggggttaatcataaaaaatcttcccggagaattagatgcccaaaattcatagggttcttcagcatcttacaacttacaaggggggccaaatcccagcgcaacttttttaaagtaagctgtagggggaaaaggaaccatttttaacaacgggaaaaatattggttttggagggaaaccttttgaaccaatttattgggaaataaatttgggggatcgtttccgtccgatctaaaaaaaaccgggcttttgtacctaaagggggtttggcctccaagtgaccgggttgacctttttggtggggagggtttt

SEQ ID NO: 426625 - DNA, 386 bp, Oryza sativa
ttggtttttttattttttgtgttttgaatttgaaaaaaaaacagtattagagaatggataaatcataccccgatgattgtcactgagagccttcaacttcatgtccaaagctcccatcatcacaaaccaaaggaagccaggccatacatatacgggctcctgaaatctctcctgaaacagtctctcaagcttcatgttctccaggcaaagtgagaagaattaagttgggggcatggccatcaggggagacctccactgttgccaagtacacataaccagccctaactcacacaactcttatgcccttgtaactgagatatgggggtcaaagagaatatcttctgggatgcccatcttgcaattccgttcctgacgactctagggat

SEQ ID NO: 426626 - DNA, 99 bp, Oryza sativa
ttggtttttttaaccaagggggttttatttttttttttttttttttttattttatttaataatctaaaaccaataatcatatcttttaaccaataacat

SEQ ID NO: 426627 - DNA, 376 bp, Oryza sativa
  unsure (1)..(376): unsure at all n locations
ttggttttttgaaccccgngggtttttatttttttttttttttttttttttttttcagggcagaaatttttctgaaacaaaaggggtccatcatcctcctttatcatctccctccttaattaaatcatcccagaataatcttttttttcctccgggaggcagtattttagggggggacaaaaaggcggggccgtaaataaataaatccaaagggggaatttacgaagcaggcaagctttaggggttattaatctccttaaattaaggcctcctcctccttaatcaacggcgaggggggaagtgctgcggtttggcggcggccccctccccggggggcttggcttccttaacggttttaaaggggcccacaagcgcc

SEQ ID NO: 426628 - DNA, 168 bp, Oryza sativa
ttggtttttggatattagtgggtgtttttttttttttttttttttttttttttttattttattacttaaaaaggataattaattaacaaaaaagggtattaagcacgtacaaacagagggacaagggaggggacaaattatctgggaaaaacacgggggaagagggga

SEQ ID NO: 426629 - DNA, 161 bp, Oryza sativa
ttggttttttgaagatgggggaaaggattattttttaattactaatacatatttcatttttcatttttaacttttcaatttcttaccatttccttttattggttcctgggaaatagccatggaatctctttacatccaacaacaaccgtaagggcaatata

SEQ ID NO: 426630 - DNA, 442 bp, Oryza sativa
ttggttttatgcaaaacaggggatttatccacaaaacaagtaccaactgcatgaagtatgatgaatagctagctagactaaccacacactcacacgacatcagacaactcctgccgcaaatgtaaaaaaacaaacaaacaagaaaacacatcctcccgatattcttttccaccactgacaaataaaaaatatcaaaaagggacgcacccattaattttcacagaagggattttttatcttagggttcccgtcccgtcccgtccctatcttcaccacgcttcatatcagggtggcaaggacctgcctcaacgctccctgcacattccaatgcatatattcacagagctagccatccaattttgggaccagcttgtgcagggttgatgttccctggaacacggttgttcgcccacccttgaggtactcacgcagctcgtcttgg

SEQ ID NO: 426631 - DNA, 177 bp, Oryza sativa
ttggttttttatttttttgggtttttaattttttttttttttttttttttttttttttttttttttattttttaatttaaatttttaaataaaaaaaaaaaaaaatattaaaacaaaaaaaatattaaaattaacaaaaatatataaaaatataaaaaaaaaaaaaacaaaaatctt

SEQ ID NO: 426632 - DNA, 140 bp, Oryza sativa
  unsure (1)..(140): unsure at all n locations
ttggtttttggagaaaggngggttttaattttttttttttttttttttttttttttgcttttttttttttttttttttttttttaaaaattaatcgttctttacacaacctctgttttttattttattctggggcggccc

SEQ ID NO: 426633 - DNA, 98 bp, Oryza sativa
gtatattgcgtatacattgaattaacttcagaggttaaataattagccaaggttaaaattgtcccgtgcacatatagcttgtgagggagaggcactta

SEQ ID NO: 426634 - DNA, 254 bp, Oryza sativa
  unsure (1)..(254): unsure at all n locations
ttctaatttncccatagacgcgcagtccaattcgactcgtgctgtggtgcgactccggccggggtgggggacgccatgagccgcacgctcctctcccacatcctccaccgaccgccgacgctcctcgcgtataggggtggttggcgaggaggatcgctcccgatccgcctacgcactcttcgactcaactgcaccgtggctgaagctactgtactcggacactaggcgcttgctcctcagtctaggaagaaaag

SEQ ID NO: 426635 - DNA, 293 bp, Oryza sativa
gtttgccataggtaaatgatagataaaggtactagatgtaaagctcacgatgaacgatcaatatggtcgcgagaacgcacttgtgtttttgtagatcgacatcgacgaattcgacatgaaacacctgatgttggtctctcagagagccgtctgcaatgtgaacgtcgtggtgatcgccgccgcgttttttgagatctgcgccgacactgccgacacgggtgtagtgctggaatcatggggcaacgttgtatttaactctgtagcgctagaatctaatgtgggtgggatatgta

SEQ ID NO: 426636 - DNA, 329 bp, Oryza sativa
atgttttgggagaagatttcaggctcagaagcagtcgccttcgtcttagccgacgtgccttccccccgtcgaccgtgatcttccagtccgcaccccgccgcgatggccgacgccggtaagcccgaccccgtgttgtcgtcggaggcgccgtcggtgaagaagggggtcttcatgcgccgcatcttccctgttcctcctcgccgccaacattttcatcggagtttacgtttttgcaaagacctacaagagagacccggaaaagaagaacgctcatattgttgctgctgcagctgcagatgtagcattgtcaatctccagttgccccagtt

SEQ ID NO: 426637 - DNA, 340 bp, Oryza sativa
ttttgtggtttttataaacaaatggggggtatcaatataaatttttcaaaacattcttaaacttacaaacatcttataactaactgggtaggccggtaccactgcagacaatctgactatagagcagtcggatagtccgactgcatcagaacaatccaatcagagcatcgccagagaaaaactataagtgacctggaaaatagaaatagaaatgaaaaaataatggtggtggtggcaggatgtagcgtgggttgatcgtttagaagcacgaaagctccttgaggcagccggtggcagtgcccttggcattcttgcagacggccatggtcttgttgttttt

SEQ ID NO: 426638 - DNA, 397 bp, Oryza sativa
ggagtgacaaggatgatttgtaatttgtgaggcataagttcttggatccacatgcaaagcgtctttccgcagatgaagcccataggaattctaaggagtttagtgaggcacttgagttactgtactccaaaaaggatgttttccctaaaatccttcaggagaacagtggtgcatttccaggattctcagggcacatccttggtcacagtggattgcagtactccaaattgtttgagcaagacaactgctctagcagcggtgttgaacatgacgggttgtttaatgtaccaaaggagccagagatgcagcaaaagtaaccacccacatgatttcatcagaaacaaactacattcatgataatgtacagaaggcaggtattatggtttgaaggcaggga

SEQ ID NO: 426639 - DNA, 431 bp, Oryza sativa
tttgtctctttcccttccttctcccttctctctctctctctgactaccagcacgaagatgacgatggtggctagctgtgcggggtggcgcgttgggcgtggaggacgctcgtcggagccagtgcccgccgttgtccccgtcgccgtcgccccaccgccgcggggtcgaggcgacgacgaggagctcggcgataggtgcggtgaataagagggagagtgggagcgggacgtggaggccgctgctggcgccggggacggcgttgccgggcgggagcttctcctgtcggctcaagacctcggccgccgaggaggacgacgacggcgcggccccggcaagggtcgccctcaagctcgcctcccttaccgcgctgctctggctccccgccctcgttggtcttctcatcggctgccccaccttgacgaccatcggat

SEQ ID NO: 426640 - DNA, 236 bp, Oryza sativa
tataaatccgccaaggctggaagcggcgcggcgccacgccacagagacgcgcacgcacggagcactagcagaagtggcagagaggaagagtaacctagcttgttgattccgccgccatggagaaggcgctcgtggagcggctggaggcggcggtggcgcgcctcgaggccgccgtggcctccggggcctcgctgtcggcggcgccgcgggacctcggggacgggctggacgcggtg

SEQ ID NO: 426641 - DNA, 457 bp, Oryza sativa
ttcctagattggccaagatattgcaacaggttgctataaagaaagaactaattgttgcgttggcaaactccaatgtgagagagatgcttgagatgtggtttactaacatcaaacgagttgggatttcaaattatttaattgttgcattggatgacagcactgaaaccttttgcaagtctaaaggtgttccattttataggcgggatcctgacgaaggagttgacaatattggaaaggtaggtggaaaccatgctgtgtctggactaaagtttcgcatattgagggaattcttgcagcttggatatagtgtgctcctatcagatatcgatattattttcttccagaatccgtttgatcatctttacagagatgctgatgtagagtcaatgagtgatggtcatgacaataggacagcttatggtttcaatgatgtatttgatgagcccttaatgggctt

SEQ ID NO: 426642 - DNA, 317 bp, Oryza sativa
tcgttggaaagctcattacagggaagtgttcgatcatggaattcgagaagctttatgctgcctagggcgtgcaaagtatctaaccgtattggaagaggatgaggtttactctgtggcaagacttctgggtgatttggttgcatatcctgcttctggtacaggacatttggaacttttagcagggcttgcactattacagaaaaatgaaaatctgccttattcgcaaactgaccttacggaagagccactgaaccttatgcaagaaggtgctatccttcatccctttgctgaagcacgttacacgggacctttccttg

SEQ ID NO: 426643 - DNA, 152 bp, Oryza sativa
tagccaccgccgccgccgccgccaccaccgttgccgttgccgcctccaccacccgccctcgaccacagccatgccgccgaagctcgacccgacccaggtggtggatgtgttcgttcgcgtgaccggcggtgaggtttgctcggttttatttt

SEQ ID NO: 426644 - DNA, 520 bp, Oryza sativa
  unsure (1)..(520): unsure at all n locations
gttttgcacttgatccgttttgtgcatcaaggccacagcatcaggtggcaatttcaagtgacgaggagcaaaccgagtgcttgatgtttgaacattcagcacggcatcgtgagaatcctcattttgcaaatgacaagggcccaaagaactttaacttgaatgaagcattatcggatggacaggaagattatcttgtagaacaagatgggggaagcgttagtagcttaccacagagtaaagccagtgggttcccgtggctcataaaaacaacagatacatgtactcgcccatcagatttgcaaaatccaaggaaggtttttgcccattcaaataggattgtaatcgatctgaacagcaatactgataggaaagaagcagctttgactattcatagcctgtcagattctgcttcaacatccctagactgtggggttaagaaggaatcccaggattgcgggattaaaaaggatgaggcgttcggggacattaccactaagactgangtggcatgtaatacgac

SEQ ID NO: 426645 - DNA, 306 bp, Oryza sativa
ttccccacacgcctcacccacctctggagatccgatcatccatgcatggctgcttctcccctgcgcctcctcgccatcggcgccgctgctgtacctttcatgcgtggtagccgccacccgcgaggacgacgagccgacgccgtgtctaggccgccgagatcatcgtccttcctctgccaaagcagttcgccgagcgagccgccgggatcgccggccggtggcggcggcggcggcggcggcggaggaggaggaggaggaggagggaagaagagcgcgtggcgggcccccctccctttcccctaggcc

SEQ ID NO: 426646 - DNA, 225 bp, Oryza sativa
tgaatctggacaaggagatcctggacacctgctgcgagggcatctcggagtgcatcgtgaagctgctgatggagtacgccagcaacgtgcagacgccgatcgggtggaagacggtgcttcacctgctgtccgtcacggtgcggcacccggagacgttcgaccagtctgtggccgccatgatcaagctgatgaacgacggcgcgcatgtggtgactcctgttcaac

SEQ ID NO: 426647 - DNA, 462 bp, Oryza sativa
tgggttttttttttttttggggttttttttttttttttttttttttttttttttttttttttttttttttttttttttttttttttttttttttttttttggggggggggaacaacacaaagagacccgagaaccaggaaaaagggggggggcaaaaaaaaaaattcggtggggggggaaaataaaaccttaaaaaaacctccccccccaaaaaaaagggttggggggaataacaaaacaatccctggggcaataaaaaaagggccgagggggttcccccaaaaaaaggaaaaaattccccccggggttttcggggaaaacctaaaaaaaggggaaaaaaaaaggggggggggtccaaggggggaaaaaaacggtgattttcggaggggccccccccaatttacacaccccccctggggctttggggggcaattaaagcactgggggtggaaggaaaaaggg

SEQ ID NO: 426648 - DNA, 233 bp, Oryza sativa
tttgtgtttttttattggtttgttttttttttttttttttttttttttttttttttttttttttttgggttttttttttttttttttttttaaggggcaagaagggaaccacccccaacccctttctttttgaattaaaaaggcccctcatcaaaaacaatttttatgaaaaactattgataattaccaaacccacctttggcctaaagggaaatgagcggaccccggggggc

SEQ ID NO: 426649 - DNA, 174 bp, Oryza sativa
tacttctctcacaccaaaaccagtaaaaaaatatcgtcaccttcgccggcgagatggtccaccgccgcatcatcctcctcctcgccgccgccgccgtcgccgcgacctccgccgtctttcggcggtcctacggtttcttcgacttcaacccgatccgcttcgttacggttcact

SEQ ID NO: 426650 - DNA, 529 bp, Oryza sativa
ttcttccaatggtgatgtcaggcagagagtgtgagagagaaagacgaagcagtcaataaggaggcggagaaagaggagtgggggaagaagagacgcgctcgggatagattccggccatgtcgtctgcgttcggcgacttcggcccgctcaccgagcggcgccgcgcctagaaggctcgtcagcagctcatgctcatcatgatcgccctcggcacggtgtccatcatcattatcctcatcgtcatgggcgccgccgccatcacgtacagcttgaagaaatccgatgcggactaaggccgcttcatggtctcgatctacggccccttctcaggctgctgatgtggagacttccaccactgctgccttctcttttgtaatgcttccttttactccttgtcttacatattttttttctttgcgctctcacttttttccctgtctcctttctcctcctgctttcctatgtctcttatccccttctctcttttccccatggcttttttcctctccttcttgtcctttcctctttt

SEQ ID NO: 426651 - DNA, 436 bp, Oryza sativa
cgcctccctcgtctcctcgacgcgatgccgccttcgccctctctcaaaccctagcctccgcctccgcctttccctcccctccccgtcgcgggcgcctccgccgccgcgtcccccgtccccgtccccatccccatcctccgtccgctagcgccgccgctccgtccttcccatccagatcgcgccaccccgtccgcccgcgcgtcgtacgcctccaccagctgccggtcctccgcctcccggtcaagatccggcaccgcgccgctttcctccgtcgccgccatcctccgtcgcctccgcctcccgttcgagatctgcagccccttctctgcacgtcggtttctgcgctgccgccaagaaggtttcaattttggtaggaacaccatctcaagtgcttatttagcagatatttgcttgtggcgagacagaaattggccct

SEQ ID NO: 426652 - DNA, 524 bp, Oryza sativa
tttgcctgctattgcatcagtgcttattttggtgcatgaggtgtgaatatattacatgaacttgcgaggtggttgcattataatacacaaacttgtaaaacattcgttccggtgcacaaacttgaggtttgtgtgaaccaaggtcaaaagggcaaaatatggctaatcttgctgagttgagtgttgattaggatgccatgtaagcatgcatgttaggactatgccatatacatatgcatgtactgagtaaaacatagaacaagacatactgattgaacaaagaaagacatatagcaaaccgataaaggatgcaagggatacaaaggaaggacaaagtggaaaccaagtacaaggttatttgcaaatataacatgtatcatgccctcctcacatgtgcacgccatgttctaatgagcatccaacttggtaataagttgccatgcccttttggccttggtttacacgcaccagacatgttcatgcaccaaaatgaacgtttaataagtttatgtgctgcaccccct

SEQ ID NO: 426653 - DNA, 380 bp, Oryza sativa
tagcgacccttgttgcgctccggctccgacggctgcccctggcgcgggtgcctgagccaagaacaggatcggaggccaggccccatgcatgcatgggaattagtgtgggactgatcactttatcccattagccattagctgattatcatccagacggacgcgccatccaacacacatagatcgatcggaggttgcttggccggacatgacgacgacggtcgccggcggtgccaccctgtgcgcggtgagggaggagcatgagctcctgtccacccgcctgaatgtgaacggcatccgtctcgccgcattgtgccgcggaatacatactcatatacctcaccgtgccagggctctccatgacgcccatgcgggtgatgggc

SEQ ID NO: 426654 - DNA, 198 bp, Oryza sativa
gcttcaaagccttttgcctctctatcaactttctttattgactgataatgttatatacccaaccttaagcatccatgtacccttatgaacatgacagaaaggatgtaggatgaaaacacattacaccatttatcccattcgtcatcttcaagaacctttggcgaaggggtgaagcaccggtgccgcctttaaccaggc

SEQ ID NO: 426655 - DNA, 237 bp, Oryza sativa
tgtgtttttttaatttttggttttcctaaactacatatttttcaaaactcgtttaaatcccaacacaactcaaggttcactcaaggttcaacaataaatttcctcttagccttcaaaagaaaaaccataaaggtaaacatctctcctactctacacaaaacatctctatcttcttttccttcatccagcctcctcgtctttaacactgaccatactaagaccctcctctactgctac

SEQ ID NO: 426656 - DNA, 254 bp, Oryza sativa
ctggtacgcctgctggtaccgctgcggacagtgtattgccgggatcgaccacgcgtttgtgatctcgcatcagaaagtggctgttgcaggctcatcagggagcgacgacagccgtgtgacggacacgacccctcgacgactgcggatatgggcgctgaaggacgactacgctaagttggagcttcgtgacaccgactccagcatgggcaacgccctttcgcgcgtcatgatcgccgaggtttccaccgtcgtca

SEQ ID NO: 426657 - DNA, 339 bp, Oryza sativa
gctccgcaccacaaatttcctcttccaccctcaacagcgacgacgacaaccctgcgacggagacgaccccgcgacgacggcgaccatggccgacagcggcggatctcgctccgccgcgtcctcctcgctccgcgcgccgtcgatgccgccaccgctgttgtgtttgccgtcgtcgcccttgccgtgcgttgtggaggtcgcgatgacctcgagcactccagatctggcctcgagctcgactgggcggcgtcctcgatgcggccaccggcggcgctgccaccttctcctcctcgatgcggcatgggaggagggacgccaccgtgcgccactcgggggcgc

SEQ ID NO: 426658 - DNA, 264 bp, Oryza sativa
  unsure (1)..(264): unsure at all n locations
tttgggcttttaacccccttgggtttaaactttttttttttttttttttttttttttttttcttttttttttttaaacccaaaccccctttaaaatccccccattagaatatgcctccatatccttaaatcccantttcacaaataaaccccttaacaattccccnncaaatcccccctatccaatttttaatttcccacaattacccccccccctttcttttttccctcttaaaaacctttnttcttaaataaatccnttaat

SEQ ID NO: 426659 - DNA, 484 bp, Oryza sativa
tcgttgttggtttctagctttaatttggtgccctagagtgattgctcacagtttacgtgattgatttggccaccgaagttcgtgttcatgttcttggttgtgaaccagtatatactgttaagttaaaattctaagctaattgttcggtttggacaagaaagatattgagggttactgggttaggattttgtgcttcagtttgatcactccattgatgatatccaaaaagttgcataccacatcatgtgacgcgaacactaatccgttaagaattacaggaaaacaaaagtgtacaatctcatttgtagtaatatgatttacagacactgcaaattataaagtacggcaataaacacaccagtctgaaatacttagttatcttctttaatatgatcatcgagatatgcagatccgagctaaattagaagtataacatatactgtcttttgatttttcaaatgttgaatatgaaaattatgatatt

SEQ ID NO: 426660 - DNA, 310 bp, Oryza sativa
acactatagaagagcttgaggtgagcacctcgaagctgatccttaggcgctttttgtttgttggaattaaaagacaataaaaatatatgtgtaaggaatgacaaatgtaaaaaagtattaggtacaaagtattggaaaaatttaatgcacgataaactggaggatgccaaaatgtaatccggaacaaacaggtactgggtatgcttggtgcccgacatgtggcaatcggagagtacacttgaatctaacgaacgatataccattgtgatgagaacaatgaaaactcaggtaatgaagatgaggtgcatgt

SEQ ID NO: 426661 - DNA, 419 bp, Oryza sativa
agatacaagaactaactgaatcagctaataatatgccaatctcgtctcacaacttgcttattgaacaacaggatataccgtattacgtgctgcagtattacctttcgtgttcgtaaatcgaactgaaatgaacacatactaattctgcaacctagaaatagctgattttcccgtaggagactatcagagaataagatggctgaacagatttcaaccagagggcacaacagcaattctttgtaaaactcacctttgcattctatgaccgacattggtccaaccaactgtaatcatccgtactatttgcattacagtgttgatgagttccagcttgcatcgacagcacccacaattctgtgatgaagcaatggtccggaacaggctattatgcctctatccaagcccttctagaaaacacc

SEQ ID NO: 426662 - DNA, 343 bp, Oryza sativa
  unsure (1)..(343): unsure at all n locations
tgatgccgccgtcgatggcggtggcggcggcggcggcggcgccacgcagtctcctcttccccgtctcgccttcaccctcgcagccgcggcgtgtgccagccttggcaagggctggacggagccagaggcggcatgcggcgctggcgaggcccgctcgccgccacctcgacgacgcgatgtccgccgggttcgtccgcagcctcaacgccccgcctgacgaggacggcgcgggatccggcgggaggtacgaccccaggccgggggacttcgccgcgngtgtggtgggtctccggcaccgaggcccgttttgacgtcgtccggggcgccgaccgccttgccacgc

SEQ ID NO: 426663 - DNA, 500 bp, Oryza sativa
tttgttttactgctgcacgttgaggtagttgagttgcttgtttccattgaaatagtaaatacaagtgaactcaagttgtacaaatagtggatgctatcaaatgtgatgttttctccacggagctacttggactaatggattaaacattcacaaaatgtgtcattttcggtccacagcgcatcaaaattttccaaggaacgacaggctcacaaagaagttcctctttgctgataggagtacggcatacgccgacaaagaaattttgttgctgcttcttttgttgatgcagttgccagatggagctgcatgttgctactcgtagaaccgttaatgctggttctttgctttggaaagtgctgtgctctcaccaagaaccgttatttctccaggtcatccaatgaaggttcaacttcatatgcttcatgctaagctgcttatatatgctatttttcttcagcagcaagccagcaaccagattgttctcacaacatgtaatccct

SEQ ID NO: 426664 - DNA, 215 bp, Oryza sativa
gcgacatcctccctctcccggcgatggcaacggctcagtgacgaggaggtcgcgacaatgatgacaacgccttctggatccgctgccggctcgccccgggcacacggatccaccgccgaccggtcgcgggcgcacggatccgccaccggctagactcggggaggggagggatggtggcggcgacaaggaggtgaggggaggggctgggaggggag

SEQ ID NO: 426665 - DNA, 492 bp, Oryza sativa
ttgtttgttcattttctgtgtgttgatgcgctgtatgatggtctgatgcaggatggtcgttagataatgaaagatatgattagttgttctctcccagataacactcttaatgtgatgagtaaatttcattgtatccttgtatgtatctgctagttgaatttggaacgccgattttacctttcctagcacatgtagcagcgaataaatttctgaattgtataatattggaagatttatcaacctgaacctctgtagctcattcaagaagcttattcttgccccccgtcaatgcattaacaaagtgcatagactttgtagttgtggtttactgttacaaacttgagctaacatttggagcagaagagttggagcacatggtgttacatgatcagttttgtactcataaaccatctctagggagctttcatatttccgtttatacttgatttgggttcttggcttatgatatcaaattgcatctttttatgttta

SEQ ID NO: 426666 - DNA, 525 bp, Oryza sativa
ttttgttattcaaatgccgcacggtcaaattgatttaacattcttgagatgtaatacagtaatcggttttttcccaccttaacacagtaattagagcttaatgatacagtctacaaccatcaattcatagctcaagagagattatgcgacgaggtcttctggctgcaggcctcccggtattcatctatttctttgggttcccaaagaatttagagagccgcacaggtccttcctcctcactatcactgcccctgtgcttggatcttgacctgtacttcttatccttttttgtcctcttcgatctggaccgtgacctggactttctcgaatccctatcctcatcatcactgcttgatgattccgacgatgaactggaacttgactctgatgaacttctatgctggaatttgtagcggttttatttcatcagttcatctattgtagttgacttcgaaatatcctaaagttaagggtatacctttctcctctttttactccgttctttgcatctttatccttcttctc

SEQ ID NO: 426667 - DNA, 178 bp, Oryza sativa
tcgtccgcgtccgtgtcccctcgccgccgcagccagcgtcgagggctcggcgaccggaggaggagaggccggaacccgccgccgacgccgtcgcctccgcctgtagcgagatcgctcgatccgatacgcctcccgcgcgccagtccgccagcccagttcgatccgatgagggggaggc

SEQ ID NO: 426668 - DNA, 76 bp, Oryza sativa
ttatttataaccctacctctcatctgcagagagatgatcttcttaagccgtcagccgacagcttccaaggctcgag

SEQ ID NO: 426669 - DNA, 305 bp, Oryza sativa
ctatggcctgcgccaaaccctagctccgtgcgagagagccatcatcgccggatcatcctcaggggggagaaagagagcggaggctgctgcaggggcacgacgccgcaggtagggcatgaacccatctatggtactactatacctcatacccaaaagagccactctctaccattcttctattccaaggagaaccgcggaaaacctctatcctccccagttctttctctgcacccactgccagcgccgcaagtgaatttacccaagtataaccaaccactctccggcggctgaggcaccctacctta

SEQ ID NO: 426670 - DNA, 177 bp, Oryza sativa
tcgtagatgaccgggatagggacaaaagtagtattgtgaaggatgaaagtgatcctaatagtgcttacaaacggcgaatgaccaagagagatcactctggttttgaagctggggattactcaacctctgcttctcactttcccatttatgacactagtattttacaagtgcttgtat

SEQ ID NO: 426671 - DNA, 60 bp, Oryza sativa
atgccgacgcacatagcatcttttaatagtgtcacactaaaattaaaattaaactgggcg

SEQ ID NO: 426672 - DNA, 429 bp, Oryza sativa
tttggttttttaaattttttgggtttttattttttttttttttttttttttttttttttttttttttttttttttttttttttttttttttttttttttttttttttttttttttttttttttttttttttttttttacccccaaaaaaaaaaaaaaagtttttattttcctttttttataaaaaaaaaaaaaaaaaaaattttcccccccccccccaaaaaaaaaaaaaaaaaaaatcccccccccccataaaaaaaaaaattcgcaacccccccccccactttttttttgcgccccccctgggccaccccccccttttaaaaaaaaaaaaaaaagggtcttttttccaaaaaaaaaaaaaaaaaaaaaggggtttttaaaaaaaaaaaattccccccattttcccccccccccaaaaaaaggggggt

SEQ ID NO: 426673 - DNA, 324 bp, Oryza sativa
tatcgacctcaactcggacgacgagcagtcaccgatgtcgtcggacttatcccccacggcgacggcgacggcggcggagttgtcggcggaggcggcgggtcacgatcagggcggggagcagcagatgatgaacagcagcaagaaaggaggagggtgggcgcgagggggccgagggaagctgcaggtggcggcgccgcacagcccgcagtcggcccccgccggcagtgtggggcacttcgagccggcgagccctcgtcacaagcttgcggtgagcccccgccaaaagtgccctttcagcccacgccagtcgcctccttacgccca

SEQ ID NO: 426674 - DNA, 118 bp, Oryza sativa
ttttgtttggatccgtcaaggctagcgagccacccatctcccatacacagacgactccctccacccccgccggcgaactgacactggcccacgggccaccggccgagaaaggagcagg

SEQ ID NO: 426675 - DNA, 447 bp, Oryza sativa
ttttgttcgaacaccagctaaagctccatacagagaaccaacaccttctagttcgtccagaggtggccatttttcaggcacttcaccaaatcatccactgccaccacctccaaggcacagaagtgatgattcttcatttctgggtttgcatgatgatgatcgtaggcctcaaagtggagacaggaggttccatcagaagaggaatgatatgagttctggacgtgggcatggacatgcctggaacaatccaccgagctggccttctccagttgcaaatggttttgctcccatgcaacatggtgcgcctggatttcacccccctgttcatcagttttctgccccaccaatgtttaatctcagaccccaaatgaagttgaacccacctggagtttcatattctatgcatgagtcaagtgacaggttcttgacccacatgcgcccatttgg

SEQ ID NO: 426676 - DNA, 157 bp, Oryza sativa
ttaataaaaaaaaaaaaaaaaaaaaaaaaaaaaaaggggcggtcggtaataagaggatcaagtctaacatacacgagcatgcaacgtcatagattttgggtagagtcaccaaaggtcaattcactgccccccgttttacaacatcttgactgggaaa

SEQ ID NO: 426677 - DNA, 341 bp, Oryza sativa
tcgtactgctcttcagtcggtggattgccaccgcctgctgtctggttaattcttcagtgcctgcaagctattgaaggttggctggcaccaggtatagctttgaggggcaagttatctttccttgatcccagcactattgatcctcacaattttatggctttgcttgaggagcctttgacttctaacaaaggcaaaccaaatataaatattgctgaagtgaatgccaagataaatgaagaaccccgaccaggtgatattgcagatatccctgagtcatttagttcctctgttcaagatccggacaatccgatgctaattggtcaattagggttggcttatcc

SEQ ID NO: 426678 - DNA, 90 bp, Oryza sativa
tcgtattcttggcttgtgctctgttttaatttctttgcaatgatggggtggcagagctcgtcggcggtgaggagggtggtggtggtggtg

SEQ ID NO: 426679 - DNA, 235 bp, Oryza sativa
tttgtgtttttaaacaatcaagggaaaaagcccactataataaaatagacaattatatatatggggtcccttggacgaaaaaaaataacatacaataacagatattctagacacaatttctctcagaaggggaacagccttactaagttagaataaatatcaccattatttactttgtatctctaatattactccaagcaaaacaactacaggccccggtactccaaaaagccct

SEQ ID NO: 426680 - DNA, 467 bp, Oryza sativa
tcgttgactacggcggtggctcctccgacctctcgatgctcgtcggctcgagcggcggcgggaggaggacggtgggcgacggcggtggcgaggcgccgaagctggagaacttcctcgacggcatcttattctccgacgtgcacggccaagccgccggcggatacctctactccggaagcactgtcaacggcgccggtggttacagtaacggcggatgcggcggcggaaccatagaactgtccatgattaagacgtggctccggagcaaccagccgtagtctgagtcatcgccgccgcagcacgctgatcaggacatgagcaccgatgcgagcgcgagcagctacgcgtgctccgacgtgctggtggggaagctgctacggcggcggccccgggggcaccgccagcttgcatgggcagagcctggccctatccatgagcccctggtccgtggcatccactgcaagggg

SEQ ID NO: 426681 - DNA, 175 bp, Oryza sativa
tcggtgatatctcgccaaaggcagcgtgtgacgcggcaatgtttgaatcaaacaggctttactcccacataataaatataaccacaatgacatccatacttttcccagaggttatggataaacaataggaggcgggggcggtaggttactagaatctatagggaaactgcgggag

SEQ ID NO: 426682 - DNA, 98 bp, Oryza sativa
ttggtgatatcccggcaagagctgcgcgggggggggggttgtttagatcatgcttgcaattcgagcactcatgaaacataatcaggaggccatccata

SEQ ID NO: 426683 - DNA, 154 bp, Oryza sativa
  unsure (1)..(154): unsure at all n locations
aaaaaccggcggaacagcaacccaacgcccgaaaaaacgcaggcaaaaacaaacaaagccangaacccaaaacaacaaaagccaccacaaaagggaaaccccggggcacccaaaacaaccaaaaaggcacaacagccgggaagcccgcagggcg

SEQ ID NO: 426684 - DNA, 109 bp, Oryza sativa
tcgttacaccccgccaaggggcgagagcgacgccgcaatggtagacacaaacaagcaccgagcccacacaaaaaacaaaataagaaaggcagtccaaacacccaccaaa

SEQ ID NO: 426685 - DNA, 97 bp, Oryza sativa
ttgtttatatccgggcaaggggagagtgagccggggcaatgtttggatcctgcaagctccaatccaacacaaaatgcgaaaccagaatgccaaccag

SEQ ID NO: 426686 - DNA, 78 bp, Oryza sativa
ttatctcccatggagtccccacccaaccccctcctcctacttttcacgctcctcgtcgccgacgacaaaaaataaaat

SEQ ID NO: 426687 - DNA, 406 bp, Oryza sativa
tcacatgcactcatacataatcttgcatccataataccccccccccttctttttttgtccttttaacccctttgtttaaaccccccccatcatttcttatatacaaaatacctaaataccttccaacacaaatccactatatccataattccacaccttaaatttcacaaaaacaaattctccacacaaccaaataacctactataacaaaactaaaaccaaaactccaaactccaaactataccctaaaacactcacaaacaacaatccaattcttttttttcacaaacccaccattcttaatctacccttcactacaatcacaatacctacaacaaccaacattccacaaccaaacaaacccactacctctaacacatctatatttccactcaaactccaaacc

SEQ ID NO: 426688 - DNA, 142 bp, Oryza sativa
tttattttccaccccgaatcccggttgacacggccgggacccttacaacctgaggttgggccatcatcagagagaagccctgcatccttgctcaatccgagaaaattctgaaatcattgaactgcgaaatagcgatggcatt

SEQ ID NO: 426689 - DNA, 406 bp, Oryza sativa
  unsure (1)..(406): unsure at all n locations
tttaattccaagggagagatattaattatagattcaaaatgcatcaaggaacatgctgtgattcccatcccaggtggaacagtagttaaggatattgttttcagcagggatggccgatatctactcacaaactctaatgatcgggtgattagagtctatgataatcttctgcctgttaaaggttctggagaggagatagaaaaaataagcagtaacaacattagctatgagagtcactacgagaagctaaaagcaaatggtgcaagctgcctagctatttcttgtgaacttttggatgctatcgcaaagataccgtggaaggcaccatgctttagtggtgatagtgagtggatngtttggtgctttagcaagcaaaggagagcacagattgtgcattatgaaccga

SEQ ID NO: 426690 - DNA, 95 bp, Oryza sativa
tcggtgaaatgtcgccaaggacagcgagtgccgctgcaatgccagactcaagcacgcaccatgcgcacatatgaaacagaatttgaaaggcatcc

SEQ ID NO: 426691 - DNA, 130 bp, Oryza sativa
ttggtgttaccccggaaaaggcagcgagagggggggttatgttaacatcctgcatgcttcacgaccacctaacaaaccgactcacgaaactcatgcacaacgtcaaaaaaccatctgccacaacaccaaa

SEQ ID NO: 426692 - DNA, 79 bp, Oryza sativa
ttggtgatatcccgacaaaggccgcgtgaaccggggcaatgttaacaataataaagcggttatccaaaatacaaaaccg

SEQ ID NO: 426693 - DNA, 305 bp, Oryza sativa
ttgtgtttttttaaaaaaggggggttgtactaatcctgaacatggcagtaaaacacttgtcaaaggaactaacaaaatggccttcaacagaccacaaatctacattaaatcaatgcttgagcagcgcaaagacacaccgaatgggagcaaagccaacgctggggtcgcccgttacaactgaatctttggcgtgttacaagggtcctacccggccacacaaggaaaggccaggttctctagcgaccctgggccagatgccacatgaaacaacaaaggggccactagggtgaggatcctattcttct

SEQ ID NO: 426694 - DNA, 66 bp, Oryza sativa
taaccttagccgccgccgcagccgcagccgcagccgcgcgtcgtctcctccgcccgcgagctcctc

SEQ ID NO: 426695 - DNA, 84 bp, Oryza sativa
tttaatgtagacaaaaagcgtgaaagctgacaggagcaatatttgcaaggatgcacagtttcacctctcggagaaccagacgac

SEQ ID NO: 426696 - DNA, 74 bp, Oryza sativa
gtgattatccaccaagagccccaagggaccccggggggccaatatgaagcaagagccggtacagccccaagcaa

SEQ ID NO: 426697 - DNA, 58 bp, Oryza sativa
tcgtttagacgccgggaagagcaccttgtggcgcggcgtcgataacatcccctttaga

SEQ ID NO: 426698 - DNA, 177 bp, Oryza sativa
tcgtacactcttgggggggcaggcagccagagccatgtcaaccatcctcgccgtggtcgtcatggccaccttacaggctccgacgaccctcccggggcccctggctcctacgctaccggttcgccggaacgacatttcgatcgtctgtctccttcaggggcgtgcgttgtgaaggtt

SEQ ID NO: 426699 - DNA, 404 bp, Oryza sativa
tttggtttttttatttttgtggggtttctttttcttttttttgggtggaaaatcccaataaattgggcctactagctatgcataagacccagttggacccatcgggagctcctctggaaagagggttattaacaatccaacaacgtcaacctatggagacagccagccagaatccccttataatggttccaaatcaacctagcctaaaaaggaaccgtcagaagaataccaagcccaagattaaactaatagcacatcagatctatgcgcatgagtcagaaatggcccccagccacgttctgaaagaaaacatacctatatacgctgttcatttctaccagtagcctttgcacgttcagatgtgcatggccagaaatgaagtaaaggcgatccaaataatactc

SEQ ID NO: 426700 - DNA, 177 bp, Oryza sativa
tcgtaacatatggtcagcaaacatcttcatatggactcctttgtacgagtacaccatatagcattatggacaagtatgctcctggattcttggctccaagtgcacaaagaagctcatctatggacatttaccccctttctccaagttcatttgcaagctcgcttatccacaattttc

SEQ ID NO: 426701 - DNA, 173 bp, Oryza sativa
gtgaatccgcagaaagagcagcaagcgacgctgtaacgagatcatgcaaaaggggttgcaagagaaaaggggctggagcaagagaggccacgcagaatggaggaagatgagatggaagaagaagggaaatctggaaacagataaatagccagaactcatgacaaggtggatga

SEQ ID NO: 426702 - DNA, 351 bp, Oryza sativa
ttcactcccccccagatcccccaaccccattattaacccaccgccccccgcgcgcgccactggatctcgcctcgatcgcggcggtggcggtggggaggggagcgcaccgcctgcccagccatgagatggtatgcttcgctagcctgaggagggctctgcctctgctgctgcgcgccaccaccaccaccaccccccgcttccttctccccagggccctctccggcggcgttggcggcggggcggcggtggatgcgcgcgcgcttctccgtgggcacagcgggtggcgcggcctccgggtggccgccaggatgatgctagacttcttcgacttccgcgccgcttgggggcata

SEQ ID NO: 426703 - DNA, 221 bp, Oryza sativa
cccctttattttttttttttattatttttttattaatatattaatttaaataaaaaaaaaaaaaaaaaaaaaaccaaccaaaaaaaaaaaaaaaataaaaaaaaaaaaaaaaacaaaaaaacaaaaaaaaaaaaaacaaaaaaaaacaaaccaacaaaacaacaaataaaacaaaataccacacctcttctccccccaccccccccacccttccactcccc

SEQ ID NO: 426704 - DNA, 88 bp, Oryza sativa
atcccaaccgccgcccaaacgccctggcgggaacgattgaagcgtaggtgcgggaccagaccaccagattcctcctgaaccgccttta

SEQ ID NO: 426705 - DNA, 79 bp, Oryza sativa
tcggtacactccaccccactccactattgcgctcggctaatttaacatcaacctaccttgattttattgcgaccgatcg

SEQ ID NO: 426706 - DNA, 89 bp, Oryza sativa
ttcgtgaactcgacgccagaacagaaaagagcacggttaatataacatcaatcttcggaggatccacccaaatccaccgatagcagcac

SEQ ID NO: 426707 - DNA, 158 bp, Oryza sativa
ttcgtccaaccgattccgcagcgccagcccactgagtcctcaccgaattctctcattttttttctctctttccattctccccggcgatcgagtagtcggcttttgttcgccgcctgcacgccggagggaggctaggttcccttttatttgaaattctc

SEQ ID NO: 426708 - DNA, 316 bp, Oryza sativa
tcgttccccccctcctctcttcttcctcccctcccacggcgactcgccgccgccgccgacgccgacgccgatccggtctccgctccaactccggcgagattggatttgggggcggagccgatccgatcggggtccatcgcacggaggaggaggaggagggggtgactcgtcgatgcgcggccagatctgcggcggttgctcggtgggaggtgccttggcgggcaacatggacgacgcggtcaagtgcttttgcattgggaaggccgaagtggacaccttacaaagtgtccgcactcgcaagttatctcttctaggc

SEQ ID NO: 426709 - DNA, 534 bp, Oryza sativa
  unsure (1)..(534): unsure at all n locations
ttattttttatcataccctacaggtaattctcaaaatcggagagatttacaaggacacaatagcgatataagtatgactccctcggagctctaattatatagcacaaggatgattcaggactcatccaccatataactataactctctcagggctccaatcatatagcacaaaaaggattcagaactcatccataaacagtgacgatgacccgcaaccactgcgagaaaaccttgaccacggacaacgtcagagattttagccacaggataacaaactcacaggaaatggaaggaaagtgagaaatatctgcagccgccgtcagcctcaggcctcagtcgctggcaaacgcaccgcatcagcagcagcagcagcagcagtcattccaagcgagagagctntgctttcgcgagtcgcgcgacttcgtcaggacaggaaaaaaccggaaaaaaaaaaccccgcaataaaatttcctcaacttccgttttttcttgcttttccaacaaaacaaacacccatttccatttaccatccc

SEQ ID NO: 426710 - DNA, 282 bp, Oryza sativa
ttgtttttttaaaaaaatgtggtatcacacccacatatttaatctttcaaaatcccaatatactctaatattcattaatcctttaccccaaaaaaaaccctcacaatctttcacactaactaactattaaaccaaaccaagtaagctcaaacttacacatctaacgaccaacatgcatatatatttctagctagaacattgaccacaaatcatacacatagaaacctttaaattacagccttaaatcaatgcacccctcctttcttcataaaatgtcacatc

SEQ ID NO: 426711 - DNA, 132 bp, Oryza sativa
gtcaatccctagccccgcccgcgagcgccgccctcgccggctcgtcctcagggggttgcgagagagcggaggctgtggcaggggcgcgccgccgtaggtagggtatgacgttttcttactctgggtggtccg

SEQ ID NO: 426712 - DNA, 174 bp, Oryza sativa
ttttgctttagtcgcagccgcagccgcgcgacgtctgctccgcctgagagctcctcttcctgccggcgagagatcaggagcacgcaaggctcgcggccatggacgctgagacccacacgctcgcactcaccccgataccaatcatctgttattcttcattatcaacccctctta

SEQ ID NO: 426713 - DNA, 65 bp, Oryza sativa
ttgaataccacccccgacccacaaatcccgcggaagggaaattttggagaaggggacgttacaaa

SEQ ID NO: 426714 - DNA, 163 bp, Oryza sativa
tcgttaaaaccccgtaaaaaaccgcaagtggcgttgttacgatacgattcagcggccttatctcccaccaagcaggcagatatagagagttcaccataatgtagaattcagttgctggcatatcctgtctccacctatccttataattacttgacgggggagc

SEQ ID NO: 426715 - DNA, 62 bp, Oryza sativa
ttcgtttcacattgaatacattatttcttaattaatcttacgtctctttttattgcgcttta

SEQ ID NO: 426716 - DNA, 121 bp, Oryza sativa
ttggtggtatgccctagtgaaccaagaaggctgggcgcattgaagaggtgatgagcctacaaggtgttctactgggggactgcttcaatgttcatattaagtacactgcggtcgtatcttc

SEQ ID NO: 426717 - DNA, 435 bp, Oryza sativa
tttgtttttttatttttttttgtttttattttttttattttttattattgaaaacaaaaaaataacaaacaaaacaaaaggaacaaaagaaaccaggaaaaccaaaaaaaaggaaaaaaaaaaaaagaacaaaaaccaaaaaaacaaaaaaaaaggaacagggaacaagggccacaagggaaaggaggcacaacgaaacaggttccgaagggggcaaagaaaaccgaacgaagaaagccacaacacaacaagccacacaaaagaagcaggaagagaaaggcagaagaaccaggacaaaaaggccagccgggcaaggcggccaaggaaataaaggaaacaaggaacaggaaaaaacggacccgcaacacctgaacctaaacaagttaagaggaggaaaggagccaggggaccgcggaaaccaggccacgcaggcaa

SEQ ID NO: 426718 - DNA, 52 bp, Oryza sativa
tcgttcgccgaacaccaactcctcgccgccgccgcggaggattaggaggacc

SEQ ID NO: 426719 - DNA, 68 bp, Oryza sativa
tttatttaaacaaacacaaaaaaaaaaaaagaggggggaaaaatgggcggccgcgcgggtgcaaccaa

SEQ ID NO: 426720 - DNA, 465 bp, Oryza sativa
  unsure (1)..(465): unsure at all n locations
ttggtccttgaccctcttgtttttaacttttttttttttttttttttttttttttttttttttttttttttttaaccactataacggggggacaaaaaggatttaaaaaaaagggcccttcaactgctgaaaaaaccggcccaaagctaaaaatccagggttaaaaaattcccttcccagctaatccaaagtgggatcttagcaaaccattccgnccttatttctcacccctatcagaggcccccctcaaaaaaaaccttggaaagtcaagttcccnnaatccctatccccaaagccctgnntaaaacccatcactccccaaaaactaccccactttgcccgcccccaacccccctatgttttcttagcccattggccaaaattctcaaaaaccaaaaactgacccggggcaaaccacagccccaaattggggaaaaaatcggaaaccaccccccccaagttcct

SEQ ID NO: 426721 - DNA, 331 bp, Oryza sativa
ttctgttacctctctggctggcccctatccaaccccgagacgctaggcagaccatgccatctctctgttgtactggaagatatggctggagcagctcaacctcttgcttttaggcagcaacgcactttagatgttacaggaatttcacacccacttcaagttgctgttcacgaatctgttttaagacaagcgctgagtaatcttatagagggtgctcttctacgcactcatcttggaggccgagtttcagatatatgctggtgaagcacctgcaggacgcattctccgtcgccattgatgatgaaggcccctgcatgcaatacatgacaca

SEQ ID NO: 426722 - DNA, 91 bp, Oryza sativa
ttgatcaaacccagtcccaggctaaatactgggtggtgacgattgcaacatccgtagcaattttcgccctatccgacgtattcaccgcctt

SEQ ID NO: 426723 - DNA, 99 bp, Oryza sativa
ttggtgttgacttcatttctgaaaatggagacgactccatagttccaaccaaatcgaagatgatacatcaactagatgcaaatattgttgaggacgaag

SEQ ID NO: 426724 - DNA, 380 bp, Oryza sativa
cccccccccttcccttttgtccttttacccccttttgttttaaccccacaccaacaaaaaagcacttcttttcataaaatcagtatttacctctaccatacaacctaactaccatgctacatttccttatgctacaaaaacctccaaaggagttcatattaacctttttccacacaaaacatacttcccttgaatgcacttaaagatctccataaaaagcttaacttataactgatctaatcaaaagcatcagctcactttgcatccttccttctaacatttccaaatcagaaacattggaatgatctccatcatgccaatccaacattacctttatcttctaaacatgctttgattactaaaattcaactaaactcctt

SEQ ID NO: 426725 - DNA, 119 bp, Oryza sativa
atcgattcctccgggaaaaaccctaccacccgaatccacgccgccgccgccgtcgccgccgcgctctcctccggcgagagctcagggggattcgatcgcgaccggcggaggaggtgagg

SEQ ID NO: 426726 - DNA, 144 bp, Oryza sativa
gtttagtaaggtgtttgggttattgatggtgtggtggtcctcaatacccccccccccaccactcccctcacccccccctctcctcctaccccctccccaccctgcaaagctccaacaccaactttcccccccccctgccccccc

SEQ ID NO: 426727 - DNA, 198 bp, Oryza sativa
gttattttgaagtgggacagctcccttgtctcccttgtatcatgtgcatatggctcataacgtaataatcatacaattataaacccgggttccagggggtaaaactaggaaccaccatcttccccctcccactcctcacatgacaccaagaactcaaccaaaactcattcccaaaacacgctgcctctttacctaggc

SEQ ID NO: 426728 - DNA, 283 bp, Oryza sativa
atgcgttatatcgggtatagctagcatcttactagtgttacatatttactggtggaaactcatatgcttaatgataatgaaacaattgaacaataaaggacaggttggagaggatgttcgatcagattctgaggatgaagagtgatggagcgattctttgacaactgtgatgtgtgccatttcattgctgatacttttctgtgcctgcttttggtactaaattgttttggtcttggcaagctaggagcatagataagaaagacttgcctctgtatattggcct

SEQ ID NO: 426729 - DNA, 69 bp, Oryza sativa
tcgttcaaatctaatctacacaacctccatctcaaattataatcactagggagcttcccatggtgaaga

SEQ ID NO: 426730 - DNA, 215 bp, Oryza sativa
tcgtccaagcggagacacacgcgccagacgtagtgtgaggggataacatgcgacggactgagcgagagacggtcccccgctcggatccagcagcgctcgcacggatccaccagtggcggtggtaagagagcctagtggcggatttgacgacggtttgtggcggtggaggatcctcctgacgggctcatctgtcaccttcttctagatctccattg

SEQ ID NO: 426731 - DNA, 397 bp, Oryza sativa
ctgttacgaactgtccagactccaccacgcgggcgaggaagcacagttgtactcaagcacgacgaaggcggcgtcgctgcccgctgaccggtgggggagccgatgacgtggtcatcgaagcaaccactggcggagaggactacgagctcggcgccgggagcggcaacaccgacagaaagtgcggtcgacgccggttaggccttgagctcgccggtggacacactgcctcaacaaggaacatccgttatgagagaggacccgagctcggtggcggcgggggcgctaacgccacacggagataccggtagcgccggttagggcccagagctcggcggtgagggcacttggagggagcgtgtcgaagcttgtggcccgcttgatggatatggctgagagc

SEQ ID NO: 426732 - DNA, 253 bp, Oryza sativa
ttcgtttagatggaggaccgctttcacagaaaaggagtattgaattcacatctgatcctctcgcttcaagcacatgggaggaggtgtcagaaaagaatacgctgatcacaccatttcagtgtaaatccatctggaggcaattcaattgcatatacagagtattctttttcactattatttgttattctataagcacacagacatatcatatatcttctttttccttcattaatctgttttttttcttttatat

SEQ ID NO: 426733 - DNA, 97 bp, Oryza sativa
catacacacttacataaacttttatcctctatgcgcccccccttttttttttttgtgttttttaaaaattatgcgttaaaaaccatacccttattta

SEQ ID NO: 426734 - DNA, 478 bp, Oryza sativa
tggaggtcctgcatccagctactgggacctactcagagcacacctgtccgatccgttgacaggtatactcatggatgatgcaatgattctatcgtgtgggcactcttatggaagtaatggaatgcagcatatctacagaatgaaagcttgtggcaaatgtggtcagccaattaccgaggactctattcgaccaaacttggctctccgccttgcagttcaggcatttaaacgcgaagaagagtcagctaaatctctaaaaagaagaagagagcgccttgagcaggacaaatgtggcaatgatgaaccaaatccaactgagatttctagaggtaaaggtgtccagtttccttttgctgtctttgaccgagtcataatcaagggcaacaaaaggaccccagaacgatttgtgggacgcgtagcagttgtgacagcacagtgtctaaatggatggtatgtggtgaagaccttagacaatgca

SEQ ID NO: 426735 - DNA, 367 bp, Oryza sativa
ttctagatcgcgagccggcgcccgccctttacttcttctctttagcggttatgaagggccaacaactaccacacgctatagctttacgatcatccaccatgcacaactacatgacggcgtggtcaccccagcacgggaacacgactttaatacaaatctggggtgctaacaccctggatgatttgaccaagcactccgggacagggctacactactattgcgcagccactacaaaaaccctcttctttaccattcagtgaatttcaggcttgtgcaccctaaaaaacgccaactgcggcgcacagcgggccaagattcagctcaacctcaacacaatcttcatatgattgaaggaacctgtcttcat

SEQ ID NO: 426736 - DNA, 535 bp, Oryza sativa
  unsure (1)..(535): unsure at all n locations
gcgtacgccctcgccgactcggcctcgccaccgtcgacgactcgtcggagatggcctcctacccggcattccaagtaagcccggaggaagcagcgaagggtaaatggtacattgcgactgctgctaccaaccacatgacccgcgaccagagcgtcatctccaacctcaagcccgtgactggccgtgttgttggtggtggcaacggcgcaggattgcaagtgcatggcagtggagctgtgaacacagagacggtggcgatcccagacgtgtggtatgtgccggggatcaattgcaacttggtttctgttggccagctctgtcaactcgggctcgaagtttcgattttccgaggtgtctgcaccgtcactagagctagtgatggatctgtagttggcaaagcgcatagatcaggtgcagtctatgaggtggaattcctcanagttcccgttaattagcactggaaattcctcgctgcagtatcagttgtggtagtcagactcatatggtggctaatatcgcctactctatcgaatgc

SEQ ID NO: 426737 - DNA, 137 bp, Oryza sativa
cactcactatatggaaagctgctactcctgcagctaccgctccttaattcccttatctacccactcttctcttttccgttagcgatcgacaggatgacatggctgatgaagcggcgtcattttttcctaccttatcc

SEQ ID NO: 426738 - DNA, 377 bp, Oryza sativa
tttggggcattccaattcttgggagtgaaggttttatctttttttattgtattgtttttattttgtttcaaagcggggcttcaaatgaaccaataattcaaagaaagccgcaagggaaggggcaaaacccccggtgaaaatcaaggggcttcaaaggtaaattcttctaccatctgataaaaaatgaaagcgcattcttccttaaacaagaaagggggctaataaaacaccaaccaaaagttttgaacctacttggaaggttgctaaaaccatccaaaggtccattttcacaggattttttgcaaaaagcatttaagcttctccctcttgggggtttcgtggggagatttccttgcacaaaaattgaccagaccttt

SEQ ID NO: 426739 - DNA, 368 bp, Oryza sativa
tttttaagcgggtgccgcaggactggaggaagcgcctcgccggcatccgtgcccgccttgacgtcgacttcggcttccttccttgggagcttgacccctgcctccttgcctttgagccggacgaaactgggcatcttgaagcaaagaaaatatacggcatgctgttggaatcacaacccggagagtatggaacatatttggccccctgactggctcagcgggtgaacgtcaggccattgttaaagcttatgagaaggaccatgttattctcggggaggcagctcatatcatggttcagaatgctgactatgacagggcctgatcagaggaagcagatgcaaaagacttaacaacaggctccagagctg

SEQ ID NO: 426740 - DNA, 137 bp, Oryza sativa
tgggtgttttttaaaaaacatgttgttttctccttgttttctattaaataccattctctcttataccaacaagcatttcaaacaccataaccaaaactcaccttccttttcacaaaattcactcgactaataacacc

SEQ ID NO: 426741 - DNA, 406 bp, Oryza sativa
ttttgtggtttttttttttttttggttttttattaaataatttttttttttggaaacaaaagggaactttttagggaggtatacaaaaaaaatgggagcaaggataaaggtacctgaactccaaaaaaacaagggggcacaaaaaaccctagccagggctaacggatccagcccaggcaagaggtttccatgcatttgtccgaaacaagtaatcaaccaagtggatgctggacggaacatgactagcgactagaacaaccgttaaaaaaactcccacccaaaccgatgatgcacttgctaataagcaggttggagatactgaaagttagcttgaaaaaaggagtcgtcattttaaaggtcttcagggaacaaataaatgcttggagcaacaggctgggtatggggg

SEQ ID NO: 426742 - DNA, 188 bp, Oryza sativa
tcgaaattcatgcgagctcgcgacgcgaaccccctacgccgcagccgcaggcggcctattgagctgctgctactacagacctccacgcgagcgtgccccggggtggaagcggaggcagcggcggctcgagcgcactctggaggcgggggagcgcgtcacgatggccgtaggcagctgcctaggcgtgg

SEQ ID NO: 426743 - DNA, 213 bp, Oryza sativa
actaatctgtggggctggctcgcaccgcatgtacctagccgggacttacttggtggacccacgcgtgcttatatggctagcgagtcaccatccacagctgatttgggggtagcctgaccactactccatagatgggtgcactacatacttatgttccatgcattattgaagcagaagcagacgcaccaaaagagacgaacactactactagta

SEQ ID NO: 426744 - DNA, 84 bp, Oryza sativa
tttgccgaatcaaccgtcaacaaggagacctttgcggtggccggatcaaccgccgataagaacacctatccagcggccgtatca

SEQ ID NO: 426745 - DNA, 509 bp, Oryza sativa
tagctagttctgctttcaagtgctgcttctcttggaggaaacaacagcaaaatataatgcaaatgacatctcaacttttagagttgaagatggctccattttctgatgcgtaacagcgtaaggaatagacatcactgacttgctatttgtcacctccatttatgtaaccgttgtctattttgatggtcttaccgacgaaggctgaacgaactatatgcaatggagagggtaaatgggtattgtatttagtccaccaccatcttcttttcttaatctagtaaattccctggtaagggggtatcactgtatttcccacaaacgccaatcagccagactgctttttgcctccaactgtgttgatctgtgctggatttcactcctcgtaatgaaggatctacatatgcaaggttagccgggctgttttaggctatatgcctgtctgtcgtgcagcatagaatatatgctaaaacaaacagacaattgtaatgaccaccgggcacattcttaag

SEQ ID NO: 426746 - DNA, 507 bp, Oryza sativa
gcgctcccacaccccccgccctctctctctctcgatcgccgcaatcgccgcgcctcctccgcagaaatcgccgcgcctccccgtcacggcgccgcgcctcccctgcgcgccgtctgcgccctccgcctcctccgcatcgctgcgtctcccctccgcgccttctccgccctccgcctgctccgcatcgccgcgcctcccctccgcgccgatccggtctccgccctccgcctcctccgcatcgccgtcatctgccggtcggagccgcgcgcgatcgacgcgcctcctctgcatcgccgcgagtgcgcgtcaggcgcctccccgccgcatcgccgtgcctgctccgcatccctgccctacgcgcatgctgcaccctggtccctcgcctccgcctgcgaggaggaacgcttcgccgggcgcctctgctcgccttttgcagagtattttaaagacaaatggtgtagctcgccagggactgcatttgcgtcactcgtgccgcgccgcataact

SEQ ID NO: 426747 - DNA, 286 bp, Oryza sativa
ttcttctaaattccccggactatctttctgtagagcgccgcatacagcaggcctcctaggtagaaatttgctcgccttcccgtaacaatactcggccctactcttatcgcgccggatttcgacctctgagttctccgtataggtgtcggatcccctccgtgccttctacgaactccgactacaacgcatcgccgagccttctcttcgcgctcgagccgggctccgcccttcgcctactccgcatcgtagatatatggcgggcggagccgcgcgcgatcgacgcgcc

SEQ ID NO: 426748 - DNA, 431 bp, Oryza sativa
tgacaccgcggtctcctcccctgctttcgtgtggctgcctgtgccgcgaggagccgtagccgtggtatgatgcaacgccgactgaaagggaaggaggtgctaagctgtgtgagatctagacattctaggagctaaagggaggagctttcacatcgtgccccaggccatggaccagtctatagctaggaatacgatggtcaccgagtgcacggtcagcatgaacacacagctcaatgtggacctaaagggataacacgcgtgccactctgttttagtgtacacagacctacacaactctgttcttatgggattttccaaatggttacaataaatcatctatgtagtgagtgatcacccaatgtagctaatgcatgtccagtacatgctgatagtctagtggcagttagctatgatggtcacaccatggtcag

SEQ ID NO: 426749 - DNA, 560 bp, Oryza sativa
tgttgaccaaactcgctgtacttctccttaatcaattatgttacaaagaaatatggtgtggacacatcaagttgccagtcctgaaaaccaagttcaacctgaaaatttctatcatggaggtgctgggagcaacttatctaacctgagtgtgcaagttgctgttggagttccaggaaatactgatttccggagtcactatgagagcattaatcttcagcaccagcatgttcagaatccatacccacatgtgggtgttgcttcaagttctgtgttcccatctactatgtacaacccctgcatatcaacaacagcagtggacagatatgttcctcctattcaaagttttggattgggcaatccactactactgcctttatatcatcaacttgctcaaggatccatggatgagaacggcagcagtggcaatttttgtgacagcgtcagggaatttatcaagaggaaaaatgcattacttgtgggtggccatcattttgttaataagtttgcaagctcaagctcatctgcttatgtgcctccaaatcctttacataggtcatgga

SEQ ID NO: 426750 - DNA, 528 bp, Oryza sativa
tctccgatcgaccaaaccagcgaaaccaccatccgccggcaatggcagccttgctccaccagacaccactccagccacctcaaaccaccacgagaccgcacccgtggacgcacacctgcacaaccaacctctcgccgcctcacgtggcactcccccagcgacggcgagccccactccggcggctacaagccgccggcagcggcggcgccatcggctcctccgccgtcacggacaccgagagcaccaccacagccaaatcgccttccaagaagaagagccgcaaggagaagcagcggatgcggcggcaggagaaggagcaggagcagcggcagatggtgctggaagcgctggacgtcaagagcggcggcgaggtggacgaggacgacgacgagctgccgcagccggtgttcgaccgcatcctccgccggatcatgttcatggatcgcgtcccgatggcgtccggcgtcgggctgctcaacctgtacggcgcgctggagcgcggtcgggcgtcaccgtgccgtcgtggct

SEQ ID NO: 426751 - DNA, 449 bp, Oryza sativa
ggacggagaatatttttccatttcatcgatagattgtctcacgcttacaggctagcgttatatacgccttacacacaactcaacaacccccggtcccacatattagcatctaaactcaacagacccatttcatacgtatctgctactcgattacacatttctgaatcccgccttcactgtggctcatccggcacaggcgtaacagttgctccccctggaattggagcttgtccccaagcgacagcatctggaaatcttgtgcgaacaacatcaaaatcctcccaggttgccaaagcagcaggaagagagccccaacccaccagaatctgaaccaccgcagcattgcctttttcaccatgtgcccagtccaaaatctctgaaggaagtaattcagcaatatccaactgagcagcagtcggtaacagagaaaacacaggcttggtatccgg

SEQ ID NO: 426752 - DNA, 577 bp, Oryza sativa
  unsure (1)..(577): unsure at all n locations
taatttggaatgttttggaagctgagcgtccagatttaaggcagttgcatgggaagtctcttgttgaagtaaatagaagtttccttgaaaagcacagtgcttctttgacgcacagagcagcagcagctgaaatgatgtacctcttggaaccagataagaagcttgaggcaatcaaattaattgaagattcagtaaacagcacagcatcaggaaacagtgtgcttggtcctgtgaatgaatggaaaattcaagactgtattgatgttcacaaattgctggagacaatctttggtgaccaggatgtggcaaacagttggaaggcacgatgcgctgaatatttcccatactcaacctactttgaaggcattaagagtgctagtgctgcctattgttctgttgccaatagtcttgaggattcatcagaaaatggaattgtagcaaatgcgcaaatgaagtcagcagacggagaaacatgcactgtgaatggaactgtgcatattgtggatgaactgagcaatctaagcattaggtaatgcgccataagcanggtacgttgttacagctggaacagaacaca

SEQ ID NO: 426753 - DNA, 274 bp, Oryza sativa
ttgcgcatcaggcggcgtggagggcggactggtaggcggtgccgggccgggggtggttcggcggagcggatggcggcgccggggccgggcggcaggtgtcggcggcgcaggcagtgggtgtcggcagcgcgggcgctgtctcctggcggcgcggacggtgactccaggctaccccttcctcgtaccccatatctcggaaaagaggattataaggtaaaagcacacacaaatctaacaccactacagtgataaacctcataaaccctaccaccac

SEQ ID NO: 426754 - DNA, 494 bp, Oryza sativa
tctgcttccgccgcatccatccctgtttcccatgttagacccgcccatggaccggttctagcgttggtatggagagcttccgtgatgatcagcgcgctggtcctcaatccgagcaacactctgatcatgtgtctgattctgctgaggatgcaatatctgatgaggatgttcttgcaccaacaagactgtcattagcttgtgctgcttcaaaagaaagagagaaggaaaacaaaatggtggtgccagatgaatcaaccatctgggatgaagttctggaagaagccgatgagctagcctatgtgcacaaagttcctcctagtatatcattcctatctgctggaacaggcaaaaggagaaaaggtgaacacaggctcaaattctcaatacgtggatccagttctgtttcactgaatgtgaagactgaaaacccatacattggggagcaagaagtttcatcagtaatgcccacatacagagctgctgaaaccatgatg

SEQ ID NO: 426755 - DNA, 513 bp, Oryza sativa
tttccaagggaattattaacaacataaatttcatgccatggtctgatgtatgctttgtgactggtggaagtgaccatgctgtcatactttggcaagaaaaagatgattcatggaaccacaagaaagtgcacaaggatttgcattcttctgctgtcatgggtgttgctggattacagcagaaaagtacaatattatcagttggcagtgacaagaggattatatcatttgatctggcagctggaaggacagagtccaagaacctaattgattacaaatgcatgagtgtattaccaaatccatgtgatttcaacttgtacatggtgcaaacagcggcaccaggcaggcagcttcggttgtttgacgttaggcttaggcagactgaagttcatacactcggttggaaacaagagagcagcgagtctcagtcagctcttataaaccagtcatggtctcctgatggttggtacttatcatctggctctgcggaccctatgatccacatctttgacatca

SEQ ID NO: 426756 - DNA, 218 bp, Oryza sativa
tgttaattgacagagatgagagtctggctaaatagtcagccatgtgaaatgccttaatgaactctctatttcgatagatgagatatgtgaaatgccttaatgaactctgtatttcgatagatgagatagctcatttaggcagtacatacatgacgtgggttcttcgatccattcaactctgtagtgctgatccatttatagatatttctcccttgctt

SEQ ID NO: 426757 - DNA, 490 bp, Oryza sativa
cagtgcaactcagttcttggaaagaaaggttggatttttactctgaacaaagcgaaaggtgtggcaatgggcggcagcggaacgctgatctccatttaccctgaggatctcactttcctatttgagctggataagcggtgctattgcaatctcaaggtggtgaacaacagcgagcatcatgctgcattcaaggtccatggccttccatttcatgaccaatattttctaaaacttggcgagaaggcttgatgaaagtttgtttcatgtcaagacgacattaccgaggaagtattttgtccggccgaacacgagcattgtccagccatgggattcttgcacaataacaagtaaatagtaccttcgccgcataataagttaatctaatacgagatgtgacatatcccagtacttgtccaaattcatagtactagtatatatcacatcttgtattagattaatttattctgggacggagggaatacatgttcct

SEQ ID NO: 426758 - DNA, 408 bp, Oryza sativa
ctcctttcttccacttcactcgaaaggctccctccacttataaaccccaccaccaactcctccaatggcggaaatccccgaccctgcgccccttgcctccgccccaatccgcggaatccgagctcgccgcgtcctgccctaccgatcgatctgagcctcgccgcgcgccgtgccctagatcgggagatctcgcctccggcatcggggacagcgcaatggtggagacgtccggcggcggcgggaggctccacccccacggccagcggcggagcgtggccgcgttcctcgcggccaacaagacgctgctcgccgccgcgtgggtcatcgggttcacgctggtgttcctgtggcagagcgccaaggtatcggtcggcggcggcggcgggggcggcgggttcctcaggctgc

SEQ ID NO: 426759 - DNA, 72 bp, Oryza sativa
aaaaaacccttcccggaattataagtaaaaattgttttacaacccccggtctaatacaaaccgaacaagggg

SEQ ID NO: 426760 - DNA, 297 bp, Oryza sativa
tcctttggggtactggctagaaggcacgggaactgattgaagccatcctgatcaaacaagtgttgaaatgggaggtaccagcggaactatgaatgaatgcatcaatacaacaccttctgtggatccaaaatgcgacagctatgccgcaacacacaccttgagctacaactatgcaggctgtgcacgaatgatgcaatggcactgcacccaagaagcctacagatcttgtgccaagatgtcatgcaccttttccagcatgcttgtatccacattgttgtcaaaccctgcaatccatgc

SEQ ID NO: 426761 - DNA, 330 bp, Oryza sativa
ttcttatcttcttgttagccagctccaatctttgggtgctcgtgtatagtgctgctgtatgtcagtatgtagcttcggctgccatccattttttttttagcatcgcgctaatctactaagccccatacagcagatctgaagcttggcgtgtttcttcgaaattcaagccgtgacaaataccgaaagttcatagccataccagtgtgaaaatattcgtttttgtacatcttgaagcacatgtctttttggacagttgagcacccttgtttaatttagtaggttactctgctgtatactagtttggatagctctacggcttttaaaaaacaa

SEQ ID NO: 426762 - DNA, 498 bp, Oryza sativa
tcgtataatctcccgtctcgtctcctccggtccttgcgccatcccgggctgaacagggaggggcgacgatctccttctggcgagcagagcaagggaggggaggggaggggatcctggtgatactatgcgtttgatgtcctctgttccttgacttggatgtaaccagttatctgcctcgtcagtaacctttttgatccttcaaacaaaaagtcagtagtacttgcacttgattggcaaaattagtcaagacgggtgctctttgctgcgtggccgcgaggccacatgggacaaagtctaatcttgcaagcagagactgttctatggatcctaatgaaccttgctggcggatgaattcaagcttctctcctccaatgtcaaggagatgggactgcaggaatccatctgatggattgccacacaggattcatgatgctccaccttatgtatcatcactgtcatcccatagtaaaggaagtagaagtgcatttggcagtgacc

SEQ ID NO: 426763 - DNA, 207 bp, Oryza sativa
tgctttacatcctctctctctctccccattattcctccgccttctagaaccttctctccgccgccgccgacgaccagccaccgaatcgaagtgatggccgccgccggatctaaggccctcgccatcctcgccgtcctggcggtcgccgccatctccgccgtctccgcggccgacgcgccggcgcccagccccacctccgccgccggc

SEQ ID NO: 426764 - DNA, 207 bp, Oryza sativa
gccggcggcggaggtggggctgggcgccggcgcgtcggccgcggagacggcggagatggcggcgaccgccaggacggcgaggatggcgagggccttagatccggcggcggccatcacttcgattcggtggctggtcgtcggcggcggcggagagaaggttctagaaggcggaggaataatggggagagagagagaggatgttttgct

SEQ ID NO: 426765 - DNA, 508 bp, Oryza sativa
ttagtccgaacatgacatcctatgaggtttgctgggaaaggaaatttaaataaaaaacatatagtgattcttctcagaattggtttgagttgtatactttgctctcaatggaattatggcagaagcccactggcgataaattgatgcaatcagaagctacttctagtgctacctatttaattagtgcggattggactataacagagagctgcaaattatcatacaaaataacacttgaagatggtgaagtagatgtgtactggttgaatactatgggccaagaattcttgtatgaacaattgttattccacaaagaggagttcgctacagtttgggtttatcaaagtactagttttatcaaaagtaagggcagtggcagggttgtcaccattgcagcaagtacctcatttaccaactctataccattgccactacagtattggaattatgggtctgtgtggaaattacagttctgttgtatggtctttctgatcagtgtcaaacaagc

SEQ ID NO: 426766 - DNA, 342 bp, Oryza sativa
aacgttctcgcagctaggcgctcgcttccttgggggacttttttatcctgacgcctgacgttcggatggagagcttcatcatgacacacgacctgcccagagctacagccccaggatgggacccagagaactccttctgagtgccatattcaccgtcttcttcttgcttttgctctgcctcggatgcaagtgcatagccttagagatacacttacacacgaccaagactgcggtccttaaggatgacgccctactgcaacatagctcgacagatccacgacatcgctatttggaatatttctttgaggaaaccaaccatgcaggagctggtggaataatggg

SEQ ID NO: 426767 - DNA, 233 bp, Oryza sativa
tgaacttgccttcttcagcgggctgtttttgaaatataaacctctcgcgcgtctggtttaaggaaaattcttctctgcctgttagcgaatctgccctctgcttctgtctgcatatgcatccaaactagtttcactcactgctcttatctagaatcatttggcctgaatttctcaattttactaatggtactattgcacccctatgttgaagaagtgcttgtgcctgaatttta

SEQ ID NO: 426768 - DNA, 441 bp, Oryza sativa
ttgtctcaaccaggggtggcagagagggaggtggcgcatgtgtacgtgctgatcaagacacaccagcctgtgctaggtggacaccagcagccgcagcagctggcgcatggtccactcatccactccatgcgagccctcaacgtggccctctccgtcatgaaccaaccacatgcttcttcttcttctgctgctgctgctgctgctgctgggcatcattacccggcgatgacaatgatcagagcagagtctactccggcgaacagacctgctgcagatgcttcatacaaccacggcgatggacggcaagaagatcatcacccgccaaacgaagaaggattaactgtgaggacaagtgattgtgggtttaccacacagatggcccttcatgaagatggctaccaatggaggacatatggacagaagaagatccagggcactcac

SEQ ID NO: 426769 - DNA, 334 bp, Oryza sativa
aaacggggcttcaaaagcaccgcccaggtatttaatttataccaattaaactaaagatttttgtggtctacaaaagggggaatagttcgacccccacaaaaataaattaatacttgatacaagggaacaaaaaaaaagttttttttcaaagctatactttgatgggaaaccctacaaataaccatgggtaaaggataccctataccaggaggaacatccgggcacaaaaaaacccttgcatgggttgaatctttttaaagaactttccatggagaacgtcccaatgcccaactttatgtttgttttatggagcataaaaacatgtttttttggg

SEQ ID NO: 426770 - DNA, 505 bp, Oryza sativa
tttggggtatcaccaaacatgcagttgatggacaggatacttgttcaaagtgtggtagtgagcgatgatctgattgatattgctaaagacttgtcctgcaaacaaaaggggaagctagtcttgaaagggcctgataagattatgtcaaagatttatgtgaacatccggaaaacaggagcccttgatgagaacaagcctatatgtggtaccacagaggggattggcaatagccatcatgacaataagctttctggtttaagtatcatgaaaaactcttcccgtgacgactacgtaattgatgggatgcatatatatgtcaagatcccatctattgcaaagaccattaaactcattgtgaagaactccaactctgttgctgatgtcaaggtggagattgaacggaaggaaaggattctttaagataaccaaatgctgatgtatgcaggtcgacagcttgatgatcgccagattttaaagcattttggtctatcagatgatcagatac

SEQ ID NO: 426771 - DNA, 404 bp, Oryza sativa
tctttctattaaattgatgcacctgttccctagcactatgttgggatgagtgacaatcttaacttgcaaggaatgcacctgatcctttgctgtgaatacactactctcaggctgctgcaagaatcaatataccagccgtatacctcatatagtgaatataaatcatgtgacagatatatgtacaaaaagacacactaattaagaagtgccaacagacttaatccatcatgctgcaaacgatatctattactgaatggttagaggctatacaaaatagtaatagggctcgaagaactctccctaacagtgattgaccacgtgatgatgccttcatgaccttgtctataggaccaaagatgcacctagaactaatgtgatcagaaagagttccaggccagaggact

SEQ ID NO: 426772 - DNA, 378 bp, Oryza sativa
ggaaagcgaacgggggaaaagttttttttttaaaaaaaacaacacctttcgggggcaaaaatttacgggttacaaaaaaccattcgggcccaaaatttacaacctacaaatccctaaacattttggaagaaggcatttgcatccgggggtatggggatgcctcccgggggggataagcattgccccccctttacaaatccagaatttttcctttccccccaaaagggggggcaacccctaagaccccattttcctaagggccctggagggggggttccggggccgaaaaccaggggggggagaaaagcttccgctggcagaaatgaaataggggggggaatgggtttttgaaacgggacccccccaatgggggagggg

SEQ ID NO: 426773 - DNA, 274 bp, Oryza sativa
tttctttcaaacggcgcttccctaattccggcaccgaatattgacctgctcgggcctcgacaccgcgccctgtacctcgcgatctgacgcgctcatcgccatcggggacctcgcgcgcgcgccgtcggcgctgggggggccaaacaacatcccagccccacagtgaggcattacagcatccccatgcataccaagaccacaaaagtgaagagatcacatcaagacctgggacctcaacagggcctgagtatctatggggtagtccaaaacctaa

SEQ ID NO: 426774 - DNA, 269 bp, Oryza sativa
gtgggaaggtgcaaagttccaggggaataaccattttcctaagagaattcacgttttctgtgggcttgaagtcaacttacattttatatattttccattcacaccttacagattgataagagtaattcctactccaaaattcttcttttatgaagcagaccgaaagagatgaagggcatttatatttcatggggctatgttgctctaaataaaattgtacacccttaagctatttccattttccagtttgtgagtgttgtttccactta

SEQ ID NO: 426775 - DNA, 216 bp, Oryza sativa
ttcctgccattaaaatctcatgctctgtaaactgcatatcatgaaatttcagcaaccccgtgttgaattgaagacggggcaccactgctcctctcgccctcccctgctacacttcccgtttccctgggaggcggaggaggaggggagagacacacatactctagctcccctgtataccatcactcagccgcatagctcgcttcgttcattgggctc

SEQ ID NO: 426776 - DNA, 509 bp, Oryza sativa
ctccttcggagtatatgacatattgaagatgggctacctgcattcccccgaagggaagaggagggtatcaacgatgaaacaacaaggtcaagaggcaaatgcattagatcagcttgagttgggcacagttaggaccttactatatggtgctattgctggttgctgtgctgaagcagccacatacccatttgaagtagttaggagacagctacagatgcaagtcaaagcaacaaggatgaatgcttttgcaacatgccttaaaattgttgatcaaggtggagtaccagcactctatgctggcttgatccccagcttgctacaggtacactctctcatgtcagatagtctgcttgcatgtatatttaggagcaaaatctataaatccatcatttgattgacacgtgcatacaacagatactaggtttgtgctttatctcatcgttgcccatttaaaatccaggagttttttcagggaatcggaaattacttagttgatattgatatattca

SEQ ID NO: 426777 - DNA, 484 bp, Oryza sativa
tgctccttcttccccttctcacgttgagctcgagcggcggtcatggcgggcggcggtgtcgcgcgggggtgtgcagatgatcctgcgggcgccgctagaggcgggaccgccgccggcgttgggccgggcgcaacggcgggagagtcgacgccgcggtggattggatacggggacgacggcgcggcgcggcttcggctggaattcggcctcgatcctgggcgaggttacgcgtggtggattcggggactgttatcccgtgaaatcgtctagcgatgaaaggattccttcagaaattcctccaatccaaacgggaccagccatctccgattgatagggattatccacgatcgaatttgtctgctccgaaattccctgagaagtagtgcagagtacagtccatacatgttcatgttcatgttcatattattaaaggataggagtactctttcaaagtttcaatgatttgtttttgaagatctttggc

SEQ ID NO: 426778 - DNA, 68 bp, Oryza sativa
tttttgttctttcccagaagaaacgaacgaggggggggtttatttgaaaaaaggatccggacagcgcg

SEQ ID NO: 426779 - DNA, 461 bp, Oryza sativa
tgtagctgtatgtggattgtgttcgtgaagattaatgatttagtagtatgtgttttagccccaagaaaatcccatcatcattcaaccaatgccttcagaatcaacctactgggatggtttctctggttgatcgaagtggaaataaatggagtgcagagctgacttcagactctgagggattcttctttgtgcatggatggaaagaatttgtcagagataactcaattcagtgtggtcaatttttagtattcacttatgataaacggtcacaattctcagtgacagtctttgaaccttcaggcatcgacaagatatcaactttctctgctcacccttccaaaaatgtgatcattaaaacagaaagtgatgaagggggcatggtcactgcagctatcacaacagagaaaatggctcccgccctgaaggaaaataatggaatcacaggaaaagagactagagat

SEQ ID NO: 426780 - DNA, 515 bp, Oryza sativa
ttctttattaatcttactcagtaaatcatatcaaggtggtccaattgccttgagagcactcccgtacgtatccaatttcgttaaggcatgcatgtacgcatgtatttaaaaactcagatttgttggtttggatgaacaattggctagatcatatgtgtctgtttagttcacagaaaccgtgtaagttggtttatatatagttagtttggagtatttccgtacgacattactggttttgtagctgttaactgttaatttcatcacaagagaaaactttgcttctttatactaataaggaagatgattttatattcccagagaaaaagtacttctcaagatttatatgtgcggcaccttctataactgggcggaattggatggacccatagggaggagtattttacaacggataacttcaagttctttttgttgcacaaattacgcacaggggatattgcataacaatgaagaaatagccgtgaagaaactcaccagaaaaagattgagagaagtgg

SEQ ID NO: 426781 - DNA, 277 bp, Oryza sativa
  unsure (1)..(277): unsure at all n locations
tcgtgtgctccggcgatgtcggcgacggcgacggcggcggccatccgctccggagagctactcgcgtgcccgatggctctgcggagggcggccgcccccgccggggccaccacatggttccggatggggcgagccgcgaccgcgactgcggcgcggatggcgactacgctgagggtgagggtgccacccnngttgtcggcggctgcgtttgatgagacgtcaagtttatgaatgtgtggtctcctcagcgggaccatgagaacccttgcccaggccg

SEQ ID NO: 426782 - DNA, 478 bp, Oryza sativa
ttttttttttttttttttttttttttttttttttttttttttttttttttttttttttttttttttttttttttttttttttttttttttttttttttttttttttttttttttttttttttttttaaaaaaaaaaaaattaccccaaaaccaaaaaaggggggaaaaaaaaaaaaaaaaggggaatttttcttttgggggaaaaaaaaccacccctctttttttaaaaaaaaaaccttttttggggggtttttttttaaaaaaaaggggggaaaccccttgttttttaaaaaaaaaaaacctgggaaacccatggggaaaagggttttccaaaaaccggggtttaaccccggggttttttaataagggggggttttaaaaaaaaaaaaccccctccccacccctgggggtgatctggggaaatctaaaaaaaaagggtttcccctttaaaaaaaaaccgggttttttttttggttgg

SEQ ID NO: 426783 - DNA, 341 bp, Oryza sativa
agcacaggaccggggcggcaccggcggaggttgcttcaatgaccatccctaatcgcgcagcgcatgcggagcccgagctaccggaaagcagtccgtaccggagctcagtcgcccttgatggtagccgatcacgcgtcgcgcgggcggcgtaccctgaaggacatcctgcagacgagatccgtcgagaggatgcagcagaacacaaacctcggcgtcgtggaagcgcttgacaaccctaactggaaccaaggaaccggagttgacctactgagggagagtagagaactcgaaaatgggaacatagcatgggaagagggaaaaccaaatgctgttatccacaa

SEQ ID NO: 426784 - DNA, 524 bp, Oryza sativa
ttccgaccacctctacgggaccggggccggtgggagaagtcggggagtagggcggggacgttctagcccaacccgcccccaacccgccccgttgccaaccctatggcgagcgctgcgcgtgtaaataagggccaaatgggatcgacgcgagtggataaggttggtggagatcgcgctagtggatctgtggaaataggcggccggctcggccggctcggctcgctcgtgtcggttcagtttggtaggcactggttgtttaaagaaccagcacctgtaatatattaataggtgtaagttcttttaaaaaaccagtacatatagtattggtaccggttttaacaaataaaccggcacctttaattattaattattaaaggtgacggttctttatattttcatcatgcgaggtgcaaaatgcctataagtgtcggatttaaatgaaccgacacccataagagcgacccctatgagggttttttagtcagtgtgatccaaacatgatggatgcaataaaacctgtgtgg

SEQ ID NO: 426785 - DNA, 376 bp, Oryza sativa
aaggaacaaaaatggggggtccatttggggtttttttaaattaagggattaaaaaatttttggggccttggaaaagaacacttgggaataaggggctaggaaaaaaaaaagggggggaaacaaaagaggggccaacgacaacaaaagaggggggcatttgaaattgggggggcttattggggggggggcccccaattaattaaaaaggggggggggttttttggggcttagttttttaaaagggtggggttaaaggggggcctttttggaatttttacccccaaagacttataaaactgggggggggggttgacccaaaagggggggggcttaggggggaacttggggggggggagatttccgggaaaagggggga

SEQ ID NO: 426786 - DNA, 451 bp, Oryza sativa
tttggctgtcccacccatgctaactttctacccaccgcgagtctccgcggggggtgtttctggagatctctctctgtcccctcgcctcgcccaaatcagaagcctatgatggaggcgctcaggtcgtgagagggagcggaatcctctgagagagggaggcggcggttggtggttgcaggaaggctgtatcaaggataggcagtgggatagtaacaacaagaacccattcactgctgagattggaaccgcctcatttctggatcaatgccattatcaaccatggccgttgacaccactgtttcggagtactggctcaattggcggttcatgctctgagaggtctgggtctactcctgcatggtcctggcatgcttcttgatctggaagttccaggggccgagctcacaggacggaaatggctatggctgttaggacagtgaggatgcgcggc

SEQ ID NO: 426787 - DNA, 286 bp, Oryza sativa
tggccccaagccttggttttgtatcatccctgccaactcaacctaggagttaggtaggatttttggtgtaatgctatcagatataccgagagaaccgatatgtgctgattccccatcagaagaccatgggaaagctctatgttagtatatattgtccatttgtcctatgtatgagctgccaggtgacttgttctgttcttgtcgtatggataaacattttgtcacaacattctcttgtcctagtatgagctaccattggaaagtagcagcattttattctcccgtg

SEQ ID NO: 426788 - DNA, 518 bp, Oryza sativa
  unsure (1)..(518): unsure at all n locations
tgcgatggtgaggcagggcgtcgtcgtcggcggcggcggcgagattacgcaggccggcagcggcagcggcagcattgccgggtcggcgaccgcgccggcggcgagcccccaccaggtggcagttgaaatagatgagcaaatttactccccagcatttggcaatattgttgtccctgatagtcgtggttgctgcagtggtttcacatccagtgtcacaagagtggtgtttatcttacacctccttgctttcattgccctcacaatcttccttggtgtccaggcctcttcccgacagaatcctacctacaagcctttcgccaactttgttcctcttgcctcctctgtcatagtatccataattgcaggttgcttttgggtcatccttgcagtcattaaccctccaaaagccatcaagacctcactctgggcagcccctgttcttgcactggcctgcgatgtagtcatactccttgttggcaatggngctgcacttggtatggnagtgctcatagttgtag

SEQ ID NO: 426789 - DNA, 398 bp, Oryza sativa
actggccaaccgctcaactaaacgagcgtggatcatctcagggagtatgtatcaataactcaatgtgcccgcgaacatgaaaacattacttatgaaggcggctccgcctttagcatatcacggccactgtgcacgcgtcgtcgagacccggacagtcggaatctgtcccatgcttagaacaaacagtccgactgtggatagcactctgctccgaagacatgtataacacaaattagcactttcgagctacagcataggcctaccctacgtactggcgcttacagatccaaacggctaggacttaccgactcactgcacataccgggccgaaaatcgtccagtactggcacatgaaaacagacagctacacagtgccttaggctaggatctgtcagggt

SEQ ID NO: 426790 - DNA, 525 bp, Oryza sativa
aggacgcccgccggcccgacccggaacggaatggccggcccacgcgtcctaaatcttttagcttctcagccttttgcctctctttctactctctttcttggccgactctcttatatccctcaatttaaccatcgagggcggccaaaaaaaagagagaaaggaagagcaaaataacacattacaccatggcgcgattcgtcatcatctccgtcgacatcgacgccgacttcgccgctgccgctgtcgttgaggcccgggttggacctatcgacgtcgctccgaccaacctgatcaccaacccactcggtgccatcatcgacaatggccacaagatcacaggcagtgaaacgtgccatcagaaacgcaagatgctcctaaggcgaggttcgaggcgccagctagggcgtctgataaggggacgccgatggagttcatcctggacacctgcaaggaaaggtacgacagcaccgtgtcggcgctgcaggaagtgcaacgctgcatcgacgccaacgacagcaaggcgag

SEQ ID NO: 426791 - DNA, 502 bp, Oryza sativa
ttttttgtttttttatttattttttttttttttttttttttttttttttttttttttttttatttttttatataattaaaatgttatagataaaaaaaaaataaataaaaaaaaaaaaaaaaaaaaaaaaaaaaaaaaaaaaaaaaaaataaaaacactaacttaaaaataaaggcggacaaaacaaaaaaagaggaaaaactactattaaagaagaataacaaaaaaaaataggaatacgttgttaaaaatcaaaaaaaagctaaagcatctaaaaaaaagaaaccacattcttgcatgaaaaaaaaaaaaaaaaagcaatagaaaaattaaaagaaatcagggaaaaaatgttaaaaggggaaagaaaaaaaaaaaaatttaggaagggaaaaaaaaaaaagccaaacacttctattccgttgagaaaagggaataaaaaaaaaaagaccaatagaaaaaaaaaaaaaattaaaaaaaaaaaaaaatttccttgggaatc

SEQ ID NO: 426792 - DNA, 350 bp, Oryza sativa
ggaaggaaaagtttttgacaaattaaataaatggggggggcccatttttagagggagagagagagaacccacccatatgattgattatgcgggggggcgttggaaattggcggcgccctccggggggtgaaattttgggggacaaggggcaggcttggaggaggccccggcaacgggaaggtacttggggggggggacaacctctttaatggcagggcccatgggggcctcccccgggaggaacaagggggcaaaggcaagggcctggaaaaggcccttgggggggaaagccccccggaaaaaggggttccccaatttggaaaaaaatttttgtcctaaaaggggggggg

SEQ ID NO: 426793 - DNA, 361 bp, Oryza sativa
atatgactattaaaatttaaagaaatttaaaactaaaaaacaaagcacaactgaaaaaaaatcacagagaactaaaaagtgaaaatgaccaacaactaaagctctcaaaagcaaaaacaaacatagacacaggaacatacaaggacatacaatcacgaaaagccaagaatactcatgaaaaaaagagcaaaaatgcacagacaaaaaaaaacaaagtgtgacacaggaggggctggaaacatgtgtcaacaaggcctggcctaactgacgcgaaaaaagctgccaaaacagatgcacgaaagggtagtacacgatagacaagatgggataggacatggagaaggacataaacggggaccac

SEQ ID NO: 426794 - DNA, 498 bp, Oryza sativa
gcaaattgcctgagagccgaaacgcgcgaaacgacccgcccgcccacgcggcccagcccaaccaggtcgcacaacgcaactcgcgagggcgagcgactgagaccgtctcctctcgtctcgtctccccgctagggttcaggccatggcgcacggccgcgccgccgccgtacgccgccccaagtcgtcgtcggcgtcgtccgcgggggcggctgccgaacggaagcggaagcgcgccgccgccgccaagaccgtttccctcaagaaccagatccgctccaccgagcgcctgctccgcaaggaccttcctaatgacattagggtagctcaagagaagaaactggaagaattgaagcggcaacaagagcttcagaatcaactggctattcaacgaacagttcagctgagagatagaaagataaaattctttggtctgctggacattctgcttcattcttgctcctgtatgatgacctttaactgaacatatgtacttatcat

SEQ ID NO: 426795 - DNA, 324 bp, Oryza sativa
tgtcatccagtgcgtaggtgaggctcatcgcgggggatggtttaggaggatgcactgatccaccggagaagccgagggacatttgcaggaatgtcatgcggaaactgactactggggagacttcactggtagagcgaagtggaacggaatggatcgtagcgctgacggactaatttgaggcagactgcggggagactctggtgatctagatggatctggagaacatctcttagtgtgataagtgtggagtatttgttgaggaattaaggacaccatccacaatgagggttgtgtgcactcattgacccgggctaatgaccatgc

SEQ ID NO: 426796 - DNA, 218 bp, Oryza sativa
ggactcaaacaacaaagtgtgcatgtatttatgcattccttgctggttaccatttgcgcaagggcacaagaatgaaacattacaatatcaaaacaaaaacctggactacatctgctctcccaaaaaaaatcataaatcaaagtaaagaagattgtcctctacacaatcttacgtgcgaatttacaacatttctccccgttgctttgcctttgtttcta

SEQ ID NO: 426797 - DNA, 492 bp, Oryza sativa
tttactcgtctgctccggcatcccggcgacgagagagagagagaggggagaaggctgcgcggcggagatggcggtggcggacgtggcgttcaaggcgctgacggcggggctcggggtggcgacgctctacctcgccggaaccttctccgtcaacgtctaccgcggcctctcgtggcactcggagcaatccgtaagcaaaaccctcgcccgcctcgaccaccaaacccttgacttctccccgccgctcgctggggagccgctgattcggggtccttctccgacgatctggtgctactcgctgcatctcccatgtcgaatctccccccttcctttgggcctaggacgagggtttgggtggatatccttcgacctttgttctgttgttttttttttgcatcgacccatgcctgccaaattggaacatgtttggccctttgacttgatgcgagcacatatatttttgcgtgatgctgctgtactgtgcaggagcta

SEQ ID NO: 426798 - DNA, 430 bp, Oryza sativa
tttagtattaagttataagttaccatggttgagattctagaagtctgaactttggaatattcattgacaaaaggtaactctgaaagtcagaactttggtttgaaagtttgaaagtgtgaaattctgaacatgcagtggctaatatatatcggtcgtcgaggcgtggtaattatattgaaatttccaatcaattctaatatggttgcataataaatcacattttatcccccaccggctgggttttatttcaatcacattttatgacaatgctgaaatcgaaaacaaatattttacattttatatgtgcagccaacaagtcaattccctgttctgttgtttctgaactctcatgttgcgtgttactgctactgatgatattaatgatacattaactatttccttttgccatgtagtagttcagccaaatttt

SEQ ID NO: 426799 - DNA, 504 bp, Oryza sativa
  unsure (1)..(504): unsure at all n locations
taaaaaaagaaaagaaaaacaaaccctagccgcaccgatcgaagccagtgagacgccgccgacggctatgcgtgaggcgatcgtcggtgaccacgatcgccgccgccgccgcacccgcatccagtgaaaccctgcactgtcgtctcgttcggttgtgaggagatgagggcggcggcggcggcggcggggcagatcgatccgtcccctggggcgccggcgaagtcgcggctgaagaggctgttcgagaggcagctgctgcgggtgtcgccggcggagaggctcccgtcggtcgcgggtgtcggggagaaggatgagtcgtcggagccgagctccgtgtgcctggacggcatggtgcggagcttcttggaggacggtgtcggcgtctagcggccggcgggcgccgcgcgctgctgcaattgcttccacggcggngaggcgtctgacgacgacgacgacggtcccgctgctgccgggcggggtcaccttcgacgccgcagagaccat

SEQ ID NO: 426800 - DNA, 252 bp, Oryza sativa
ttttacgacagagcgtcaacagtggggggtcgtgacatcagtttcgacatggacaagatattgacgctgaagccaactcttgataagaactggccgtccttctactgctcatcctctttcacttggtccagaggcatggggcccttccgggctcatgagtgccagaaacatggaacatgcatcaaacccagcccctgaactaccatggatggcaacgcttccgggggctctcgacctctactccaaatacac

SEQ ID NO: 426801 - DNA, 77 bp, Oryza sativa
cgtccatatatttttctttttctttttacttcatttacactttccaaggaccggcaccaatttttacaccataaaaa

SEQ ID NO: 426802 - DNA, 501 bp, Oryza sativa
cttgtgttagtcgttcttctagtggcttgattgtccttcaccattttattctggtagtcgttcttctagtggcttgattgtccttcaccattttattctggtaatttactgcacgtaggttaccacaagatcaacatccctatatggggcgtgtggctggttgtgctaacttgttatttctgttgtggtacctgcactcctttcttttcttttttttttctctccgccacttacggagtaataaacctggacggcgccgttcctttgcaggcccatcgaaatcgacatacggtcattggcgcgctaaagttgaaattggagaatagcacatcagcaatccaaagtacctataggtatcgtgaaacagacttcacgccttgattgtccttcaccattttattctggaaagctacggagattcacagctgagaaagcggctgacttccatggcatggcatagactttgagcatcatatccatttggtttcaacagggggattc

SEQ ID NO: 426803 - DNA, 146 bp, Oryza sativa
ttttcttcactgctgctgctgctgctaagcttgtagcaatctagtggtgcttgttgttcttcttctcccgaaatctttgcgatcgattgattgatggcatcgtcaagcgggagcggggggagcgcggtatcatcttcatgggctga

SEQ ID NO: 426804 - DNA, 355 bp, Oryza sativa
ggggggaaaaaaaaattggaaggtttaatgaaaaattatggagggaaaaaaaaggtaaatgaaaaaattttgaaaaaaagggaggggggctcaaaaaaaagaatagacaaggggggccaaaccatttaaaacgaaaaggaattaaaaaacgtcaaaaaacattggggcaaaaaaaaaagagtttataggccctaggaaaattggggaaactaaaataaaaaggcaccttttttttaaaatttaaaaatagcaaaccaaggtttacaaaccaaaagggaaaccccaatttaaaaatgtaaaaatttttgggtttaaaaaaaatccctaaaggaaattggactcaaatttggttttg

SEQ ID NO: 426805 - DNA, 450 bp, Oryza sativa
gtttcaaatgcagaaaaaaagcttgtccactgcaaacactactcaaatcattcgtgcaaagacgatttaagacgcgctactcatgtttacctcgcagtcgagctcacatcccaaaatttcgcgagtttgatggcctgccgtggtgcacgtctcagcctatccaatttatgaacttgtagagggtgatcaaaagttggttgttcagcaaaaatgcgggtgtgacttcaaatgtgaacatgacactttattgagttcatgaccaatttatgcttcttgtacagacattttgatgtgaaatccccttgtctatctgaagaggtgaggcggtcggcacagctaggatagccttgatttatgattaatttttcttgtttttcacgcgtccttctttgatgatagttgttttattgtatgtgacaacattctggtatatttcttactttggtcatc

SEQ ID NO: 426806 - DNA, 168 bp, Oryza sativa
ccctcgactcctcttgcgaccaccaccaccgccgacggcgcctgaatggcggtaatcggaggcggaggcggccgtgacgatcttcacaggcggcgtggaggaatcagaccaaactcccagtgcgttgcaccatggggcaaggctggcagccaagaggaccgtccaggg

SEQ ID NO: 426807 - DNA, 380 bp, Oryza sativa
tttatttaaaaaaaaaaaaaaaaaaaaaaaaaaaaaaaggaaaaaaagatataaggaaaaaaaaattaaaaaagggggggtcgatttagaggattctggtattgcgtcacatagcatgcaatggggggggtcttttttgggggcccctagtttgggtccacgggggggggacttaaatttttttttttggggaacccttggtttattccaggggggggggttttccacgaggtccccttgggaaaacctggggttcccccaatttaggctgtttgggaaaggtcttcttttcggtgggggggctttaagggaggggggcaggccgattgccctttcccataaagggcgccttgtgagggggttagggcccgcgcctttgg

SEQ ID NO: 426808 - DNA, 485 bp, Oryza sativa
  unsure (1)..(485): unsure at all n locations
tgatgatgatgcttggagttggaggcgtcgcaggagcaggagcaggcctccccttggtcctccgccgctgcaaccggtcccgcacccctcccccgccgatggtgatgaccccactccaccgcagctgcttcttcttccgaccacaaccctctagtctctcccactacccatccccatccccatgcgccgccgacgacttgttcaccgtcgactacgacccagaggaggaagaagaagaagaagacgaggagggttctccgtgggaggcgcgggtnggtgtaccggcgggacgcctcggttcaccacctcgagtacgccaccaccctggagcgcctcggccttggcgacctctcctcccctcactctcgggcacgcgctgccaccatgggaatcctcatcctctcctcccccaaccttaccggtaccaaggacgaaacgccagtgctcggctctctcgacgttgccaggcgccggggccgcctgcg

SEQ ID NO: 426809 - DNA, 262 bp, Oryza sativa
attgtcaatcttctaaaatgaacaatcgggaaaaccacaaagacctacacaccaactggcagcaacaacagtggaaccacaagctatcaaaggtacaaagggcaagaacgggaggaagcaccaccccttgggggggatgtgctggtccccaaaagaacagaaggaaaacaggaaaagggagagaaagcaagccacgtagcgacagaaggaaaaaaccaaactaaacaagggagcaggaaaaaacataagcaagaaaaaggcc

SEQ ID NO: 426810 - DNA, 201 bp, Oryza sativa
tgttttttaagacagaagcgaccaccagaagggggcggcgattaaaaatgactggagggttacagaaagaacaaaagaggcgggaactagcgaaggccgtcataagaatatgacgatggttagtgcaataaagcacgctcgttggcgtaaagcaccgtgtccgtgaagaataatcgcaaagactcactgcttttacaagaa

SEQ ID NO: 426811 - DNA, 381 bp, Oryza sativa
ttcattttcagataagcagacttcgtctgatttgctgcctgtagaaatggctgtacttcaagatggggaattcacttggttcactgacaagccagcagtgtcaatgttacagaacaaatgaggtccatgcctggatattgtttaagctttcatcttaaataaagatccaggggctaatcccagcctggatactgcttaagctttcaatccaaagctgggttgtaatgatcttctgtctaaaaaaggatccaggtgactgcatagttgcattcctcttttatgcatcacttgtaaggaaaacatgagcatgtatgttgtatgttgttcagagtgatgtatctgagacactcctggtttcgacttagtaaataacctttcctg

SEQ ID NO: 426812 - DNA, 138 bp, Oryza sativa
tttacatcctatcgcgatggggaacgaccagggtgattgccgatcttgaacgagcaatgccaacacagggctgtgcaggggcaaatttatgctaagcccctggacacgtgctgcattgtctaccctgctgaatgctga

SEQ ID NO: 426813 - DNA, 323 bp, Oryza sativa
tgataatattggaagtggcggaggtggatggggcacaggtggtggttcctcgtgggctggtggtggcgacggaggttctggaggtggtgatagtaaccgtggtggtggtggaggctggggaacacccgtcggcaccgacaccatggtcgccgtggacgtgaaggtggccgtcacccaggcctccgacctctcccggagccgactcacgctccgcgggaaccccaccgcgcgccgatggatcgtcgtgatggccgagtccacccccaggtcggccgccgtcgccgcgttcctcgagcgccgcgagtcggagtgcgccctccact

SEQ ID NO: 426814 - DNA, 332 bp, Oryza sativa
tttttttttttttttttttttttttttttttttttttttttttttttggttttaaagaaaaaatttaaatttaaaaaaaaaaaaaaaaaaaaaacaaaaaaaaaacaaaaaaaatttaaaggaaaaaaataaaaaacaaaacccaaaaaaaaaaaaacataaaaaaaagaaaaaaaaggggaaaaaaagacaggaaaccaaaaaaaatttgggaaacaaaaccaaaaccaaagacaaagacaagcaaaccccaaaaacatcccaaaagaaaaaactaggaaaaaaaacccccggacaaaaaaaaaaacctcaaaaaaaaaaaactcagggag

SEQ ID NO: 426815 - DNA, 374 bp, Oryza sativa
tttagggcatgagcatgaccagcatgtactggtgcggccaggacctgcaggagcttgttaacgccaatggccatggataagaagacgaggaagaagaaaagacttctccggagagggaggacggtggatgcagaccgaatccgatcgacatgcacgccgcggagttaatagggaaattctacgagcaattgaggctgaaaaagtcggactgattcaacaaccgagcctatggatcgatctcagtgctcggatcttgaaattagcagcgttcttctgttacgatgtacatggcggatggggagcaagaaaaatccattgaaatgaagtaatgaagaaaagtatatacctgaatgtcgagagcataattcacattc

SEQ ID NO: 426816 - DNA, 235 bp, Oryza sativa
ttcgcaatgacggggtgcttgcccaccgccgggctccggcgggggctgacgctgccgtcgacaggagacacggtacgtattgggcacatgaggaagggttgtatattaaccaggtttgacaatgacattgggacggggtttgtatgaccgtcttggaagtgtttggttgaacctgtctcaaggtctttggtccaagacattattcacctggcttgcttaactcgttttagagaat

SEQ ID NO: 426817 - DNA, 287 bp, Oryza sativa
ttctttagtgcgccggttacacaagcctcccgaaacctcccgtgcgtgcatgctgtccactacagctaggtcggacaatgtatctagagctgacacacgactgaaatgcgctacactgatggcacgtccgggctagggtccatgctcatggcccacaatcccgccaacgtcgtacatcgaccaaagtattccacctcctgttgggcacacaccgcatcagaccggatgcggagagactcacgctgcctaaacacctgctccctctggaacaggatctcctccacctg

SEQ ID NO: 426818 - DNA, 468 bp, Oryza sativa
tttggttcgatctctggccggtgaacgctgccatgtcgaagtgggaccgccattggatggtgaggtggttctaccacatcagccagttgcatcgccgctgattgaggcgaagggaaagagagcggtcgctgagacgtccgcttcagaatattcgctctcggtaccccacttcgcccctggcgacttcgagacgcgagcggacctccttccttttgtggagggggtaagcaatcttgtactgcccgccagtgccccgagcttgttcaccgaactgaatgagttcgacgaggggtgctctggtataaaaagcctggctgctcgggtacgaacctgctttttttttccacttttttatcttttactcttcctctatcttgcttttacaattgacacttgttctctttcgcgctcgtattttgcgcccagatcctcgcggctcactgctcaacggagcgaaccgtgcgagct

SEQ ID NO: 426819 - DNA, 226 bp, Oryza sativa
tgttttcccgtctccaccgatcggcacgcaagtcgtcgtcgccgtcgccgcaccgaggtagtaggcgccgtcgccgtaccgaggtaggtgcgccagtggggaaggggaagtagtactggagggagaagggagatgtagtatggccatgggtgggataaaaaaacaagatggaagacggtttggtgaggttgacatatgagagcgatttgctatggacttgcaatgg

SEQ ID NO: 426820 - DNA, 481 bp, Oryza sativa
taagccaccagaaaggcagcaaaacacaccgcctcctccgcccccgcctccgcctccgcctccgcccgcagcgatcgactccccgccctcctcgccccgctccgtagcgagacccctcctccctctcctcctccgctctcgcgcgctaagttgaggacctcccaaccagtaagcatttcgaggctcctgcctatgcttgatgtcaactatcaaagatgttgtttagcgctgtggaggtcaagtagcattggatcataaattcaaccaaaacaagacaggcatggaccgtgcagacacctcaggctttgtcagtggtggttgcttcagtactacactcctgctgatattcttccattttgtctattctgcgatctgcgtttgaaagatcatcagttccctgttcttcagctattcagtgattcagttgtcatttgctctcaccccgctgtcatattgtcaagctgtgatggataacagcttt

SEQ ID NO: 426821 - DNA, 228 bp, Oryza sativa
ttttattatccagcctgcacatatgaatgggcgtggcgaggattcgtcctgagttgttcaccatagggtactaaattttgctacatgcaagtgaattgaataccctgttattattgcaatttagcattcacaggcgaccataacattgatgacagggctagaccattatctatccacttctgtgatgcagaagatgcaccgtcacctactaatatgagagtgtgacca

SEQ ID NO: 426822 - DNA, 227 bp, Oryza sativa
gttagctataatatacttccctttggagtttggaactaaagatttatgtccaaatttatggtttttacagaggaaactagaggattttttacgttcacctgtagctggcgcgagcaataatgccttcgatcgcatcaaagtccgaatgaagtggaaactccattgttgatgacgtgcgacgtccgcaccagatccagatatgttcatccattcgacaggaaagtttg

SEQ ID NO: 426823 - DNA, 235 bp, Oryza sativa
aaaaaaaaaaaaaatttcagaatccttttttgggaagggctggaaaacggaaaaaaaaaaatgccccgcccttattggccaggtaaaaaaaaggggttttaacggcccttaaaaaaaagggggttttaaaccccccaaaacgccccataaaggccaccccccaaaatttttcaaaaaactccaaaaaaaggaatgttggaaaaatttttacccccattcaaaaaaagggggggcc

SEQ ID NO: 426824 - DNA, 187 bp, Oryza sativa
cccgacgacgccgacgccgacgtgcgaagggtatcaggaggaggagccgccaggatgccagagggccactggctgcgtgcgcggacgcacgacctggtcaagcggccgatcacgaagaaggaggacagttccgttgatgacctacctcacgtacctacaagatgggggagcccgggcacattaagga

SEQ ID NO: 426825 - DNA, 440 bp, Oryza sativa
tttagcgtacaaatttaaggccacaaaatcttttcgagttgggtaatggagtaattatgctgagtaaaaagaagtgaatgcctctaatgctctgcttggaacaacaagatttgtatatttggtatccttatccatgaattgatggagtgaagattttcatctaccagatttcagctgttactgtcagagttcttatggccaaccagtcaatggatccacatattcaatcacagcaaatggcacatagcctaaagctctgtgcctacgtattgctcctattccttgatcatagtgattctcctgttaatgaaagcacgacacagttttgtatccgtgcttccagcagccgtcattctgtctggcctcgttcacattattgctgctccaaaatacctccagatgatacatggtcaggcggcgtctggaactgagctcacagt

SEQ ID NO: 426826 - DNA, 240 bp, Oryza sativa
tttcacttgacacgctaccaccacggatctggtccctcctatagcttaggccacatccaaatccaagctggcgacaaatacaatagctattaatggctccactaggatggctaagctaatggcacttgatcccctgaatagtgacgacttgaaaggagggcccgaggacaacatgtacattaccacgaactacatcacatacttgcaccagacagacactatgcactatcacctaaagga

SEQ ID NO: 426827 - DNA, 442 bp, Oryza sativa
acattgcaaaatagtctgttagcatgactcctagactagcatgtgcaacatagattatagaataaaataatataaatatcagaatgttacgccagtttttggaatcatttctggactgcattaatttattaccttcttctggtatttttggttgaactccctaaaacagtttgttggatggcaacgatagtagatactttggttggatcatgcatcaataagttgcaagcgatcattacagacaaggcaatactcattttaggtgtgaaagatgagcttgaagaactgcagcgaagaacagatcttattagatcttcttttaatgacgctgaggcaaggaggatagaagaatcagcagttgaaaaatggattggccagatagagatgttatgatgatggtgatgatttattgatttgctagatttaaggaagtgtcctacta

SEQ ID NO: 426828 - DNA, 404 bp, Oryza sativa
ccccattcgaaaatcaaaatctcttcctcgcctctctctctgctctctgctctcctcgccttcctctctcgccagttgctccgcgtcctcgctcgagtgcgcggcgatccatccgggagggagagacggtgacggcgcgggttgaagatgaactcaacggcgggtgggatggcttccttcgagatgagtgaactcaagaagattgggctgggcttatctgggttcggaggtctgatctcgattcttgggaacatcatgctgtttgacaagggggtgcttgcaataggaaacattctgttcgtgactggtgcttcactgaccattggaccgaagacaaccgagcagatcttcaccaagcctaagaatcacaagggctcgagtgcttttggaataggcttcttcct

SEQ ID NO: 426829 - DNA, 162 bp, Oryza sativa
tttttgtgagacgagtccattgagtccgcacgaaggatagcaggcagacgattggtgtggccactaacaaggcacggcctgcgctggcggacccaggcaatcatccggcggaggatcagcgtgaccagggccatatagtagacgagcaaggtacgtagctga

SEQ ID NO: 426830 - DNA, 406 bp, Oryza sativa
tatatagcgtggcacaaaataagactcgctaaagtacatcaggtgttgtcccctcaatgatgcttctgaatacatttcaagaaatgcatgcaccatatactcaggatgcatttctgatgactgaagatatgcattaataaaggctccatgctactgaagcttaagacaatgctggtggattatctggtgaattggaacgagatgtattatcttctgatatgtctgcttttaaagctgcaaatccagatgctgtacttgaagattttatgcggtggcactctattggtgactgggtgagtgaggacagagcatatggttttaaagactgtccagccaggaggatggaaaaacaccgtctgtctgaacatgggaatctgtggcgtaaaatcatgaatgacgctcctga

SEQ ID NO: 426831 - DNA, 198 bp, Oryza sativa
taggatgcccgcttttcagaagctttgctcctttttagcggcccttcttttttttttttttggtatacaaaatgtagcacaagtctttattgagcaattaatcttttgttgatgttacaaattaattaaatgcacatgcatgatctcaaactataacaaataccttagcaataacatagcaaagcttactaggctagt

SEQ ID NO: 426832 - DNA, 92 bp, Oryza sativa
tgtcctatcaagtaaaaggttaccatcccggggcgggacttttctaatgcaggtgcctccccctacttcatgcacgagggggacaccgtagt

SEQ ID NO: 426833 - DNA, 235 bp, Oryza sativa
tatcaccttgccagatcccaacacggaagagctcgcttctgtcgctgccatggctcattacttcaagaacaccccataatcaatggctgacatgggaacggaccttttccaacagtgatagggactctatcagatcaatattgacgagtcataaatgccacccatcaagaagatacgcctcaaggtgagccactacaagatcttcaagggcgcaaggaaattggggtacctccac

SEQ ID NO: 426834 - DNA, 321 bp, Oryza sativa
caatggttctaagaggcatgtgttgtacaatagaattgtcagttcatcagatactggtggctgactgccgtttttcatttgtggcactcattattttagccccctaaggttgggaatatgtttaacaagttttgtatttttaagataataatgttctaggttaaatttcagttttggtggatatatgtcaaaatcttgtattcttttcttatttataatggaattgtggttttccctctaaaaaaaaaaaaaaaaaaaaaaaaaaaaaaaaaaaaaaaaaaagggccccctaattcggggggccgcctttttagaggcccc

SEQ ID NO: 426835 - DNA, 68 bp, Oryza sativa
tttttatgtacccacaagaacctgttgaacaggagacatcttaggctaaagcatcctgggggctcact

SEQ ID NO: 426836 - DNA, 443 bp, Oryza sativa
tctttcgcgggggggtactttgtcttcgtgcaggcgaactcggctgccgccggctaggcggcccacacgcggccgattagcagccgtgccgaccgtaagcgcgaccggcggttaggagaccttactaggcgtagagagagacaccacccagccggctgttgtctttaagaccgagttatacactctgactggtgtgccacctgaaagggaaaaaactatcgcgaagggtggaaaggcggaagatgatacagattgaggtactgtgggagtgaaagatggtgcaagaactgatgaggatcggcgcagctgatgagattgcgaaagcttcagagtacggaccagaccttgaagaggatataccagaggaagagcacgtggctgcacagggaacatacgctgtgcttcatacagtgacaaaaacaattaaaactcaattgttcttc

SEQ ID NO: 426837 - DNA, 199 bp, Oryza sativa
ttctttgtttaccaccccaaccgccgccgggtggaattctttagacataaggtccggttggctgactgccgtattacatatgtggtactcattatcttaggccggtaggggtgggaatgtcgagaacgggactactgttgttaagagaccatggacggcagttacaagaacgtgctgcagaccatttggtaaggacctg

SEQ ID NO: 426838 - DNA, 233 bp, Oryza sativa
ttggagtcgactgggggagagtggcgcctgatcacttcatccaggggcaaggaggatgcagtccacaactttgtctcggttgtggtaccggatacggagtcgtgcaggcacttttttcaacctggggtaagagactcccttgggatataccgaagctgcgtgagaactacaggggacggaatctaggaagacatactctcatggtcctgccgtggatccaaagaacccaccca

SEQ ID NO: 426839 - DNA, 357 bp, Oryza sativa
agcatacaacacgatgtaccaacgggtaatatctttcatcatttgggatttcgactggttcggaaacagataccactactttccaggttataaagaaccttggcatgggtaaaagagagttgcataacaggctaacaggctagagcaacagcgagcggtaaaagatggggagaccaggggaagagagagagagagagacagaggcaagccgggggaagggctgttctttacaggacccttcttcattcatcttcccaggcattttttcctaccataggcccaaattgcttttgctgcactggtaacgtccagcttttgacggggcagaccaattgggggcaacaacgccacctttga

SEQ ID NO: 426840 - DNA, 62 bp, Oryza sativa
cgaataaaaggctctgctggaaagtctgcaacatgggatgaactaccttggccatccatatt

SEQ ID NO: 426841 - DNA, 459 bp, Oryza sativa
ttctttggttgttgccaagtgactctgagacatggagatgcactcaaacactggagctcgtgagttctctggaacataggtttgaggaagcatttttcaaccaagtagcagtgttgccacaagctagccttattttgcttgcaaatgccaaaaagaatgctatttatgctgtgcatgttgaatatggcccagatcctgcttctactagattggactatatagcggattttacagtcgcaatgcctattctaagtctgacaggaacacacgaaagccaactggatactgaacagatagttcaagtgcattgtgtccagacaatggctatccagcagtatggattggaattatctctttgtttgcctcctacagctgataatcctgggtttggtagagatccagctatttttcatgcgtatgagagacctccagcagaagtaactgtggtggggttatcca

SEQ ID NO: 426842 - DNA, 426 bp, Oryza sativa
tcgtcttcgtcctcttccgatacctcacctcaccatacagctgctttctctctctctctccatccacccgaagcagaatccccaaaacaacagcgagagaaaaaaaattcacgcggcgaagccaaaattttttgttgatttcgatttggacataaaccctagctccaatctccccatcgccgcgtcggccccgaacccgtgcgcccccccatcgctcgctgaatcgaagggcgcctaccagtcgattcccccaagacgagattggctgccggcgacgacgagaggagcagctcccttggcagcggcggcggaggaggcgccagattcaccgcccccaaggtccgcacgcgcgataagggcgcgctcgtggccctctgattcgaggagggttgctggtgcgtagacgtggagccttctctgaggaga

SEQ ID NO: 426843 - DNA, 381 bp, Oryza sativa
tatagtggcaaaagaagttaccctcaaatgacttgaaaattgacttctgagttctgaccaccacaattttagcagctaaactcatggctctcaattgtaattatttatgtacctaattcgatctgtgctacttccattgactagctgcaacaaataaaccacaccttcatttcaaaaaaaaaaaaaaagaaaaaaaaaaaaaaaaaggaaaaattagaaaaaaaaaacaaaacataaggaaaaaaagaaaatgccaaaataactggaggaagatagagatcaatagcatataaagaggggggccgctttaggagctcaaattgtaaatgccttgatttggacagtcaatgtttttttatgggggccctaaaattaaataca

SEQ ID NO: 426844 - DNA, 437 bp, Oryza sativa
tattttagtgatgactatgattctgatgcaggcgagaaaagctctgagacttctataaatcacacgttggtaaaaggtctttccatccgccttgaggcgttaagtgtagaacagttaatcgaacgagctcggccactgcattgaccagtatgcatacatgcacaccttgctatcgactggtacaatggggtacaacctttgatgactgatgccagaacaatagggttctataaaggcaactcgtgcacagagaattggctaggttagagctagaagagctatatcgcaggggaacttgagccggtaccatctgacgatcaatctagcaaatggaaaggatagcgggatagctctgatcgtgagatctgtagcacaccaatggtggttgttatgaacaactgtttggaacacgatgaggatgatcagtggaaaggtat

SEQ ID NO: 426845 - DNA, 261 bp, Oryza sativa
ctctctagcttctctatcctcctggtgttatccccattctgaactctgacaccgcggagggcatctaacccatctcgatggcggcgccgtcgaaaccgcagacggagccggagcccgccgcgggcggcgcggggctggaggcgctggaggggcttgcgctggacaccgctatcgccaaggccggggtgggccaggccgtggcgttagactgagccagtacacgcctctgtgatcgcgcggggaaacaaccacctgtggcgc

SEQ ID NO: 426846 - DNA, 302 bp, Oryza sativa
tttggcgctcgctctcgtagccaggtgcagagattattggctcatacatctactagcaacaggggaatggagagggggggtcgtccgggagggctacatctcgcaaggtggctgggtggcgccaatgctacctaggacaggatacaaagtttgcaatgataaccttcttattgtggcgtccatgctaacgctgtttgatgtggagtttctcctatccagtaaagttgacagtgtccaggatggctgaagcctctactcatgcattggattgcacggtgctgatgatcacacacttggtagta

SEQ ID NO: 426847 - DNA, 363 bp, Oryza sativa
gggttcaacatgctcatgctgctctgcatgtactggaaggagctcgacggcggcgcctgcagccccgacgaggtcgccgccggcaagcagatggaggccatcgaggagggccgccgcacggtgctcaacaacaacaagaaagacgacggcgacgccgccacccccgcatcgccggaggacgacgacggcggcgacgccgagtcgatgatgtcggagaacatctcgacgaagcaccggtggttcatgcagtgctcggagcaccggcggaagctgttcctcaagagcttcgcgtacgtggtcaccgtcggcatgctcgtcgcctacatgctcggcctcaacatgtcgtggaccgccatcacgacc

SEQ ID NO: 426848 - DNA, 311 bp, Oryza sativa
gcgtttttgtcgcctaatgagtctgcgacatgctgatgaatgaagtgtcagagattgatgcgcgcacacatacattgcagttcagctggcgttcatgagcctaataatgggagggagcctcatttggttgaattcgtttgcagaacacgccttaggcggctttctatgctgcacatgttagctatagcccaaggccgggtggtactagcttggactatgtagaggaggtcccagattgttgcataattctacagtacgactgacactgacgttgatgaggaaacactctgctcagatgagccatgtgggag

SEQ ID NO: 426849 - DNA, 294 bp, Oryza sativa
ataatggcaacatgagagtaccaaggctggtagtgtttttaagctaaggcggccggacgcccttatccatccaggatttctgacgcgtgcatgcaccaaacgatataggggtcccggaaaaagagaaccaattgtctgtatgtctactactaggggcatgacagaaacaagcggggatgaacacaagtgaattttagagtgagactctctcctacaatagtctggaaatcctgcggagaaggcccaaccggtagttctaagccaaatatgggggagccatggctggcgaaatgg

SEQ ID NO: 426850 - DNA, 63 bp, Oryza sativa
ttttgggggtttaataaatttatggtttttttttcaaattttttttttttatatttaaagggg

SEQ ID NO: 426851 - DNA, 422 bp, Oryza sativa
ttctttttgaattcatgcaaggtttagattctgaaccaccttttgaaaatctctcagctgggacgccagaagaagattcagatgatcgagacgaagctgacactactgcagaatctgcggaacttcctgaggaagaagttaaagtttctgcagcagagaagattgtatctgaagctgacctgccatcttcgcaggataaatctgagtgcaggttagagtcacccaaagatgaggtgggctcaaatttgggccctgttgagcagcgtgaaggaaagctgataaaagcctgcccagatagtgttgaagtcaaacaaacaactactgaaaatgtgctgaatcgtgactctactgtgcataatatggcaactactctatctatgatacgtgaaagtatatgggagggtggcattcaacttaccatg

SEQ ID NO: 426852 - DNA, 451 bp, Oryza sativa
  unsure (1)..(451): unsure at all n locations
cttagcagcaagattccagcacatatctgctgactcagttatcacagatagatacaggcacatctctcttgcaattcactcagttaacttggatgaaaaatgggaaggagcttcatttgggtcaattcttagaaggaacaagcttcaggatgctactctcagtgaaaatattcttcgcataatcattaagctgaattcgaccaactcaagtgtcaaacaagtccaatattgttccataattctacagcctattgacctgaaggttgatgaggaaacactaatgaagattgtgccattttggagaacatcccttgctcctcctggaacgccaagcacacaattttactttaggcattttgaagtacatccaattaagattatcgcaagctttcgactnggaagtccatacacaacttatagttctgctcagaggctctgagagcattattga

SEQ ID NO: 426853 - DNA, 462 bp, Oryza sativa
gccggccggcgtgcggcggccggccggcacggcggcccctgccctttccttgaccaaacctcgagctctagcaaccggtcgccagcaagcacccgacagctgccgctctcgacaagctcgacggagcctcctctctcaccacacgccgttgtctccgtcttgcataagttgtttcgatccaattttctcagctcctttcctctccttttttttcttcgtagcgtgcagcacaagagcgcactccagcaagcagcgagcaccacaaggttgctgatgctccagcctccatcatgatgctgaccagcaatggaagtacaaatccaagtaagtgttgtttcaactgagctcgaactgaagtttctttcatatgtgtgcccatttgcatattatcttgatctgggctggtgagcatgctatttgggttttcttttcaagaggcaagggctggaagcattggagaac

SEQ ID NO: 426854 - DNA, 61 bp, Oryza sativa
ggggttaaaggggaacccgcaattcttatttataaatggcagagggaaaaaacagaggggg

SEQ ID NO: 426855 - DNA, 272 bp, Oryza sativa
tttttaaaaaaaaaaaaaaaaaaaaaaaaaaaaaaaaaaaaaaaaaaaggggggtcgatgggggggctctatagtgaatcccagcttcctgccacgtgcaagctattctatagtgttactatagtgcaacctaatgtcacttgattggccgcggttttacagggaaaagcctgggaaaacccagctgattcccatcttaatagatttgcattacatccgcttgtggacaggtggagaaggaccgaacaggcccccttccaaacactttccca

SEQ ID NO: 426856 - DNA, 401 bp, Oryza sativa
gctagcttccccccccccctccatttcccacaccttccagtacgcgcgtctccgtcgcgctcgcgccggccggctgcgtctgcgcgcgcggtacaagagatcgttccatcagggagcgcgggtgatcacagcagccgacgcgcgcgcgcgcgcggcagcacggcgtttcaccgatcgcgtcgttgcgcgcgatcgagctaccgcgttgttgtttgaggagatttagctagctgcgtcgtcgtcgtcgtggaggtcgtcgcttcctttgtgacgtgcctgtcgtcgtccccgtcgccggagaagtgcgagctgccgccgctgcgcgttcgcaccggagggttcatcagcgaaggttaaagcaaaaaaggccgggaagggtttccttgataaaaaaaaacgag

SEQ ID NO: 426857 - DNA, 422 bp, Oryza sativa
tcgctcaccaatccccaattccccatcgatccccattaccgcggagaaatcagaaatcggcgtctccacctcatcgcccatcgatcccattcagcttcgcccctccgttcttccccgccgactccttccctccgttctccttactgaatcagcgtcggctatggttgggggttctcggttgctgccggtcacaatgaggattccaaacagtgcgccattgagaaccgaccacaggtccagggttttggtaggtaatgcgcattgcggcggacgagctgaggcggcagggtatagcgcataaacttaagttttacgtccttcaacagttcaacgatgaatcgatctgtgcaagttatgcagctattggctgtttgtgtgactgctcaacctcggctttgctgtcctccggctatggtggcagg

SEQ ID NO: 426858 - DNA, 381 bp, Oryza sativa
tgctgcgcctgctggtgccgccgcggcgttactgccgggaccgacgcctcctaccatgcattggatggtgcaggagcgggaggtgaaacgactatcggtgaataagctgtataccagttaaaggctatgcttagagacagcttgtatggaaagacataatcgggtctagagcggaactaacacatgggggatgcgtcaaaaaagctgtaccacgtgccaaactacaacctattatttactctggatgaagcacatcaccaaaggctgggtgtctgtagatagtggacatgtttggaccattgtgccaagactgcaagaagtatatacacatgctgaagatggccatattagaactcagtttgacacaagtagaagactagg

SEQ ID NO: 426859 - DNA, 563 bp, Oryza sativa
gccgcgcacagtgaaccggctcgaccgcacgcctccttctttatggaagattacaccagacaaacaaactagctagcccatggcctctttgtcctctttacggctcgccgcggcggaggcagcactgatggctgttggctcctgtgccactgagctcacctttaaggtcgctgagggctctagcgccaaagagactagaggcttgtcactaatgttgccatctttgagggtggaggtcacagaaaaccggacggcaaggactcgggtggcgcctcaagggagtcgtctgtctaacaccctggacgcttaaaaagtgcaagtcggccgatcaaggggcccccttttttgaaccgtttactctgtcaagaaatggcggcttacccgggtcgtcgacgatgtcatccctgaaagcttttacagctggctctgagtacaagagtggaatccaactctaagtaacagacatgtgaactcttgtggggtcacatgccaaatatgaacatctaaaaaattcccttttaaaaagaccgggtcatgtttgagtgagcaaaaaatattttttt

SEQ ID NO: 426860 - DNA, 112 bp, Oryza sativa
tcgtcggcgggcgcggaccagaagcggatcaggggacctttgaggaacttccccgttcgctcaccggaccctgtcgacgccagtgaagaggacgagagtaagcgaccccaaa

SEQ ID NO: 426861 - DNA, 490 bp, Oryza sativa
ttttcaaatcctgattgttccttcacagccaggtgcctgtgctccatatgatgacgacccataagcaacacctgttatattgataatcgtgtaacgtgcttcgttatctgaagcgggactcgacaatgaagcatccgcatgctggttttgtggcggtatggctcacaccatggcttgtggcatgccttcctgctgggaatgggttaatgtgctggatcgagatggaaccatttgttggatcagtttgcttgccaggtattactccctggcctgtttcggcctggggatattgctgtgtcgccagcatcacctgcattaatccgtgtggtggcatctatgttggagatgggacaacgatgattgacttgtgagtgtcatgattgatggaagaaggttgtatcatcttagtgggtatggagcagtgttatgttttgatccaggaaagggaaatgattgagttcatacttcacacccctccttggctaaagga

SEQ ID NO: 426862 - DNA, 298 bp, Oryza sativa
tttgtttaccatctccactactgatctcaggctgttttactaacaagggcgctgtgccacgaggagctgcccctgctgctgtaggagccgccgaggaccctgaccgcgggccgccagtgtcgagggaggaggcgaaagctccgtgtcaagtacacattccaggggatgcacagaaaaggttggaaacgtcagcagcacaaccagagccaccaccactgccacagagacggtagcgactacctaagggtgcgcgagaccaagggggaagaggaatgaaacaacagcaccggagagtgtc

SEQ ID NO: 426863 - DNA, 297 bp, Oryza sativa
ctcgaggatcggtgcgaacaggggggacgacttcttgctatacatggagttagaccaaaatcctatggtagtcaaacctgatgaaggcatcaacaagacagacaatgctgagaggctgcagggtaacaccaccatgggagagggccagttggccagacacaaggactatggcgccaggagaagggagggacaacttactactctgttggattactggagaaggaaagagagctggcgagagctatcattgactacttgcgccagagcaccagggacaagcggctctggacctgggtg

SEQ ID NO: 426864 - DNA, 377 bp, Oryza sativa
atcgggggaacgcgctcttaaccacagggggggggaataggaggggacagttcatggaccgcgccaagacaccgacagtaacactggacatggttgcgcagcgcagtgcaattcatggcacatacaagctcaagtcgcgggagacggagaaaccggagcagcacgccgaccaagatgtgaaagctgacaggagcctgtcttgctagctggagtacgacagatcgacccaggaggcagaaaagggcaaaagtaaagacagtgtataaccgccgcacaagggagattcatctactcccacagacttgtgcggagacacgcagttaccagattagtcgagaacgaagttgcagaccataccgaggaggagtccctggcca

SEQ ID NO: 426865 - DNA, 235 bp, Oryza sativa
tttacttcccctcatatcatctctgctggcgagctggttaaccgagcataggttcatatatacaccgatcgatgctgagccacactatcgaaggcgatcgcatgatgtacaactaactaagcttagctgagctgactagttctctagaacgattaggttgctagtgttgacaagctgactacagacgagaagaggaccgcgaacgtgttatgaaggcagagcagtactaggattc

SEQ ID NO: 426866 - DNA, 417 bp, Oryza sativa
tttttgttgtttggcaataacaacataacagtacgcaatgtcaaatctttacatacggagctgatacggctcgtcaaaattttttctacatatatacacacatctaggaactattcaccatatttctctacatccgtaacacgcatgcttccttcagcaaactaggctacgtaagggcaccgcatctgatcgcttaatcaattttacattggatgatgaaatcctagctttcgtactggagtacatccatgtaccaaaatggacctgcgaatgggatggcaaatatgcagccagggtacatctgcacaccatcgatttataccttggttgatattgaaccaacaaggcctttattgatttgcaaagacctgtactaggatagcctttataattacagacctttggtaatcaattttt

SEQ ID NO: 426867 - DNA, 430 bp, Oryza sativa
tttgagagtatcagggaactggagaagtttattgtgaagcataggaaggactatgttgacttgcatcgcaccacggagcaagaaagggacaacattgagcatgaggtcagtgtttttgtaaaagcatgcaaggaacaaatagatatcctaaagaacaggatccatgaagaaaaaggtggaagtacaaagacatggcttggtacaagcgatgagagctcccggttggatttgatagctcaccagcatggcgtggttttgattttgagtgagcgtcttcactcagtaactgtgcaatttgatcgtcttcggaccatgcgttttcaagatgctattaacagagcgatgccaagaaaacggattcagaagaaacgagaaaccaaagctgctgaaccatttaagccaaaccttgtattaaaatctgatgtttcaa

SEQ ID NO: 426868 - DNA, 409 bp, Oryza sativa
gttccggcgccgccccctccggcgaacattccggtgaacttgccggccaacgtgccaccggagatgccagccaacttgccggccaacgtgccaccggagatgctggccagcttgccggcgaaccttccggccaacgtgccaccggagatggtggccagcttgccggccaacgtgccaccggagacgctgtccaagatgccggacttctccggcttgaccgacctgtcgttcccgccgatgccgtcggcgaagatgccgtcgatgccgcacaacatcacgctcttcgggttcgacgtgcagatccccgagtttatcaacaagatggtggatgaagaaaccacttaagcttgatcgagcttggcaatggcgatggcgtcatcattgcctcgagtttttgtgacatgggtgg

SEQ ID NO: 426869 - DNA, 260 bp, Oryza sativa
acgcgcgcttcacaagcatcctgatccacgacacgggctgcttatcacgccagcaggggacgaaccccaacgcaacatccataagaggtttcaacgtcgcacacaccatcaaggtgcatgaccagggccggcgcatacataccgtcttgtgtggcgacattgttgctgtagaggggctacactgcgaagggcacatggagaaaccgagatgaccggatgaactcccacgtgaaggctctacaccgggccgactagaggtt

SEQ ID NO: 426870 - DNA, 232 bp, Oryza sativa
acgcgcgtgtgttccctcagcggcaatcaaggtggcgcggcagccactccaggtggagaagaagataaaggcgcaaaatggagcacgcccccctttgtgatctaatcatcagtagcgggaccgcaaccagaacgatgaagtcgccaggctttattattgctgcgtcttgcttcaatgccaccgcactcatggtgcggggatcctagctaactgccatcctcatgtaggcctc

SEQ ID NO: 426871 - DNA, 323 bp, Oryza sativa
tttaaaaaaaaaaaaaaaaaaaaaaaaaaaaaaaaaaaaaaaaaaaaaaaaaaaaaaaaaaaaaaaaaaaaaaaaaaaaaaaaaaaaaaaaggacaccagggggggcgatcgggggggtccgttctagggtacccggggttccctccccgggcttgggccttttagtctcttttatggggctccttgttccgcatctctgggccgggggctcccgcggcgctaccggggaaacccctggagttacccagcctttttcctttgggcggtatccccttttggccggctgggatgatggccaaaaggccctgccgacaggcctttt

SEQ ID NO: 426872 - DNA, 233 bp, Oryza sativa
atttgatctgtgtgatctgagtgagcgagtgacactcctctgcaggagggatcttggcttggctcgattcggtggcatgagcaggactttgcggcaaggtactccaccaccacccacaacaaggccatgatccaccaacaccacaaaaccaacaccaccccgacgagctcaccgactcctgcaagcgacaacaactcacccgaacttctacaacgcctactccggaaaccaca

SEQ ID NO: 426873 - DNA, 235 bp, Oryza sativa
tatggacatggcggtggcgttggaggagggtttggtggcggaaaaggtggaggcctaccttcccgctgctatatctcctccttagccgttatgggattcttcgtcgcgccgttccacatgttgtagattcagctcgacgacacgacttttgatgcctatgttgttggtaaacgaaaatgcccctggaattgttgttttgcaaggaatggcggggggttgccttttagatcaagaa

SEQ ID NO: 426874 - DNA, 406 bp, Oryza sativa
ttatggttttcagagacgtaccagagccaacagcagcagcaggctcgccggacggccagccagccatggcgtcctacgacaaggccatcgagtcgtacaagagggccgtcaccacggcggcgtccctggcggcgtcggcgatgctggtgcgcggcgtcgtgaacgagctggtgccgtacgaggtgcgggacctgctcttctccggcgtcgggtacctgcggtcgcgcatgtcgtcccagcacacggtcatcatcgaggagaccgagggctggaccaacaaccagctctacgacgccgtcaggacgtacctcgccaccaggatcaacaccgacatgcagcgcctccgggtcagccgcgtcgacgagaccaagagcatgatgttcagcatggaagaaggcgaggagat

SEQ ID NO: 426875 - DNA, 427 bp, Oryza sativa
tttgttttttttttttttttttttttggttttttttttttttttttttttttttttttttttttttttttttttttttttaagaaaaaaaaggaaaaaaattgatttcaacatgcaaaaaaggggtagctttttttatggaaaaagggccaaaagggcgggatccgggaaaaaaaaatttttttacagggggaaaaaacccaaaattttaaaggtccctagcccaaagaacaagggaaaccttttccatttccaaaactcctaaatttttgaaggggaaatggttaaactttaaaggaagggagccaggcagccacaccggaaaaaaaagggtcgcccgaagcaaaacgatgctttggacaaaattttcgcccatttattcttgacaagaataccggggaagggaaaggtcccgagaggtttttggg

SEQ ID NO: 426876 - DNA, 78 bp, Oryza sativa
ggaattcactgaccgacccacgcggccggtaacctccatcaacacctctccacaaaaggggcaggaggcactggagca

SEQ ID NO: 426877 - DNA, 311 bp, Oryza sativa
tgaaaatgcatcattcttctagccagagttcagcctttcatggatccagtggacactgttactcatgagaggatgagaccctctttcacagtccttaggggattacacattggtaagtactttttgtttacggtgtttgttattgtaattgaatttacattttttttcattttttgtattttttttgttgatatctaactttttttctttacatttatctgttttttggctctctacttatatctcatgtattattactactttacttttttttggttttttctttacttttaattcatcttctctatttc

SEQ ID NO: 426878 - DNA, 399 bp, Oryza sativa
ttttatacctatggctcgcagctattatcaagttgcacggcctgctctatgaaactgcttgcgcatgtgtatgtaaatagtttgcagcatgttattctatagacatgaataataattatacgatcctattgaatttgaccactctctgttctaacctattacaccactaaagaatttttatagcattttataaaatgctatatctgtattggtaaatactaccttaccgaatatgtaacatagccaatatagcagccagacatggtgtacgatttgacctaaaacatgtattggtgtgattgttactcagttatttaagattttgcaaatttgcacttcataatttaagacatttcattatttgaatataaatttgaccacccatcgatgggtggttcc

SEQ ID NO: 426879 - DNA, 91 bp, Oryza sativa
caaacattcgtggaccccaaacttattttcaatttattaatgttttaaataactgaaatcaatattggcaaatatcaaacacgtgtttaca

SEQ ID NO: 426880 - DNA, 150 bp, Oryza sativa
cgcgccctctttttttttggttttttttattttttgggggtttttatttttttttttttttttttttttttttttttttttttaaaaatttataccaacaactttaccttgtaatttttttccaaacaaaaaaaaactcccccccaaggg

SEQ ID NO: 426881 - DNA, 474 bp, Oryza sativa
tgttggatagaataaagcaatgcattttattggacagtatggtggattcacttgaccccgttgatcttttatctcttaaacaacttcttaactgggtttggaaatggtcgcgagatccagtgaaagttccaggaatgaatagtgtttatatacacaatgcaaaatttcatccagtaactcatcagatgttggtgaatgcgagatatatacctaatccattaggatgtctgcactttgcggggaattattttagccatgctcataatcatcagctgaatctagaagaagctgaagctgcatttgcggaaaacaccgaaagcttcttaccttttatactacagttcatcgtggtggaaggaatcattaaacagaaatttaatgttcagcgcattataacatccttacactacttcgggaacaaacttgctgataagaacactgggaaagaaccttcaggtcaggataccgggagtt

SEQ ID NO: 426882 - DNA, 361 bp, Oryza sativa
  unsure (1)..(361): unsure at all n locations
ataaccttagccctcgtgcggctgtcgaagaagctaccacgtgcactggctgctcttcggccgcgagctcgggcattttcaaaactatgaaggaaaacatcatgaagaagagcatcgtgaggcacatgaagctcgagatcgaggacgaccacagggtgggcgcattgtacgacacgatgatctctgacgaggccagtgacgatgctgtgggctaggaattcaaggtctatggctctaggatcatgggggtgctgtgacaaggaccgttagggtatcagcagggtagggctcagtgatgaagngtgtcccccttcttctttacaggggcacaccttgctctcgtgggtatggcaagcttgat

SEQ ID NO: 426883 - DNA, 380 bp, Oryza sativa
ttttgtttttttttttttttttttttttttttttttttttttttttttttttttttttttttttttttttttataaaaaaaattttaaattaaaaaaaaaaaaaaaaaaaaaaaaaaaaaaaaaaaaaaaaatttaaaaaaaaaaaaaaaaaaaaaaaaaaaaaaaaaaaatggaaaaaaaaaaaaaaaaaaaaaggttgataaaaaaaaaagggctaaaaaaagtaggaaaaacaaaaactttgggaaaaaaaaattttggggctgatccaaaaaaaaaaaaaatggaaaacaaaaattaaaaatggggggggcccccacagggggggaattggaaaaaaaaaaaatattgagaaaaaaaacgcttttagtggggacct

SEQ ID NO: 426884 - DNA, 211 bp, Oryza sativa
ttttccgaaaatatctcgccgtcgttgcgcgcggtagctagctagctagctgcgccatcgacgacgaagtctcatccatggaggcggcggctgcgctgacgacgacgaccggcgcccagtacagctgctgcttcggtctcgcgcatggcggcgccgcacaacggaggaggaggacggcggcgggtttcggggcggcgaggtggtcggggct

SEQ ID NO: 426885 - DNA, 191 bp, Oryza sativa
  unsure (1)..(191): unsure at all n locations
taaacccccccacctcgagctctagggtttcgcggatcgaggggcgccgcggctagggtttgggtggggggtgcctgcgcgatggccgctccggcggcggagtcggcggtggtgggggtgggggtnnacacaaaaaaaaaccccaaaaacaaacgcgctcgaggcgcccgcgctgccggtccgcgcgcttc

SEQ ID NO: 426886 - DNA, 465 bp, Oryza sativa
ttggttttttttttttttttttttttttttttttttttttttttttttttttttttttttaaccaacaaaagaagggcattaattaagccgggataggtcaggggttgaagaatacaggccgggttttttttgggggggtttagggggggttagactggattccaacacaaggggaccacggggggccaggggcaacacggccataatttacattcaggtttttcagggggaagtaggggggggaggtaaaaacggggggaactaaccaacacaggggttttttaggtttaagggaaaaaaggccccacccacctaccgggggaggcaggcgctacaaaacatggccatgggggggaggcgccctggcaccataagggattcagctcatgggcatttcatggggtttgacggaacctaccgggagaaagcctgggggggaaagggtggggccattggattggtgt

SEQ ID NO: 426887 - DNA, 478 bp, Oryza sativa
cttttggaagagatgcttttggatctgttcagttaggctgttggctgctttcagagtttcaggtttccatggcacaatacacttgcttcccccttatttagtttttgatttttcttaggtacttctcagcttgtaatgtttcttcgttggttcataaggtcaaaagtttttttttttttttggtttgctgaagcagtggttgacgagttttttagttgagtcgccgtgcttgaggtatagagcaagttgtaaattttgttagtttagatcaggtccgtagattaaattcttttagaacgagaaagggcatcccataggttgtaagtctttggcggaatgtataaggagtatagtggctctctatttgttggaatttctcagttgaaggcatttaagtctgtacatcggggaaatagtaccctgccaacatttgtattggtcattggagaataaatgaagtgtgtccttctgagttttg

SEQ ID NO: 426888 - DNA, 212 bp, Oryza sativa
tttggtttttttatttttttttgtttgttttttttttttatttatatgtttttttttgtttttatggttatccagcaaaaaaaatcaaatggggaggctaaccaagaaaaaaagaaaagaaaaaaactcaagaaacaaactaaagcagaaaaaaagaaaagaaaaaaaaaggaggcggaggcaaaagtaccaagcatagggcaaacaggaca

SEQ ID NO: 426889 - DNA, 395 bp, Oryza sativa
gcgttaacgtcagatacaatgctaggctcaggggatgcttatgtgatccagaaaaattgtgacactgcagatctatatgaggcggaggacaaagatactgagcagagacctgtacttcatacaaaaaatgggatagcaccatcatgaatgcgtgagcatacatagtatggacatgctgatcagttgctttgatttggttcaaatgatgtggccacagaagctaataagccaggacatgggggggagactatatcatgcagtcaagatgaaggagcagacgaattaaaaaaccagaacagtttatacgagtgtacaacacccgacaaatattttgcctcttctggaatatctgctcccacactggtctctgcagctatacgggtgctgtactggac

SEQ ID NO: 426890 - DNA, 521 bp, Oryza sativa
acccctgcaggtgccgggccggaagctccggtgcgacccaggcgatctgttttgcccagtctccaccctacggagccggcggtcatggagggccgtcgaacactactttctcctcttacacggcagcctccagacgtgcacacacatacactagggcctgatattgtgctcgtagcccgtgagggatgaactctaactgaggggaggaggaggcgttaagcatgatagcaggacgcattttgaagaaaacagtctggaactggtctgcgaatttgaagttttctgacctatggtcatcgactctttgattgctgactattgaattgcgccactcattgaatttgatcttcattctttctgtgaaaagaacatccgcagcactctttaatggcgcatcttcttcctcctcggaagtgtttggatatgcagatgtttcattattatgcaatgtatataatttctgaagtgcctcttcttttgtgttctggaaaataatatattcccttaaggaagcatgtgtt

SEQ ID NO: 426891 - DNA, 314 bp, Oryza sativa
tttttgtttttttattttttggggttgctttttttttttttttttttttttagaaaaagcagggtgcttatcctggtacaactgcatccttctcaaacaccgggtggttagcgacaacaaaaaaacaagggcccacaccccgcagctggctttgtttcccccaaaacacacaccagttttacaggacaagcccattttagaaaatttacaaggaccctcttttattgaaccaaaggggtcgggaatctatctccttcttggaccctaccctaagctgctggcagattttaatatcttcttcttcttcttcaaaa

SEQ ID NO: 426892 - DNA, 357 bp, Oryza sativa
ttgttttttttttttttttttttttttttttttttttttttttttttttttttttttttttttttttttttttttttttttttttttttttcaaaaaaaaggtttggggggggttaaaaggggaaaaaagattttttggaaaaaacggggggaacaaagggaaaccccaaaaaaaaacttgggggggagcccaaaggttaaaaggttacaaggaaaagggcaaaactgggggtaaccatggttctcaaaaaggaaatcccaggggggcccccgtgggaaaggtttttttttaaaaaaacaaaaacacggaagctttgggcgggaacaaaaaaaaaaaaactccccgggggggccccc

SEQ ID NO: 426893 - DNA, 431 bp, Oryza sativa
  unsure (1)..(431): unsure at all n locations
ttgttttttaaaatttttggtttacaattttttttttttttattttttaaaaatatttttttttatattcttttaaaaaaatataattctttattaacaaatataaaactaacaccaaaacacaaagttcccacacccaacaactgtattatattcccacaaaacacaacaccanactacaaaaaaaaccccaattggtatgtttaaaaaactccattcacaaacaaaagcaaaaagaactaaaatgaaaactcgtcaaaaaaaagaagcaaaaaacccccaaaaaaaaaaaaaagtttatacatccatcaaaaaacaaaaaaaaaaccggcctttttcgaataggaaaaaaaaacaaaacagtgagaaaattttctttgcaaccccccaaaaattaaaattccaaaaaaaaaaaaaaaagcctttttttt

SEQ ID NO: 426894 - DNA, 396 bp, Oryza sativa
ttggtgttttaatatttttgggggtttttttttttttatttttgttttttccttgttaatttttggaccggtaccagtaggggaaccaaccccccctaaagcgagacgaaaaaaaaccgggcgaaaaaaaggccaaagcaaaacccggggaaaaaggggaaagcgggggaacaaggggacacaacaaacaagccggaagaaaaaagagaaaaggcgggggggccaaaagagggggggaacaaaaaagaaaggaaaagggctaaaagcccgctagccagccgggaaacctgacaggccagaaacaagaaagaaccggccaacccacgaaaagaggaaagacgcgaaaggggcgccagggcggatgggctcctcaccaggcagacgggaaacaaacga

SEQ ID NO: 426895 - DNA, 391 bp, Oryza sativa
ttgtttttttttttttttttgtttttttttttttttttttttttttttttttttttttttttttttttttttttttttttttttttttttttttttttttttttaaaaaaaaaaaaaaggggccccccccttttaaaaaaaaaataaccagggcccccccagggggggcccggggggtttcaaaaaaattttttaacccccaaaaaccttttttaacgggggggcgggggggtttaaccaagggttggggggaaaaaaaattttgggggggaaactggggggcccctttttggggaaaaacctttttacccccccccaattaaaccggggggggggggggggcccccgcccctttgtcccccttcccggggaccaaaagggtttggggccc

SEQ ID NO: 426896 - DNA, 417 bp, Oryza sativa
tttttgtttacagaagttatctggacaacaagattaggcattgcatccgcaacgcaaaaggtattcctagtatacaacaaggtgaggccctcagaatttacatgaccatgaggttcccacatgcctgaatggcgcaacaaagcaactatcatatatagctggatgcggaagcaagattaaataactttggatcacatgtgcagctacactaaacaaacagccccgaaaaggttaagcacttaagcttgccgtgaggatgatgattcacccagtgaaacagaagtaaacgaggaagcccaagctcgagcattgcttgcgcctttcctaaggtcccttgtcttattgctcagtctaagcttgctacaaagcctcttcacatcaagtacattcagcgctcgttccaacagttggcttgat

SEQ ID NO: 426897 - DNA, 413 bp, Oryza sativa
ttttgttttttttttttttttggtttttttttttttttttttttttttttttttttttttttttttttttttttttttttttttgggaaaaacgggggaaaactttccctgggggggattttaaggccccgggttcccggggggtttggcctttaccaaaaaggaaaaggcccatccctttgttttacagggggggcccggggaccaggaaaaccttttggctttgggaaaaaaaaatttgggggtccggggtccggggacccccaaactaccgacccgttttagggggggaaacacccccttagggggggggggcatcaacattgggaaacattcccggttcccccggtgggcccccccgggggggggcccttggaaaggaaccccccatttctaaaaacttttcttggggg

SEQ ID NO: 426898 - DNA, 362 bp, Oryza sativa
gtttttttttttttttttttttttttttttttttttttttttttttttttttttttttttttttttttttttttttttttttttttttttttttttttttttttttttttttttaaaaaaaaaaaaaatttatcaaaaaaaaccaaaaaaaacttttaaaaaaaaggggaaaaaaaccccaattaattttaaagggggttccaaaaaaaaaaaaaagggggggccccccccccccaaaaataaattaaggcaaaaagtttttcttaaaaaaaaaccccaaaaaaagggttaaaaaggttttaaaaaacaccctaaaaccccttggggggggccccttggccaagggttaattttaatggggg

SEQ ID NO: 426899 - DNA, 417 bp, Oryza sativa
tggtttttaactactaagggcatcgcttgaatgaccattgactggtacgtaaccaacaactatcccatgaatagcattagcaacacagcaccaaaatgttcttcagtctacacaaatgcacgcacgatccgggtcagattttcctgacttacacaggccataattaagctaagacagaacattacagtccaggtgagtatgcaacaactaacaaatctcgctcgaatgatggataaacaacagccaacaaacacagactggccacaaactacatattcagaactcttccggcgagtcgtcagaccagcgcgatgctgctcccgccgacaggaggcttactgacgcctccgaagtagtcccgggaggccaccttcccatcggcgaagatgttgctgccactcatctccttgagcttcg

SEQ ID NO: 426900 - DNA, 348 bp, Oryza sativa
ttggttgttttattttttttggtgttttttttttttttttttttttttttttttttttttttttttttttttgggttttttttttttttttttttttttttatttttttaaaaataattaaaaaaaaaaaataaaataaaataaaaaaaaactaataactacataaagtccaaaaaaaaaaaaaaaaaaattatttttaaatatttaaaaaaaaaagaggggaaaggaaaaaaaaaagggccccggaaaaaaaaagcaaccaaccaaaaagccctaaaaaaaaaaaaaaaaaaaaagggggccatcggtgggaccgcccccaaaaaaaaaaaggaaaaattttttttc

SEQ ID NO: 426901 - DNA, 383 bp, Oryza sativa
ttttgtttttttaatcttttgtgttttttttttttttttttttttttttcccttttttttttttttttcgggctaagaaaccttgaaaatgatttcaaaaaattttacaaattcgtaattccccttcaacctaaaaaaaaaaaacggaaaaaaaaacattttttaaaacccccctactttttttgcccctaaggaaggagtaacccccaccccggtgggaccaaaaaaactcaaggcaaaccccggcggggaccctacgggatgagcccccccccaaggagtactatgttctttttaaaaaaaagaaaagcaaccccgggtatcccacgagctttctgtcccaagccaaacccaaaggctacagggggccgaggccctggttt

SEQ ID NO: 426902 - DNA, 381 bp, Oryza sativa
gtgtttttttattattttgtggttcttttttttttttttttttttttttttttttgggcctcaatccaaggggaaaacatattggcatcccaatattttaagaaaacacaaaagggaactgaaaaccaaatccccacaagggtacaaaaactgaaccgccggtcaacaaaaaaaaaaacaggcttccccacagggtaaaggtccaaaacacaccaaggacatactacaaaacttggaggctcaaaaataaaaggccaaccaagttaaaaaacccccccccccctcagggggagagcaggtagctgatcagtgggggtatttgcctgatgatgcggagcaataccgaaaacttccatagcctcaaggaccttggccttaaaa

SEQ ID NO: 426903 - DNA, 365 bp, Oryza sativa
ttgtttttttattttttgggttttttttttttttttttttttttaacccaagataaattcatattacttcagggcatacataagattgggagatcgacaagcaaaaacatactggggccgataaacagaagttttaaagaacccagcttgggaacatcgaatgatggaattcagagtctgatctccctaacttgcctggcaaaatgataacagcttctctaaatcaaacacaaagcaaaactcaaggaagaacgaacgagattaggcaaccaattttgattactctggtccaatccaacaggattgagccaccgccgccattgcctccaagttggcagttcttagtttcttcagttggttacatt

SEQ ID NO: 426904 - DNA, 324 bp, Oryza sativa
aaaaaaagggtttaaggggggaacatgccaagttgaaataagttccaagagattggtgttttttggacaacaataactaattttttgttaaacagtttagttggtggggaaaaattttacaacttataagcaatccatgcctgccgggggccctttaccagtttttaaaggccattcgcagaatttttaatcgcacagggggttttttataaaacttaaaagagggtcatcccaaaagagggttacataaagaagggcctagtaaaaagggacatggcccctagcaggggctccccctccaaacaaaaatggcaaaagaaaagg

SEQ ID NO: 426905 - DNA, 355 bp, Oryza sativa
tttttgtttttttttttttttttttttttttttttttttttttttttttttttttttttttttttttttttttttttttttttttttttttttttttttttttattttttttttttaaaaaaaatttgggcattttaaaaaaaacccaaaaaaaaaatgggggggggggaacccccaaagaaaaattttgggggaaaaaaaaaaaacaggggggccccccaaaaccaaaaaaggggtttttttagggccaaaaaaataaataaaaaaaagggggggggtttttgggaaaaacaaaaaaaagggttttaagggaaatttttgcaaaaaaaagcttggggaatttttaaggggggcc

SEQ ID NO: 426906 - DNA, 147 bp, Oryza sativa
ttttttttttttaaattattggggttttaattttttttttttttttttttttttttttttttttttttatatttggaaaacaaaaaaaaaaaactaaaaataaaaaaaaaccaccgtataaatcaaacatataaagtaataacaacc

SEQ ID NO: 426907 - DNA, 402 bp, Oryza sativa
ttttggttttttgatttttttggtttttttttttttttttttttttttttttttttttttttttttttttttggcccccggcccacaaaaaaaaattcattttttcccaggggcggggtatagcccccggcccgatttttggcccaaagggaaccttttttaagggggggaaagaattccctaagccttggggaagccccaaatttggtgcattggggaaagcccaattctaagggggggcagggttcacaaacaggttcccaacatttccctggggaaccctccaaaagggttttgcctttttttttttaacggaaaaaaaggggcctggtccggcccaattaaaaactcgttgccccccaagggaccgtttttggtgaacccaaccaacccggttcaggg

SEQ ID NO: 426908 - DNA, 378 bp, Oryza sativa
ggtgtttttttttttttttttttttttttttttttttttttttttttttttttttttgaaaaaagaggtatgtcaccctaaataagaatttttgttccccaaagccaggttttttggaagcatggtcagacctaccaaaaatgcccaagcttattaggggcgctgggggtcccccattgacaaacattcagatcaactggtggggggggggccgcccaaaaaagggaattcaaacaactttttttgtactatcagacaactttaataacaaggatgatgttggggaacccccctctttggggtactaacccaaacttttgcacaaaaaggggcggggcccctggaggggttttgcccccaaacccaaagaagcccgaa

SEQ ID NO: 426909 - DNA, 332 bp, Oryza sativa
ggtgttttttttttttttgttgttttttttttttttttttttttaattttttttttttttatttaatatttttttaaaattaaaattaaattaaaaaaataaaattaaaaaaaaaggaaaaaaaaaaaaaaaaacaaaaaaaaaacaaaaacaaaaaaaaaaaaaaagaaaaaagaggagggaaaaagaaaaaactagacttgaccgagaaaaaaaaaaaaaaaagaggccacaaaagctttaggaacaaaaggaaaagcaaaaaaaaaaaaggataccataggaaaaaaaataaaagatatagaacaacaaaggggggtgaaaaaaacagg

SEQ ID NO: 426910 - DNA, 406 bp, Oryza sativa
ttgtttttttatttttttggtttttttttttttttttttttttttttttttttttttttttttttttttttttttagggaaaaacaacagaccattatttatatttaggcccgggttaattttaccgggggggggggacccccttacaaaaaccaaaagggctggggccaaaggtaccgggggtacggggcacactggggattcaggtttaaaacaaggaaggaaaaggggcccttcttaacggggggggtaggtgcaaaagggggggggggaaaaaacacccaaacccgaagcagctcaatgggggggggggggtttaggccaaaagcaaaaaactataggggggggcctcactcagggggggggcccccggttttatttatttaggtaaacacctttgggaagg

SEQ ID NO: 426911 - DNA, 381 bp, Oryza sativa
cggccccgatttttttgtgctacgcacttgagggggttgcacaccgtttggatatctttttttttttttttggttattttttttttttttgttgtttcccaactttttttttttctgtgggggggcaaccaccatgggtgtgtttttccacacgaccccggtgaccaccctaatgttcggggggttccagtcaccacccgcggggttggatcaaaaagttggcttgaacgcccgacgggaaccgtcgggcaattaaagatagaaacccaccggagggggttggcagtagaaggcccattctccacaccaaatttcctaccaggcttatgtgtgggcgagaacagaattgtacccggtttatttgggaggggaagcaccgga

SEQ ID NO: 426912 - DNA, 376 bp, Oryza sativa
ttgttgttttttttttttttgttttttttttttttttttttttttttttttttttttttttttttttttttttttttttttttttttttttttttttttttaaaggggggggaggggcccccccccccaaaaaaaaattttccgggacattcaccaggggggccggggtttatccccaggggggggcaaaaaaaaaacccccaaaacgccttttttttttttaaccccacttttggcagggggaccaagaaggggaaacccctttaccccagaaccccttccactgttgggggccccctttgacctggggaaaaaaattacccccccccttggcaaaaaaaaaaaaattccctgcaaagggggtttttctccccgg

SEQ ID NO: 426913 - DNA, 454 bp, Oryza sativa
atgcacccctccttcatcttggatcctttgtgcggccgccctcctttttctgtgtttttttaacttgggggggacaactttatttagtcattagggcctgtaattccttccagagatgaacaacagcttttagggggctactacaggtataactggttacatgcatatacagacgggaacacccaataattaacctcaactccttaatgaacatccagggataaaacaaacactaggacaacaattacgctggggatgctctgaatggaagaaaatccacattttattatgacccccaacgcctccgtgtcaccaccacgtcttgcagattttattttaccctgttctattcggtcatgcatacacgatctcaccgtcgtccttcgacgccaggatcagctccgggtgcgccgccgccgccgtcgccttcttgatcgtgccgtcgatggcgttc

SEQ ID NO: 426914 - DNA, 386 bp, Oryza sativa
  unsure (1)..(386): unsure at all n locations
ttgtttttttatttttttttgttttttttttttttttttttttttttattttttttttttttttttttttaaaatttttttttttttttttttttttttttttttttggnnagggttttttttttttttttttaaaaaaaaaatgaaaatagaaaaaacctcaaaaaaaaaaaaaaattttcctaaaaaaaaggaggaaaaaaaaannaaggaggtttttttaaaaaaaaaaattttgggcaaaaaaaaaaaaaaaagaaattcttaagttttgtaaaaaaaaaaaaaaattttttaaaaaaaaagaaaaaaaaaaggaaaccactgggtaaaaaaaaggggaaaaaaaaaaaatttttaaaaccccaaaggtaagcaaagtggga

SEQ ID NO: 426915 - DNA, 100 bp, Oryza sativa
ttaaggccgacggcccggaatatagacagacgcgaaggaagagcaagaggggagggaaaaggaaaaccctttctatctgtctctatcaaactctttctcc

SEQ ID NO: 426916 - DNA, 259 bp, Oryza sativa
aaaaaaaaaaaaggggtttaaaaaaaaaaaattaaaataaaaaaaaggttaattagggccctattaatgggggggagcaaaaaaccggagggggaaaaaaaaaaaaaattttgggcttttgggggattaaaaaaaaagggtttttaggaggtttttaaaaaaaggggggggggcaaaaaaaggtttaaaaaaaaaaataaaaattctaaaaaaaaaaaatttgggagggaaaaaaaaaaatttggggggagtttttttt

SEQ ID NO: 426917 - DNA, 345 bp, Oryza sativa
ttggtggtttttttttttttgtttttttttttttaattgttttttttttgttgtgggcagcaaacaaaattggaaaccaccaaagattggcaccagcagctcccagggacgggaatttcggtttgattgcctttggcaggcgatacccatcttatagtgggaatttatttgtgcaaaaagggcacacctgaaaagctggcgctccaaagtggacaattttttcaaggccaaaatgataaaggcaaagggccccttggttggctatacccgcccctataacgaatggtcccagggaggctttggtgggggcggcgcccagggggtcccttggttcagattttttgg

SEQ ID NO: 426918 - DNA, 368 bp, Oryza sativa
tttttaaattagctagcaccctagttctctggctggttcctttcaaaaaaatctttggctactggctgattcttaatctgtgtgattagatagggcactccatgacggttcaatcaacgtgcatgcagctagctagataggcctaaaaattagcataaatagtcactaggatgtagataatggtaagaggtggagacagaaccagaattgcagtgctggctagttatccttactgctcttctgaccatgtgagacaatgtctgctgtagccccgttgcactagagttatagatatacatcctaaggggcgcaaggaagatgatgggacgctgcaggctttgagggcggggtctggggatgaggcttgc

SEQ ID NO: 426919 - DNA, 198 bp, Oryza sativa
tctcagtcaagaaaaaaggaagattacaccagcaaacaaactagctagccaagggcctctttgtcctctttccggctcgccgaggcggtggcggcactgttggttgttggctcctattccactgagctcaccgacaaggtcgactctgacctctagcaaccggacgtgtatgaggcaataggtaatgtatgccagctc

SEQ ID NO: 426920 - DNA, 346 bp, Oryza sativa
tttttgtttttttaatcttcttgttcccaactacctacttaattttttttttcttttatccttcttaatcattctttttttttttttacattttcctatttttacttcaaaccaaaaaaaaccaaactctttcttccttccccactccattaaaccccaacaacaacaaaaccccccaaaaaaatttctcactataaaaactaaaaataaattcccaccccccccccccccccccaattaaaacaccccccccaaatgcctcacccccaccaattttatttaaacaaattcaattccctgaggatcctacactaatttacactatcgaaccccacaaacttactcc

SEQ ID NO: 426921 - DNA, 419 bp, Oryza sativa
tcttaagtatcaaatatggcacgtattaagaagaattttgcggcattaataggtgtttgctatccatggattcatgcgaccaatgaaggtctctcatttgcttaccagttgctgtatttgttggatggtactgcattttatagtccagcactgcatgctcttgggcttcatgtttgtcgtgctacaggacaagagctgatggaatcatcttctagggtatcaagaatcagaaatcgagaacttgagagacttcgtggtcctccatggctgaagaccatgcaaagggtgttacttaactgtatgtacactagcctagattatgcacaaactggtttgattgctgcagttttctttttcaagatgatggaatggtggtatcaatctgctgaggaaagaatgtcagctccgactgtatatcc

SEQ ID NO: 426922 - DNA, 421 bp, Oryza sativa
ttttcgacgccggccagcggcgctgccttgggggggtcttcttcgagatcgatctcgccgcggacgagtggaagtcgcggccccccgtcgtggaccacggtgatggctcctactccttgcgcctccaggtcgcgccgcgcttcgccgagggggatttccgcctcaccatcatcctcctgttccgcagcttcgagggcctcaagttctcctccctgaggttcaagtaccacgccgagatgcgccggattcccctcctgttcgggccgagcaactccacgcgcttcctcccggcattggagacctgccgcgccgcggacttcgcgcgcgacgtgtggtccggccgctggacgcgcctcgccaagaacgacagctgcgaggaggtggacgacgccggcaggtaccggtgcctggagccgcaaca

SEQ ID NO: 426923 - DNA, 400 bp, Oryza sativa
tttttgtttttttattttttggggttttatttttcttttttttttcccataaatcctacttaaacaatattttgaaaatgggggggccattttgctccatcccagtatgtgggaggggcccatggcctgcttcattttgccaagactatgaagtcacaaaataccactacaaatttatcttttgccggggccacaaggacactgggtttatgtttgggctagataaattattaggggctaaatcttgccgggtgacccaatgcaggggctggactgtccattgctggacctggaggccactctatgggagcgagccggccttaaaggttttggggactacatcggaaacaaagcaatcgccactgtactttacaaggaagcggccggataaggggccctt

SEQ ID NO: 426924 - DNA, 376 bp, Oryza sativa
tgcattcataattcatacaaaaattattgagacatgatcgatcgatcgatcgatcaagagttgcatcccaaaataaataatccaccgcaaaagctacaggcgccagcctccaggtagcttcgctatagcccatcaaacaagcaagaaagggggagagaagggaaggagaggtcgtcgtcgccgtcgacgacgattcaccggccatgtgctgctgctgcggcggcggcggggactgctacggcgacggctgcaagtgccggccggtggggtggctgctgggtctgcctttcgcgctgctcgccgtccttgtgttcatcgacggcgccatcatctggatcatagggctggcgatctcgggcatctgcccttgctgcct

SEQ ID NO: 426925 - DNA, 418 bp, Oryza sativa
tttctagtatgcagtcaagtgagccatcgggtacaagcagcaatcctagggatctggcaaatgaagttgcaagtcattcaaaaatgccctctagaacaactgaagatcatacggagtcaccactgaaatctcaagtgctcttgcaggctgcagaaatcgagaatttgaagctagacaagctgaggttggcagaagagaaagatgggctggaaattcacagtcaaaagctggctgaagaatcatcctatgctaaagaattggcagctgccgctgcagttgaactaaagaacttggcagaagaagttacgaggctttcttatgaaaatgcaaagctgaatgcagatttagctgcagcaaaagatcaaacaaggagcagtatccagagtgacacaaaacgccgtgatcaggagaatggaat

SEQ ID NO: 426926 - DNA, 396 bp, Oryza sativa
tgtgaacttcaccgccgtgctcgtcatactgctgggctcagccgtcgtgatgtatgttactgctccgatgcacaatgaacattctcatgggtattcagcagtgcgcaagccatgagccagatgagccattgatcgatccagcttcttcatcggctgtgtctgttgtataattgttttgctgaattattcccatagctgctgcctgctgcaaatgtggttcagatctatgggcatgtgatgtaactttgtaagtaactgacgatattaattacgagatgcgaaaattttgaactgtttgtttactgatgatatagagaggactgatataagatgagattgagacacatgaagttgcgccgtagtagcatttgcattcctgtggctcaaactacctac

SEQ ID NO: 426927 - DNA, 399 bp, Oryza sativa
tttttgtttttttatttttctgtgtttacaactttctttatttttttttttattttttttattttaacaatacaaatcttttaaccaaggccaaacaaaccttaaaaaaaccacccccccaaaagacaaagaaaaaaacaaagccaaaacataccccacacagagctaaaaagatacaagcaccccacaagaatcaccacaggccccaaatcaacggtccagactttatttaccttgccagattaaggttgctacctaaaaacaacttttcaaaaaaccccacccttcaaaaaaaatgtaccaaacaaaagcttaatattctaaacccttgaccactaattaatacccacgaaagatcccaaaaaccaccggtggagcaacaaacacaagcccgggttg

SEQ ID NO: 426928 - DNA, 264 bp, Oryza sativa
tacggcatcccagcggggtggttggtgtcgtggaccaatgggatgggttggtacatggggatgccgcggcagttacaggacggacacaaccagctgcgcgcgcgctacggtctgcatcctcactaggcgggataacaagctggcgatgcacgccccgctgagaaccaaagccatgtacgtaccatgccacatccgccactacaccggcaaaaggtaccacgtgagcctctacatgaacaggaactgctggaacaccagggattt

SEQ ID NO: 426929 - DNA, 399 bp, Oryza sativa
attacattgaaagctgatttcttttcatctcttctgattgtgaacggaccaatttaggtggtgcgggatgccttctttgatatatctccccgcttggactccgtcttgagaaaggacagtgtccggtgcttcttccgtttgttcgcggaatgtactgcggccatggcatttaagtgtaacatcacctcagaaaccttatcctgcattgtcaggcataatgccttgcgatgtgcgaaaactgtattggagggcaaggcacctcagctcagttgtatgcatgccaatccaaactgcattaacccatatggaatttttccactccatgaagctgctgaacggttctctgttgacatgatcaagttgctgttctgccatggtgcttcagccaatttacacaca

SEQ ID NO: 426930 - DNA, 383 bp, Oryza sativa
gttgtttttttttttttttttggtttctcccttctcttttttttttttttttttttttttttttttttttttttttttccaaggaaaagccaagggggggggcaaatgggcattcccgggcccccccccttaatcaaaccccaagaccgaccggccggggcccaagggggggccccaacccacaaccggggggggtctgattttacaaacgcccccccggcaaggggcctttacccccccccccagctttcctaaagaaagggggaaccaacaaaggggggccctttcctttttcaaaacccccccaacttgtttcggacgggggggcccccccggaaattccggcccgggccctgggggggccccacccttcccccaagggg

SEQ ID NO: 426931 - DNA, 413 bp, Oryza sativa
tctttggtaaagttggttcttggtctggttcatctgccttgttactatcttccttttgctaatcttgttctgcttagattgtcttttctcttggggcatcctttgcattttggctaatcttgtcatctccttttgaagtttcacctctcttcctgcatctcactacctgatttggtgcttagtctaatccaattcctttttggttcttgcgattgcagtgggtgattaggtgcttaacataatcccaatcctagaaaaatacattcggagtggttgctgctgagctcaaccaatcaagcttgttggggaggcaagcagtcacaatgatgagcttcaacaagagccaagaaggatttgggcaggttgctgctgtggccaccctggcctccaatggaggaggctctctaccatgg

SEQ ID NO: 426932 - DNA, 420 bp, Oryza sativa
gtctcgggaggctcctgcagcagaagctcgacatcctccggactcccgagcacgaccaccacgacacccatggccctgtggatcacgacggcctccacctggtgcctcagctccacccggtgctccagccagtcggcgatctgggccgcgtcacactgccaccgctctgtgcccagccctctcagcagaatcacccggctcctgtactcttcctgctgcgccgccgccgcctgcgtgatcacgtacggcggaagcaggagacggagcaaggacgacgtgccaccctcgtccgggagcagcagcgaggaggagtccagcatccggaggcccgtcctgacgagcaaccgcggcgccctcctggcaaccaactccgtggcgtccgcgtcgtcgtacacgagcacgccggcgtccccgcccctc

SEQ ID NO: 426933 - DNA, 276 bp, Oryza sativa
tcgtccactcccccgtttccatccccgggaatcttcttcttctcttcttgcggtgactgagaagaaaaaaaaaagaaagagaagaaaaattgctacgagattccttcttcgtcgccgccgctgctgctgcgttatccccaaggtgagagctttttgtgctttgagcctttggatggtgtggtttggtgggggcgctgatggttggggacctgggtggtggtgtttgcccgtccccttttcgttgccctcttccttcttgcttctcggcttggggtc

SEQ ID NO: 426934 - DNA, 419 bp, Oryza sativa
tctgcggcggcggcggctggcgatttcgcagtagcgtcgagagcgcaaggcggcggcgcttgcgaggcgacggcgcgacggcgcgggaggcggcggcacgcacgagaggtggctgagtgcgcgggaagggcggcggcggcagggcgcagcggcaacggcggtggggcggcgcggcgacgacgcgcggcggagagggccgcggttctcctccgcgcgcagccagggccacggcggcgagcctcgacctcgcgcggcccatgggaggcagggcaggcgtgaggccggtccaggacgacggcgaggacgtcatcgagcgcgcgggcgagctgatgccacgcgcggcgacgacaacatgttcataatgccatgtcacaagcaacttaaaagcggtgtcctctgcagttattacacatgcgaat

SEQ ID NO: 426935 - DNA, 419 bp, Oryza sativa
tttccatgatgcaaacggatctggtaaagggctatctagcggggaagacccgtggtcgcagattgaagagctaaagcaagaactgggccatgagaagaatctaaatggagatctgcatttacaattgcagaaaatgcaggaatccaactctgagctacttctggctgtgaaggatcttgatgagatgctggagcagaagaacaaggagatatcacttttgcatgaagaaacactggaggatccccaggaggctgaatatgagctagcattgtcaaatgtgcataatgctggacacaaaatagacatatctgaaacaagttcagttcaagagaaagaagatgagctgatgctggatgcattggcaaagacaaccgatggcatcgctacctctgaacttcaaaataaaattgttgagctga

SEQ ID NO: 426936 - DNA, 436 bp, Oryza sativa
tcatccactcctacttaatctagcatccataacagccgccccccttttttttttgtttttttacccctcttgtttttaacctctcctttttttttttttttttttttttttctttttctttttatttttcctttatcaaataccacccctaccttctttttaaaaaaaaaaccccaaaccccccccaatttcaaccctcaattcctttactccaacacaaaaacaccctaaataccaataacacccccccccccctttaaaaaaaaaccacattaatatcccccccccccccccccatacaaaaaaacaaaaaaccaaaaaaccaaacaaatctcctttctggggaaaacaccccataccttttacttaaatcccccccccccccaaaccctagcccccccaacccccacaaaaaacccccaaaatttccccaaaa

SEQ ID NO: 426937 - DNA, 419 bp, Oryza sativa
  unsure (1)..(419): unsure at all n locations
tgaaaggtgacaggggcatggaccttcttcaagagatcttgcagcatcttcgcgaactccggagcgtggaacttcatgttaagcatgctggtgatgcccttgctgcaaattcagcatagcacatgcctctcatatataacatgtgattaccgtagcttgctattgatttagtggatcggctttggtgagtcgatcggaatgatctgaagtacttggttggtgatggtacctttgaaagataatggctgatttcatgggaggttttgctcattttgccggtggcacggaagcaaagcctcttccttttgtttctggtccagcattgccggctttatgatgtggtagttgtagaaatcattagtccttccaaagctgcacaatgttgaatcattggtgccagcttcngatgtatgcacaac

SEQ ID NO: 426938 - DNA, 390 bp, Oryza sativa
ttttcggggggagccacacgcgcgtctacccccacagggaaggatcgacggaggtgctgtttaattgataacgggtgttaaactatacttcgcactggcaaccttgcgaagtaattggcgatcaaagaaaaggggcaagactgaagaatcttggttgctgaatcagtgcataggaggaacattgggactgattcttgcaaaggcaagaacctgggccaagtcacgacgagcgataggtgatgcatactcgaaagtacccacagtatagcaggtactcatgtgacagatcaatgctaattgccagttcattcatcgctgcacgcgtgcttcgaccaagggaccgctctatcaggaaaggctcagctgctctatgggaacatgtgaacactt

SEQ ID NO: 426939 - DNA, 358 bp, Oryza sativa
tacatgctgcaatggttggatccttgcacccaacaccaattgctacgctgccatttcttgctccgcattctgctgtggtgcctttctgtgacgggctctacaggcatgccacagcttgggatgcattgaggaaagatgcagcaacattggcccaagacgtaacttctttgacagaagacatggcccagaaatcaggaatcactattgagcaagtaagagagaggttgcgatcagtgctgtctttgactgacgtcactcgatttccagtgccaaagaacccacaggctgtcatttttgttggtgcaacggatgacggctacatccccaaacattcgataatggagctccaaaaggcatg

SEQ ID NO: 426940 - DNA, 417 bp, Oryza sativa
tgttcacttggttgaaagggcttggtctggccaccatcatggttggagttagcttattcaattggtacaagtatgagaaatacaaaaagggtcacataaatgaggatgaagttaattcaccttcattcgatggagatgccaaatacatcattctagatgacttggaggaccaggatgagtttcaggatgaagatacataattttgcaatgtggcaacattttaactgtcacttggatttttatgccctgaaaccattcatgtctgcttattgattgaaactataagtacttatggatgtttccacttaaacgaggtgtcacggacaagggcactgctagacttgctgatgttctgcaaccaaacttaaaaattatctgccggagcttgtccgtctccaaacaatgaaatggtttctc

SEQ ID NO: 426941 - DNA, 238 bp, Oryza sativa
tttaaagccaaaaccaaactccatcacctcctcctccgtctccttcccccaccatttctcccccaaatccgtctcctcctgctcccccacccaaatcccccacctccgccgtcgcggaatccgccgcgacgacctcccctcgatccgcccgatccgaccccggatcggatcccaccgtcgccgcccgcgcgcgtggtggttgggtgtgcggggctgtggaaaccctaggcatgcgatc

SEQ ID NO: 426942 - DNA, 302 bp, Oryza sativa
tttgaaagtcaagaaacccaaataacagatatggctgttgatcgacctataggagataggtgtcttgtgagcaactcgggtgatgtctctacagctcttagaaagctaattgaccaaggaatggttaatgctggtgatatagaatcagaattgggtgtgtcttcagaatctttggaagctgctctcgtgcctgaaacatcgaccttctcccctggtctgaagttgaaaataatcaagttactgcaaaacaccattcgtgtaccttctgttcaagagaagtgctctaaagagggatctttggc

SEQ ID NO: 426943 - DNA, 418 bp, Oryza sativa
tctcaaccatttacttaatggatgctcattgggtaactacaataatccatgaaccataagcaaactgaaatctttaacttgtacctagttatttctcaaagtagtattgaagtaggcagcattagcaatcagtaatgactctgcgcaaggttgaagcattcaaactgcatatatttactgcaagaacttgtgcatagtacacaacttgttataaacgcaaacctgtcaattcttcatgtttgtgtgctactagtgggagagttcagaggacatgaagagttgctgcaactctgctcatttgcttgaattggtggtccagcatttctggaaaataactgcaaaacttttggatcaagcaaaatcttgcaattaggcgtcaactaatatcatccaaactgaattaaaaattaggataggt

SEQ ID NO: 426944 - DNA, 260 bp, Oryza sativa
gttgtttttttaaaatccgtgttatcaaaccccacaaataccaccattcaacatgtcaaccatattttacactaggaatacctttctaccccgtaaaaaagggcaggaacaaaagaacattctctaaggtaccaaccaccactagctcaagagcctaggaaaagcctttacaaagggagggcaaaggatgggcaagccattctccgggcacaccactgcggcaagccgccaggtgaggcccaagatttttctgggggcgg

SEQ ID NO: 426945 - DNA, 210 bp, Oryza sativa
gggacgacaccagtccttttggagcgtggcgcagaaagagcaggacggacttgtctgatgctaccgaaggcatgctgtctggattggcgcttccagttgcaaaaagcgcgtaagcagcactgacccatgctcatgcaagacctggatgctcatgtcctacatctacaacatcttacccactgattatgaacacggcggtgtgatgacaac

SEQ ID NO: 426946 - DNA, 227 bp, Oryza sativa
gtttcttaactaccttcggccgacctcgcgggggagaataattggtattccaggcggagcacgctacttctccattttcttgatatcctcgtggttgtatggcctccttctggttcccacccctgcacttgctattgccgcctctgcctgccgtgaacgctgtctctttctctccacggcatgctccgactggccgtctgtttggcctgctgtggctgttacttggc

SEQ ID NO: 426947 - DNA, 439 bp, Oryza sativa
ccccccataattgccgggtccaaccacgcttgtttttaccgatctatataccttgtgttttttaagcacctaggttaacaaatacaccctttcataactcttgtactagtattatgtgatcgaggagccaagaaaatccacagctatatggccagatagcaccagcctcgtaggatacacatatggttcgcttggtattcttatacctttgtaagagatcatctcggatccaagactacatctgtattctaggacttcagcattcaaatgatattgcacacttcggatatcccatggcctgtattatggaagttctagtttacaattgaattctcatgagtcatggtcgtcattcaatcaataggctaaattgcttcatatcaaggagagttacttatttccagcatactcatccatgctattgccaaccacatctgat

SEQ ID NO: 426948 - DNA, 334 bp, Oryza sativa
aaaattgttgtttttttaagtaacgcggagagaaggccaaaccctccacactgcttgactcaaactttatgtcacacaacagaaacaaaaacgacgaatggcacacatgaaagactgaaagttggcactaatacagcactgaaataccgaacagaaggcacctacccataagacgcgagtggaatcacatctgaccctcaaacgtgcgatgagcgaatacccttatatatacgactttgccactggcatagcccatatctacagattttagagagctaatcgcaccagctttgacgacaagataaaacaggtaagtgacactccaaataaagcc

SEQ ID NO: 426949 - DNA, 370 bp, Oryza sativa
tctctccactcctcctagggtggcggtggcgggagctggcagcggcagcggcacggctcggccgccttgggctccggcctggagctggcagtggcgggggcggcccggcctggagctagcggcggcgggggcggcccggcctggagctagcggcggcgggggcggcgacctcggtcgaagagtgggcggcgacctcgtgtggcggcaccaccgccatctcctcctcaccgccgctgccgacgacgacgaggaggcgacgggccagatccggcggcgacggttctcgtcccgcccggatccggcggcggcgggtctcgtcccgctcgaatccaacggcggcctcgggcgaagagtagcggcgacctcgggc

SEQ ID NO: 426950 - DNA, 483 bp, Oryza sativa
tttctgatccctcaaccctagctccccaggtgtgcttttacggcggcgcggttgtccgacagggaggcggagcctggcgtcccagggggtggcgcgggaggcggtgtccggcggtgcgggaggcggagtgcgggggcagcgcaggagtctgaaggcggcgtcgtgtctgcatcagcatcgcttttctcctccgaatcctctcccaaaaaaccgagagaaatatgttggtaaccagatcgaggttatttggagtgtcccagttgcgcaaatcctctcttaagcatctgttgaagttcaggtctatgtctgatcagtcatctgttctagctgccgatgataccgaaacttcatgggctatgtctgatcagtcgtccgttccagctggcaaggctactgaattttcattaggtgatttccctaagcatctgcgcaagctaccaccatggatccatgagccggcgtctgttcatgaagttaatgata

SEQ ID NO: 426951 - DNA, 71 bp, Oryza sativa
ggaccccgccccaaaacccccggcccgacccaccccttttggcccggagcaaccaaccacccccgaggggg

SEQ ID NO: 426952 - DNA, 353 bp, Oryza sativa
ctcgccgaggggtacgagcactggtaggagggggattccagccacgctgtcggttaggcccacggccgacgctaggaaagcaactacagccaggcacctcgccactagtggcgaactggcgtcgtcgctacatggggcgcgacatggccaccgcataagcccacctgcggcacacgaagggggactaccgcgaacttcccccaggaggagccgttgccacaggatacgacacgacggaaggctgcccggccggcgatcacagctgctgacgaacacgacgaagctaaggctgctgacgacggcggagaaggcggtgctcctgtcggcagcggagcgcgcctggctgacgctga

SEQ ID NO: 426953 - DNA, 414 bp, Oryza sativa
tttgtgggttttttttttttttttttttttttttttttttttttttttttttttttggtttttttttttttttttttaacccaacatgggggcaaattattccccaatgaaaaaaatttttttaaaaaaacttaatcttttaccgggaacaaaaactaccggggcttaaaaaaaccggaaggttgcaaccccccccgcaaggggccaatggggggtagctacttatccttcccgaccccttttacaagggcatttttttcggcttcggcttcggctttggcttggccctgagcaatttttcctttggaattaatccccctgggctttttgagctccttaactaaagctgggagggacccgtcggcattgtcccccaaactcttgggcggaagggttttggggaactcccccggg

SEQ ID NO: 426954 - DNA, 525 bp, Oryza sativa
ctgatgctattgttgccacccacgagcctcctgctgccactgaagctgctgagcctgctgagattgtccccagaacaagtttagcttccaccatagctgagtccttcaaacaaatgatcttcccttcatgcgatccaaatctgctacaagaaattgatacccagaaagtaagttggaatccgcacaagcattgcttggcatttgtatctgggaagaaccaagttacagttcatgactttgaggagccagataataaagaatcctacattctaacaagtgaccatcaaaaggatgttaaagctgttgaatggaggccaaatagtggaaagatgattgcagttgggtgcaagggagggatatgcctctggtcagcatcatatcctggcaacgttgcatctgtgaaatctggtgtcacctcttcttcctttggtgcctttcctagaggttctggtggtcaatggatactcgtggacattctcgtggttcttctgctgagctagttagcgcactttgttggaaacccga

SEQ ID NO: 426955 - DNA, 184 bp, Oryza sativa
ttcttttacacctattaggcttcctgccctgtgtgagccggtgtagctaagcctcgtctttcgacaccagccacacctcgttcgtagcccttacgcttatctatattggtcaagtctaccttcctagggcataccatcactccattggtccgcgcaccttctacgaggcgtattgttctggcag

SEQ ID NO: 426956 - DNA, 258 bp, Oryza sativa
ctgccgtgcagcttccttttctgcttcaatcaccttctcaagctgctgctggaactgcgcgagcttccggcgctgcgtcttgagggtgaggatggccctgtccacgtccgtcaccttgggcttcttcacgaagatgttccccatggccgcgtgctgctgctacctacccggcgccctcttcttccttccgacgcggcggcggcggcggcggcggagatggccggagaggggaggtggataggggagggcggcacggtg

SEQ ID NO: 426957 - DNA, 408 bp, Oryza sativa
tcgatagccggcattcgttgccagggcgttcgttggcattgtcaagcttcacaaactctgctactcactctcgtgtttgtgtgtgtctccgatcttggccatttccaacatttggtatcagagcgagtttagagaggggagatgatgacgccgacgaagactcttcgcatcgaggactcgagctctagcggcaccggttatggcagcacaccgcgtaaggccgtggtggagcgcgtcgtgcccaattccagcgtcgtggagctgccgatgctaaccagggctaactatcatcagtgggccttggttatgcgggtgagcttggaggcgctggtgttgtgagacgcggtggaggcgggcaccaacgaccgcgccaaggatcggcgggcgttggccgccatcttgcgtgca

SEQ ID NO: 426958 - DNA, 291 bp, Oryza sativa
  unsure (1)..(291): unsure at all n locations
aagctgcgcacgccggcatggtaccgggccggactggctggaccgacccacgcgttcgttaaaaagcgattttttgctctcctcttgatggttgctgcgaccttcgatgtccctatgcggaatgaaatctcctgctggggcggctaaaaatcggagattttctgtctttttgatccgtctttagtggagctttttgagcctgatttatgcgatgggcttcttggcgtggttgttcccatgtcctcaagaggtgagagattatgattaggaaccaagaacctnncatgactt

SEQ ID NO: 426959 - DNA, 460 bp, Oryza sativa
ttctttcaggtggttgccaagattatgactcatggcatcaaaatcctcagtaccggcttagagtaacaggacgggatgcactgtatcctgtacatgtatttattacccttacgcagggtgttggtttttctagaaagacaaatggtttccggaactatcaatctagccatgactcttctatgttttacattggaatgaggatactcaatacacggggctgccgtgctgcttacaatatctacatgcatgaatcagtgggtggaacagattatgttaactcaagggagatatcatgtgaattagtgttggagccttatccaaaaggatacacaattgtgcccacaaccatccatcctggagaggaagcaccttttggtttattagttttttacaaaaggaccaatcaagctagaagctgtttaatgcaagagtcatactaaatttgttcgctgctgggagc

SEQ ID NO: 426960 - DNA, 347 bp, Oryza sativa
ctcggacacggctacactagctagcaaatgagagctgagcaggcgagcgagcagacatggcaggatcactccaagccgaggacaccctgatgcatccagacaagctcggcatgcgaaccttatacggcgaactggcatattgcccgtacatgcacgtagccagggcgaccggattacaaaccagcaccgacggaaggatcaccttctctctgcaaggctacatcctgctgggctccaacaagtgcgactatgccgccaaacttgtccgattaagactctgcacgcttatgtgtgctcgtctgagggcgccagatgctgagggcgtgaccctggaggatcacctttga

SEQ ID NO: 426961 - DNA, 420 bp, Oryza sativa
ctcgtgcgcccacgagcctggtcccctctctgcctcattccaatcccccttcgtctccggcgacgacaggaggaggaggaggaggaaagaggaggatcgcggcgcggcggatgtcggatcgggagctccgcccgctgcgatcgatccgaattacaggcgatgggagatgcctctttaggtctgttgcgtacggtgcctgcttaaggagaggaaagcagtcgccaagcgatagcatccataaggagcttgccgatgagcttcgatcgaaagtagcagatgagtttgtcaggagaagaggggacactgaatggtttcttgaaggagatttcgagagctatgtgagacagataagaaagcctcatgtttggggaggagaacctcgactgctcatgtgctcccaagttcttaggatgcctatca

SEQ ID NO: 426962 - DNA, 383 bp, Oryza sativa
gttcctttcttcagacaaaggctttgcctttccttcctcttccaccatcctgccacaagaagcaagaacctctcttaatttgagcaagaaaccattcgtcacatcaacggaggaagcagctatagtttgattgattggttgatcgatcgatgctgggcggcggcaagatgaagggtggggagacgatgggcggcggcggcggcagcggcagcagcagcattagcccgctggtgtcgttcgtgctgggcgccgccatggccaccgtctgcatcctcttcgtcatgtccgccagcccgggacgccgcctcgctgacatctccgcctggagcaacgccgacgacgcgccgccgttgccgctcccgttgcaagacgccgccgtcgac

SEQ ID NO: 426963 - DNA, 137 bp, Oryza sativa
ctcgttttacgcctagggagcagtcaatgatgggccgggccaactaagactaccgcgccgttctttgacccaaggacccttgcatatccggtttcatccgtggagccgacacgaatccatcgaggaggagccttctc

SEQ ID NO: 426964 - DNA, 523 bp, Oryza sativa
tctcacactgccctgccctatcgcaatttccatttccatctctcctcctctcctcctcctcctcgtcctacaaatgcggcgcaggacgagagtcagagcggagtagtagcagacgaacacgacgacatcggagcgctcttgtctcctcctcgtttcttctgctcccgagtcaagcagatcctccaagcccagcgagggggcgggcgcgccgccgctgccgttgttgttgtcggccgcagcgcagacatggacccgtccggcggcggcggcggagtcggagtcggaggcatcggcggcggtgaacaaattctttgggactggcaagctgcggagcagtgcgagagcaatgctgcaaatcatgatgtttctagattcatgtgggactgcctcaatcaagatgatgatgacctactgggattgctgggcaatcaaactcctctaagagattgtcgcggcttctttgatattgatgatttcacctgcaaggagacgttggacctagaggaatctcggggaatcaaag

SEQ ID NO: 426965 - DNA, 401 bp, Oryza sativa
ttcttcaaacaggtatctaactaactacggggccggggcccatacaaacatggtgctgtaggacacaccactggctgtgtacctaggcataaagcacagcctcgctctggccgatagccgcggtttcacgaacttgatctatggatacctcaacgctggcgaatgattcaaatggatacggggataccctcgacaactaataaacaaaaaagataccctataagacccaccaccattaacggtggtggatcgcttgatacagatggagctcctgatagtatgcctgtggctatctggtctcgtgctgggtatgggggccccccgggagacgaggatccacatgtcgcgggggaaatacaatgacattttttagagccttttggaaatgcccatcttgggaa

SEQ ID NO: 426966 - DNA, 89 bp, Oryza sativa
ggtttgtgggggtttgcgaaaattggggtggggttggcgtttaactgtgcgtgtttttatcatgagcttgggtttgtttttgcttcttt

SEQ ID NO: 426967 - DNA, 438 bp, Oryza sativa
ttcgttgaggtcaaggtcgacgccaccatgttcgacggcgccgccgccccgcccccagacgcgcccctcttccgccgcgtcgagtcgctcgagcgcggcccgcgcctccacctcagcctcatcgtcgaggtctcccgggcggaccgcgtcctcggcttcatctgctccgcctggcacgacgaactcgtcgtccgccacgtcctcactctccgggacgccgatggctccagcaccagcagcggaggccgcgacttcgtcaagctggaggctagggagagggagtcggcgaggaaattcttgcaggagagggaggtggatgacgagcttgccgagttcttgcacgactacatggcgaacaaggaaaagatggagcttctccggtggttgaagactgtcgaatcattcggcgggaagttggcacaggagaagcagataaat

SEQ ID NO: 426968 - DNA, 269 bp, Oryza sativa
tcgttttcagctagaattactccaaaaccgggagggtctacatctaacttactgaggggatcacccggtcgcccatcgagagaactgacgaggaaggcacagaggcattaacaaccggacaaagagctccaccaactgtcactggtgaaatgactagatggccgagttcacgaggtactacggcaactacctatcataaaaataaacacaccacctcattatggagatacaaactgtactaccatcctcatggagagaacacaaggacg

SEQ ID NO: 426969 - DNA, 286 bp, Oryza sativa
gtggttttgtgaacttgggtttcctgttctttcttcaaccttacccttaaatgctcagtattgtccttttcatcatcataacacattattttgttcttatcactctcacggatgtaaacaagcatgtaagcatttgaatactttgcgaatttaaatggttcttttgttgaaactcggatttatctttgaggcattctttttttcacccccgttttgctcttcaagggcacttcatagtatctttcttttagttacacgctcatcatctaatttatactcattgatc

SEQ ID NO: 426970 - DNA, 387 bp, Oryza sativa
gggggaacaaatgagcaaaattccacgttttttagaatttagggactttacaaccatacccttaggcatgggggttttcaaattaaagaaatgatctcgctttgatagaatcacaaaattttttgttccccaaatttaacttccataactttcacatccaaaaaagggacaaaagggcaagagaagcaacaggccattttcacttaaatacaaagttttaattccaaagatcccttttttttgagccatgaaatttttgcattggccacgtcctgtaagcaggaagttttaaaatgatagaaaaggagggcctacccaaagtcttgggttgcattgacttgacagccaccagtttcgtaactttaacactggatagctcttttaggg

SEQ ID NO: 426971 - DNA, 128 bp, Oryza sativa
ctgacgattagctatctagcttagctactcgatcatcagatcatcgatcatccgacgatcaaatcagtaatcttgaatatggcggctttgaacggtaaggtggtggtggcggtgatggtggtggcgat

SEQ ID NO: 426972 - DNA, 191 bp, Oryza sativa
tcttgacgcgtggggaaagaaagaaaaaaaaaagggaaaggaaaatcgtgtctcgtctcgtctcgtcttcgtctcccccgattcccgagcagcttctcgaaaccctcgcggcctcgattccggcgatggcggagcccaacccgcaagtggagagggaggtggaggtggaggaggttaattatcaccttctt

SEQ ID NO: 426973 - DNA, 249 bp, Oryza sativa
ttctatttgaccgcgcggccggctgccctcagctgcgggtagaaacggcaacacgagagcttcctttaacacgggcaggaccctcccgcgccggccattgctctgctcgccagaggctgctgcgcttccaacgattggaatcccgcacgacggaacgccgacattcagaagtgctgccatgcataccggacaggaagagtctgcgccactaccccaaagggatcttacctgacgctgcttaacaacctc

SEQ ID NO: 426974 - DNA, 193 bp, Oryza sativa
cttaaacgttggaactgtcaaagcaaaagcagttctggtgcaagaacataaaaaggagctttcttgctgtccttgtttccacagcattaaagaataagcacagcacccttaacagccaatgacactaacacacaaacagttcctcttgttttcgaaggttggactaaccatgctacctatttctagcctaaat

SEQ ID NO: 426975 - DNA, 169 bp, Oryza sativa
ggatcaaaggaatgaagtttatatgtggatctatgtaacggtacgaagttacagagagaaagacgtggggcgtaaacagatccaatgatgcaatatgctggtgactaagccacaaggaggattctggtatcttgaaggagaaattcctatgaaagaacaccttttactg

SEQ ID NO: 426976 - DNA, 428 bp, Oryza sativa
ttctactttggatttgaagatgatgtcatgtatcctagctatatggttttgtttacaacctttctcggattggctctggtaaggagattatctgttgatcagagagttgggccaaaagctgcttggatcttgacttgtctttattcttcaaaattatcaatgttatttatcacatcaagatcggtgctatgggtttcagcggttttgctactcgctgtcactccccccttgcttctttacagagacaagtccaaaggggcttcaaggatgaaagtctggcaagcttatttccatgcatctgtagtagccttttctgcatggctctgccgggaaacaatcttcgaagctttacagtggcggaatggaaggcctccttcagatggcctacttttgcgttcctatattctgttgacaggtcttgcttgcat

SEQ ID NO: 426977 - DNA, 398 bp, Oryza sativa
ggaagataaacaaccttaacaacaaaattggggggggttctatagagagaaacagagctacttccatacacgggatagaaccaaccaactgaaatgatgaaggggtgaaaaacagaaagaaggccccggaccccaacacccaggacaccgccgcgcgccgcgtaacccgagcccaatattttgaccccaaccacggggctggctatataacacaccggggagaacaccgagccacccccctgttacaaacggggttgcctggcaccctaaaaaggggcaccaatgccacaaccccggggccggcgacggggcccccctccctttaaaccgcgggggcgccccaaaaagggacgggtaaaagccgtcccccggcggaagaatgggagggcccgcctccg

SEQ ID NO: 426978 - DNA, 468 bp, Oryza sativa
ttactactctgttccccgagggcgcaccgaaggaaaccctagccgctgctccccgaagccatggcggaggcggcggggggccagccggagttcgtggaggtgcggtgcgcggggtgcggggagacgctggaggtggagccgggcctcaccgagttcgcctgcccggactgcgggacccaccaggcgctcccgcccgagctcatgcctccgccgccgccgcgcccgcggcgggctctgcccatccccggacgggggcctcctcccgccgcggtgttgcacgctcccgtgccggtccccgtgcaggttcccgcgcccgcgcgcatgccgtgcggtggctgctgcgctctgctgagtgtgccggcggggctcgtgcgcttcgcctgcccggtctgcgccgccgagctcgtcgtcgacggcgggcgccttcggctgtagcttggtttccctgccggccccacggtctccgtc

SEQ ID NO: 426979 - DNA, 288 bp, Oryza sativa
ttctgtactactattttctctctctacaactcttgtcaatctctctctctagagcttagcttagcttaccctctctcatggctccaactgcagaggttgcggcggcgccggtgcaggagcaggagaaatgcaacggcggcggcggaggcgggtttaggggtgcggcggtgaggtgccacccggcgctgtcgacggagaagaaggcgtcgatcaggggcgtcgtcggggagctgctcggtgctgcggcggcggcggccggcgccggcgaggagaggaggaggagcctca

SEQ ID NO: 426980 - DNA, 305 bp, Oryza sativa
gtgcaaacccccccccgaaaaaaaaaaaaaaaagggggaggggggggaaccaacaaccaggggtttaaacccccggaaaaatttccccggggaaaaaaaaaaaaaaagggggcccccgggggggcccccccggggaaacccccgggggggggggaccaccccccctaaaaaagcagggggccccccgggggggggaccccccccggggcccgcccccggggaacccgcccagaaaaaaaaaacccgggggggggggggaaccggccccccgggggggggaaaaccccccgccacgcccggaaaga

SEQ ID NO: 426981 - DNA, 353 bp, Oryza sativa
ttttcgttcacgcgtacggagaagaagcaagcaaaatgcggagaggctgctgcaaggtatgcgagagagactgcgcaagctcgagagaggtggaaatttagcatatgatgtcttcaagaaagccggaacgggtcttcagtcacaattgtctcgcaccttctcacggaagaaggctgcccaaacacccaaaggtggtggcggccgtggctgcatcctgccttcaagcggagaacatggtggcgggaggaagaagaacctgaccgacatgatgccatccctctaggacaacccggataacgaagaaggatttaacctcgagataggatacacgggcccgaggaagaacatgcctg

SEQ ID NO: 426982 - DNA, 411 bp, Oryza sativa
  unsure (1)..(411): unsure at all n locations
tttcttcttcctcttccttctcttttcttttcttcttttcccctttccttccttcccgtcgaccgcagatgctgatggcgtgggaggcagcacgggaaagcagcaagcgacggctacatcggcttgggaggggcggcggcggagctcaggatggggaaggcgacatcggcatggggggcggcggagctcgcgatggggaaggcgacatcggcatggggggcggtggcggagcttgggatgaggatggcaacggcggcgggcgagtgaggcgacggcgactggcgcgtggagctgctcctcggcggcctcccttgctctccctcgtcgccgtcgagccctccctctcttgccgtcgacggcactcgaaggggaggcggcggccggcaggggcgacngccgctggagaggagg

SEQ ID NO: 426983 - DNA, 474 bp, Oryza sativa
caacgattgcaactgctgcaacttgagcagcagcagcagcagcagctgttgttgcagcaacagcacctgctttctcaagttatacctcatgggcattccagtcagcaacctgatgatctttatgggtcacaacgtacttcattgccaactggtgattcttcgaatcttggccttcagaaaatgaaagaggttcttgaggcagaccgcgttttgactgcccatggtacacaggaggggcagcaacctagtgatccaagtattatgaataagaagggtatggagggtgtaggtccatctcaaagctctgtaccttctttattgccccatgaaatttttggtggtgtaccttcaaaagatcgctactctcacccccagaagttggaagataaggtcaatgtcaatacacaattgaaagccagtatagtgaacccgatgctaacaaagttgcaataggcgtgaagatgattctgatca

SEQ ID NO: 426984 - DNA, 405 bp, Oryza sativa
atactagtatagtacagtttttacattagtttgaaggtgaaacagtacagagagcaaaattctacataagatagcatccataaactgacaaggaagtccagacttgctttgtagtttataccagatgaaagaaaagggttaaaattacaaaagaaagttaaaaagaaacctaacccccaaaaaagcctggtactttcttcaagctgccattttagctttgctttgctcaaagggcaattgttgcaatgacaccctccaaattatgcagtcctgtgctcttcttattctttttcactctagatcccccaggttctaaaactttttacatgacagagcaggcattcgggttttcgtcgctgaagatctgcgacgggtggtgcgaagggtgcgaacggtatggcgggt

SEQ ID NO: 426985 - DNA, 476 bp, Oryza sativa
tccacttcaactagtggctggccgtctcctgtagtttcacctgtgccgagcgaggctggtcccttgacgtaggggcgcacctcgccatcgagaggatctgaggccggacctctgaatcttggatctgcccttgccgacaccaacatgaccgatctgcacctgaggtactcgatctgtaatcaccacccttacattggcacgctcaaaaactccgactgatcaacatcgcgaaccctatatacaaaaggaggtagtacttgatttgccctgaagcgctgcactagccaaaccgaggcactgggcttggcaatagacgcagcacaggattgagttagttagttttgcactgtagattattgttttttctttgcaggaaagtctagtgatatatactgattgctttattttatttagagctattaggttactgacctgaaagcatgcaggtttattgggccttgttagatccaaacttt

SEQ ID NO: 426986 - DNA, 334 bp, Oryza sativa
ttttctttccatgacaatttgtttttgatgtctaagctgcttccgcctatacagattcatagaagatagtcttttgcctgtttcaggtctatttttggtcattttgcaaggcaaatccaattccgattgaaatcttctgaacaaccaggattttcccttcaactccttattaaaaagttaaatgccccacaaggacagaatttgaatactcttaatttcgatcatcagggatggggagggttcgagggtgtgttttggagcttcacgctatcatagaccctgggaggattgttcaaccctacatctttatatcattcaatgttcttcttgcatt

SEQ ID NO: 426987 - DNA, 470 bp, Oryza sativa
tctcgactggtttataattaaacactggctcatttctttgaagctttttttttaaggatctggttttccctctagtagttctgagctgatgaaaagtttctatagcgggttactgagagaattacagtcattgtgctaccatgagaataaatacaataacagagtaacaaccatgagaatatgttcaagaactaatggattctaaaatttgaaaggtgcttaaaatgttttcttgacactattcatgatgagaattaaacggttaatcaagtaagacatgggacgataacaactactacctaatcctgtaaatctacagaatctccatgcttttcagttgctttttatgcacccacaatatagttttcagttgcatgttatcattggaggatgtagaatactcatgcatgcacaattttttataatatggggccacatatattatcttttaatttcttgtatcacatcct

SEQ ID NO: 426988 - DNA, 487 bp, Oryza sativa
gtgatattttggtggtttaaccggattataattatccccttataccatagaaatgacatagttacgcccatccacacgaccaagtaattggacttagcctagtacattgtcctactatatgaaagattgttgggtggcttattaggagcaggttttgtggtgaatcatgcgtaaggtgtttgggtggcatgaatcacaacagtgggcttcatgaaagtgtgacgatatagataccttgcctaggcctggcaagagtttgaccactatgatgaaccaagaccccactgtgcagtaactagtggtaaatgggactcgaacggctatggtgtttacaacctcgcgaattgttctcatcgtgtgggtaaagctgggcagacattgcagacgtattcgaatacaccatgctcccggtcaaggagatatgtcataagggttattcctactccaaaagtataagtagttttgaaaatctaaaatgttgagactt

SEQ ID NO: 426989 - DNA, 433 bp, Oryza sativa
gtaacttctacagaatcaattgtattatgcagactaaacataatactctgtcctgcgatatagaggaacatttttctcctctaagggctctatgtattcggtcttctattttgactaattggagatccttttgcatttcctttagggcacaatcaaatcacatgacataagcaccagagagatgatgacctttttggcacgggggtaccaaccaaaaagtgttgggttgattgtcgaagctgtccaatgcctctataccataggtgagaaagaaatatggacacatgccttttgcatggtttcgaaagatggaaaatttgggatgtccttgctagccatgtggctatgtaattaataatggaataactcgtgatgtcacccttttctttaatattgacagtgactcattttaacaagaaaaaaaaaaagggga

SEQ ID NO: 426990 - DNA, 266 bp, Oryza sativa
tttagttacagtcttgctctaccgttagctcagaccacaaccggcggaaaatatacgcgcgccctggtgaaccaggcggaccacactggacagggacatgtgcgccaccaccgctacggcgagctcaggattcagatccgcctggcagagactctaggacccaagaattggggggagcagacaggctcgaggtacatggacaggagggctcctgccactagggggactgatcatgttgcccgaatggtgactctcaggaggtcatt

SEQ ID NO: 426991 - DNA, 444 bp, Oryza sativa
ttcacgctccacccagcgccgctgcttcccaggcagtgccgtcgctctcccctgcgcctgctgccacgccccactccggcgacccttctagccgccgccccgcaaccgtcgccggcctgaatcggtttcttggctcctcgcttctctgcccctaagctaatcccagccaccggtctcttgctgctgcagccgccgcggagatggccggtggaaacacagcgcacgcaactccggtggctgcatccctttcccccatagattaccttgtttgatggtcctactgcggctgcggaagactgatgatcatgtgactctctggttctacagcttcttctggaattggaagaatgcatgcttgaatcctgggcgtgcgtcccgtcgaagcgacagatgaggcactcttggtggatacctgcgaagaacctttacctgaatttgcaagtc

SEQ ID NO: 426992 - DNA, 447 bp, Oryza sativa
ttagaggggatcgtgcggccgcctgcgctaagctgcttgcagaaacggcaagacgcagagcttgctttaacccgtgcaggaccctgccgcgccgtcgacggcactgctgggccgacgcggctgcggtttctacgattggattgccgcgcgacggcacgcccacattctgaagtgctgtcatgctaccggacaggaagagcctgcgcgattccgccaaagggatcgaatcgcaggctgcttgactactgccattggcttggaactagattagggctctacaggatcaacaggagtggctaccggaactgaacgaaatgagcgatggcagcgctctaacattccaatcaggcatcgactgcaccctcgccacagacataacggctagcaaagagcacatgccatctttgctgacgtcagcactgaacgacgccatgacatatgatgagg

SEQ ID NO: 426993 - DNA, 531 bp, Oryza sativa
tgctggccgcctgcgggaccggcccggaacgcccggctggaccgacgcacgcgttatctttaaaaagtatggcactacaaggatgctgcgggaagtgttcagggcccattcacacttttacagcgtctgcaagtgggcagcttatttcccacgtgacctgagaatatggctaacatttgagagtgaacaaaactcactgcttttgaatgaagctctctcgaaacaacaaagagatttcattcaggcttgtcccaaaggtggcactcataggcgcacatgggaaggcgttcagcgctatcgaggtggctcacgtttgagtggaaatcactcttcctgtgctatagggtatgaggcgaccgagtcttgtgggcgggatcaagcactatgtagcgtatcgtgcattagcttgagaaggcccacaccttcccgcgcggaaccttgtcattcatgactagctcagaaacacataaggatccttatatgttgcatgggcaggcacagcataagggtgattattaatgtaacatcccg

SEQ ID NO: 426994 - DNA, 207 bp, Oryza sativa
tcgttaaccctccccagctccactatatggggggggttcattgacctcaggaggcgtttcacccacgggatggagaagcccaaggtcctcacgcgggaggagcggtagaagctggagctcgagcgccggcagggcggcgcaaccgaccagggacgctccgtcctcgacctgctccagtcgctccctcgacaaggtacgccaccgtcg

SEQ ID NO: 426995 - DNA, 523 bp, Oryza sativa
tcgttcaggttattgctcctaaggctgaatacgatgacaattgcctggacctactgttggttggtggaagtgggaggttgaggttactgaaatttttggtgcttttgcagtttggaaagcatatttctcttcccaatgtggaatatctgaaggttaagtctgtgaggctcaaggctgggcccaacacacatgatggatgtggtattgatggtgaactattgcatgtcaaggggcaagttcgatgcaatttgctgcctcagcaatgtcgattaatcggtaggccagccaaaaatcctgtacagtagctgtaaatacatgactccaaagtctgcacagttctcaagtttgcccgatatcctgttcatgtacaatcggcaaaggtgtggattatttttgtccacgcccacagattcatagctacagtcagaggtcagaacagctgtgctggcaccctgcttagaggtgtacatcgtgtgcttgatcatagctaaagtcagaagttagaacagccttgttgacaccc

SEQ ID NO: 426996 - DNA, 255 bp, Oryza sativa
caggcgcaaatacactgcgcatttacgataaactggcggtgctaggctttagctagctttaaccggcaatgagaaaccaaaatacccaagggattttctttagaaaaatgccacttggtagtaacaacttgtagctgaaaattacatcaaaagtgctctatacttggggcataaagcacagtacttcactgaaattttgacttcctagaacgttgctttgttacaactgaagatcgcataaacatgatttaatta

SEQ ID NO: 426997 - DNA, 325 bp, Oryza sativa
ccttcctccgcggttggtggtggctgcgccgctgcccgcatcatcaccacctcacctcacctcagctcgcgagctccgctctcaccaaccgcagcgcgcgacgaaggggattggattgggttgggttggattggagagagagaatggcggcgccgtcctccctcgcgttcttccacctcttccgcctcgccgacctccgccgagcaggcgtcggtcccgccgccccagagcatccccaacacgttccgcctcgggtgctcccgccgccgcgcccagcgcgtcctcttcatggacggatccggctagctcttcattggaggcaact

SEQ ID NO: 426998 - DNA, 370 bp, Oryza sativa
tggactcgtggggttttgaggagggcgttggtgatgggggagcacggtgcaggagggaggccgtcaccaaccctgccgggttggtagtagggtgacgcacgggcggtgaggaggaggcggcgcccggactggcgcggcgtggcacgggttgcggtgtggctcggcgtgggagcgcgacgtggagcggcacggttcggtgcggtgtggcggtctggcgcaacggccttgcccggctcggcattgtgccgagcaggcggcgtgcataagaagccgaccctccgaggaaaggagggagggggatgtagacttgggctgcaagagagagagggagggctggaggggaccggaagacagacttgggctggagtga

SEQ ID NO: 426999 - DNA, 524 bp, Oryza sativa
gttggtaaatgccatctagttgtaactaatatgttggacaggggaaagttacattgctaaggtctaaagtggaagaattaagggtttttcaactttttagtcatggtgaatcatcactgacttgataattgacttagttgtcttatgttgaaaccacaagttccagattgatggaattactcagtcccactgcaaaaatcaccaagttggaaaaaatagaatttgttttttgcggaattttctctgattgaaatgattgcttaggtgttatcatccattcatcctaatagtagactaggatagtacgacataactgttctctctacatgctttgttttgtcatcattttgttgtgctactgtgaccataattgttgttatatgtgaatgtttggtggcatgatcatcctgaaattataacttgtcaattgtatgcttgtggtgtccatatgctgttgaagttggtagataaatcagttattgattttgatggctcattttgtacgggtgccttgggaacttcat

SEQ ID NO: 427000 - DNA, 317 bp, Oryza sativa
ttgggtttttttttttttgggtcagaaacactgctttttttcttttaatttttgttgttaggttttaactcgtttttcttcacccagggggaacaattttacccccagtaccttctccatttaaaagacatttccccgcaacagattgtaccagcagcttaattttataaaaaagccacagacgccctcatccctggagggtgtttcccccattagaaccccaatttttagaaaaaaggaatggggatcaaaaaaacctgagtgaattatcccaatagttgctcaggaacaaccccctgctatggcgacagccttac

SEQ ID NO: 427001 - DNA, 397 bp, Oryza sativa
ggacctgcggtgctacagcgcgtcgtacgccacgtcgtacaagccgggcgctggcgcggcagcgggggcggcggcgggggcggggacgaacacgacgacgaaggtgatgaagcgcgccacgagcgccaacgcgtggtcgcggccgggcggcggtggcggcgtgcagcggagcgggagcaccaagacggtggcgttctccgccgccgggtggggccaggggggcggcgggccgacgcccgggttcaacctgcggagctaccgcgcgtcgtacgccgcgttgtactcgccggtcgaggacccgagtccggcggagaagaccggcggccggggccgtggcgccgggacatgggccttttccgcggggcggttgttggtgaacctgggagggtacacgccg

SEQ ID NO: 427002 - DNA, 537 bp, Oryza sativa
ttcttttttgcggcgctcaaggcccctcctcctccggatttggattcggtttgtgatcctgataggtgttcttgccaaccataagtgtttaatccaatatattttcatttgacttgatgcggaacttgctgatttattgcgtggactcgattcaactgattaccgtttttattatctgaatcgagcaatggctgcgctatgaatggggataacgaattgcaatcttttttacaacaacgcacatgttaagagtccccgggttcttgatcctgaatacccgggtgcctaaccttggtgtgcgagagctaaaccttcgccggctatccacgcttcctaccagtaggcgggcgctgtttagccctgttcgcttctcgtgtgatttgccgcacattatcgaattttttgtatttcacctccgatttttctttttgccttctttgtttatttcgtttcgagatccttctggcgtagtcgattcagcggcagctcttctttaaaattattattattattattatcattattattattattatt

SEQ ID NO: 427003 - DNA, 502 bp, Oryza sativa
cacggtaaaaaacgatgtgtacagcttcggtgtcgttctctttgaactcatcagcaggaagaaacctgtatatcattgtcatgacaagaatcgtcgactcatccctgaattcatcagagcttacgagacagccaagagtgggaaggcaatgtttgatgaagggatcatggctgaagaagatatcgctgtccttgaagagattgggaggctggcaatggagtgcgtcagcttggaaatcgatggaaggccgacgatgaaggaagtggctgaacgccttaagatgatcaggagaatgaaggagagctcagccatgggagcagcgagatgctaactgaagcagaagctatagaaggctgttggcatcgctgaaaccgaagatgaagccaactgatgggccacaactgattgttccctttcagtctttcacctgagagatcgtttacagagtatcatcagaaacatagtgtgtactggttggctgttaactgtgttatataacata

SEQ ID NO: 427004 - DNA, 434 bp, Oryza sativa
tgcacctcccgcttccacgacgccatgcggaccatccacgccgtcgtggcggtggctggcgatgaaggggtggcgcagcgaggcgaggatggtgctcgaccggacgtcggacaccgccggccgaggctgagcagcggctgcaggagatcgaggacgtcgtcgccgccagctccgtcggcggcaacggcggcggtgcgcggaaggaggtggcgaccaagcccggcatgcagcgggtgctcaccatcgtgctgatgctgcagttcttccagcaagcctccgacatcgactccgtggtactgtacggcccgggcgtgctcgccgccgccggcgtgacgcccaacaccctcctcctgggcctcaacgtggtgttcggcgtcgccaaggcgagctccatcctcatcgccatggcgctcaccgcccgcgtgcggcgccgt

SEQ ID NO: 427005 - DNA, 485 bp, Oryza sativa
tttggtgttttttctttgaatatgttaaccaagcatcaatattgatcatacaaagttttacgaagacaacagtagataacgacaaagttgtacaatgtgaaagaaacagttcaaaatagaatgtagtaagcatgtgagtacattgtgcaactcattatgaaagcagttaatagtgcacttccctgctggacatttattttaaaaatgatgcaaaattaaccaacatcataagaacattgttaagataagatgccccttcaatttgtaaacatgatgttttagatgttaggtcattcaggtgaaacatcatatatacagcagcgcccacacaagaagctagatcaagagttagcaatttcctttgataagtgaaaactgtgaatatgccgggtccttattcatcttagaaacttattttaaaagcaaagtacatcatctttgaagtctaagataacagtaattaccaggtacaaatatctttgatg

SEQ ID NO: 427006 - DNA, 499 bp, Oryza sativa
gtggagattcgctatgcgtgcaggctgaggaggttatattcttcgctgcaaagaagtctccagacgcaggacaccagcatgttccccagcagcagcagcctgcatatccaaacaaaaagaagaggatattctgttatcaggctcctgagagagatgctgatggtttgttcatccacgagaacaaagccgatgcttgttcacagcgacagcatcggagcccagaggacgggtacgccaccatcaaggagacgaatccatgctcgcggcaaatccagatcgtgccaagagcagatgtctcattgctggtgaagaatgcgtctcttgttagcttcctggagagccgcacgagaggttggcgagtgcagcttacatcgccgtgagaaatctcctgatgaaaaggacatttttcctacggctttcccacgaaataaaaccccactcggcaacacggaacggcatagtgctttcacgaacctgagaatattaacggaaatcatga

SEQ ID NO: 427007 - DNA, 501 bp, Oryza sativa
tcgttctggcatgggaaggagatcaggagaaggatgcagcggcggccggcagcaataggaggcggagcgatgaggaggggaggcggcggcgtttcgggatggcggataggcgggcgagaattttcagaatatgccatcgaatacgcaatgcttttaggatttaccatttaatttgtgctactttcagaatacgctatcggagtgcgaattttcttcgttcggtgccattccgtccccccaacgacaatcacaccgccatcgtccatctcccggcgccgacgacgacagttcgccacctcccgcgctcgcgggcgtcacgccgtcgtccgtccgccgccgcccgctctcatgtgcgccacgcagtcgtccgtccgcccggcgccgccgtcgtcagtccgccaccgcctgtacccgcgtcagccgcgccgttgtccgttcgccgacgacatcgtcgtcgtccttcgcagcttcagggcaagcatgcgcggtcaccgcgcgtgt

SEQ ID NO: 427008 - DNA, 473 bp, Oryza sativa
agcggcgctgctgaggaaggccgacgcggccacggtcacgctctccgccgccggcaccgccaccgccaccgtctcgtagatgcatagttcgccggcctcccgtctctctcgaatctagagacgcacgccgagctcagagacccgatcctgctaaggtttggttggtagctcgagcagccgacggcgacgacgcacacccagttcccggcgatgtcggcggctgccaccgctgggacctactctccggcttctgccgcgggggaaaagcgtcgggagaggaaggaggagcctgcggcgccacctcgccgaggacgccgactggccccgcgccgacggacgcttcttccacgactgccgtcctgcatttatgcaaacaggaccaacaaccgctgcatcaggatctgcttatgcagaatttgggaagacaaaggtcattgtgtcagaggttggaccgagagaaagcaagaagcaat

SEQ ID NO: 427009 - DNA, 388 bp, Oryza sativa
ttgggtgttttttatttttttgggggtttcttcttttttttttttttttttttttttttttttttttttttttttttggacccaaaaggccccaaggcatttttaacaacccggccccaaacaaaaaatttcaattaccccgcccattattccaaacccccaaaaacaagaattaggttaagaacaaccttttcaaaataaaataaatttacacatgggggggggacaaatgaaaaaaaaggaacaaaagggaaaaaaaagaaaagctaaggaaggcctgcccatggttagcttcccagaccatgggggcccaccccccttttcaaaggggggcccaacaccgggggggagcccgggaacccccccaaacctggccttggggttgggg

SEQ ID NO: 427010 - DNA, 342 bp, Oryza sativa
cataccgatctttgcggacaactattgcggttggtgacctaaatgggaaggactagtgtaaccttccagctgtaaatttggtgcctgtatcatctaaacatggacggcgacgacaaggcaggaaggggccagcacaaggtggtgttaaactgtctcgggctgggcttgctgccggtgttgatgctaatgaaatactaggtgagaattcttaggccgggactgatgatggccattgagattcacctactgctgctggtatacctatgcctgcgcgtcactgtagctacaatccgggtgcaagacgtggactgtgaagctgattatcacagtgtgtcactcgga

SEQ ID NO: 427011 - DNA, 512 bp, Oryza sativa
aaagactcgcccaactgccttaaaatcaaggttggccaatcatccagatcctccatcaagaacaacccttccattgagagcaacatcatcaaacaacttgaactcagctgccacaacacgtaggccgtcatcttctggagggcacacatctaattcatcaaggccttcaacaccaactgggcgtcctgcactgaccaatacctccaaaggttcaagaccttcaacccccacgtctcgggcaactgtaccttctaagtctggacctcctgccccaagatcatcaactcccacttccaggtcaacacttacttcagcaaggtcaacaacaccttcaaggacatctggccctgctgctaggacatcaattccttcaggtagagcatcagcaccagctagcaggtcatccacacctacttcaagatcatcgatacctgctaccaggtcatccacgccatcatccaggccctccataccagcacaaagcaggccagtatcaaggtcatcaaccccaa

SEQ ID NO: 427012 - DNA, 536 bp, Oryza sativa
gtcggccagccgccgccgacctcgccggtcgccgccaccggcgtcgccggcagagacaagagtaacgacgaagaaagattcttttgggggtgatgtgttccaaataccgaagactgattctgattgccgcttctgtttgttggaggaccagaaaacatctcacaaatattttgggttggcataattattatgcagtctcgtgaggtcttaatctccattgcacaagaagaatccagtaaatgatgcacagctgttatctcgtctcattaggtacaaggttgacaaattcttactgggaacaacacaattagacagcagtttataccggcaagcttgttctaaataatctttgtaccggcgagaaatttacttatcagatcagactccaggcaactactgaagggaagccccaggattcaatcagagctactttcgtgtcaagaatgagttgcacggtgctctattgtatcctacagttggcctgcctctttctgagcttggttcagcatgtctaaatgcaataacttcactaccac

SEQ ID NO: 427013 - DNA, 537 bp, Oryza sativa
  unsure (1)..(537): unsure at all n locations
gtaaaaagagtccatgtcaccagagaaggcactgcctgctgaaccagaggagcaagaagagaatcaagtaaccaaagaacaagatgaagaagacaggcatgatgcagaacttggtgatgcacatgaagaagatcacaaagaagctgaacaagattatttgcctgtctctagtttcctgatgaacctaatattgggaaaagacaatgatgatccaaagaaagattcagaaaccgaggttgaaaaggagcaagaagaaacaacgaaggatggaagttgtttgatcgcttctcaacaagaagaaaatttggtggcatttcctatagaaaaatcggtggatgaaaaactcacctttgaacaagaaaaagaaaaggtagaaggctctgaagaaacaaaagaaccagtaaaagaacagagttatgatgtcgagatggacgtccaaaaatcattggaaactgatgaagagctcataaggaacactcgtgattnggaagcaccagtataccaagataatgcccaggatgaaatttctagcaaact

SEQ ID NO: 427014 - DNA, 415 bp, Oryza sativa
agcgttttgtttttcagtggcagcgcgggagccgcatcactctcagcgtccacttccaccgaagtaccgaacaccccgtccccatcatcacctcaccatggcggcagagggagaggaggcgaggagcccgcacgtcgtgctcttccccttcctcgcgcacggccacatcccggccttcctccgcctcgccggccacctccagacgctccgcccgggcctcgccgtcacgctcgtctccaccccacgcctcctcggctccctctccctcccggccacctcccctccgatccggctccacgcgctccccttcgcgcccgccgaccacggtctgctcgacggcgccgagtccctcgccgccaacctctcccgcccgccacccctcgcgatctcctctcctggctgtgatggcggtggt

SEQ ID NO: 427015 - DNA, 493 bp, Oryza sativa
ttgttttatttcaaatgacaggttggcctttgaacctgaaattcttgactggtggcagtgagagatccatatcatgccggagcaactaagaagaaatttcgacaacattgagtcatggataggtacatcttacatttacaaagtctgagcagcactgcggaagacgaggccaaacagagtgccagggatatccaaaagcgtaaactggcctttattcttgcctgaattcttgtttcaccaagcttgtgtggtctatccccttgttatggctgttctaacccatgccatctgcatctggtggcgctagacggtcttggataaacttttcatcctcttatttctcttgcttttgttgttgcaagggtcttatataaactgtgcattctttgatcagatttatggctgtgtgcattctatgcagaggccggcggtggactcaaatggaatgtatcatgctggagtatttaactgagtattataaaacttgcattat

SEQ ID NO: 427016 - DNA, 54 bp, Oryza sativa
gttgcaaatagggcgagtaaatgaagaatgctatgacaatctgattttagtttt

SEQ ID NO: 427017 - DNA, 523 bp, Oryza sativa
gaagaaatacccctgcagcttgttgccacaccatctgttcacaaacctttgttccatgcggaatggaatgctgaaaactacaaaagtccatcccctactcgctactggttgcaagtttttgctcaggattctcagggtgggaagacatcaagcgagcgacgaccattttcagttgagggtaaagtgcaaattcaatcacgtccatgtctgaactacttgatttttgaagtccaatgggaagacatgtatcaagttcttctgtggagtaattttgccttcataattgtactattgtttgctcccaaattgctgtatcattttatgaagaaaagtttgacataccaaagatggaccgtgtcagttatgctatcccctatccagccgaggaaagcttacttttggttggtctggtttctaatggagggtgcaaggagtagacccatctggttttctttgctcatatatgttatttggcttattgaaatgccatggttttggggtcatgcgacatctgagaaaggag

SEQ ID NO: 427018 - DNA, 353 bp, Oryza sativa
ccatgcgtttttgtctcaatctaactccactcatgatatatacctgatgtgtctgaacggacatgcatgtactatagttgctctgctaatgtactaccatcagcttttagcattttgcatcacaaaatatacctatggactatgcaatacgattctctattaaatggttatgatgacttgcgtggaatgggactcccacacttgtgggagggcagagaaacaagctagatagcttagaaacttttaaagaagctacaggttgcatatagcatcgtaaaggaacatatgaaggtctattggtcggatcgatatagattttcatgccaacctgttggcagagatcattttgctaa

SEQ ID NO: 427019 - DNA, 476 bp, Oryza sativa
tacagcgatgcggccccgccgcagagacgcctccgcctccgactccgacgacgccgacgcgcgctcctcctcccctcgcccgcgccgccgccccgaccccgcgccgccgcgcgcgcccctcctcagcagcctcgtggtcaagctgcagccgcgggggccggaggaggagcacggcgcggccgaccggctggagcgccggcgcgatcccccgcccgccgcacgccgccccccgcgggagccctcgcctccagggttcatgcgccgccgggagtcgcgccagacgccgccgccgcagcagccgcacgcggtgccgaggcgccgcggcggcagcgcgtcccctcctccccctcgccgacgcgggagccccctggggtttcggcctaggtatccccagccccgtgaggagccacaaggatatcacccgcactcaggttccatgatacctccacgtggccgcggagtagaaagcagcaatt

SEQ ID NO: 427020 - DNA, 523 bp, Oryza sativa
  unsure (1)..(523): unsure at all n locations
gtcaagatggtctgcatcccttgcgaaggacagagtgaagagaaattttgtgtcaaaaccagctaggtgaaggatacaagggcaacggcaatttgtagttgtgcaaaggtgttgtcagtgctgaatgttgagagaatgcacaactcacttgcacatcaacaagcatcgcaagggcgaggctctatgttgagcgaatccaaatttcggaaagcaaaacaggctgtgcagcccaacttgatgtacctccagggtcagcagcttgagaatgaggaagaaattggtacacttgtctggggcgaggctgatgtatctgatccatagatatttagttcactcactagtccaccttttccgaccatagatgctatgtgatccgctgcggcggcagcattagcattcgcagcagctgtagcaatgtgaggaattggggagatccctgcttcttgcgcagttcgatctcactggctcgagcggcctttgagggttaacggttgccgatctgtggngttttttgttaaccatg

SEQ ID NO: 427021 - DNA, 523 bp, Oryza sativa
ggatgttcttcacgatggatcttttggagcaatgcaaccatcgtcgggatttcagaacagttggtgtggggtgccaggtcagatgtcaatggctgatattgtgaaaatgggcagacctcaagtgaggtcttctagcaagcctgtggcttcaacagacaaagcctattctggccaaacctcatctttctcaagtgtggtaaaccagaacccaaacaaatctgcaagcactgccccaccaacaacatttgagcaaagatttcctgttcttcaagatcctattcctcaagttaagaattccagtcatgcttctgctgataaccatgagacacaagagagtgattggtttcaacaggatgggacactaccagggagtcaattaacagtccctgagacatctcgtgacatatctttacctgtggcatctttggaatcatcaacgttggttgctgacgatgcgaactcgtataataattctcatgtaggagagagcagctcagctataccttttgatagacacctggaa

SEQ ID NO: 427022 - DNA, 443 bp, Oryza sativa
gaccacctgcggggcgtcccccgagaagggggcgcgccgccgacttcgcccgcgctgcggcggcgtctcttctcccaccacctactccagcttcggtcagtgctaaggcgacgagggtgtctggagccaaggtggctgccgccaggactgcggcggcggctgcggccatggggggctcggacaggagcaggaagcccgccaagaagggcggcgccgccgtgctgccggcggtgacgctcgcggggctcgaggcgtacgagcccgccgggagcatcgcggcggcgcagcgggagcacgtcgcgatggcgcaggcgcagcgcaagatgcggatcgcgcactacggccgcaccgcgtccttctcccgagtcgaagggaaagtcagcgctaccgcgacgggtgccgccgagctcgtcgccggtgccgtcaccgggcatgacgagaag

SEQ ID NO: 427023 - DNA, 355 bp, Oryza sativa
attgatgcccaagcgcacaacgcgggggggttttaacaaccatacgtgcgacatgaggcctccagggcaaaggcctttttaatgatctcagaaaataaattcatggctgtaatcattaatgcgtcgcctgaagacacgaccattacagtatacagatgtggccctctagaatcccatcctccggggggcaaacatccccaatactacctttgataaagctccagctggtctcaaggcttcatcggcgtatagtagacggaaagcatatccagagagcccggtaccctttatggaataggggtctgctgattctaaacatctcaaggtatcaaaacattccgttatcagaggcttc

SEQ ID NO: 427024 - DNA, 387 bp, Oryza sativa
ttttgtactcctctacgcggtcacgggttccccagcggtggataaagcttgatagagagcgcatcgagcctttaaatctctctttcttcttctagacgtagtctgcaggcacctgcttctagcgttcagtggcgaacgtacaatctttcgtctgaggaaagctcccatccttgctgagtgctcgggctgtttctaccacagtggttccattcgcggagaattttgccttccatctcgttaatcggggacaaaggaggtgggaccttgctttctttactgcaagaaaagggaagcttcttcgttagaacgtctgcactttgcagggcaccgacgaaggcgatgctgcccttgctgatttcagccttattcttccgatggtccaggtga

SEQ ID NO: 427025 - DNA, 442 bp, Oryza sativa
tttgggtgagaataacaaaggggaggaaacagatagtaatacaacattctttttcaagacaaatgacaaatacatctagcagaagttcaggctttggagatgtttgtttcgacgtgatatggctctttggtataaaggaagtaacattcagacgtttcgctctgtggtttgaacccgaaaaccttcaattgttgcacatgccggacgctcctccactcttcagagctggcatcctgcaaggatatcaggttgagcaagctcaagttgcagtttatgtgtaacctctttacctttgcctcctgtaagtaccccgggagcgtgtcagcatccaagtcctcccaaacgatgctccggactgcaggcaacctgtcaaacgccttcagctctgggcatctgaggatctcaatcttcgtcaagctcgagcagtttacaaccatctcta

SEQ ID NO: 427026 - DNA, 441 bp, Oryza sativa
tttacccagccgacgtcgctgccttcaacgatgacgatgacgacatgctggatgaggccgactatgaagactttgaatagcaatcaactgaaactctgatcaatcccggtccggaaggagcctgcgctggccctgaccgcgtcgggccgggacaagaccctgaaacatccaaaagatcggtgcaagaagattaaaatgaattggagaggatcccagaaatttgatgatgatgccatgggcatgataagtctgttcctcttcgctcaaagcttggaacttgaggatgttcttaagcaaccatggctcccttctgatgctcctatcagaagagcttaagtaataccatatccacatattattctctcattatctcatggtactacaaataatgagccacgttcagcgctggccactgggctgcagcatactctacttgaagag

SEQ ID NO: 427027 - DNA, 358 bp, Oryza sativa
ggctggattcattcgttcgcatacaggtgtacatgttgtattactgccggttaactcttgatctgttgctagatatgcatgtccgacgatcgagagtgataccatggaaggttgctatgcgggctcttagatctggaaggcagtatggtggattattgtcttgaaacatggggaggttcaggagaaacaccaccacttcgttggtataaccgactgaagaaacacctagcagttatggaatgaagaggaacgtcggttgaagcgagatactgcatatgagggtcatgacaatgagcggggcaacttgacagacggacaatgcattattgagggcatagactctatggactatggaata

SEQ ID NO: 427028 - DNA, 375 bp, Oryza sativa
tttaaaaattgcggttgttccactgaatccttgtggtggaaagttctatgtccaaacagctgggaccatagagcggctttcattcacaacaggctgcaacttaaaacttaattattcacctgctaatgatgcttccctatctgctggaagggggaaatagttcttgcctcagttaagtgctgacaactcctggaatagagcaatgattgagaatggacctccaggagccgtattatctcaccaccactgggccgaaagatgcttcctcaaccctgagggcctggaagaaaaaatcttgctgctatattcctcctgctgacccatcaatttcctctactcctgctcttgctaagttgtgcacccttgccttcataa

SEQ ID NO: 427029 - DNA, 330 bp, Oryza sativa
tctttacaaacacaagccccatccccgggaagacgaggctgtgtgtggcacgtcacgtgccccacccccctacccacccacccgtcttgacacccacccatctccaaatccatggcccccctccccgccatcgtcaccgccaccgtcttcttcgtcgacacccccgccgacgacaaggcccactccctccttccttccaccccctccaacgaggaggatgacgacgacctcgtggagcgcgcctaccaggcgaccgagaaggatatcttttcgatctaggacttccccgacgcctactactatgaggaggagtccggtctcgtcacctcc

SEQ ID NO: 427030 - DNA, 167 bp, Oryza sativa
tctcggtctacgcctcttcctctctctccgtccgcaggaggccgcagccgcttcgggatcgggaagcggaggagaggggaaggaagggagagaggcaggctacccggccgcgcagcttcccccctccctctctctctctctctccgccgcccccactcccacctacc

SEQ ID NO: 427031 - DNA, 407 bp, Oryza sativa
  unsure (1)..(407): unsure at all n locations
ttcatcttgcgcggaggccaagcgcctccggcgccggcgccgcttcctcccggcggtgctgcctccaggcgccaccgacgcttcctccccacggcgctgccccaggtgccgcctcttcctccccacgctgcgccgaccttcttcgtgccaccgccgccgcctctccgcttcgcagcgccggcgccgactccacctcaatacgccatcaccagtcgccctagcccccacgttcaccttaacagccgacctagccccttcctccgccacccgcaccagccaccctagcccccagtcccccacctccgccacccccaccttcacctacaccaccccacacctncgatgcttgctcgagctcaagacagccccaaccccttcacccccaatcccttcctaaaaaatcaggg

SEQ ID NO: 427032 - DNA, 317 bp, Oryza sativa
ttgcaaccacaacgagcatctggagctccgcctctgcgtgggagggaaacaccaattaatctacgacgacctgaacctgcagtacaccgactgagaggtgacggcgcacctttccgcttcccaggcttcccttgacgatgcaagtaatacgggtgctgctggtggtggacctcggcgaggggtgtcgcgcgaacctggcgccaccagtctccccgccggccgtggacccgaggctcatacgaactggaggggctgtcgcactggcgcggaggctgttgcgcgtgttgatgatgatgactcatcggggacttcagcga

SEQ ID NO: 427033 - DNA, 346 bp, Oryza sativa
aaaaagaaaaaaaaaaaaatgcccacaccttcaacaaaaaaaaaaaacggaaaaacgaccaaaaaaatgaaaaaaaaaaaccccaaattttaaacaagaaaaaaaaaaaaaaaaaaatcaaaaaaaggaggaaaaaaaaaaatttttaaaactcccgccaaaaaacccaaaaaaggccccccccccaaaaaaaaaaaaaattttgaaaaaaaaattgaacaaaaaaagtttggccggggagcctcaaaaaacctcgaaccgccccccaaaagttgtgataaaacgaggcccaaaacctcttttttccaaaaaaatttttccaaaaaaaaaaagggttttggggggg

SEQ ID NO: 427034 - DNA, 216 bp, Oryza sativa
tcgtttacacagatgcgtaggcgcgccgggggaggttttgagacaccaccggtcgcctggtcctgctgatattgggctgcatccattgcatagcacgacggctggggtgatcacggaaagaaaatcgtcaggattagtgcgtcgagccaacagcatgttcggttagggcaataactccctggccacgttactgggaggaccatctgctattgattc

SEQ ID NO: 427035 - DNA, 282 bp, Oryza sativa
actttttgtgtatgacatcctgaatatccgcttgggagggtttcttccaggatgccttggaacacccaccaaaggcattcaagggaaccttgaacgacaagcagcctggctcctacagaagtgtgcaccaactcaaaggggagcagaagaacatgtcggtaacccaaggcgggacacacgggacgcaaggccctgatgaccttgacgggataagcccactctcaagggtatatcaaaaaaagctctaaaagtcccgtccgagaccgatgcatcgacaaacat

SEQ ID NO: 427036 - DNA, 522 bp, Oryza sativa
tttaatcgcgaaccgactgcgagtagtaagtaagggtaagcatccgtctccccccttctcgattgttctcgatccgccgccaccgccgtcgacatggacgtcgtcgtcgccgtcatccgccgcccgctcctccgctccgtcgccttctcctcctccaggtcccgctccctcctccacctcctctcccgccccctctcctactcctaccccccttccggctcccccaaccatctccaccacccccaccagcagcagtggcagccatcgcctccgcctccgcctccgccgtcgcaaggaccttctccccagtggtctcctcccggaaactaccaccagcagcaggccccttcccctccgcgccactactacggtcccccgcagcatcaacctcgctacaactacggcccttcgcagccacaggcgccgccgccgccgtgcaacgactactggccaccgtcgtcgtcgtcgtagcagcagcagcagcagcgggaggctgtggtggcgccagggagctgatcgggc

SEQ ID NO: 427037 - DNA, 343 bp, Oryza sativa
  unsure (1)..(343): unsure at all n locations
gtaaacataatatcccggtacctgtttaaataggtgcaagtcggcacacgagaagggccaaacacgtacctatacatgggaaaaccatgtttcccaaggtatttttttaattctgttatacccttattacaacaaacaatgcgattacgcaaagcccagccctaataaggagcaatggtgttgncggcttcgccattgacgggatggcatttcgctagccagactcaatctgtagaggatggtcggctgcccggaacacgtactgaactctgaatctcaatatctttcagaagaggagagctgagcttcgtcagactaggtagtcgtagtacaccagcaagag

SEQ ID NO: 427038 - DNA, 346 bp, Oryza sativa
tatctgacttgctcaattatttaaatttgagagtcatgggcgcttcaatagggcgagaaaggataggttactgatgaggtctatccagaataggctggatctgagcgacgcaagcgaataacacacaggattaatgcgtgaagtggacgagattgtgcattttgctttgaaggcgcgagctgaggcacttagctgtggactacggtgattggcgctggagccgtggagtatgtgcatgtgcgcatccagcggctcaacaggagaaaggggctaactcctgagcatgggatagaggaggagtacagcaggcgcgagagtcctgatgggaggggaacaggagatttgc

SEQ ID NO: 427039 - DNA, 528 bp, Oryza sativa
tttccgtttaacccgtcacctagggcctcttcgagttaagcgcgcagaggccaagggagaaaaggaaaaaaaaacgaaaaaaaaagagaaaaaaaaaaggacgcgccaccgcggcgggagaggcgtacggcgcaccggccggccgtcggatctgcgccggcgacgcgcgcccccgccggatccccgctgccggaggtggacgaggcggcgctccggccatttccccgcccgcgagcgcccagatccgtcccgccggatatttgctgctcaattatgcgataaagtgcttccagttgacgcggagttggtggagacgccttgctctataatctattctccattgctcagcagtgatcagttggaagattctgcctttcttcctcttgctgcctgtttgtttgcttccttggtggagtagacgagaggaggagggcatgaagaaaaggtagcttttttcagccactctatgtccagggacttggattgtactgttcagacacagatggccgttgcagtactggatcggag

SEQ ID NO: 427040 - DNA, 92 bp, Oryza sativa
tactctttgacagcaaaccctctggccacgaagccggggtgagtttctcggcggggcgtgtaatcaacgcgcacgtcacccagttcatggat

SEQ ID NO: 427041 - DNA, 187 bp, Oryza sativa
acgcgtacgaagcctgattctgacttccgtcgcctttttttgtttttgtttttttttttttttttttttggtaggaaaagaaaggatacaaaccagcacagccaaacgaagggagtgcatacattttttttttctgcaccaccgcctctactgtcgctaacgaaccgaactaccactcccatgccta

SEQ ID NO: 427042 - DNA, 90 bp, Oryza sativa
cggtacggaacccccgggacgacccacgttttttttaaacacaagaaggaaacaaaaagggggggcaaaataaaaagaaaccttgccgtt

SEQ ID NO: 427043 - DNA, 473 bp, Oryza sativa
  unsure (1)..(473): unsure at all n locations
gatagaatcatggagtttatgttataaattctgaatcaagtattttacattcatgtacaacatacgcgttgctacactttgaaaacatggctccggggagtattagaagttattctaaccactcagggcaattctgaatcctacattnaacaccttgatgaagctagttaggttacaatctactcggaaagtcatcaaacctttattcccgtccagcaatgattctaagtgggatgagggnntctggtctatctttactaacatatcgatgaactctgtaaatctactcatttaaccaggctaatttctcatttcattgatatttgcgatgcgccataacggagcaatgcaaattttcatttaacaagcagcggcaattagaatctcgccttctagaaacacattcgaacaacctcccatctttccgactgaaatatgtcaggtctcctccatggccttgtaatactaagatg

SEQ ID NO: 427044 - DNA, 480 bp, Oryza sativa
ttaatatcaggagttacagattgttacagaaactggagttgtagcatctttgctgggatttcaccaggccctcagtatcagccaccacagttaggtaggatgaaccttttgggttgcagatcattgccatcaatctatatgtctcagctccgaaaacggagatgaagaaagatccaagatacagtaccggatattctacagcaagtcaccgctgttagctgttcttgatggatttcctcatgccacattcaataagtctatttatatgtgcttacataattgtgttcatcatatttgcagctgaaaatattttggtgaattcagtaagacgggggagaagatacttaacttcaacattctttgttaaaggcattacccacagatcatatagcttagatagcacttcaggattaactttgcacctcactgttacctgcattgccttcttgcttgtcagcattgttcttcaaagtgacattt

SEQ ID NO: 427045 - DNA, 205 bp, Oryza sativa
ctctttttgccgaccaaagaataaagcccagggggggggtgtattaaaaaaagcctagggtaacccaccgaacggtgaaacatatcccagaaagaaaaggtagagtccaccaccccatgtcaccacggcgtaaaaaacttagggatgaaaggacaagacaaccgatctcatcaaggaagcgtgaaagggatacagagcggaagca

SEQ ID NO: 427046 - DNA, 204 bp, Oryza sativa
taatttttaaaaaaaaaaaaaaaaaaaaaaagagggggaaattaaaaaaaaatatacggttaagcccaataaggggggcacatgcttatgggggcggcttgcttgggggttctgtggtgtgccgcgtccctcggcgtcgttgtctggttttttgtgttcccccggggctcctgttcctgccgcggggggccgcggtggccgccg

SEQ ID NO: 427047 - DNA, 387 bp, Oryza sativa
gtatgttgccaggaaagtttaaggaccaaaaagcccgcccccacaaaaacaggggggcggccacaaaaaaaggggagagaaaaggggggacaaacccaaaaaaagggggaccgagagcctggggcaaggaaacaaaccaccaagatgaagccaccccccaaaacaaaaaaaaggaaaacatatttggcggggagaggaacccccaaagaacatgggaagaaagggaacaccttgccgcgggggaaacaccacaaaaaccaaaagtcccgggcacccccctacccaatggggcaagggtcaaaaaagaaaaaacgcccccaaaaccaaaaaaaggggaaaagcccccagcggggggaaaaaaacccccccccccagggggggggaacc

SEQ ID NO: 427048 - DNA, 180 bp, Oryza sativa
gcgtggtcaaatctcacccccgcaccaaggagccgcctttccgacgcttcaaaccaacggcgccgccaccctgacaggcggcctcgcccagatctcccagggagcccagccgcgcggcccacccactacaggtgcgcaaaccgacgaggcccgaaccggtgccgtcagggccggcccgcg

SEQ ID NO: 427049 - DNA, 364 bp, Oryza sativa
  unsure (1)..(364): unsure at all n locations
gtttttgttttttttttttttttttttttttttttttttcaaaaatggatgttttaaattatttaaagggttaaaactaaaagtcaagttttagaaacagcagggccaaataaaagcatccaancatccatccaacaccaagataaaaattggagggctttaagttccaggaaaactaaaaaggggcccacacatgttgggcccattgggggaaaaaactactttttttttcccaaacaacatttcccaaaaacacagggcgaaattggcccccttctagggggagggccaaagggatggggctgagctaaacccatttaaccccttttaacctaacctaaaaatggaaaccccctggaaaagg

SEQ ID NO: 427050 - DNA, 451 bp, Oryza sativa
ttttattcttcgtcgtagcactgatgaaaagaccatgttaccgcaagcacctctaggcaacgcaggcaagaaagttcggttgttccatggaattcctggattccctctctgacgcgccacaagatcttcagaacctcgtaataaccgcgaggtttctgactgtcccacggtggatccgagggctgaaccacctcgcctacttgcagatcacggtctgcaaactaaccccagatgatgtaaaacttcttgggagcttgcacaggttggagtgcctcgtgctgggcttggatttcctcccgaaagaagccaccctgatccaaggtcagggcttcataagtcaagaagaagaagaagaagaagaagaagaagaagatgaagaagaagaagagaacatggggatctggttccgtgagctcctgagattgtccgtcgattgcccggtgccatggct

SEQ ID NO: 427051 - DNA, 254 bp, Oryza sativa
tctcctactcgcttactcaatcgctcgaggattctgggattggattattgggttggatttcgagccgctcaatggcggcagcggcgcaggctccggcggcggcgaaggtggtggtggcgacgtcgccgagggcaggcggaggcggaggctgcggcggggacaggaaggtggcgcctcctgtggtggcggcgctggccgtccacaaggcccagagcgagatgcacgtcctggcggtggacgacagcttcgtggac

SEQ ID NO: 427052 - DNA, 123 bp, Oryza sativa
cgttaaaaggggatgaaaacaattgggagacagttaacttaggaaggaaatattccttagcaacaaagccaaacacttggcccttcctatcagacgatcagactgaccgggttctaaaattca

SEQ ID NO: 427053 - DNA, 75 bp, Oryza sativa
ttttccttttgaaccagaaagagaatatcaggggggggggtgatttaaaaaaacagttccttttaatacaccgag

SEQ ID NO: 427054 - DNA, 526 bp, Oryza sativa
tctgtccgggttaggcgactcggcggcggcgggcgctgcttccggttccggcggccgttccggccggctccggcggcctttccctcctggtcttcctcgctcgtgctcccaagatgtctaggttgttgagcctagacacccatccccgccatcgtcgctttcgttcgtctccagatcctcctcttctcccttcccccccagatctgcctgcttccctagcctctcccacccttgagttcttcccccccactagatctgcacagtcacctccctcctctttgccttccagctcttcggctgtaccctctgtggcattctctctgggggagctggtgacagatcgagcagctgtcaacggtgcgttcgtcactcgcgctgcccaagatcttggcccgttccctcaatgcctcggtgcgccgaaagctctctctcacagttccaagcgtctttactcccaggtggttggcggcgtcgtctcaatctccagctgcttgtcttaatgccttcatccctcgcagcccttctc

SEQ ID NO: 427055 - DNA, 152 bp, Oryza sativa
gagacggagggggtgctaatgcctaattaacaatggggacgtggacagacaacttaactaccacggtcaaatgggtcaaaccacctagaaccagtacaaagggaagagcaccccccactaaatcaaagactaattaaaccctgcgtgggggg

SEQ ID NO: 427056 - DNA, 518 bp, Oryza sativa
  unsure (1)..(518): unsure at all n locations
tcgtctctaatatgcgctcgaaagatcacacaaccaaaaaccaaaaacagcggatctatagagaggaatgaaggcactcagcgtgcccgagatatcgtcgtcaaaaaaattgagcgatgaagtcactcaatcttctgaagccagagaggaagagagcgacgaggacatgaaagagccaattacaagattgttcgtgcatggtttcctgtcgctagtgatatcagcggtcggcaactatataattcctcttctaacaagtcacagcgagcccgagcaaacggctaaacggtccgcgatgccaatagctgttttctgtctcggcatgatcactcctgtgattggaaatggcatgcgtttccggatacttcaacccaaacagcaatatggctccggggttgcgttgcacatcaccactgcccgcatagtgctgatttcttacgtgttcctgctcctgattaacacanggtatatcagcctcgccgtgttcccagctatcatgattgtgttcatcggcgctc

SEQ ID NO: 427057 - DNA, 458 bp, Oryza sativa
ttaatatgccatcacttagacctttattatgtatcaggtcataaaatctctcttcatgccctactcaaatatctctgctacttaacaggaattgtttatgcccacaccaattatcttccaaaattatttgcctctgtggcatgaggggtacaatcttatttctaagggtattgtcaacagctggaatatagatgtctttgcactctttgctgtattgtcagctaaatggtgatacaaagtacatattcggtgaagctattaataactccgtagaaagattcttttttgtttcgtttgaattaggcagctggagatgataattgtccattcgacaacaggagatggctcttccagagaagctgttgactgaaaacactttatcggacttgagataagcatgatagctgtctcaactggtgtcaagggaggactgaacggtgtatatctagaccatacat

SEQ ID NO: 427058 - DNA, 543 bp, Oryza sativa
  unsure (1)..(543): unsure at all n locations
ttgtaggcgctgtgcggcaagacggaccacgccgacctgtgcgagtcctccatcgggcagctgccgcagcagccgccggcgcagctggacgacatcggcgtcctcaggctctccatgaacgcgctgcgcgccaaggtgcaggaggcgatcagcgtggcgacgaacaggatgggggcggcctccggggacgaggtgtccaaggacgccatgggcgactgcctccagatgtacgacgacatgaaatccaacctggactcggcggacgcggcgctcaagaagggggacaaggacacggcgcacaccatgctcgactccgcgcgcaccgacgtcgacacctgcgaggacggcttcagcgagcgcgaggggctcaagccgatcatgggcgacctcgacaagatcctcgccgagctctccagcaacaccatcgccattgcctncgccataattgagtgactcatctcattntctctgtctttctccctctgaccggcctggacaaacaactgaagtgtatgtagtatgtaccgagtgttcaaaagctga

SEQ ID NO: 427059 - DNA, 388 bp, Oryza sativa
  unsure (1)..(388): unsure at all n locations
tgatcgattctttccacggtttccatactacacgaatggatcgacacgtcttgcagggcggcagcgccaacaacntcaccaaagcacttggttgttcatagtatatcaaccaataaaaattggatgcaaacggatattattaacaagatatttactatccacgctattatgagcatggtgcacatcgaatagcacttctacctatgcttatgaacaaggaatgtaagcatgaagtgaaagcagctcttaaatgacagtataaacatgaggcacaaatttatctaccatccggaagaaaaaacgtatcctctaaatatacaaggcaactagattgcggaccaacactcctgcttataaaacacgacgatttgccataatccaattattt

SEQ ID NO: 427060 - DNA, 381 bp, Oryza sativa
tatggagaccccttcaaatctcaccaacagggtatcttcagttcacctgtgaaaaatcaatggatattcagtaaccagagcacttggttgttcagagtatatctcgacgaggagattggctgcaggtggatatgattgggaagttctttactatccacgctattatgagcatggtgtgtattggatagcacttcgacttatgcttatgagcaaggaatgtaagcatgaggggaaggcagctcttaaatgtcagttagtacatgaggcacaaatttatctgccatccggaagtaaaagtgtatcctctaaatatacagggcaacgagattgcgggccagcgctcctgcttgtaaaacaagatgatttgccaggatccaatta

SEQ ID NO: 427061 - DNA, 173 bp, Oryza sativa
tctcctgcgcggggaatggtagcctcctccgggggggtttattaaaagcactctgggcttcccgacgtagcgcagcagcgattgcattctgtccaactttaaggctgcagagaccgggcattgtcacagagggctccattccgcttaaggctggcgacagcttctcggtgccc

SEQ ID NO: 427062 - DNA, 501 bp, Oryza sativa
tcgacggggcaaggtccgaaaccttgcctgctttctctcgtccgatgctgtcgccactgcgcttgcattgcggggattgcattttgtccagcttcaatgccggagagactgtgcattgtcacagagggctttggtgcaatgtggctggtgtgagcttcgtggtgccaaggattctgaaccattgttgtctgtcaatttcttggcagtcccttcttacttccagattttgcacttgttaatagcactcgagtcaatgtatcttccagctgtgattcgtacgagaatgcatttggttggtggagctgaagaaatttatcctcgcaccctattggaggaggattctgaatctctgagcactggggatactgatcctgctgttgacctgtgtagcaacaaactttgcagtgtggctcaagattatgtgccccttgaagagattgcaagagtggtggtccatggtctgaggctaaagaagcatcaaaggaagagaagctctatgcg

SEQ ID NO: 427063 - DNA, 314 bp, Oryza sativa
gttgagtgcttgtgcttcacggaaaaagaaaaaaaaaatgaaagggggtcctactgaactagtagcagaacactagttatagagctgaattctgaacgcatctatggtgaggccatatggagatggaggcagcaatgaaactgaggaaactttgattcgaatcgcgtttaagggagaacagtccgtacttatggtgctagtaacagcaagttacattggttcaggtagggtggaggtatgacgaacaggctaggatacccggggctttattgaggcccccgggttgggccctgcctgggccctgggcctttagc

SEQ ID NO: 427064 - DNA, 344 bp, Oryza sativa
gctggcgctacgaaaagctgagcttgttcaccaaaggcctcaagaccatcgtgaagcatggcctcgacaccggcggcaaaaagggcggcatggacctgaacaagaaatagatcaaatcatgatgatgatgatgcatacatacataggttttatcatcaatagccagcatgtgctgaatataccagagctagtatgtgagacagtattaaaggcatgcatgtcgatgatggagtttattgctaagaactacagtatgcatacataggcggcggtggacggcttcgtttccttaaatttccttgtatacaacggtggttatggaagtgcggatcgaattgttcgct

SEQ ID NO: 427065 - DNA, 126 bp, Oryza sativa
ttgctccccacacaaaggtagcgaccgagcggggggggacttgaacaccctgtggatttacacacgatggcccccgctaggcgctggcaccaccgaagatccaatgatgaatgccagcggactcac

SEQ ID NO: 427066 - DNA, 535 bp, Oryza sativa
tcatatcgacaaatatgaagtgtctaacaccacggtaagttacaatgaaactattcttccacattaacaggcagttagggttatttcttctttgatatactgcatttgtctccatgggtacagccttgtacatacacaactgttaattggaaagtcgcccacttttctcttatgcatgtgccagataaactagagtaatggtgtgcacttgcgctgtacattaagcatataaggctggtcaacttgggccaagagtagcttctgcattatttcctagttacttaataaagatataccaggtgctttggtttatatactacaatggggtggttgtggacctgttttgctattgagaactgggcgtagggtctcacaaactagacacgtgatttagtttccatcctaccaaaccaacattgcacgtgtaataaatcaaataggctgaatctatttttaatcattttattagcagctattcttttgagacacctttataggatatcagaaactagaacaacccaaatggtcaaaatat

SEQ ID NO: 427067 - DNA, 399 bp, Oryza sativa
tttgttttttttttttttttttttttttttttttttttttttttttttttttttttttttttttttttttttttataagttataaaaaatattatattttatggaaataattataatatatgggcagaaaaaaaaaaaacaacgaaaaaagccaaaaaaaaaaaaaagagggtcccccaaagggggaaaaagatattttgaaaaaaaaaggggggtaaaatgggaaaaaaagggagggtttaaaaaaaaaaaacgccttaatagaacaaacaaagctgaagaaggggcccccccttggaggtaaaaaacagcacatttaaacgcaaaaagggggcacaacggggcccaacctcaaaagggaacccaggggggggtaaaaacacccaagggtggtaagcc

SEQ ID NO: 427068 - DNA, 476 bp, Oryza sativa
tgcaaagctcccagccatggatgatctgtctgctcgccctctgcttgattctgttgtaatctctgccactggtgaaattgagagaaacagagagcgcttctctgctcgttccctcgtggcctggcaagtgggggctcaggccggaaaggtggagctcaacacgtttgcggatgatgtccgttcggctttcagcatcaggcgtgctgacatccagttcaccaagttccatccagaagatttcttcatcacctgctccaaccagagtgaccgagatggcatccttcgtcagccaaggctcgccactgtttcgggtagagtgtacctctttcgtccatgggatgagagcctccatggtactgaggcacgcttcaggttccgcgctcgtgtctgcattgagggcctccccatgcatggccgcacagatgaagcagctgccaaggtgatcggccgcatgtgctctattcattatattgaag

SEQ ID NO: 427069 - DNA, 380 bp, Oryza sativa
tttttgtggttttttatttttttttgtttttttttttgttgtttattgttaattttattacaatttacaacatgaaatgtacttgcatagcgtaaacatggacattgaaaaaaacgctgtttatgaccagctaaaagccagtcaaacgcaaaccaccacagttactacagggctaacaaaaaactgatcatgccataaggggtatagcaaaaggctgtatcagatgcatttagatggtcgctaaaatgtaacaagcgtcggcaaactggaggttgttctagcatattgcaaaaaatggacaaaacaagaattaaagaaactagctggccctaaaaaaccatttgaaaacatgcaagctggatctagctgcccttttctga

SEQ ID NO: 427070 - DNA, 433 bp, Oryza sativa
tcttgaacatacctcccctttctaaatctcggtgccacgattcttccttccgtgttgggacacactggcgctcactgcagagtacacatactcttatacatactaagagccttactggccattagagaagctgcggatgtccattacgggtgctggtagatacatagcatcccacatagcgaggcgcctgacgagcgagggccactacatcattgcttatgactggaagaaaaatgaacacatgactgaggatatgttctgccatgagttgcatcttgttgatctgagggtgatggacaactgcctcaaggtgaccaccggggttgaccatgttctcaaccttgcgctgatatgggaggagatgggattcattcaatccaatcactttgttatcaatggctacaacaccatgatcagctctaacatgcttgag

SEQ ID NO: 427071 - DNA, 323 bp, Oryza sativa
tgttttctgtagctattggacctcaagaggtggggatactttgggggtttcgggtgtcgctccctttattagacaggctgttatatctcaagtttaggcgctgaaaatgtcaggtcttagtttaggtgctgctagacacctagtgttcagagaaaccagcttgaaaggaaaagctgaaaaaaaaataagttggcttcaatgcacccctggatgtcactgtggctaagttaccatgtccaaatgtgtggtgccgtttaaagcacacctgtttttattactcttttgttagtgagggaatgctgcctgattgactatgcacacgt

SEQ ID NO: 427072 - DNA, 290 bp, Oryza sativa
agttattaataaatgtacaatttgatggccggctaacgaacaaacaaaaaacaaacacagtggaacccacaataaattaaatttggactcacccccctcatctagcctttaatgacataccacattttttccctccccctccccggggcggggccggaaaacctaaatacctatcccctccccctgagctggggggcgggtgcgagctgcgggcgcctgtgcgaaggtggtcgcttacgccggggaggaagaaggacgccccgggcatgaacagcaggtgggggggggaa

SEQ ID NO: 427073 - DNA, 373 bp, Oryza sativa
tggtctaccatatggcgagaaggcccccagggtggcggagtcgaaggatcaggatttactccgccctcgacgacctggtggtcgggcgccgaatcaccaccgacacctacgcccatcgacgacggcgagaggtgggtgggggagcgagcgtggccgctaggggactcggaggggcggaagcggctgagatagatcgcggaatgagcaggttcggcggaaccagatccagcggctacggtggtgggaagaggctcgagtacaggcggacgcatggacggaggcccaagggggcgcacaaggccaccagtcgagaggctccactggctcggggacagcggggccaggtggtatcaactactggaaacccttgccc

SEQ ID NO: 427074 - DNA, 285 bp, Oryza sativa
aaaaagggggaaaaaaaatttacaaccaaaatttccccaatttgcccccccaaaaaaaaccctttgttggggggaaaaaagtaaaaaaagaccaaaaacggacacaacggggggtacccaaaaccgtccgggggggcctccattaaaacggaaaacttttttaaaaaggggaaacccccccaaattttggggggccttttaaaaaagggggggtaaaaaaaaacccgggtttttgggttttgggcctcccaaaaaataaaaaaaaattttctttaaccgaggggc

SEQ ID NO: 427075 - DNA, 280 bp, Oryza sativa
tttctgcggctaaagaagagagccctgtatgtgggatcatatgtggatcagggtttgcagccgctccaaacgatattaccatctaacaacagatctaccgaggagaccgagtatccagtggacgctcctctgctggtacgcgccgctgctatacagttacacaatcttgaccccaagatggcttgcgagattgtcatccgtgaccaccacgatgtacgctacctccgctgtatgagtattaggctactgaactttacctgaagcatgccatctaaccaca

SEQ ID NO: 427076 - DNA, 160 bp, Oryza sativa
tttccataatactttgacgagaagcaggggagtgcttttaaaatacaagggcgcttaaaacaacaactggttcagtagtaaggggcgtacccccccaccgcaacctgtctgcttctgggaaaacgaatatccctggtgagaaaacaccgggttcggcgaa

SEQ ID NO: 427077 - DNA, 249 bp, Oryza sativa
tgtgcaggtaaggacgactggtgagtgcaatgcacgttatgtgatgcatgtgggtgaacatggatggataatttgaagagagctcagattcggtcgactgagctagaagagtgcgtaccgatcatgactgctagcgaacctagaaacgcagagtggggactccttatcgagctatacatgaataggttgaccagtctattaatgctgcttaccaccacgcgtgtgataaacgtggtaggtacagatgcg

SEQ ID NO: 427078 - DNA, 496 bp, Oryza sativa
tcctcattcctctccacttcttccttccgtgccggttcgacccgacagcagctttggcgtgtggaggtgggaggcggcgtgcagcggcgggagggcggcggcctcaggtgaaggcggcagcggcgggagggtggcggcgggatgggaggccgggcagcctccggtgaaggcggcagcggcggctgcaccctcccctccgccagatccagtgggagggaaggcggtgacccgacaacggtgcccgctggtggcggtggtggcggcgtcaacagtggtggtggagactggcgcgggctaggtggctgccggctgtaaccgccggattccggcgatggcggtggcgttgctggtggaagaggctggcacgggcgatgtggctaccggccgacatgaaattttctttttttgagatcttgagttctttctctcttttatttctcttcatgtcccatttgttgagttcttgagactttgtacatgtagtggtttgctgttc

SEQ ID NO: 427079 - DNA, 349 bp, Oryza sativa
tttctctaatttctatcccctctctgaaatgaagagggtattagagcaagagatcctaaaaccctagccaccaaatccggtcatcgcaggcgcgccggcggcgctcgccgccggcgagccatcgtctcatcctcccgtcattagttggctgtcttcgagttgtagcagttttgctttttgtctcttctcttcgcatcaaagcagcagcaacaatcgcctcctcctgctgccgccggcctagccaccggctacctcgtccatccgtcggcctccgcgaccgatcccgttgcagatctcgcgggcggtggcggtcgtcgtcgtcgtcgtcgtccgttgtcatatgtcgcat

SEQ ID NO: 427080 - DNA, 233 bp, Oryza sativa
tgcggccgctacttcaccgggatgctgtgtgggccaggaggatcggcggcgccggcgctgaagcacaaggccctgcaggcagaggcgttgggaacggacaacgccatggctgacgtggccgtcgtcgggaacgccagccagctcgaccacccctgcttcccatactgcaaggaagtttacgtcgtgaacagggagagcaccaagaccgcgcggctgccgcgggacaggtaccc

SEQ ID NO: 427081 - DNA, 306 bp, Oryza sativa
aaaggatatttgcaaaatttatattaaacctttctcgatagacctaccactgggccaattttgactacatacgaacaggtttacgaaggactttcaaactactaaacaccaagcataaactccacaactgaatcctgacgcctctggagattttacaagttccacacaggaattgcaaagcaacgggcttaaacaaaccaaccgattcatgtaaaacacgataagaagtcacgatactgattacctaggttcacaagcgatcattaggaggaggcactcttgaagttgcggcgaccaagtataagg

SEQ ID NO: 427082 - DNA, 116 bp, Oryza sativa
ccggaaaaaccgggaagacccacgccctccttctcaaaaccaaaaaacaaaaaaaaaagggaggggcaattagaaaaagaggcccgctaaaccccaggaaacaaaaaaaggggaca

SEQ ID NO: 427083 - DNA, 375 bp, Oryza sativa
tttcaactactattaggtatgtagtaggcataaccctgacagatcttttggctactgctggttataatgcacatttttttttttgttactgcaacaacatccctgaattttgtttgtaagcgtttcgttatctacgaggaacacgatagcttgagactataatcaattagtaccttttacacttgcgaaattatatcagactataaatgaatttgagaaaaactatatattcttgaaaaatggcaaatatctagtccaagggcagaagcgatctgcatcccgtgcttgtgatgaaacggaaatgttcttctgaagcatctgcatcctgcaatattatggtctatgctttttgtctgatttcttttttgtggaaca

SEQ ID NO: 427084 - DNA, 523 bp, Oryza sativa
  unsure (1)..(523): unsure at all n locations
tgagctcagtgtcgatgcactccctgtcatgacgtctttccactagtgaaccattgtattctagagaacgccccagtttcccatcttatagtccaattcctcgactatcagtatcagagatttcagatgatcatggtggaggtgtggtgtcacctcaaaggaagctaaatcatttgctgtcagatcatcatccatcaaatggacagatgttttctctagatcctgaccgctcaaatgatgatgctggaccacctctcacaccaaaatatgttgaaccagctggatcagaaggctttatgagaggaagatcgtacaacataagaatagatgaccaagtgttgcttcgcttctcaccaaagaattctgactcaacttattactttggtgatatgattggtggagcactcaccttctttcatggatctggaacacgaagatgcctagaggtatctgttaccttggaaacatcagaaacggttaatcctcgtgtaatacatncttcgagaaggagctcaccctcaat

SEQ ID NO: 427085 - DNA, 167 bp, Oryza sativa
cacacgcagccgtaataaagtgtagttctggaattgagacggtaactgctgcgtccactatgacgtgttctgttcggaggcctcgattccaattcgaaggtttcggaatctgaaatggcggcggcggcggtgcgggcggcggaggagcttgcggagagggagatggc

SEQ ID NO: 427086 - DNA, 448 bp, Oryza sativa
gcttgcagcggcatcagtctccggctgacgctgtcgctagggttcagccaccgccgccgccgccgccgcgaccgccggagatgagcgccgcggcgaaggccgccgcgctcgaggtagtgctcgccgccaagtcgtcccgtatcgcctccctcgaggccagggtctccttcctcgaagccgagaacgcgcgcttgaggagggccatggcggatcgtagtacaggtaagggaggcccaaatctccgtcgatcggaggagatggcgggagggcgtgtggcgcgtgatgtcattgaggttagtgatggcgaggagggaggggatggctgttgacgtcaggaaggggagaggcgcggaggagtgatggatgcctgttgcgactcctcggaagcgtgctgctttgcgggtggtgatcggcgagagcggggatgaatacgagattgatgaccccc

SEQ ID NO: 427087 - DNA, 477 bp, Oryza sativa
ggaagcggatcatggagctcgccatggattttgcgctccgcctccgcgacgccgccaaccaccacctctcccgctacgagcctctcgtgctcctcgccgcgcccctcctggccctcctcgctgcccgcaccctccacgccgccgctgccgccgtcgccgaccgcggtctccgcaccgtcctcctcgctctagccatgacagccatcaagtaagctttaatcgacttcaatctcctcctcttttcttacttgttgctgctattactattattatccgttcatacatacacacgcaggttgcttccgggagttagcgcctacatcaacgctgagaagaggaaggttgttgaccagctgcagtcaggtggcacgtccacaaaagtactctgcggaccgagttgccaactgttgggctttccaaccaagtgataaacgatctcgaaacactgaaagctagagatgttaacctgcagggaaa

SEQ ID NO: 427088 - DNA, 532 bp, Oryza sativa
gagagcccaataggacgtctgatatctccaagctcagcttgttcagggacttgctctccatttcctgaccctgaggtgcagacttcctcacgttccacattcccctcattcccagttcgtgagcctccaaagatactggatggcgagggaattgcaacacagaagttgatacctcgccatatgcgcaatggcggttctctcttggatggacatatttctgctgctgtaccagtcgtagacttctctgcccgacttcaaaataatgatcatgctatggatcatcgggtttcatttgagttaacagtagaagatgtagctcgctgtcttgagaagaaaaccaacattaatggggagtctgctgcagcttcttttcgccttgtgcccaccggtaacggagatcacattcatcccagagaatcgaatgatacaagagcagggctatgtgttgatgaaacataccatgatctgcctgagaagcacggcgctccttgtcccttcgtaggctaaagaatcaagttcaacatgttgatgc

SEQ ID NO: 427089 - DNA, 500 bp, Oryza sativa
ccgccattgaggaagttattcagggaatgcccggtgaaaaagttattcagggaatctttcggactttcatggacattgatgactgcaagattcagattcagacagatgtatcagctctgggtatcatactacttcagctagttacagggcattcagatgcaaagggtctgagagattttgtggcacagaaactgggagatgatagtgaattccaaaggaagagcattctgcagaagagagaaatcctgaaagggattgtggatcctgagctgaaaaagtgtcaaacaccagtggaaggtgcagctaggatgctgttcttgggcttgagattcagtgatccagcagggaaacagtgtcctccattagccagtgaagtgctgcctcagattcaatcgatgcatagtacgacttactctcagatggtttgggttcatcgttccttcttttgaccggataagttggtggatggtttgcctgtcatgaaagaaaaacctcaattt

SEQ ID NO: 427090 - DNA, 386 bp, Oryza sativa
cttgacatcgacgtgcggcgtaagcgggtgttatccatcacccagcaccacattgaaagtatgggtgatcttataccagatctcatcgcctgtgagttcactgcatactcggagctctcaaaaggcatgcaggcaatggtggaaggaaatgagggtgaggaaagcacaaagcggatgaaggttaaatgatctctgcatcatgtggaacttcgatggtttttgcaacatatcaagtaggattaacattgaagattggtgtttgattagcacccatctatgtggaaggatgaatgtgatgtaatcattctctagaagttatgatgttattatcagatggtagtaaaactgaattgctagtgtgttttgttaacgctgatggttttaac

SEQ ID NO: 427091 - DNA, 306 bp, Oryza sativa
ttttgttgtttttttttttatttgttttttattttttgtgttattttttttttgtcttcttttttttttttttatttaaatcacacatgctcttttttttttgtttcacattctttatggacagaaaaaaatccctggaggacgaggtgtcccaagggcgggtgggggctgcagacctaaacacaggaggtatttaccggggccaaaaaagtttgtatgtacagcatactgcgggaggacggtatggcatacaaaacgaaaaggcgggtgacatactgtgggtaaacggacgaattggcctcccca

SEQ ID NO: 427092 - DNA, 495 bp, Oryza sativa
aataaataacgaaggctaaccgccgccgccctcgcgtatctcccccctttccctcggcgtaaaagaaaatctcccggtctctcgtctcctccgctccttgcgccatctcgccgccgatctccatcgggcgagcagagcagagcaggggatcctgatctggaagaagctccttctcttaatttcagagccttaaaaccttaatacgagtaacagcttgttgtttgttcatccaaaagtttggggttgaactgaatccccatgccctcacctggtactaatagcagcagcagcttctgtttaggaggaggctaggaaaaaaaaaaggaggattttttttttgcttttttgcgggggctcagctgaacaacccccatgcatcacgttaggtcccggctgggaagcccagatgcttccagcaattctagtaagcggaagaggggctcctgcttcgcggagcggaatatggaagggaggaattcgatcccgataaagccc

SEQ ID NO: 427093 - DNA, 51 bp, Oryza sativa
tcttctcttcgggagagatggtggggaagagcggggtggcggaggagggct

SEQ ID NO: 427094 - DNA, 516 bp, Oryza sativa
tgaatttcttcaccgaaggcaatggcggcggcggcggatgcggtggaggaggttcggctggatgttggaggcgtcctttcccttgcttttctttttctctcattttcttgcttttccttgagtctctttcttgcttcttctgctccgtcgttcccctcgttttttccttctttctgttttccttcttgtcttcatccctgtcatctttctcctcgtgccgctccttctcccgcccatgacgtcttccggcccttccctgacgcccactatgtcctactacctcccgctctttccatctgccatactcttcttcttctccccctccttcgcacgcccacgccttttttcttctgtttctactttttccgtctcttcccgcccccaggttttcttccttttctccccactccaccttttttttttcccttttttttttatttttttcccgtcctttcttcttttttctttttttctccttatctcttttttccccttctttcctccatcttttttctc

SEQ ID NO: 427095 - DNA, 240 bp, Oryza sativa
tctcaatggagagagatcccggagaagaagtttgcgtgcaaggcgatcgatccatgagcctgaggcacatgagccgagtgggcgcgcgcgcggtgcaggccgtgcgggagggcgcggggaggtctttgaaggacaaggcgcagtcggcgtcgacatcctcgtcgtgcgcgtggatcaggtgcagcggcaggggcagaacttctcccgcactcggtgtcggtggagaaggatacactgagc

SEQ ID NO: 427096 - DNA, 551 bp, Oryza sativa
gcgctcttcttctccctccaataattctctcccctctgctgctgttgaccaccaccaccaccaccagcaggagcagagagcaccatgtccatccaatagatccccatgcttgcgcaccactcccgggcacattccgatcgaggaggaagaggaggaggagggttggccactttcatgccttctatctgtttgtggttgaagttaaaaggtccacatgaccgcctgcgattgtattgatgaacccttgcacttgcacggtctagatgaccaccttctgtaataggtatcattaacccaaggttgctatttgcagaggcagtgaagacacactttatagacctagtcgtctttacacaggattcgtgtcctatgttatcgtatttttgggtctcgggacatgtcgtcggcagagcttcatacgtttatgcatcccagtaaaattgcatgttagaaggtaattcggacccctgtgatcagtatggtttgaactttccttggctctaaagtgaaatagataatgcacatgcccgaactagttgtgtgaaaagaaa

SEQ ID NO: 427097 - DNA, 350 bp, Oryza sativa
tttctggtcatccaaaaatatcttcagtttttttttctttctcagaatttctcgtctctatttatatggatcatatgtattcaagtctcatttctgtccagtatcaattcaccaaatgctgcatttgatttgcattgccttgtttcattttgatcagaattggccactttaattccatctatgtatctatggtaaaaattaaaagctacttttaccagctacatttgtatagattaaccacaatcaaatggagtgtccaattgtccttatttgtatagattaacattcaccgaattttaaacaaacaggcaacagcggatattttgcttaaggcctaatggcctttactc

SEQ ID NO: 427098 - DNA, 223 bp, Oryza sativa
ttgttggtgttcttttgagacacacatagtgtgggtgtacctccagctttaccgcttacacacaccagttccggcctatacgagagctaccttgatcttgggccttgtgcctgttagcttgctttgtggtggcggtttatcttcttccgatctgtaaaagccccgatcaagaaaggatccaacccacctaggaggactaacctgaaccttctaatgaatttaa

SEQ ID NO: 427099 - DNA, 495 bp, Oryza sativa
cttcgatgctgccattctatcaatatgtaagagcagcgcacaaattttttcagcagatgagctaaaggacagaaccattttaactcatataaaaatactatacaggttaattgcactgtttataactataagcttcggttactgcttgctctcagctctgccttcagtgtcattgaggagtcagaaatgaacttgctgaaagtgaaattcttgagccaagattatgatagtgaccacaaaaatgttcagaaagattaccccagcactccataagaccacagctatatatctgtgcacatcttttcagctgcagtttgttcatttcagatcaatgaaaaaacactgcttattctgtagaatggagagaccttcagtagagaaatggaaaaggctcagagttctcaaccatgggatcattacctcctgcatgatttgctgccaaattctcctccttctaaagcccgatttatatattgacggagcttgatgccctga

SEQ ID NO: 427100 - DNA, 470 bp, Oryza sativa
tctggtcatccaaaaatatcttcagttcttttttctttctcagaatttctcgactctatttatatggatcatatggctccaagtctcatctctgttccccatgcttgcaccacacgctgcatcacattcgcatcgacgtggaggatgaggagcagaattggccactttaatttcatctatgtatctatggtaaaaattaaaagctacttttaccagctacatttgtatagattaaccacaatcaaatggagtgtccaattgtccttatttgtatagattaacatcaaccgaattttaaacaaacaggcaacagcggatattttgcttaggtcctagtgccttttactcacgcagatcttgtgtcatttggttatttgttgccacttgccaaggtagtaggtagagcttcatatgtttatgcattccaagtaaaattgcatgttagaagtaaattcttgcccctctcatca

SEQ ID NO: 427101 - DNA, 125 bp, Oryza sativa
tatatgtctgtgcgatagagcgctgtgcaaggagggcgcatactaagagcttgtgatgtaatgatgacaaacgcacctggtgtactagggatagaaagggtttaacgctacatggagttttggct

SEQ ID NO: 427102 - DNA, 297 bp, Oryza sativa
gggtgtggcaatccctttaacccctttttcctttactgttggaccgaaagagcaccacaccaacgaacacggggacaaccagcttaggggggacaaacaagcgcaatcaggggtacaacaaaccgccgctgggggaaacagaacccgaagggatactcggggatactcctggggaccccccggaacacgggtaggcagaaaggggttcgtgaaaaacaacaaactagagggcgggcaaattcttggccttgggaaaaaaccccatggacacgggccccgcgaactggttgaacaggt

SEQ ID NO: 427103 - DNA, 418 bp, Oryza sativa
tcgcctccgtacgccacacgggagaagacggcggcggggagcccgcggcggctagggttttgattgatttgtcgccggctgacgcgccgcccgtcatggagagggagctgctggagacgttcgaggccgccaagaaggcggtcgacacggcggccggggcggacgactccccggaggccgaccgctgccttgacgcgatgcggtggctgtgcggtcttcgcgtcaccaccgacgttcctcgttttcacgcatggttggaaaatcgtcttctttaccttactatagtaccctcacttaaacatacaattcatggctacagattttttggggatccggaaaaaggttggtatccccataatggatagaaaaatgctctcacattataatgttgtatccacctattctttctccaaaaact

SEQ ID NO: 427104 - DNA, 52 bp, Oryza sativa
ggggccgggaaattttttatgcccgggacaaatttatacaggggcattgccc

SEQ ID NO: 427105 - DNA, 259 bp, Oryza sativa
  unsure (1)..(259): unsure at all n locations
tctctgcctagagcattatcatcgatcgtcgtctacctagctagcttcacttgtgctccactgcaaccagtacaccacattaacttaattcacacctagcttagctcactatatagcttagcttcgcttaagcttaagctgatctcggagaagacgtacatgatggtggtggtgatgaggctttntcttnttttttttttttcctccctttcttttctttcttccttcttttcccctcgtcctctcagctttctgttct

SEQ ID NO: 427106 - DNA, 261 bp, Oryza sativa
tgactaatatatgccacagtctccttgctgccatgccttgcgtcacatggtgcaaggtactaggcccttgatcggagatgcgcacagcgtgcctaatccgttctgcccaaacccggatccagcggtcatcctgctaagcaccgtttcctgccacatcacgtgcgctcaccttcaggtgtttgaccaccttcgaggcactctggactccttgcatattattcattcttgattggcagtcctttgaattttgttgatgtttgt

SEQ ID NO: 427107 - DNA, 384 bp, Oryza sativa
tgcctctgctggccacagccaccttcctgccgtgcgttgtgttgcgcgtgccagattggtagtagtaggctggtagtagcgcaccggttgcctccttcgttatccccaaaccccgcgccgacgggcgtcctgctcaccgacatttcctcccacccccgcgcgcgccccgtcgtctttctcgaacctcccgcgcattcttgtcaccttgttgattcttcattcttgatttgctctccttttttttttggtgattttggtgtttcttggcctgctactgttggctgcggcgagcggcggtcacctgccgtgcgttccctgttttttgctcagtccttgggttctccggtcgtctgacaccgccagctagctgagttgttgggggtt

SEQ ID NO: 427108 - DNA, 134 bp, Oryza sativa
acacagttgaccgtgcccgccgcctgcaggggttcttgccaattccgcctcacgaccggagagcacacataggccttacagcaggcacgagccgccgctcgccctagccatcgcgctcctgctgttgttggccg

SEQ ID NO: 427109 - DNA, 540 bp, Oryza sativa
tgctgtttcgacgatattgctgacaatgccactataacgctgcatttccatggtggcgttgatttgcagttgtccaggaatgccacctttatggagatcacctccatgaatggcgaccaagaggagcgctatgtgtgccttatcgttgacaagacggtggatgggacagcggtactgggcttatcaccccaacttgaccacaacataggatttgatctggagaacaagcagatctcaatttatcgcaagatatgttagtttgtccccttattaattacattgttaattttcttctactagctaattagactcattgttactgtacttttctgcaagcaccattcatatctaatatatgcatgctgatgaaatgtaataatgactatgactctcgtagcctttatttttttattaatatcacatagcttgccaattcatgctgggcaagacatgcaggttgttacacgcatttgtgcatattgttctacacaaaccccattgatactggatgaattcgatttgtgtgggggattgagaaat

SEQ ID NO: 427110 - DNA, 371 bp, Oryza sativa
aggggggacagtatggtatagcctccaaacatatgccaattgtaacaatgacaacttacaactccattatgttcaattggtctctccagtcccaaaacaaatgccatttaagctaatggtacaagctgcaactttaacaatgtgctgtgtggtttggcttcatgcaagatcgaaaaccatggctgaatacctactatcatagaagaccatgggttctgcacactttgcttttcaagactgacagaagtcacatatgactcaaaaaaatgaagttccacagcagttaaaagtgcatatgctgaggcatttcagcttgaaattactgttgaagatttcctgacaaagtgaagggaataacagcacaaatttac

SEQ ID NO: 427111 - DNA, 307 bp, Oryza sativa
ttggtggtgaaggaggtgctgccggaggagaagaggaagcctgagccggccgcttcatcggctgggtttgatgatttgatcccagggtttggcgggaggatcccgatgcgtgccagggagactgttggaactaaagataagaatgtgtccatgtcaacgtctaagccagctagcatggcaagtgacccatttgatgttcttggtacaacttcaacctcaaagcatacatgttcagggatattcacggatcccttggatgaaccggtcaggcctgcaaaatctcaagggaaaaaaacatgataatact

SEQ ID NO: 427112 - DNA, 78 bp, Oryza sativa
tctttcttgtaccagacactgctcccataagcccaagatgcgcttagagagcaagatgttgaactacgtaaagcagtg

SEQ ID NO: 427113 - DNA, 233 bp, Oryza sativa
aaaaaaaacccccaactctttgggggggaaaaaaaaacaaagtttttatagcggcggttttcaaagacggggttttcaaaaaaaaaaaaaaaaaagcggccgtggaaaaaaaaaaatttgaccccggggtttcttgggggggggggggccccacaacaaaatttttgaaaaaagggggggggggaaaagttggcgacaacggggggggaaaagggaaaaaacatggggggggg

SEQ ID NO: 427114 - DNA, 458 bp, Oryza sativa
ctcttttttttttttggttgatgaacatcacggggtgccaagcataacttgtctttttttttttcgtctcaagtatctagttgccgaaaacgttcgatatcgcaaaaaactatggaccgcatttgcctaagccctttgaaggctcgaacccatgctttttcacaaacaatgtaagaacctataggctacagcaacaatcggggggccacaaccatggttaactgggtacttcaggaaaccaaaagttcacccataaatggagggaggttaagtgccagaatttcccttgaaagggacttagataactgtgctggtatcgaaactggaatccatgtatattcattctatactcaaccgtgagcttacaggtacacatctttaccaggcaccacttcacaggatcgggttggtcagattggaatttttacccagtatacattgaacgagttctttatgag

SEQ ID NO: 427115 - DNA, 327 bp, Oryza sativa
tgtatcgacaaaacgtactcagggagatgccaagggtttgctctttacattttctcaagatattaaaattcaagaaggagccacgttctcctggcctatttggttccatgctgcaactcctgggaacttttctctttatatatctctgtattatgaaatggagagcccaagtgagataacttatagaacattgcgcatgcactacaatattgaggtaatgacttgtgcttgtatttaaataatacatgatttgttgcaaatttggtggattaaacacctaaatttgttgttaagggttgtaagtgggttcttagcaaagttcaaggt

SEQ ID NO: 427116 - DNA, 74 bp, Oryza sativa
tcttcctctcatttgtctcgctaaatccggcccgcgcctcccgtcgcgtcacggtaggtggatagggggaggac

SEQ ID NO: 427117 - DNA, 377 bp, Oryza sativa
tcgcgggtggaccaggggctccaacgaaactatatcccctctcttcttctctctgcagctggtcctcccgtgaggcctaagccaggcaccaatcagaaggttactggatcaaaagccctgatcaatcctaggggacagatcctattaggctagaacagaccaatgagcaagccaatgagtgaactgtgtatattcctctgcactggatggtgaccgtagccgaataaaccacttccgctttggacacggcactgtccatgtatgcagcttatctgcctgggtcaaactaaaacccgatgttgctaacgattacttgggtgaaagtggcggcccattaaaatggacaaagggattactgactggcaactgaatcccaa

SEQ ID NO: 427118 - DNA, 536 bp, Oryza sativa
  unsure (1)..(536): unsure at all n locations
tcggacgcgtggggctattcattcggtctttacttaacatccctgaacttcaatttgcaggtttgacagctggtttcatattttaagataccactcagtcaaattcttgtggtaaatattgtcaatttgtcattgctcccatcatctactactgctactactacatcattagcttcttgtatctgaaattgaaacacatttttcaccttccacattgggatatctagaaaccaataggattttttattcataataatgtgttcttgaggggtgcatatctagagatgcaagtgaggactggagttccttagttttgagatgcatgaatattttctcgagaagtacagtaattttgcttttgcatttgtattttcttcatcattgagttctcccaggagctttttctacttgagatttagctcttgttctgaaactttgggatcaacagagcaatttaagtggaattgttctcgtgattttgatgccagnctaatctaaatacattttgttttctgagcagtcagatgcatgagcag

SEQ ID NO: 427119 - DNA, 460 bp, Oryza sativa
ggagaaaattgcatagtgcgagctaagcgcaattgggcgaacgccgcgagccgccaccaagccaaaccagagcactccgccgccgcgccatggcttccccgtccccgtcctcctcacctctccacccgcagcatcaacaccagcacccgcttcccccgcacccgcagccccagtaccaatccctctcccgccccacctctccccgcacgatccgtcgctgctcctctccctcgatgtcttccactccaagccctccgattcgcccaagccgctcgtcggctccgcccgctcccctctccgtgacctcctcttctcaaccaaccctaaccctagccccgattcccccgcctccgcgctgatcaccctaccgctcctccgcccctccggccgcccacaggggaagctccgcatccgcctcgcccttcgcgagcgctccccgtctcctcccgagccgcagtat

SEQ ID NO: 427120 - DNA, 332 bp, Oryza sativa
gctccgcagctagctgtgatggcagttgtcttggggcctgatcaagttgccacggaggcacggcggatagtcgacatggattgtcggccatgggtgaagaagtatcatcgcaccaccggagactgactgtcgaactgactacaaggttgacctgatcaccacactcacaaagtcgtgctctgttgcgcagaatatcaactatcaagggctacacgtactcctaagcaaaagatggactcggttaaagcgataccgagatggataggtggctgaccaacattgatgctctgtgacgctgagacaggagacactgagcttgattagggtgtcta

SEQ ID NO: 427121 - DNA, 250 bp, Oryza sativa
tttaatttcgtgaccagtgcgagctttgcggggagggggtacattgtggagacggcaccaacacataacctgatgacccagatgttggccattaagttcaacgttcaggtgccttggacgtctccacctgaagggcaagaaggaggcatcggtgctccgatcagggtagaaaaatgccaacgaggctggcgacctggacggcgcgcggatctacgccgtagcacttgtccgcaagcgcaccgagcacatg

SEQ ID NO: 427122 - DNA, 105 bp, Oryza sativa
cctctttttttttgggggtttttttaatttgtggggttaaaacccgcttaattttttcctcaaggccccggattaaactgaaattctattttcaattggaagcag

SEQ ID NO: 427123 - DNA, 322 bp, Oryza sativa
  unsure (1)..(322): unsure at all n locations
gttggtcgtggttggtgaggcgtcgagtcgtcggtgtccaagagattcgttggtgccttctctttgttttcgagtcttttagtttgttggaatcggattcccgtactgaacctgcttttactgcaagttaattgtttggttggttggttgccttcctgtcactccaccttgaccgcgaaggtattactgtactgcagcataaaggtccccaccttgaccaccatcttcaccatctatctatacattttattttcacanantaaaaacaaaaaaaaaaaaaaaaaaaactaaaaaaaaaaaataaaaatcaaaaactcaaaaa

SEQ ID NO: 427124 - DNA, 485 bp, Oryza sativa
tgcatccccaccagttgaaaccaaaccaaccaaccaccaccaccacccgccgccgccgccgccgaccgcctcgacccccatccccatggcgtcggcgtcgcggctgctgccgcccacgccacctccccactccgccgcatcccctcctgcccgccaccgccaccccaccctcgccgccccgctctcccgccgcccgatcaatccgccgcgcctccggtgccgcgccgcctccgccgccgccgccgcgggggcggcagccaccaccaccaccggcggcggcggaggcgcgctggtgctggaggggaagcggcgcgggcgcggtggccgtgcgggagttcgtgacgctcgacgagctccgcgccgccgtgcgcctccgcatccgcactttctacgagtacgccaccgactcctacggggccgaggatctcagaaaatctctggcagaccgggagtatgacgcattacaggatcgaatttctggggag

SEQ ID NO: 427125 - DNA, 552 bp, Oryza sativa
ttcttcttctccaaaaaaatactagtgtaatgtgtgatttgtgagagatgatggagctgtgtaggattcgaaccttccagaagagcctactgaggcccctcctcctcctccagcatgccccttgtagaaccctccaaaccctagggcggtccccttcgccctcggtgttccggcccccccgccgccgccccccgctcctcctcctcctcctccgctcctccttcgcctccgtctctccgggtccggcccccgggagcgggacaggcgaatgccccccgcccccgcccgcgcccttgccgcccgacgagctcgcctgcgacgacgactcctactaccacgagcacattctcgaggccacgcaggaggaccaaagtcgcctcgttccagtcaaggcctacttcccctgcaccagcatcaacctcaagagtctccagtcccagaattccttcaatgttatccctcccacttcgcgtgctaccaactacgtcggcctcaggtactacgatgtcatgggagacccagagggttttaaggctggcatcatagatgaaa

SEQ ID NO: 427126 - DNA, 289 bp, Oryza sativa
actagacagtatggtaggtaactaactacgggactctggaccgcacggggatggactactacaccacctaccaggatacagtcgaagggctaatgttcaccgacaagcagaccgagaggcgggagtggccaactacggctatcctaacggcagcaagggcggcaggatcaagggcatgcacgagtggctcaatcgagggggtcaagacagtcgagaccataaggtacctgccaccacatcaccgtggtacgatctgacgacgcagatcgagaacctgcttcgagccaag

SEQ ID NO: 427127 - DNA, 368 bp, Oryza sativa
tccttatcgaaaagaattacaaagcttagccgatgatgccaatggataggtcggtgtcgtgcgcctgagaggccaacagctttgatcggaggtcacctcctcgcggacctgcggtgctacagcgcaggtgccagaaggttgtacaagtccggcgctgacgcggaagaaggggctgtggcagggacgaacacgacggcgaaggtgtataagcgcgctacgagtgccaacgcgtggtcgtggccgggctgttctgggggtgtgcatcggagtgggagcaccaagacggtggtgtcctactccgccggatggagccgtcatgggcggtcgacgcccgggtataacctgcggagctacagcgcgtcttacgc

SEQ ID NO: 427128 - DNA, 228 bp, Oryza sativa
ttttgtttagttgcgagagagagtgtgtagagatcagcttgtttgttgagtgcctgcaggtcatgaagatgctggtgaagctgtgggaccacttggcggccggtcctaggccggagaccggcctcgagaagttgacgggggccgctacaacccgacctcttgtcatcaacaaagatggcgacggccaggcgagctgcgttgcgttctagcgctcgcaggctatgccga

SEQ ID NO: 427129 - DNA, 245 bp, Oryza sativa
tttttttttttttttttttttttttttttttttattttttttttttttttttttttttattatttttttttttttgttgttaataattatttaataaacattgctatcaaaagaaagaagaaagaaaaaaattaaaaaaaaaaagaagaaaaaaaaaaggggaaaaagaaaaaaacgaagaaaaagaaataaaggggaaaggacctggaaaaagaagaaaacacgcccaaaacgtgggggcactc

SEQ ID NO: 427130 - DNA, 536 bp, Oryza sativa
  unsure (1)..(536): unsure at all n locations
cgcgaatatcgccaccttcttcgagcagtggaaaggggacgaggcgataacgacaaaaacacctccaggcaagtgcctcttgagctgcaacaagaccatcggcgaagttaacgccatcctaacctgcggacacacctacatggaagacaggccccccatcatccaccagaacctcaccgtcttgttccatggcggccacccgccgtcactctgcaagagtggatgccttgacggctcgtcgtcagagggtgaggtcctcctcgccaccaagttcaactatatatggagcttgttggatctcatggaagctgtcctaccggaatatctttctgagactgggactgcgacgacgacggtaccatctcccgacgtcgctgcggcggcggccccggccccatgagcaactacatatgcatgcagtcccttcgattcgatcgaccacaccacaacagtgcagtgcatacacgcatatacttactatgtatctaagaaataataagattncacagagagcatttaagaatcaagtttcacta

SEQ ID NO: 427131 - DNA, 513 bp, Oryza sativa
gtacctgctccggcggctgaccatcatctcgatcccgttcgtgttcatcgccatcccgtcgatcgtgatcatcgtcgggatgctgtcgccgcacgcggcggagccccgcgaccagtcgtcgccggcggcgccggggcggaaccactcggtgtccatgctgagcaccatgaccggcggccagatgatcctcagctgccgcaccgccttctccggcaactgggagtacttccactacttcatcctcgacccctacaagccccagcgcgccttcttccagccaccgccgccgccgccgaactccgccgccgccgtgccgtacgccatcctctgcaagtgggggtacatgggcaacttcctcaggacgtcgtcgtcttaacagcagcgccgcctacgcgccgcggtgccgcgtcgaggaaggcgggtgccactacctgttcgaggacgggacgatgtttctcgtcaccgggcggcgcgccaccagggccgcgccggcgcggcggaaggagaagaggc

SEQ ID NO: 427132 - DNA, 534 bp, Oryza sativa
  unsure (1)..(534): unsure at all n locations
ttttcaaatgttagaaacttgaatgcttccttgcaaaaccctatggatggaataataaatactacactctacataagctatctttccaactacattgtggagattagcaacgaaaatgtgctaggcccagtcagtatacttgcaagtattggtggcctttatgccttcagtgtggcaatatttctttgccttatggctcaatgtgaagctaggataaaaaagcttcgagacgaggattccagaatgctaaaaatactgaggaaaagacgtgctcaacagaattgggataagggagngacagtttgtcatgtatacctggggccctagcaacttggatccaagtgatagaagtggcaaatggcctgaaagttcagtgatggattctctcatggatccttccaccgaaaagaaaaccgattagacgagcaacctcgaatggtaacaaacctaagagaaatcctgctgacgcgggagttattgacatcgaaagagttggngaaatgcaggagtcgagtagttctagacaggcttaat

SEQ ID NO: 427133 - DNA, 556 bp, Oryza sativa
  unsure (1)..(556): unsure at all n locations
gtttttatgaagttattttgagtggcattttccctcaaatgtggtgtgtatgaaatttactaaacaatttaacatttgagcttaaatgcatacacatcacatgaaattaatagcaaaacaagttgatttcttctcttcctagcttggttcaactaaagtaattaagagatgataaaatattatttggataaaagatggtgtaaattaaagtatctatatctgaaactagagaatagattttgatttttcttgataaatttattagagaagaatttgcagtacacataaaaacaagccaagaaagtaaaagtaattaaggagggaattaatgtaatgtgcacaattgctagaggaacatttgaaaagtaatccatatttatttgatgtcttttgcatggttgcatttccgattaatgttcatatatatgtgaggccttcgaagtaatttaccaattaaaatgataattngcatgcacattctgtattgtatatagtgatgacataaaatgattctgattggcattgctacaaaatgattttggcattgctgtatatg

SEQ ID NO: 427134 - DNA, 553 bp, Oryza sativa
tcagttttcattttgacaaatcctgggcaattgaatttttatgatggtggtgctctattttctgttccaaaatcagaagagggaaaagctcagattgaagcacaaaaatttccagtcacagttccaacaactgatcccaacataacagtcactaatctttattcactaaatggaagggaatctcaaagtattccacttaagaaatttgttgttaagcaaaatgccgcacctttcatgcaacggaacatgaaatggcctttgactggtggagttcctagtgaaatgtcaatgaacgagaattacaccgtggaaagaatatacattgcagggtatcaagatagttctgtgagaatatgggatgcaacctttccagttctgacgccaatgtttgtcttggatggaaaggtggttggtgtaaatatggatggagaaaattccgctgtatcatcacttgctttttgctcattaaacatgacattggcctgtggcacaacaagtggcctgtatctctaatgttattggaggttcgcatctataagcttcgtgacacact

SEQ ID NO: 427135 - DNA, 529 bp, Oryza sativa
  unsure (1)..(529): unsure at all n locations
aaactgcctgaaccactcacagataaaatcttcaatgaggatagcattagaagggactccatatccaaaggcgggcatttctccatagacaactcttgcaattctgttaaattattgaagactaacaccttttctagactgtgcaagttattattgccagtaatagacaaagaggaagttttagagtatttcaattcctccattagatttgatcccacatctgttattctgacatagtccaaagtttgagtccaagggataggtggaaatgacgagatttctatacacaaagatatttcaaactcttctaatttcggaaaccaagtcatattcacatctttcttccgagggtcaccaatattatcaataaatggcagctccaagagattagggcaatttttaatttccaaggtttgcaaatctgggaagaaagtattacagtcctgagtaatccattctgtcaactcctctaagtcgatcagtgttagcctttntaaactacaacaccatngctccagaacgaacttac

SEQ ID NO: 427136 - DNA, 567 bp, Oryza sativa
  unsure (1)..(567): unsure at all n locations
caacattaaagatgattttgtatcgacaaccatggaagagatatttaggttgttactcaatactaagaatggtaatgaattcatagtctatatggagcagtaatgatttcttaattatgtctgcaaatgagattatctgattcttccactttcaactgagttgtttcttctatgcagtgtatgggttgctagaaaaccaccaggttttgcctttattgactttgatgaccgcagggatgcagaagatgcaattcgtgatttagatggtaataagcgtagatatttgtctttgtagttcatgcaagatagtttcatgttatgcacttctctaatgagttatctatttcaacttctggcattacatagttttgccattaaaatggctattacattatttctttagtcaagtgagtccccatcaatttttatcttggttatagtataaataactgtctgaatcatgattcaagcaacttataaatttaatttggataaacaatagacacntgaattatagataaaatatgttgtgtccaaacatatagttttagcttaccatcatgaatg

SEQ ID NO: 427137 - DNA, 155 bp, Oryza sativa
  unsure (1)..(155): unsure at all n locations
tagatattcaccagtgggagacagaggaatagaaacaatatccactagactcaacgtggacggccaggacccggatggagctgcatgcgcatgtgtgtcngtttgactggatgaatgataccgaattgactgaccaattgggcatatggacttat

SEQ ID NO: 427138 - DNA, 540 bp, Oryza sativa
gaactgggaagtctggcgtggtttactgttgggtgtttagtgggtcgttccataatacagacatggtctggtgtggtgtttctgcagtttttttttttgacaccagtctgcagaaatttcagtgataaacagcaaggatttattagcgtgagatgtaatgatttttcagagtgcttcgtcggttataggatttttgatgtaataaaacaatggattatattatcaataagtaaatgtagtcttatgagcacaattaagagatgtcatcattgtagcttggatgtttaagatggcttgtgtctccacggcgctgtttggctgcccttgctgcagctgcaagccgggcaacagtgtttccttgcctgcactggctgcagcgcaggcgcagcaacgccaaccgaacaggcccatgtcttgtttaatgatccattgttatagacttgtatatatacctttagagtgtagactggtgaatcatttcttgtattactatatgttctgattaagtatctaaggtgctaattggagattcttaaacat

SEQ ID NO: 427139 - DNA, 64 bp, Oryza sativa
aaggaaatacaacatgttaagtaaatgagtacagattacagactggatacagggagaagcccag

SEQ ID NO: 427140 - DNA, 64 bp, Oryza sativa
ttgggcttctcactgtatccagtctgtaatctgtactcatttacttaatatgttgtatttcctt

SEQ ID NO: 427141 - DNA, 410 bp, Oryza sativa
gagatactcaccagtgggagacagaggatcgaaccaacaccaccgctcaacgtcgaccgcgcggaccggatgggcctggacgcgcatgtgtgccgcttgacggctgatgcataccacaccgactgaccacttgggcatacggacttatgtcagacaccggcagctcaccgtcgatgacacgatctagcggcacatgaacaattcagcgggctagcagagcgacaccgacttcgacatcgtcacggcttggcggtagacccaccactatactccggtgttggagactctctgtgctgaggggagatgaatctgacgatcgagttatggttattgttggcggctgttaaataccgcttctatgccatcaatacctgtatcatttatacagaaataatgaaacatttaacata

SEQ ID NO: 427142 - DNA, 76 bp, Oryza sativa
tcgtttgcactactaaagcagttactcagggcaggatcagattaacactgacgttggtttactcaatgcattgatt

SEQ ID NO: 427143 - DNA, 306 bp, Oryza sativa
gtcaatatccatgagagcaagaggcagagcaggtcggcagttgtgcagagggtaagctagccaaaacctacagctatgagaaaaatggtacagattcgcgcaattgcatcaagattcaatgattcaacgagtgcaggttctgtaaattttgtgcaaataagaggatcccatgtcttgattctttggaattagatggatggatccattcaatcggtatagtttaactgccacggaggtttctaggggctgattcgagcaatgtttgccctgtgtgtgtaattcagtactatgactgactactactga

SEQ ID NO: 427144 - DNA, 475 bp, Oryza sativa
ttaaacattaacattgtctatgtgctttagatactcaggtgccatctgcatcttttgcatcgaaatgaaatgaatgtttcccttttcaagtttgcactactacgtaagaattcctatttactgaattatttgtgtgcagcctgtgaatttgaatcaaaatggaagaacatctcccggaaaatggcacgcaaaaggagtgaacctagcatgacctcattgctgcagcatcgagatatggcattgagcagagtgaaaaacgatctggcctgtagccatctgaaaatcaaatggcactcaagttgaagttatttctctcatgttggtatgtatatgcatttaaaactatgcaaaaagtcacctgttactttgtaatttgtgagtgtgcttcagcataggcttttcaaattccatatttatgtttgaaaatcacttgtcttcaagctcaacactgttatctcgcaaaatgatgaagctg

SEQ ID NO: 427145 - DNA, 451 bp, Oryza sativa
ggctcgtccgcctgtacgtgcccggccgtactggccggacccacccacgcgttcgccttcgtctacgttggttttcccatcagcctctccaccgactgcaacaaggtcagttaaatcaatcctgcttggatcgatcgatcgagcttaacatgctagctcaatcggagttgatcagctagtaattaagcacgtacttgctacagcatatatgaacaaagtaattaaaataacagctgcggcagacatgcagcgctccactctctctctgtatcagctgtatactttatgttgcacgctccctgtgtgcatgttctatcttaattttcttcagtatgtacacgatctgtgcgtacgtgtaatcctatacgttttatgaattgcatgttgtccaaataaaaaaacatttattttattatttttattttttttaattattatataataataaaaa

SEQ ID NO: 427146 - DNA, 384 bp, Oryza sativa
tggatcggcgggcgaggcggcgtcgggcgggcgctgcgacgacgacgtgcgggcgagggctgaagcggcggcggcctcggcccgcacgcccgggcctacaatgcctccaagcataccatcgtgatgccgcctgcgagctcggcgcccatagcatccgcggccgtctcctccgccggtgaggcattcgatggggaaggagcggcttcgcgtgctgggccaccttgttcccggatgccggaaggtccccgggccgatgctggttgggccaactatgtgggcgggcttgagatgcagtcaagggcatggtcttattgacctcttgggcggcacgccggggacgcgtgcgacaggggacgccgcgttaacgggcagcgagcgggacat

SEQ ID NO: 427147 - DNA, 483 bp, Oryza sativa
tctctctcgtcgggaggagaaaggagggaagagggtggcaggaggaggaggaggccctcctcatccttcctccctcccctgcgctgagctgtgatgttttactgcaaccctgacgtcatcaatagatacaccccttccgtgcacagtaaccgttctaacaatttactcatgtctgtatataggccttacaaggctagttatttttacattatttatctatataagagccttgctccttcatttatgaaccttccaccaattattcctcatgagacttttttcatctatcctcagtattatttcagtcatacatgattaatacccttgtatggatgttgtcccagttattcttcccaccttttctatcaccgttttgctttttcaattaacttgttcaatgatcatttatatgattcccctgttaagcctgttatttactctttatcttctggatcatcattttgccttgtccacattaaactt

SEQ ID NO: 427148 - DNA, 262 bp, Oryza sativa
gttagacatactctatctcatagcatctgttcgtttactggcaatataccacgaaagatggcttctgacatcgttggacaccatcatatgtgaccaaagaggtagctgaggtaacacccggagtgtttcagggatgggtatagcagatctgaggatggggagaaggatgggaccaaactcaaggccagcatttagaagtaaactggtaacaacagaaacaagtacattcccaggaacaactggtggtactaagatcaggaag

SEQ ID NO: 427149 - DNA, 59 bp, Oryza sativa
tgttaaagggcacaatggaagaaaaaccttgggggtttattgcggacgaccaatgctga

SEQ ID NO: 427150 - DNA, 120 bp, Oryza sativa
tttttctcttggtagctagctagtggagatcgccggagaggagagagacgacgagagagagagagagggggcaagatggcgggagggttctctgtgtcggggtcccgggtggagtttgag

SEQ ID NO: 427151 - DNA, 361 bp, Oryza sativa
tttttgtttttttttttttttttttttttttttttttgtttttttttcgtttttttgttttttttttttgtgttggttgccgtgttcatgagcttgttttgcacgatgttgccgccggcgctgtcgccggcgatgaacagaaaaaaaacgtcgccgtgcaaagaagccagccagcgtgcgaaaaagccggccacaaaagcccggcccaggaatacgacgccggccgacggaagagggggcgccggcgcgaggtggatagcgaccagcaccccaacaacggggggggcaagagccagggggttgacacacctgggggacggggaggagtcggacaactcgcagaggaagccacctggggggg

SEQ ID NO: 427152 - DNA, 350 bp, Oryza sativa
caattcttcgctaaaccctagctacagcgcgagcgctgcgcgtgcatcctacttggctggatcagccatggcgtccaccgctggcggctgtaagcattcgcgttccgcctccgccatcgtcgcaggcgccgcgagcgggtaccatctcctcaagatcgacggctactcgcgcatcaagggcctacccaccggcgaggccctcaaatcttgcgccttcaccgtggggggatatcgctggcgcatccattgctaccccaacggcagcaaatcagattactcggatttcatatccctgtttcttcatctcgacgacggacaagtcaccaagcaggtgaaagcgcagtacctat

SEQ ID NO: 427153 - DNA, 339 bp, Oryza sativa
gggttatgggggtatgaatctattgaccatgaaaggttcaacagcttttcatcaggcaagattgaaaaaaaagggggaggggtggaaaattctagcagcagggggccaatttcttggtataaaagaaagggggcgcaaaaggggccctaaattgggccacaaaaaaatgggtctatgaacttggaacccccaacactgggtttacagcacaatcaggggatggatctagcacacattaacctcagggaacccgggccctctcaagagttatctatttgggggccaggtccccaaatgaaaagatgaaaaaggctcccattggtgaaaacgacccaccat

SEQ ID NO: 427154 - DNA, 272 bp, Oryza sativa
ggccggaacaattttattggtgataacacatcggcaaggaaaacacacaagcttattacgggggaaaaacccttaacaaaaagacacggccccaatagaaaggacatgtggacccaaacataccagaggtgctcaagacaaagataagagttggaagcggcgtggtagaaaaagaatacataacaaatgaaatcaagaaggagcataaaaacgcagcgaaaaacaaaccaagccaaccatcctcaacaacaacaacaccattgacaaaagtt

SEQ ID NO: 427155 - DNA, 328 bp, Oryza sativa
actaccccccccccccacccgccccgggcctgggaagtttttcgggcagggatggtaactgccggctccgcctccgcctccgtatttcccgccgtggagtttggcgccaaaacctcacgtctgggccccagtcccagacccagaccgagccccgtattctaattctcgaggacttccctcctcgtcttggacgccggtaggttccactcaagcctttacatttataatttcaagcgccacgggcagcaacattgttagcaacgccagcggtattaacctggaggaccccgtgctcgcgccgattgccgttccaaatatgaccggtact

SEQ ID NO: 427156 - DNA, 503 bp, Oryza sativa
ttcagatttggcaaacgatcaagccaaagctgctgagtttaccttttttggagaaatcggtgaacaattgattggcaggcctattcttaacctggttgcatctgttcatggagcacgagatatagtatcaccagagatcaaagcaatttttggcagacaatatgtcattagaaccagtgtgtcacgtggctcattgcaaagaaatcgggtatcctaccaggtggattcccttatgctaccccacccagatccaagccatgcaatttgtctacccagccatgatacttgcgtgggctcttctggacatggctcaacatcagctaatgcagttgaaccacatgccatcgttttgtcttctactcaatctatgccaccttctacgccgcttgtgcttccagatacaaaggacacaagggatagccatggtgatcagcatgaggcaacaccacctactccacaggtcatagctatagcacagctagataaaaaacataaatcttcta

SEQ ID NO: 427157 - DNA, 497 bp, Oryza sativa
ttctccaacacgctcacccatgcaacccaacgcccgccaaatgcgcggcggcggcggcggcggcggcggcgggcaggacgacttcttcgaccagatgctgtccacgctgccggcggtgtggtccgagctcggctccggcaagcccgcctgggacctcacggccggcgccgtaggaggaggaggaggagcctccgatgaccactccgccgcggcgttcgacgactccgcgctcctcgcctcccgcctccgccagcaccagatcgacggtggaggcgacaagcccatcatgctccaactcagcgacctccaccgtcatcacggcctcgccgccggcgatgacagcggcggcgctgccgggttccttcccctgtcgctgttcgctgaccggtcgcaggacgacatcgacgccgccttcaagtcccccaatggcgctagaggtgaccatgcgctgtacaatgggttcggtgccgccggaatgcatggcgccgtcgccatgc

SEQ ID NO: 427158 - DNA, 432 bp, Oryza sativa
tcgttcaattaggaacgaagaaacccagggagagtgaggatggcaaggacacgcgttctacttctcgatgtcctcatcgatgacgaggtggtgctttggggggcggtcgggcgcgcgctggccaagacggacaataagagcaacgacatcgttaatggtccactgctgacctgcaagaacaaagacgagcgcacgctgatagtgggaccgaggacgaggtcaagaccgtgcagtgcgacatcgacgacgagcccggcggaaacaccgggcgggtcatggtgcacctacgctccggcatgtacagggagaaagttatgattacggaaaccaagaagggcatcttaccgaggggaaacagcatgggccggacctcaatcaaccacgagggcgcttgatcctacaacgcctagtctgccgccttcaccgtgcacg

SEQ ID NO: 427159 - DNA, 455 bp, Oryza sativa
tctttcaaccttttgttgcaaagttcgcaagcttcagtatcggaaacttatctaggtatggatttaggtcttggtaagtttttaggtgttctgtgctgtacatattccagtttggtgggttgtcctgttaccagtttgtttcctttggtgctgcaatgtaggattccgtagcgagtttcggtactttagagccttttatcatccatcttcaatgtaggcaatggctttctatccaatttagaatcaaaatctaagctttactgtggaaccaagtttcctttaaagcacttcctgagttcctggtcctgtgtaaacagttcaagttgggtcctttaaattgagaaacccatactagaatgccatcatggaaaagcacccttgcatggtgaacagatatgcactaaatcaagcaaagtcaaagtattctgctctttttattcttttggagctgaatg

SEQ ID NO: 427160 - DNA, 450 bp, Oryza sativa
ttcggtcgccgtagcagccacgtctcctccaccacctcgtctccctctcgagagagacaccgcgcgtctcgtctcgtctcatggcgccgccgcctcgggctcgcttggtgcagatcgggacccgccgccgccgctgccggggccggatcccgccttgcaccaagtgaatcggagccggcgtagcgccctccttccgccgatccgccgccgatgctgcgctgcttggttgtttttattgtctctccttcgtttctgggtcggtatcgggacggggttagcgatgaatcggatcgaattgctgatcctcctcgtgttcgtgttcgtaggtgtggggcgtacgcgtttgtattagatttaatttttttttcagatctagatctggtgcctaattctcgattacttattctatctatgattcgtgtcggcgttatcaagttggaatttccccta

SEQ ID NO: 427161 - DNA, 601 bp, Oryza sativa
taagtcgcccggcctcccgccgcctctgctgtctcagtcccgagtcgcgagtcgtaacgccaccacgaggagccgaggaggaggaggaggaggaagaagaggtgtttgttggttgtgatgttgattggtggtttggtatgctttggttttcattttatttttttccttttttttctttttctttttttttttatttttttatagtggttcttttttctctttctttttattatttttttctttggtttttttttctatttattttttttttttttgttatttttttcttatttattttttctttacttgtttttatcttttctttttcttattcttattatttcttttttctttttttttatttttctttaattgtatattctcttcatttcttcttctttttactcatttttatttcttttccattctcttcttattgtattttctttgctcatacttattctcttttatttttttttcttattctttttatatcttttctttcatttttattcttattcttatttattattatttcttttgtcttttattttcattctatctctatttttcttttatttcttttttttcttctcaattt

SEQ ID NO: 427162 - DNA, 234 bp, Oryza sativa
ggaagccaatgatttttaataattaccaatggggtttttacattacatgtcacgaaatgacatgaacggccaatgaatagatagagccacacaacaaaacaagtgcggagccaccaaagggagagacacggcctttaaggggcgggggcgaccataaagcataaagggcgaccccaaaacttgaaagcagcacacaaagcagaaatgcacaaggatatacatgaaaacatacgg

SEQ ID NO: 427163 - DNA, 400 bp, Oryza sativa
  unsure (1)..(400): unsure at all n locations
tttttattgttcttgttccggactacaaccatcaggcaggtcactggttttggtttggtgtttccctttcaagagggcccggtgtaaatctcttcctgattagttaattagcaacttaacatgtccctatcattggttagttaattatcaactctgtccttttcctgcccctcttccccctctttctgggagagtttttcttttgtaaggtttccactttangtgtatgttatggtctttgtatttgtgatacaatcgttgctgctgttttgggaagaaaagtcttccaaaaacagaacaaagaaatgataagaaaacgtgtttcctttgttttcatcagacaggagactggcggaggctaagcagcatttgacacatgcatagataatgggatgaccct

SEQ ID NO: 427164 - DNA, 486 bp, Oryza sativa
ttcttaacccacccacccttcctcctcccttggcgagttgctggaacggcgggggggctatcctgccgcggcatcgcatccgctgcgtagctcggcggccggggggtggcgcgacttcttcctctttctcttttgctttcctggcttagctccgatcctgcgctgattcgatcatcctccgatttcggtggcttttttttttgcctggtgtttctgctcgaccatgctggcaggttcttcatctaagagggtgatgctgcttcagcaattggcagctagctaactctttagaccaaaagaagaattctgtggttatatgcaacagagaagcgcattcttgctttgatattcgccgttttaccgggtcggcagcgatcagggtgtggtgaccatggagcaagtggtcggagggaagtataagctcgggaggaagattgggagtgggtcatttggggagctatatctcggggttaaatacataatggg

SEQ ID NO: 427165 - DNA, 444 bp, Oryza sativa
aatatttttttttttttttttttttttttgttggtttttttttttttttggggggttttttttttttttttttttttttttttccctaaaaaaaaaaaaaaaccgcccaaaggggaaaaatttttaaaaccccccccaacccttaagttataaaaaaaaaaggggaaaagggtacaattttaaaaaaaaaaggggtggcccaaaggaaaaaaaaaacttgtttaccaccttaaaaattgggaattgggcaaaaaaaaaaaaattccttttaaaaaaatttttttcaaaaaacttttccaaaaaggcaggggcattttaaacccttgcaaaaaaatgggccctttattttttaacccttaagggaaaatcctccttgggaccccttaaaattttaaacgggtcccgggaatcaccccccaaatctgaaaactttgatgccccaaa

SEQ ID NO: 427166 - DNA, 164 bp, Oryza sativa
tcgtctcaggataaaattacagtgggggctcgtgagccttttgggccttctaaccatctcagacaaagtctattttagcccccttgcaatagatttatagatttacattttaggggggggggggtcttaatgggggctctaatgatttattaggggggtagggg

SEQ ID NO: 427167 - DNA, 442 bp, Oryza sativa
actactatgtggtaagctgtacgcctagagtaccgccccggcattcccgcctcgacccacccctccttcttatcccccgcgccaccctttttttctttaagtcttttttaattccagggcgtgtttttaaacacccggtgatggatcaccctgaactgaccaccgatcaggttctcaagagggatattccatgggaatcatacatggcaaataagctgatttccgggacatgccttcagcttttgcgaccatctgaccacaaaccacaaagccaacaagatcctttgcttgatcaggatgggccatcctatgttccagtgttcctgaatatcttccggaacatcttcaagtaagatactgattaatatgcgcttgccctgattgatgaaatccttgcagtcaatcctaaaccaacagcactcttctatgataactctctctc

SEQ ID NO: 427168 - DNA, 143 bp, Oryza sativa
tctcaaaactggcgttcttccagtagaaaggagaataaaattaacgtgtgagattgtggtttcctttgactatgctgtgacgccgcgagacactcatgtaagtgtaaccattcaataataaaatgaagcattcctgttattgt

SEQ ID NO: 427169 - DNA, 159 bp, Oryza sativa
  unsure (1)..(159): unsure at all n locations
ttataacatcagcaaccaattcctaccgaagcgagcatctataaatccagcaggtggttcaacaancctagctaggaagcatggccccttcacacttgatgctgatcctcctggaggcatatctgttcctcgcccgccccgaacacccgtatgaccatt

SEQ ID NO: 427170 - DNA, 501 bp, Oryza sativa
tggtgcttctcgtgcaattcaggttctttggatggtttaatattttttttattggttgtaatggacagttagcagtagcaccacgtttttaggcctcagggccaagttataaaacttgagggtgaatatttggaactaataaatacttgacgaacatatcttctcttctaagtctacatttatggcttccactgtccacatctatgtatttgtgaattatattatatgtatatcacaacagacagctgtactgattggtcactataatctgttgcatttattttactcaccaagcacaatcagtgtatgcctagttccttatagcagttcttactttttagtgccaaaattttgcactagaaatgtttaaatgtgtcatgttagtatagatgatctcagatcatatttaaaactagttttgtgattcacttgtgttctgaggaagcgaatataaaacaaaagaaaaagaatcttttgcttcttcatccactctttccattg

SEQ ID NO: 427171 - DNA, 462 bp, Oryza sativa
tttgcttgacgagctgagctgagctgagcggaggagctcccaccttctctgcctctgttgcaagggatctttcggagattttgctagttcatggcggagatttgctgccaggttgtggctggatcctcggccgaggggaagggcccggagtgcgacaccaggagccgagcgagcaggcggcggcggatggagatcccgcggctcagggtggtcgctgagcgtggggccgatgaggacacctccgggaagaggcggaggcttactggcggcacacgagaggcctctacggacgacgaggacacggaggtggagcccgctaggtacaggtttaccactgtgtgcggacgccggatggacatgcaggactccgtctccccctgcaccctgttcctacccggcaccacttcttcgaggtgttcgacggccacggctgctctcatgtggtgacctcgggcgggcagc

SEQ ID NO: 427172 - DNA, 281 bp, Oryza sativa
cgactccgcgccgcggcggccgtctcgtccgctctccacatcatccccgttccctcgcacaccacagcgcgcgcccgcccgccagccatcccgctgccgtgccgtctccatcttctatccctcctcctgctgctgctgctgctgctacttaccccgcgatttctcttcctcttattactcttcctctcggctctcgctcgctcgctccccgcgcgatttctccacgccgcacgccgctcgcgagttagggatcgatctcgtcgggggcgggcgggagaggg

SEQ ID NO: 427173 - DNA, 349 bp, Oryza sativa
aacgggcatcccttgacagaaaggtcatccccataaaaagggcttaactagcacaaaaaaaggtttaactgggaagaacaagcccctaaaaagggcttaactagcattacatcataccaatttgggggggcctaccaaaattggcagacaaaaaggggaaggtcatccatcacactacttgggaacctgggtcttcaaaacaaaaacctcgtcattcttgttgaaagggaaaatacaaacatcacccttattggaaactttgacattaaacaagtgattccatccgggggggggcaaaaaagccctattgttttgggactttttcaacccaaaatggaataaccgggtt

SEQ ID NO: 427174 - DNA, 366 bp, Oryza sativa
  unsure (1)..(366): unsure at all n locations
tccgaagctttggcgcacacaatagggagtagccatgccgtgggcggctgaactagcgcaggggatggagggatggcgctcanatccatacatccctccatccgctcgtgggccccttctaggcgataggcgttgggcggcggcggtcggcggcagcaggcaccggtggtccgccgccgcgggcggctatggtccgtagtgggcagcggtggaacggcgcgctccgagccgccccctgctgacacggagctgcagcccgttgcgcggctccacgccatagagctgcgggaccggcacctggctctcccacggggtgcagtgcttgaaacaggacaacgctggaatcacccactgatatcacttcaa

SEQ ID NO: 427175 - DNA, 533 bp, Oryza sativa
  unsure (1)..(533): unsure at all n locations
ttttccccttctcctcctcgcggcgctcnctgancatttttgcggagggggaggcctattaaggacagcgccagcaaccctcccgggggaggaggcggcggaggtggaggggaggaggantantttttcttttttgttgtttggtaggctgttgtttgtgtttgttattcttgtttctgttgttgtctttttttttttttgtttttttcatttttttcgctttttttttctttatttttttttgtttttgtttttattttttttcttttttttcttttggttcttttttttttttttgtctttctttttttttgggttttttttagtttttttttttgtaattctttttaatttttttttttttattttttttttctttttttctttttctctttttgtttattttattttttttcttttttctttctacttcttttatcatttttttttgttttcctttcttttttttttgttgggatttcattttttttttctatttattaatgaatttttttgtttatttttttactttt

SEQ ID NO: 427176 - DNA, 450 bp, Oryza sativa
tttttatttctaggcattgattgaatgcgatgagaacttttttagacttaaggggggatgtataatctgttgggaggataatagattcacacactcctaacattaataaggatttgttattggacctaaaaagaacaatatacaaattaacaattgttccatacattacattaagcgttgtcagcgtaagacaaacacaaccgaagattgaatctattatgaatgattttattcaattggaaccccaattcaatctatttgaagcatatactatggtggaaggtacccttgatggattcacatttgattctgactaggaaggtgacaagttttctgagccgcatgcttctcaaaacgatcaaaataatgaagatggagatcaaactatggcataaaccaaaagaaaagctgagaaaccggcggcgaagggacaaaagaaggcgaatgttg

SEQ ID NO: 427177 - DNA, 492 bp, Oryza sativa
ttgttgtttacttgcagatgcctagtatagggggaatttcttaaggatgtgcggtgtgcatcacatggatataagttattcttaacaccagaattaagtttgtttactgttttctattccaaaacagcaaagaaaatcaagtaagtgtttccaagaaagtggtgaaccaatgattaactagttatctactatgtttttaagtggtaataatatgtcaatgcaccatgcatgagatagttgcttgattccttgcctcatttgcccaaagcatctcatattttcttttgatgtctgtttacctttatgaaactgtatcccttgctagaatgtcataatgtatgaacaaaaatttgtgccaattgacatattttttgtacttgtttattccaaattcccaatgatcaggtgggtttggcagttatttatttgggatgagtgaaacaatagccaagcaagcaacagaggctaaagatgctcaaaatttcaaggatc

SEQ ID NO: 427178 - DNA, 499 bp, Oryza sativa
tattcataaatgtcgtaaagtaccctgctagcagtgacaacactacaggggataccataaccgagtgtgaagatggatccaccaagattgagcccaaagaatatggtggcaatgtcagctgcactgagactggagtggaatgttctgtgttgaatcagagtacagatgttcctgatccttctatttgtgaggtccaggatcccgtagagcttgacacagattctattcccaagggtcgggaccacaaaaatcttgacacacgtggcgagtgtgatgcacctacagcaggagacgagaatactgatcaaggagtggaagctgatcagacagattctacggatgctcaagatgatgctcgtggaactatagagagagggcatgcagatgcagatccggcgttcttggaaacttcttgttccacagcacctggagatggagcggacaaatctggtagggagaacgagcaacaaggtggggctggtgtgagtgaaagcaacac

SEQ ID NO: 427179 - DNA, 536 bp, Oryza sativa
  unsure (1)..(536): unsure at all n locations
tttatgctatacaacttacattatattatcaacatcgggtggttaacgcgatggtccccggccgaagctcatgcatcagcgttcgttcttgctncgccaccggctcgtgagtgctgcgtggtcgtttcgtgcagggcggcgcacgacgcacgcaagtgccgccacccgccaccaccggctgcgaacacgcagggccccggaggagccatatgagatctcgcgaactacacgaggtgcatcactgcgatattgctcggacgccccaatgccgagcagctcctggtgcccggagatctccgagctacccaacaagcggaaccgccagatgcgtgcgcgccgatctcaggggcaccggactatcaatcggggtaaccgcgagcaataatgtcacaggcagcatcctcaagatctgcaacaaagcttccctggacctcttgactgtgaactgcagcagagcctagatgatcgtgatctggatctagctaataaagcatgcatgcactacgcgcgtactttacccttaaatcgtaaatata

SEQ ID NO: 427180 - DNA, 501 bp, Oryza sativa
tcggcagtttagccatatcgccgccgccgccggggccatgctcgcctacctgctgcacgcccccgccgccgccgccgccgtggtgcccagcccgctctccctccgctcgccgccgaagacgcccttcctcccgacgtcccccatccgcgtgcccacgccgaggcggcgccccgccgcgttctcctccgccgccgccgcggtggtgcccatcgcggcgtcgctgctcgagggccccgtgctggtctgggccgggaggctctgcctctactacgcgctcctccacatcggcctcgccggctccccgcgcaaccccttcctcgcccacgagattggcgatgatggcgccggggacagcgacctagggttctcgaagtgggcggacaagctgcgcggcggcgcgccaggagaaaacgaagcccaggataagaggaagctagttagcaaatggaaaccaacaactaaaggcacgctgaagaggacttaccgagttcgttcagtaga

SEQ ID NO: 427181 - DNA, 462 bp, Oryza sativa
tcttcagcttaagcaggtctatcgggataaggtgtttggaaaatatagcgagaagatggctgagtttttacagagctcggttggcatcattcataagaaccatgctgagagtataacttctttcattaaggagagtgttgatgaggagctgaaggatgcagactcatctaaggcttctcagaagaagaggctcaccttttgcgtggaagggaatattagtgttgggaagtctacctttctccaaagaatagctaatgagaccatcgaactgcgtgatcttgtagaaatagtgcctgaacctgttgctaagtggcaggatattggccctgaccacttcaatatattggatgctttctatgctgagccacataggtatgcctatacctttcaaaattatgtgtttgtgacaagggtcatgcacgaaagggaatcttcaggtggaataaaacctctcacactgat

SEQ ID NO: 427182 - DNA, 218 bp, Oryza sativa
ttgaatgctctacctgcgtctccccaccaaaggggggttttaattctcctccgcagccgttactaccggcaccaacgccgacgaggagaggaggagatgggaaggcgagagggaggtaggtaggtaggcacatcagacattttctcagatgttccattgagtgaggacagcttgtacagggcgaggttttcggtgcaggccgcccgttactaggtgat

SEQ ID NO: 427183 - DNA, 195 bp, Oryza sativa
tattataaaaaaaaaaaaaaaaaaaaaaaaagaaattaaaatgaaaaaaaagatacatggatccgacccaccttctaaaaggaacccttgtttacaaccgacttcttgggagggattaaattttgtgtggggtgtcctggggtgaataaattgcccggcgtttaacaccacggagacggggaaaacttgggggag

SEQ ID NO: 427184 - DNA, 478 bp, Oryza sativa
tcgtacacctgcacctccgccctccgccggaattccgctcctgcacctccgccatcagtgctccgctccgtatcagccgccgcgccgtcctctgcatcgcatgtctgccaccgatccccgccgccggctcgccctccacgatcctccgcctccccgctgcacgaggtcctcccgtcgccaggtcgtcgctgccgttctgctccaccgatccccgccgcacgaggtgctcccgtcgctaggtagccaccgcgccgtcctctgcatcgcctgtctccaccaatcccctctgcatcgcaggggtgagctgcagctatggagttcctcgccggtgggggagcagcaggtgaatcccgtgagagagtacaatgaacgcggggtgctcggcgaaatgtcccgtccggctcctcacctgcaatgcatgtgttctggagagtggttatggattctggatcttagaccccctcaacgacttggatca

SEQ ID NO: 427185 - DNA, 261 bp, Oryza sativa
cacggtaccggcccggactgactggctggacccacccacgcgtgcttttgccccatttttacctcactaccggggcgcttgaaaaacccaaccgtgttgtgacccttcgccgccggcaagcgccaaggagggtgcccgccagggaggggagaggagaggagacggcggcttggcgtcgggaagggagggatggcgatggcgccctcaccgccggtgtggaccttacataaagccgcgtagagcctcttttgctcggagacg

SEQ ID NO: 427186 - DNA, 254 bp, Oryza sativa
ccacgcgttcttttagctaagctagcacgcacccacggggaggttttacacctcgagctcgctggccccggcagcgatggtggccagagacctactcctcctgggtgccaccgtcacgtccacccatgcggcgcgcctcctcgacgaacaactcagcaccggcgccatcccggcgatccccgggggccccggagagacggaggaaggccccgggatcccggtgaccctccgcctgccccgagagccggtggttg

SEQ ID NO: 427187 - DNA, 401 bp, Oryza sativa
ttaagttcccataggcagcaacgcccatcctaagaaggagcaaagcaaatgttacaagttcccttttttgtggcttgagaaacagcaggccagcagcaacattttggtgattttcaccgcagattagtagcaatcataggctcaagtaagatttttggtgacctttactgctgattagcaccattcatagactcaagtaagttcttttttggtggtttacttgagcatcggtatttttgagaagcagcaacaataggcatagatcagatcactatcatgtgtagttctgagattgtcactccaactttcttgtcggctctatcatgagccatgaagtattttcttcctaacaaatatgttctctaaatacaagtattcaacttagttctatttaactcttg

SEQ ID NO: 427188 - DNA, 453 bp, Oryza sativa
tcttttggagtttatcattggggtaagtttcaataggttagtgtgctttgcgaattcacaggccctatattgtggtatgaactaagtacgcgatgatttctggcacgcattgggggcttaccataagataatgccgtgaattcgtaaagcgttcaaacccaccgaagtgttgtgtaaaggtaaatatttgtaagtgtttgtgcttgcgcgccagtcccatgcctgcaatctgagcttgcgcgttactcccgcattgccgacgctcaaaggctgtgatgggagggcggccactagcagtagccgatagaggatgaagtgcgtagagcaggggactctccggtgatagatgacccatactcagattatgaatcacctattgaggagcaaagggattacgagcggatggcctggaccaagctttgactagagatggaagaacaagagagggagcac

SEQ ID NO: 427189 - DNA, 505 bp, Oryza sativa
tcttcaaaatgagtggtgataggagaactagctaactaggatcatcttcttcattatacagttccaaagatgatcaccacctacatggcgatctagagtctagacacaccatttcatgtacaaacaaagctgggatccatggctgaactagtagggtacgcctccagcgcgaggggactgatcaagatgatcatggccgccgtgcagacggcgaagcggaacaagaagcagtgccgggagctggaggagcgcgtcaggatggtctccgccgtgctgagccgccaccgctgccatgagctgcagccgagcacgacggagacgacgatggcggcgcggctgccgccgggcgcgagggaggcggtggacgggctggacggcgtgctccgggaggcgcacgagcttgccgtcgcgttcagccagagcggcggcggcggcaagaagacgatgcggcggcgcctcgtctgctgggcgcgggcggtggtcggcgcccggcgggacgccgaga

SEQ ID NO: 427190 - DNA, 392 bp, Oryza sativa
cgtcttgtcgaaagtgaggcacacgtgcacggcgggggtgtttgccgaggctgcgacggtgccgcccctacaccttatttaccgaaacctaatagactactggcgagtccacctaccacgtgtacaccaggcgagtgaacggatgggcccggcctattcttcagatgacatcgatgctcccgagagctacctacaaagagcatcagacttcaactctatgacataaatctatctagtatggaagaatatacgaaatgtctacactctggttgatatgattaggacgaactgtggtctttggagatacattgagtggccgctgattgaaaccgcaatggaagatgacgactgggttgttatcaggtgatcctatagaacggtgttttatacgg

SEQ ID NO: 427191 - DNA, 309 bp, Oryza sativa
tgttttggaaaagccaataacagcagaggagatgactttacgacaacagatagtactgcaagctcagcagatgggtacgcgaacgattgaggatgccaaaacctcaccatctttggccagatgatctctgtccttgaaggagtcatatagaaggcaggagcaaagaactgacactaccaactcaaacacctggtggatgtgttacactgaggggcaacagctgcaaaaggtggaagtagagctataagtgaaggatgtctagggcacgccacatgacacgttagcatccaagaagtggatttagaattc

SEQ ID NO: 427192 - DNA, 294 bp, Oryza sativa
atgcgttcttttccaactgacacacaacccctacgcaaggattgaaccttctggaaccgacgtttccttgaaccgatcgacggcaccgccgacggcctgatcggaatcgcaagggtttccggattgccgctcccatgatttatatggtttacgaatgcgccgtgaacgaccaggagagcttggttaacccggacatagcatctgctgctctgccatacgcattagccggggagattgaggtaacatgacgtgtcgcgtacggccctgcagatgtggcgatagaagaaggggccg

SEQ ID NO: 427193 - DNA, 400 bp, Oryza sativa
cgctgcatacatctatccatccacggagagtgtagcgccacacgccagtttactactcaatgctaatctgatcattgccggatgagaggatttgctgtacgactgggttgcatcgcattagttcgatacgtcgcatgtaaagaccataactagctctgatttgacggacaggacacgaatgctgaggatgatgattgggtgcagcacgccgatgttctgaggtcccctcttggtgcatgggtagcggtcagcccaccaccgtctgcgaagacaggtgcgaccaaactagcatggcgtttattgggcgtcgcggagtcaggcgggcgcctgcaaagtcgaagcctacgccaacttggctagtgccaagccaaaaaattcctgctccgtccaagatcctttg

SEQ ID NO: 427194 - DNA, 496 bp, Oryza sativa
tttactgacctatgttgagaagaattgtgccccagcagtttacactccagaactaaaatatgtgtgcattgctggaaggtacattcaaggtgctcctttaactgggcacaccatcgctactacagatgatattctcgctgtggatactccatcagatatagctgaagcagtcatggtcagtaccaacgacaaatctactcaatcaggcccaaccttgagagcccgcttcattggacaaggctacaagcaggtctgtggccgtgctgatgtgtggggagacggcgtcgttcccgaggtgtcggcgcatctagaaggcgcactgaacataagcttcgacggcgtgtaccactctcctgtaggttctgacgatgagcagaggccgtggtatggttcaccggcaatcctcaagcagtgggtacatcatctcctcagttgaacggttgatggctttgatgcagagaagctgacgatctgaaagtttgtagacagaaatgta

SEQ ID NO: 427195 - DNA, 489 bp, Oryza sativa
ttgaatcttgcaataggacggtttcagaatgcattggcatacatcgacaaggataatggtgctcatggatccaaggcggggttccctatatctggattttacagtgatatgaggaaaatgcagaacatgaatggtttagaggggcagttattgttgggacctatcactaatgatttacaaccaatggaaaaatgcaattctgttcaatctcctaaagtggcaaattttactgcccttcacaatgtagataatgagagcatgaaccatgtttcaacagcaactggagcaaccacatcagtcacaacagtggacactttaccttcaaccatcagaccattgagcagctactccctcttggatggatctcttgatgatggattaccatcacctgcaagtaatgtatcattcaggcctcagataaccaacaattcttcagtaagcaatggtacaatgactgacatctcaaatgggtgtctcacgagcatcaat

SEQ ID NO: 427196 - DNA, 453 bp, Oryza sativa
  unsure (1)..(453): unsure at all n locations
ttacctcgcacttataaatgaggtcgcgatcacaccagccaaaacggtagatcaattcgtcgaacatctcgcgcgcgctccagtgacggcgagagcgaagcacgccggagttgggagagagagaaggcgaagtgtgatgggggaggcagcggccgtgtccggcgacgctggcgcgcgcgcgcgcgtgcgcgtgctcgccgtgtcccgcgtcgcgccgtcgccggcgccggtggagcgggagcgcgtcgggctgtccttcttcgacacgccgtgggtcgtgctcccgccgatccagcgcgtgttcctgtacgagacggcggcggcggcggacggcggcggtgggatgggtnncgcggcggcggncgagaggctcaagggctcgctcgccgccacgctggcgttgtacctgcccctggcagggaagctggtctacgtggaggagaccgaggaccg

SEQ ID NO: 427197 - DNA, 204 bp, Oryza sativa
gggggtatcataaaacttttggggggttatttaattttacttaagtcctttcataatcaaaaacaacacggagggtgcatcgccccccacccccgaacaaacaaaaaaacaccaaaaccccccacggccaacataccaatcccagccaacaccctcgtggacaaaaacaaaaccccatatcatcaacctaaaaaagggcccccc

SEQ ID NO: 427198 - DNA, 258 bp, Oryza sativa
tctactagttctagatgggatgggccgaagaagtcgctgatagcaacgtaccgtttgcatatagctattacgcttttgtcgatggcgaatcgtgggtcgtgcccaggcccgcggaccatatcgagattcacatgtgatgatccatatgcgtgaggaataccaccatattgccacacgatatatctcgcacttcgatggtctcataagtacttatctgtaatgataatgtatttatagcagaggatgtgaacccgatcc

SEQ ID NO: 427199 - DNA, 487 bp, Oryza sativa
aaaaaagcactatttctttcttcgagacattatcaccatgtcaacatagcatgacaactaacagtcacaatagaatgaatagctactacccactatgattaagacctaagttccagatcaaaattctcaataccataaatcacgattaccaggtgctaagaaaagataagaaacatggacgcaaaattgactcagtgttacaactgtagcacacaagtagcaaaaaaataatagaaaggctatttagcagaagagatctgcaatccttgggttcgcaagtaccggcatagattagtttgctgcagcagtctctttggtagcatcagacccttcttcaaattttctcgcagcctcagccgtgttaagcttatcagacccatcttcggattctccaacagcctgaactgcatcaggcttcttccaagctccctcgacatgactctctggcagtggacggctcccattgtcctctcctctaacaggggaa

SEQ ID NO: 427200 - DNA, 405 bp, Oryza sativa
tctataggctaccatgtacaggctcactgatggggtgcatgaaaggtaccatggatgagtcaacgctgatacacagctatttgctttcagcgatattatgtgctcttcacggactatctattgataactacaccatatcctactttcctgggggatgcagagcatcgaaacttatgtgctcgagggtattgtcataactaacactctgttttggacgaatacctgagtaggatgacaactacttgatcatatattcttgattctttttgcagtatttgtgactgtcgcactgaccaactatagagagactgtgacaccaatgctactaatgcttgctgttgattagacttaaaacaatacagctagaaaaggtatggagccctcatggatctataggtcatatat

SEQ ID NO: 427201 - DNA, 480 bp, Oryza sativa
ttctccggcggcgaggatctggctttgatggttgcttgacaaggatgaaatggcctcccgttcaaagttatctggtattcagaggcaggtattggcattgtacagaggattcctgcggacagcaaggctcaagtctccagaggagcgccacagaattgagtctgttgtctcagcagagttccgtgagaatgcaagaaacattgatcggaagaactttgtgtacattgaatacttgctgagaagagggaagaaacagcttgagcagctcaaggaccctgatattactggactatcaacccttgaaattaataagcaactttctggagttcgttcatttggctatgtgaattctagatggatttccttggcacctaattttattatgaatcagacatatgattcatgtatggaaaatttttgatgacatcaagagtaatagagccagagttcgctgtgtgggcgtgcatgtgcctgagaatg

SEQ ID NO: 427202 - DNA, 306 bp, Oryza sativa
  unsure (1)..(306): unsure at all n locations
ttgtcatcccgcctccgcatcacccgccgccgccgccgcctcctgctcgtggtcgcggctgcgttgccggtgctgcaggaggtgcttcgggggggagatctcggtggggtttgctgcttgctgcttgaggtggtggcagttgaggaggaggaggaggttgctgtggttggcgaggtgggagtggcacttgnctcaccttgaaacagaggactgaatttactaccgacgtgaccgcaggtactagagggaccaccgatgttgatggcgatgatgatatccagccaccgaccacggaatacgatcatc

SEQ ID NO: 427203 - DNA, 483 bp, Oryza sativa
ttcatatccgcaacgcacgcacgacagccagagagagagagagagtcagaccgccgacacccgacgacatggccgtcgcctccgcgtgggccaaacccggctcgtgggccctcgccgccgaggagcaggacgacctgcccccgccgccgccgcccgttcccgccgccgacttcccctccctcgccaccgccgccaccaccaaggtccccaagaagaagaagccgcagcccgtcccgctcggcgagttcaacagcaccaagttcgtcgcccccgcctaccgcgggcccacccaagacgacctcctcagcctccccacaggcccccgcgagcgcaccgccgaggagctcgccaacgccacgcgcggcttcggggctcgctggggcggcgccggcgccggtggcccccgcggcgacgacgagccccgccgcggcggatctggcccccaggacttcggcccgtcgcgcgccgacgaggccgatgact

SEQ ID NO: 427204 - DNA, 509 bp, Oryza sativa
ttcgaatggggttgatacagcagcaaagagcagcaggtatttacccccagactagcatggtcggaatgcctgggagcagttctccgattcttcctggttctgccaatttgtccatgatgaatcagctaaacagaagcaacattaaccctttgcagcgggccatgatgggtccaccaaagatgccaggcagtaattacccgttgactccgcaacagcaaatgcaactccagcaacagttccaacagaacccgctgcagcagcagcaactgcagcaactccaacaacagcagcagcaacaacaacaacagcaaatccagcagcagcagcagcagcaacagcaacagcagcagcagcagcagcaaattcagcagcagcaacaacaaatgggctcttcgttacagcaggcggcacaggtgggctcacctgctggttcgcagcagtcattggtgatgtcgcagcatcagcaaataagcccacagcaaatggccgcgatgagtccacagctgagc

SEQ ID NO: 427205 - DNA, 245 bp, Oryza sativa
tctgatccatatgcgactcacatcgaaatgtgaggaatcttatggaatcggctttagcggggtagctaactgtacatgtaaaatgactaggtgtgttgctgcaaggctcatctcagtgcttagctaccctttttatatgcaagcaaagcagatcctcgcacaaaaaaaaaaaaaacaaacaaaaaaaaaaataaaaaaacaaacaaataaaaaagaaaactataaaaaaaaaaataaaaaaacat

SEQ ID NO: 427206 - DNA, 344 bp, Oryza sativa
aggaaaactttccaaccgtaattgaaactttcaactcaaaatttaaaaagttgcccctcgacttttgaaaacttcaggctcacacaggagccggcaaatttgcgtgcagcaaaggaatcaacccttgcccttggttccctaggaagacttttaccaattggttattgcagggtgattctgcttccaggtaccaaactttgggggttcacattttcaccatctccggtaaaaaaatggggctcaaaacaaaagctattggaatccgtttaacgactagatttattccgtaaccattaactaggggcttaaaatcccgggatgggggaagctgccttgaaattctt

SEQ ID NO: 427207 - DNA, 327 bp, Oryza sativa
tctttatcgcgagcggtcgccctaccaaggttcatataatacaatttataggttgaaccaactctcaaaaaacacaaaagattggacgccgggtattttatacagcattatggactggtcaccggactatacgtcctaacttataacctgctttcagtagaacagataatgattgaatacccaagttgaacagagcagataacaaggggattactaagtttgaactggcggcttgcacattgcactctgatcctccactagaaactggtgcattggacttggaatgtccgggacaaaaaaatccacacattacattgtgtttctcct

SEQ ID NO: 427208 - DNA, 74 bp, Oryza sativa
tcctttcgatgcatcagtcagtatttcaggtcagtgatggttacaagcctctcgcaagatgctaattgagcgtt

SEQ ID NO: 427209 - DNA, 396 bp, Oryza sativa
ccggcagcgggccgtgactgaattggcgtcgacccacgcctccttcgtgtggagggagcatagagacacgactggcgggcatggtgattactaggtgcgccagacactgactccttcattcagaccgagtcgacgacggcggtggagctcgccggagtgtactactgctcgaccaagagcgaggcgccgagtgagacagaggtgcgcctagacccgcgcccgcaattctcgagccttgagacgccaccaaggcacaacaagaaggacgtactcaggtcctgagaggacacgccggataagaaggaagcaagaaaccaggagcacttcttcaactacatagctgaaaagactgtgactacacagattgagagatacaaccatgaagcatatggtgag

SEQ ID NO: 427210 - DNA, 443 bp, Oryza sativa
tccttctccgtaaccaccgcctcctcccatggccatcgcgtgcttgtccctcccattcctcgccgccaccgccgccgccgagccgaaaccctagggcggcagcgtagggttcccctccccccccctcctccgccccgatgacgccggtgcaggcgggggcggcgcccgcgtcgccgtcggcggcggcggcgctcgggttcctactcccgacctgctgggagatcgaggtcacctgcgccgccgtgatgatcctcgtcgcgctctacgccgcgtacgagctgctcgccccgcgccccgcgtcggtggctgggggatcctccgccgccggggacgacctcctcctcgtgcgggacctcgacggcgccgacaagtacaagggtggctcgagtgggccctcggcgtacgtggtgaagctagagatgttggctgcgaagaatttgatt

SEQ ID NO: 427211 - DNA, 314 bp, Oryza sativa
gccggcaccggccgggactgactggctggacccacccacgctttcgtatgggacagaggagagactctcatgggggggtatcctaaagcataccatgcgaccccgcaccccaaaatgaagtcctcgcccgctgcttgtgcatgtcagaatacagcgagcataggatgtatcaggcgatccgctgttcacactgaataggcattcgagcaggtccatcccttcctccatagacacactttatcaggaatcttacgagaccctttcaataaaaggtcgtaggttaaaccggaaaacgagccctggaccgaatcagg

SEQ ID NO: 427212 - DNA, 361 bp, Oryza sativa
aaagaaccccgcctagttcaggttgggagttagaaggaagcccctcacacctacagacacctaaccgtctattacactacaccgtcgatggatacatcgacatgggtctactgctgagcactatctgaaacgggagacacacccgaggacgattgtgcacacagcctcaacaccaaccatttcaaccaatagggggcctgcagagccaccaaccagactgccaactcaagctgcaggtgccttgccgtccttgttgatggacgcctaccggacggtctggggcttggacctcggcttcggagactggaagggcttggccaccacactcttttacggcgccttgcactgggtgccagcgctg

SEQ ID NO: 427213 - DNA, 380 bp, Oryza sativa
cactatgtgaaagctggtccccctgcaggatagccgcgccggaagtatactgccggcgaccacacgcgtcctctcggacccatatataccacccatcagagaggggcggtatgtccagacaggactgtttgcaaaggagccacatctggcatggacaagcccggctccccgctggcaagcaccgcgtcagcctccaagaagcacaaggcagacgccctccgacgacgccgggggctcctcccacccgccttatttccagatgatcaaggacgcgatcacggtgcttaacgagaggaccgggatccagcgctcactccatcaccaagtacatggtaggacaagcacggcaccggcgttggcggccaactacaagaagatgc

SEQ ID NO: 427214 - DNA, 489 bp, Oryza sativa
gttcaatacatgcatacgtttatatatagtgggagtgtagtagctactgatgagtcccgtttcatttgagctagtagctagctagcttatacacacacacacagagtatagggatcatagctagctagctaggcatgggtgatcatcatgatgaggaggagaagggaaaagacaataaagcagcagcatcatcatcttggcaagcccggcgccatttgatcgtgctggcagctctggggggaaccgtggccgcgaccgccgtggtgataaccgtgtccgtcatcctccggccggtgcacgtcgagttcgcggtggcgagagcgacgcagcagaagatcgccatcggcagcaacgacacgggcatctacctgaacctgaccgtgaccgccaggagcaccaccagccgcgccatggtgcagtaccggaaggtgttcgtggacctggtggcgaagacgatacagaaagacaagatgcagcttgagatggacc

SEQ ID NO: 427215 - DNA, 463 bp, Oryza sativa
tttaccatttaatactggattatcacgaaatgaaggcacaattcctggcattggggtcgcaatgcctcttgatggatctgatcatggagagcagaggccatcgatacctggccttccacctgggcaacctcccttgcctccaggtccccatccatctcttctagccggtgggcagcaacagcaatatcaacagatgcagcagcagcatcctcaatttcctcgaccaccacctccaaatatgcctcaattgcagcccccagcacacatgcttccacacgcgcaaggatctcgagcaccacttcctcagcttccatcaatgtcaggtccaccaccagtgaatccaccactaccacctatgcctcacccaatggcaatgcaagtacaaggttcatcaaaccagatgatgcctcaaatgccacagcacttgattggcatgaatcagacacaccagggccctcctagt

SEQ ID NO: 427216 - DNA, 439 bp, Oryza sativa
tgtagttgtccttggtgtagttggccagcgcgcccaggcagggggtagagcgagcgagccgagctcgagctcgatccatcgcccgccagccatggtctcctctccctcgccttcctctcccttccccgccgcagcagtatccgacgcgaggcgggccggcggtggcaggacgacggcctcggaggtggacgagaagtacgcgcacgtcgcgacgccactccacaaccaccgcggggggagcgggggtgccaagaagacgccgcggcgagcgaagagcgaaggaggagggttagcggaccccgcggcgtacgtcgcggcggtgtcctgctctgactgccgcttcaagcagcggctccacgcgccggcgtcgcctggccctggggcggtcatcccgtcgctgttcgtgtcactcacccgacgatccacgccgcggtcgtcg

SEQ ID NO: 427217 - DNA, 491 bp, Oryza sativa
tctggccgcaaccccgcacataaccctaccagcctgtcgccggcgccgccgcccatggccgtcgggtgcgtcggagcggccggccgccgcagggcgtgtcgtgtgatcccgcgccccgtcctcgagacggtcctccacaaccacgcgctccgcccgcgcgtgccgcaggcgctcatactccacgggccccgcggcgtgggcaggttccacccttctcctccgccgactcctcccgcagtggtctgagcccccgcacgccgccgccttcgtagacttcctccgccccggccccgacgcgccgtggtcgctcctcctccccgccgtcgagggcgctgtgccgtcgttacccgacctccgtctccgtctagagtcctcgctcgagggcctcgcgcgcgacgccgtgctctcgggtgccgtctggtccaaggacgtgctcgccgtgctctgccgttctacggcctgcacaccgtgctgacacgcctggcgggacc

SEQ ID NO: 427218 - DNA, 197 bp, Oryza sativa
tgtctgccgccgtcttccgacctgccggcgtgccgcgctttaaatccccaataccactctcagcaccaacacaggaacgatttgcccctccaagtctatccttgggtgagcggcaggcgcttctacttccgctccccgttaatccgctcctccttcccttgcaagccaccgccaaaatccattccaattcaaatccc

SEQ ID NO: 427219 - DNA, 480 bp, Oryza sativa
  unsure (1)..(480): unsure at all n locations
aatccagcctctctttcttgctttcttggagttggaggtagtagctcggatgaggttcatggagaggtggagatgcgtcagtgtgttggctctggtgctcttgctgtcaaatgcttcccatgggagagatatctctgtccagcactctcagcaaactttgaactatagccatactcttgccatgactcttgtggaatatgcttctgctgtgtacatgacagatttaacagctctttatacatggacgtgctcaaggtgtaatgacttgactcaaggctttgagatgaaatctctaatcgtggatgtggagaactgcctacaggcattcgttggtgtggattataatttaaattcaataattgttgcaataagaggaactcaagaaaacagtatgcagaattggatcaaggacttgatatggaaacaacttgatctgagctatcctaacatgcctaacgcanaggtgcacagtggattttt

SEQ ID NO: 427220 - DNA, 272 bp, Oryza sativa
tcctgccgccgtcttccgtctgccgtctgccgcgccatctcccccaaatcacccagcaaaatcaaaaatttccccccaatcttcctcggcacggcgcgctctcttccctccccttatccgctcctccttccctcgcaagccaccgccaaaatccattccaattcaaagtccccccccccctcaaattccccccacccccgcattacaaaggcccgcctcgtcccccgtcccatccggtccccaccgccgcgccccgccgagctctcccacaa

SEQ ID NO: 427221 - DNA, 274 bp, Oryza sativa
gcatgcacccctccgtcagcttctatcctccacaacagccgcccccctttatttcttctctttctcttttttttatattttttggggtatttttaaacttcttgggggtacaacacacatccccccaatcccaatacccctcaccttacccctaaactcacggcttccactatccacaactcaccaaacctgaataaacaacacacttgaaacaacccccaacaccctctgtctaccaggccttactaaccaaccggttacactctcgccaaaa

SEQ ID NO: 427222 - DNA, 375 bp, Oryza sativa
ccccccgggggaaaaacttttagggggaaaaaattcccccctggggggcccaaaaaaaacggggccttttaggttcaaaaaaaaaattttgggggttcccctatggatttccccgggggggcccccccccacgggggggcccccccccaaacaaaaggcccggcccggccaattaaaagttggggggggggtatttccaaccccccatgggcccaaaaaaggggggaaacccaaaaaggggggggggaagaaaacttgggccattttaaaaacaccccaaaacaaaaaatggggccagggtccccctgggggccctttgggggggcccaaaaaaacccggggggccccccccccctgaaaagggggtttggtagc

SEQ ID NO: 427223 - DNA, 470 bp, Oryza sativa
cttctcctcttcttcctccctcgccgccggcaaccccccgcgccgccgcgattcggtcgcgtccaccctaagcctcagccaactccggcgaggcttgatcccttgcacgggcggcgcgcgggcctgccccgtaggccaaacctcgacccgcccccgccgcccgctcgccggcggcgccggggcgggggttatccccgctcggcgcgctttctccaagaaacgtgcgggcttcgagggcttccatcttctaccaggagccggttgaaaggcgggattcctcttccccttctcggcggcggccggtgattcgcgtggggaggcaagatgctggggttctccaccggccagcttcgggtcatccttggggcgtgctccctcatgatgaagcgcagcgacatgatcaagatcgcgagggtggcgtggaggatgaccgggagggcggtcgggcgccctatgttgtttcgcaggca

SEQ ID NO: 427224 - DNA, 379 bp, Oryza sativa
agtcttcaaaaaattcagatgcttgtatctggcagtatgatatcgccaagctaacacgttgccatctaagaaatgttgtgtctttttaataactggagcatggagcatgagaaacattaaactgtgcaccaaaacttagcgcaaatcacccatgacacataagcgacattacagtatgagatgggagtgtttcagtagagcattcaggaatctctgacaactcaacgacttgagaagctcatcagaatcatgctgcctagttcaaactggcctgctgtcgaccatcagggatagcgaacaaaaccaccggcttcggaggatctgacaaaaggggcatcgcacctgtaatagcctttcctctaagctgtatgacctccca

SEQ ID NO: 427225 - DNA, 472 bp, Oryza sativa
tttttattttcagaacatttcagctttcagggtgggatgttcatgaatgaagtgaccgttgcccggcttgcaactgttccatggtgcaaatcaatcagtttggatatggaacacgcattgtacgggttgctgcttataggttgtttggatatcacttaatggatcaaactagcttgtcatatttgtttatatacatgtgctatttggaattaagtgcagtggttgtacgggttgattcagagttgatcccagcttatatcagataaaaaggtcacacatcattctgtgaaactggaccatctccagatgcattagtgatcaacctacaagttgctttcatcttttagggacagaggtagcaagtaagaagtatgacataacatacaaaatagagttgtttttttcctaacagttcattaccaccattttctgagttatatctatgcaatacataacaaaaaaagtctcactc

SEQ ID NO: 427226 - DNA, 166 bp, Oryza sativa
cagccgccccccttttttttttttttttttaggcaacaactaaccaaagggttctttatatacatattggtgtccttcaattaattgtctttgtattaatgcaaaatgttgcccccctgccccctggcgtggaaagaacaaaacgcccacaaaaaaaccccccccc

SEQ ID NO: 427227 - DNA, 469 bp, Oryza sativa
tataagtgtactgaaggatattttgcatggtgaggagaaaaggtcgcaaaaggttaatgaaatacgacatcccccatcgtctaatcaacggaatggcagaaagcgtgacagggatgacgaaccgcaacaaataaagagagacttgcctttgcgccgtgacgttggtgcctcctgccgtcttctaaagtttgctgttcgagatgctgtgaaagctgtacagcaaaccagcagctctacggaaccatcttctaagcgcctacgttctgtggtttccacatcatctgcagacagcctgcatggtaaaagaatagaaacatctacagagggccacctgtatgacaaaaagccagaaagaactaggcaaattcttcaagtacctggagctgctttagctctcagagctgccgcagaggctgctgcagattctaccaaagttagatcttactggagcgtgtttagtcgattaggc

SEQ ID NO: 427228 - DNA, 346 bp, Oryza sativa
gccccaaaaacaaaaaaatcccaagggctaatcttttgaaccacaccccaacaccccaaaaaggggccgggatgaaaccaaaggaaaaaccaagaccaaaagggggggggggaaaacccaccaaaaaaaaagacccaccacaccaaaaaaacaggaaacccgcgccaaaaaaccatttccctacccaaaaggcaccaaaacccggaaaaaaaaaccctgcccaaacctaagacggcccaaaaaaagggaaaaaatccttatggcaacccacaaaaaaagaaaaaaaaggaaaaaaatttttattacgccccacaaaaacaaagcatagcatcgggagcccacttaa

SEQ ID NO: 427229 - DNA, 494 bp, Oryza sativa
  unsure (1)..(494): unsure at all n locations
ccccccacccaaaaaaattgtccaaaacaaaaaaaaaacaaaatccccccccccccaaactaaaaaaaaaaaacccccttataccccccccccccggcagggcgccccacccaaaaaaagggccaaaaaaaagggaacaaaacccgcccaaacacaaaaaggaaaacccccaaaacacaaacaaacaaaccaaaatttaaaaaaaagtttaaaacccccaaaaccccccaagggtacccccccctaaaaacctaaaaccccctaggccccctgggggccaaacccgaccttaacccccccccccccccaacacngcacccaaaaggccccggcaaaaaccgcccccgccacccccaaaaaagaaaaaaacaaccgggccccaaaaaaccccccccccggaacccaccacaaaaaggccccaacccccccgggccggcctcacccccggttcccacaaaaccgcccccggccgcggggaaaaacaaaaccccccc

SEQ ID NO: 427230 - DNA, 694 bp, Oryza sativa
  unsure (1)..(694): unsure at all n locations
aaataaattagcgggggttcaaaattttccccctttttcccttctttccccccaattaattctctccaaatcacttcccccccatttttcgccccccaacttttttttttcataatttttgcccattacccccccccaccattttattacaccccaccaaatttttttttaaaataaacccccacaaatgtttttcttcccccctaaaaaccttttaaaaatcctccccacccccccccccaaaatatataaaaagccccccccccttttggcggtccccccttttaaaaaccccccctttataatattttttnaacaccccccccccccccgtctcttttttaaacaaccaaaaaaaaaaatcttttgagggggggtgaaaaaaaactctttacacccacaaaaaaaaaaaatcttttttcccacccccttccgccaaacaaaacgcgtgcacacaaaaaaaaaaacccccccccccctcttttaaaaaaagagggcccctctttcttttccttaaaaatctcctcccatggatttatttttttttttctcaaaacatcccccccccaaaacaaaataaaaacccccccccccccctctgggggttttttttcccccaaattttttccacccacattttctccttctctttgtatccccccccctccccccccttttataacaaatttttttc

SEQ ID NO: 427231 - DNA, 416 bp, Oryza sativa
ttttttttttttttttttttttttttttttgggtggttttttttttttttgtgggtgtttttttttttttttttttttttttttttttaaaaccccccaaaaaaaaacccaaaatttttttttcccctaagggggacccaaaaccctttttggcctttaaacccaaaggggggggccaaacaaccaaggggggggggtaaaaaaaaaaaaatatgacggggttgggggggccccaaaaaagggggtctcccattgggggggatctgaaccctttggggggggggggggaaaaaaccccaaaaaaaaacaaacctttgggaaggggcccccccaaaaaaatgggccaccttaacagggggggggggacaccaaaaaaaccgccctttttcgaaaaaaaaaacatggggggcccaggg

SEQ ID NO: 427232 - DNA, 466 bp, Oryza sativa
tgtgataaagacactaaaaagcacttgaaaaatatgataatgtgacatcttactgattactagtagtattttttgaaggttattcagcacttacgatgacctatttcaattcgtttaccaaaacaatgaggaaacatatcttttcatttttttccctttttttctattatgacatgtgctgtgatgcagctatttctgtcatcaccatgagttgaaataaatgctaaatgactagaaaaaagaatgggaactaaatgcttccatgtgaaactatttctgctaacatgctttgttgaagatttttgaattgtatactgggtaagtggtttttcttagacgtggtagtcacacggtaaaggtattggaagaaccatcatgactgatgccatcagagaggtatctatcgtatctataatttgttttgctcttggaacattattaaatgtcataggtgcacaagttgatg

SEQ ID NO: 427233 - DNA, 454 bp, Oryza sativa
tgggataactactgggtgatgcattagttgagctaatttgagcggggcacgtttggaatgacttggcacatgcttgcttgctaacttatgtaattcgtgggtatcctcatagttaagctatgtttcacttgaggtatgcctgcaggtaaggtaatttctgctagctttcttgtaaagatgggaaggtatgtagctagggctgagtttgggaactccaagcctcttttagtaaatagtagagagatatttatttaattcctgaaaaattgtgtgaagtgagagttactagtagtgcctgcaggtgatatatggcataagtaacccaacaggtgacaagtaacccccgttattcttgtaatgtattatgctcttccaatgcaatttgttgcttcatcttgggccccctgtgtactcatccttggtagaaaaacagagcttacaaacttgggagttc

SEQ ID NO: 427234 - DNA, 391 bp, Oryza sativa
tcactgaacgaagctacctagcttaattacctagctactcgatcgatcatcagtctagatatggcggctttgaacggtaaggtggtggtggcggtgatggtggtggcgatggtgcctatacatatgtcaaaacatatgcttcccctttttgctcatttatgtgtattctgacactgcgctgtgatgcaacttattcctgtcatgaccatgtgttcgaaatcaatgctccaatgactagaaaaaagattgggaactaaatgcttccatgtgaaactctttttgcttacatgctttgctgaagcttccctaatcggctactgtttaagcggtttttcttaaacgtggctgttccacggttaaggtattggaagaaccatcatgactgatgcca

SEQ ID NO: 427235 - DNA, 270 bp, Oryza sativa
tctcccatctccacctccgcctccacgcgtggccgacgtcgacgccgccgccggcgtcgtcgtccgggcagtcgaccgctgcggcgccgtcagagctacccgggccccgtggatgagagcggcgtggataaagtagatgagttcccgctttgcctggacacgactggacgacgggagctcacagggatggatctatgttataagaatgagtggatataaatgctaaatgacaagaaaaaagaatggaaactgaatggtatcctgcgaaac

SEQ ID NO: 427236 - DNA, 561 bp, Oryza sativa
  unsure (1)..(561): unsure at all n locations
tcgagacctaatttcccaaagaaaaaaaaaagaaaaacaaaatcccatctcccaccgccgccgcagcccaccaccagccgccgcctcggccgcgagatcgccggccgccgccatgtcgaatccggccgcctactacgccgccgtcgcgcggaagcagtacttctgctaccaatgcaaccgcaccgtcctcctcccggcctccgccgccgccgccggggcgctctcctgcccggagtgccgcggggatttcatcgaggagcnaacgtnnccccgcccccgccatcatccccttccccttcgccttccccccgatgatgcccaccgncacctncgnctcccgncgnncgncgnncgnnggctngncgacccagtcctcctcctcgtccgccgccacgtcgccattcagcgacctctccgccttcctcaacagcatgctcggnccgctcaacctccgcaccgacgagcggatgccgggaaccacctccgccgcgggcacggtgacccccgaggacgagcccgacggggttcgacgcggcacgttctttcagaactacctccaga

SEQ ID NO: 427237 - DNA, 397 bp, Oryza sativa
ggggggaaatggacccaggcgaccatgggggaaaataagggggggcaaaaatttacttgttaccccccccccttacacccaggaaaaaaaaaacatggtttaaacggaggaacatacatacccttttggaccaccccccccatggttgggacaagggggggtacaaacatacggccccaaatttccccatccgccgggccttccttccttatttaaaacctgggaattaataaaaaacgtgggggggggcttctttaagggaactgggggctgggggggatttttttggggccggatccaggggggggaccaagcgggttttggcgggggccaaccccggaaaaaagcccctggacggaaaaaccgaggaagggaagcttggggagcctgccttttt

SEQ ID NO: 427238 - DNA, 501 bp, Oryza sativa
  unsure (1)..(501): unsure at all n locations
ggaaatccatgacttgcaatgtggtgggtcttttttctgaaagcttatcgtatttgttgtggaaattctgaaaactcttcatgtgaaattcctcacttggatggggtatgagatcaagtgtccctggcatgtaggtccaagccaagtatgcagaagaggtcactgtcggatggggtgaggagtggggaatgtttaatttatgngttttatctttctttttcggnggttgtttgtcgtctcctatggcctgctcttgtttggctttgtttcctctgccacaaatgctgtatactgtaaaaacatttccatccttttctctgtgaacttgaatatggcctaccggtccacggtagggatacacaactctcttttatttccacatgtgccttccccggagtgatgggaaccctgagtcctttgcggaagagcatgatcgcaaggccagggctggaattgattatgattctttccatgggaaggcacaccccatgacaccattct

SEQ ID NO: 427239 - DNA, 492 bp, Oryza sativa
  unsure (1)..(492): unsure at all n locations
gagcagccgagtcggccatggcgcggtcgccggcggcgaggaagccctcggcggcgcagaccgtcgcggtgacgctggcgctggcgctcgcctccgcggggctcctcttcctcctgttccacctctccccgtccagccccaccccgcacccgcacccgcaccgccgcctccgcctccgcggcgcgcgcgcctccccctccccgcgcggccagatcccgttcgaccccgtcatcgcgggcctcgagcgccgccgcgacgaccgcgaggnggnagcgcctcgccgccgcggggctgcacgcgccggggttcgaggcggcgcccgtccccgaggactacatcgacggcggcggcggcttcggcgccgaccccgacgaggactacatcaacgacgccgtgcggttcaacctgacgcggggggtggaggcgctgttccccaagatcgacgtcgaccccgccgacggggccgagacgcccgccgagctgaccgcctgg

SEQ ID NO: 427240 - DNA, 562 bp, Oryza sativa
tgactcgttcgctaactatcttagtgatgattggtttccacctgctgaagcttctctcaagcgttcattgattcgaaaattaatccataagctgttgaaagagccttctcaagattttcccaaactagtctgctgtagtgagcagctggataaaacacatgggagtgagaacgctgagctagaacaaatgagtgagaatgctgagcgagaacaagctaaagagctcccagctcagatgtgcactgatggtgaacctgattcagttggcaccattcttgaaacacagcaaccatccatatcaacatgtttcaattattctgatgaaaacggcccacctgtttctgtacacaacctacataagttggaggtatcgtctgcaaacaaggatgccattgtctgcttgtcaaatcatgatgagaaaaatgagtcacctcctgcagattcttacaatcatcttgatttgagatcatgcgactcagaagaggctgagacagtcaatggatcagctggtgttgtgaaagacccaatagtcataaagagcctttgctggatctttgataat

SEQ ID NO: 427241 - DNA, 382 bp, Oryza sativa
gaaacaggaaaggacacgttaaagggtatagattatgggtactaaatgtcagtggtttgagtagtgtgacacaacaaacaccaccactatagtatacataagcaggctttactatcccatccgtgctttttccaaaagaaacatcaaaaatacatcgatgtttctaagctgctagtcctgcatacaaaactaagttgctgctttcaagatgttggcaaccaaagcacacccaaaatcaggaatatctattacagacttgcagtgttctctaacctcaaagcaatgcgtgaccaaacaaacgctactcctgcttcatctttgattcaggctggtagcatggatgcagcaacacatggatgcacaagagccagcagggaagatg

SEQ ID NO: 427242 - DNA, 442 bp, Oryza sativa
tggttcgccgcgatctccagcgaggcggcgacccaccggcgaccactcgccggcaccccccgcccacctccggcgagcaggtaggacggagcagcttcccctcgccgcccgcttcgctcgccttctctcctcctccgcctccgccgccgcggagccctggccacgccgcatccgctcgtcttgcccaccaagccacttcgccggagccgcatcccttccccagccgggagaaccgctggtggctcccgctcccgctgctctccatcggcatatctacttgtggaagctcacgcggaggcggaggtccagctctgtggcagtttttgatgggatcctgccccgcgcggcgagggtagacaggatctgtgccgctccaagattagtctcccggtctccagacctgaaccaagttgctgccatggcgtcgtcagctaaggaggag

SEQ ID NO: 427243 - DNA, 84 bp, Oryza sativa
accttggttttcataccaaagctggactccaccggacggtgatgttagaagagagagacgctaccctccccgacgacggtgagc

SEQ ID NO: 427244 - DNA, 143 bp, Oryza sativa
gggggatctcggccaccgcccaccgccaccgccgcgccgccgccgcgcgcgcgcgcgcatcgcgtcacgatctcgcgagaccccgaaccccacgaaccctcgccgcgtcgccgcgggccgtcgcggtgggggaggaggaggag

SEQ ID NO: 427245 - DNA, 387 bp, Oryza sativa
aaggacgcccgcaggacctggccggaatttccggcctgcccacgcacccttgcttttcgtcgccatattcccgtggctggggggtgtcacttactgagtggcccgagctcgacggtcgactgatcatcgcgtggcctacgtgcgatctccgtttccaccccgcgcaacaaaactcggctccgacgtccgtgcccgacctaagagattgctgagcagtcgctcccgcgcgtcgacggtcttccccacagttgccgtggccaccaccgacgatccctatcacatgccaatccgctctctggaaggccttcgatgggcctcaccgtgcccttttactgtttctctagacgccgtcgacgacgaggggaacaaggtcgactggtatatact

SEQ ID NO: 427246 - DNA, 564 bp, Oryza sativa
  unsure (1)..(564): unsure at all n locations
gccagcgttggggatcaggcgtacggtttcttcaaggggccatggcggctgcggcgccgagttcggtggtagccggactcgtgtccgggctagggctggcgcgctcctcgttaacgcccagcgacggccgctctccttccctctcgcccctgcatccgccatggcccgcggccccgcggctcgtctgtaggagcagcggagcccggccccccagggagagagccgtggccgccgccgccgccgccgcaaattctccgcggcagcagcagcagctaggagagcatgagcatgaggaggctgtggcagcggcggccatggagccgnagaggagcagtccccatgaggtgagggaggagaagcnaaggtgctttcgatctcgtgcgccgtctcggccgtggcgccgtctacctcggctcctcagggtgccggccacccatccccattacctccatgccgccgagctctcaagggagatagctaggctgctggactgcaccacatggtccggagctggtacaggttttatggatgctgccaccaaggcgcttttgaggcggcaaaccc

SEQ ID NO: 427247 - DNA, 518 bp, Oryza sativa
tgaatacttacagaggagaatagagaagtgatgccttgtactagaattgtcaaacaataatagccggcaacgatttaagtgtaaacttcttaatagtcatggcatttcagctacagtagggaatatttagacacaggcattggctatttaattatcttttggccttgatttggcatattgatgagaattctttattttgttttatggtggcactcttgaatcattatgtatagatattgagcttgcatatacagggactaggaggattctacattatagggaaccatctttgccaggtgttcaacaagtttagtgataggaccctatatggcttacatatattcaaagacattatagtgaaccatctttggatagggcttcgcgtgaagtttgtgtcatatggtgtactgatgcacaagagtgtcttgcatttgcaattctataccataatcgtgctccacgacatagccgttcattctgattactttcaatggataatgtacgaagccctacaatgc

SEQ ID NO: 427248 - DNA, 562 bp, Oryza sativa
tttgtgtttttttatggtcgtcgcctgatccctcctccgtgcgacagatcgatgacggaaggaagagaaggggaggggaggagaggaatcttgtcgtgtctgtcatgtctgtcagtacaggagctcagttcaggaccaggagcgactagagtttctgatttgaggtaggtaggcgcacagattttctcttctttctttttttgttttttgtttcgttttgttttgcctgtctttttaccacctctctcctttctttgctaatgatggaggagtacattacatttagtacttttttctttttttgtgcctctccctatttattttatgtcttttttccttaacgcattaattctcatttttttttattctcttctaccttacttttttttattttttcattttatttgatctttttatcattttgagtttttctattttctaaacgtttttctaaatttccatcttgcttctcccccttttctttttccctttctttttcttttttttcccccccaacttatattttttttctttttttctctttttttttttcctctttttt

SEQ ID NO: 427249 - DNA, 320 bp, Oryza sativa
tttctttcgcactttcacagctttatcgacgacggaatcccttctcaccttcgctattcttttccaagcaccttatgccatagccaactacgtctaggattagtccattgcacagtcgatgcacgcgctctaccctgtaggacaaagatggacacggccctatcaccagctaggcggtaggaaccgtgaggcgaattttcccgctcagcccactttatgcaagaaatgtacgacattatcagggctggcatctcctaacagcagccggatcgaaagagtgaattgcgtttccgcttctgaggggccgccagctgttggac

SEQ ID NO: 427250 - DNA, 445 bp, Oryza sativa
ttcgtcgccattctcgcattctcgccttctcgctctctcgtggctggccgtggcgggcgctcgcggcggcgccgccggtcgctgggcctgcgcggcatgtgtcgcggtgaactgtggagtcgcggtggctgcggatgtattcttcgtcgtctctctcgtgtgctagggagcggtggtggagaatgggagatgggcccgtctggtgtttgacgaaatgccggagcgcagcaaggcatggagaggttggggcttcaagcctctacgcgcccatcatcctgggtagtggacagcaagctatgtctgcaagctatgcctctacagccgcaggcttgatgggcgtgtgggttgaaagcggatgcctgtcctcgtgcggtgcaaatgtgagttggttcaactgtacgggagtgaggagcagaaattctcttagcagcttcccatttttgaa

SEQ ID NO: 427251 - DNA, 527 bp, Oryza sativa
ttaggctgtgtgatagtgtgctggtcaagtcggacgcatactaaatgtttgtgatcttttgatgattaatttaccttgttttataggtgtagaaattggtggaagcatagttggtttgtttctgctctcatttcaggtctacttgtcccgtactgtttgctgccggcgtggacgctgctgagtccccacacatcagccacgactagaatcctggaatagccgctaccatatatatggcgtttgcttcctagaatccttttgctttacataaaactgcaatccagactatgaacaaacacttatggttcaaatcctataacctttaattattattactctaaatgtctactgctttgatatgatccttatcttcagcttaaacatatgccatgaaaaaaaaatgcatgaggtaactctcagccaactatggtttgctatcctctagatggaaaggtatagctggggtacatatttgtagctaatctgggatgagctacattttttttccagcctgattcatgtctagc

SEQ ID NO: 427252 - DNA, 489 bp, Oryza sativa
  unsure (1)..(489): unsure at all n locations
tgcagcaggttgcccgcccggttgatcgatcaccaccagcaagctagagatggcgagacgggctgcatcggtggcgctggcgtgcgcggtggtggtggcggcgatggtgctcccggaggcggaggcggggcagaactgcatctgcgagtgcgtgaagctgtgcatgcggacgcggatcccgagcatcgaggcgcagtgctcgggcaagtgcagggagacggcgtgcgtgcggagctgcgaggaggcgtgcgcgcgcaagggcttccccgccctgcccggcgagggcatcggcgcctgcgagctggagccgctcacccccgacgaggcgcacatgctgcactgatcatcgagtcaccaaccaatcgatggcaagcctaccgccgtttccgtctccgnctctggctctgtctctgggtatggtactgtctccgcctcttctgcgctgntgtatactntgatatgtgtactacatctaccacaccggtcaaa

SEQ ID NO: 427253 - DNA, 514 bp, Oryza sativa
ttccttctaaaatcccaacaattttttgatccttcgccgccggcaagcgccgcggagggttccccccagggagtggagaggagaggagcgggcgggttggtgttgggaagggagggattgttttttttgatttacttcctgtggttctactattctgtgctactcctatcttgatttggatattaattattcttttctatagtttttttttttatgttttcttcgcccgctactagttttcttatttttctttatggacttctttttgttgtactctttacctcttctaattctatctggttcatctgtattctattcattgtctatttgtttgacatttatttattttctctttattgtataatttcatttttgttgaactggtatgccctttttctttattataggacctcttcattaagttttattttgattggctctgtttttttttcccccctcattgtatttatttgattgttttggctcacttttgttcctgtttttctttttaatt

SEQ ID NO: 427254 - DNA, 151 bp, Oryza sativa
cacgcactcacgcgcactgcacgccgcaacacaacgcgctcgcctcgcctcgccccgatcggtggtggtgctcgccgtcgccgggcggcgctagggtggccggagaggctccggagagtaggaggaggaggaggagccggagatgaggggg

SEQ ID NO: 427255 - DNA, 447 bp, Oryza sativa
ttttcaatagatcaacattttgtctcctcatcagatggcccaacagtgccaggtgttcagtcccttcctgcagtgcgcggtaaaggtcctttggataatattggtttgagactgtctcgaccagattcatctattgctacggaagcacgcatgaagcttaaagtcacaatggttctaaggagaggacataagttacccatattcaatattctctccttcaactaactggcttatttgttgcttccattggttcctacatttctatttgatttcgttcagcaagtgttgattcgaccaatctatagctcctcaatttgtgattgttacattaggagctggtcctgaagatttctcatcttcacattcgatgtgttcaacgttgtacttcccccaccaagtcaattgccaggcatttgtgatgtgctgatttgcctggaattatgggta

SEQ ID NO: 427256 - DNA, 444 bp, Oryza sativa
ttttctgacgagtttttacctgccccagccgccagccgccgggcgcctaggccgaggcgccgtcgacgtgccagcccagccgcctgcccgcctcgccggacgaccactcgccctgcgccccgtcgcccgtggcggcacggccccccggccgccgcgcgcactcgcgcgtagcgcccgctgacgctgtcgtgacgccgcgtcgccggctgggggcctgcccggtccggcgaccggcggtccccggtcaccggtcagagcagaactgcagcagcgttatataatggatcctaaaatgaagcaacttcaagaagcactggctgacattgaaactgatgcagagcagcttcttctggcaaggcatcagttaggggaaaacgataggataaggaatggtaatagggaagcactgacagccctccggaaagagccaagacaaccaaacta

SEQ ID NO: 427257 - DNA, 498 bp, Oryza sativa
  unsure (1)..(498): unsure at all n locations
tgaaagagtcgaagccattgaaggactcgaaagaagacaagaaggcagtgaaagaagataagaaggcggctgcgaaagattcgaaagaacagaagaaggcactgaaggactcgaaagaactaaaaaaggcgttgaaggactcgaaagaacaggggttgcagaaggattcagatgaacttaaaccaaagagcaacaagcgcgtgacgttcgctgaggtggagcccgagaaggaactcaaggcctccaacagcgactggcatccgacctccgagtatcacagcgtgtacccggagcacaactcatggagcagcagcttcatgatctttgaggatgagaacagttactggaactagagatctctagacctgccaaaaaaaaaaaagcagcccggtgaagagtcttcagttagttagttagaagtagctaggaggccatttaaacgctcttgttctagctgtcctctatcgattggtctgactggngtcaccatgtaacata

SEQ ID NO: 427258 - DNA, 119 bp, Oryza sativa
  unsure (1)..(119): unsure at all n locations
ttatcttatttatttttgttttnttatactttattttttttttttttttaattttattatattaatatttttacataaatataaatttttttcctcacccccccccccccccccccttt

SEQ ID NO: 427259 - DNA, 353 bp, Oryza sativa
cgcgtttatcgagagagagagagagagagagagagagaggcgactatgacggcgattgctcggttctcccgcgggcggcggcgagccggcgagggcttctccggtggggggcggcgagctatcctagcgcccgccttgggagcgctctcgcggatctcctttggagctttgatagcatagcaaggtcatggcagacgttgcagatttaactggggatggaggtgcctccggcgcatttcttttatttttattttccgcttcctgtcttcgtttctttttgtattttatttctctctttcttttttttcttatttctctctttcttcttttctttttctcctttttcttatctt

SEQ ID NO: 427260 - DNA, 385 bp, Oryza sativa
aagaaacgctctttatacaagctctccaactttataacgcggggtagtagctcgcataaactttgtttagcatgcaaagaacgagccaaatttagaccaaaacctcctttgaagatagcgtgccattgtcaaacagcttcccaagtaaaccggcaattaattaaaccggcaatttctttaccgtgtacagtgtacacgtaagttagttgttacagtctcatcaagttgtcagattggagacaccatcttcgatactttcctcttcctcgtcctcctcgaagtctccttcctcgacttcctcctcttcctctgcgagggtctcctgtggcactggttcagggaccttggtaaggtccatgtttttgcagactccaatacatgatgc

SEQ ID NO: 427261 - DNA, 270 bp, Oryza sativa
aaagggcaactccttatttttttttttattttgtgtttgtttgagcatttaacttagttttgttctttttttttatttgaaaagaagaggcaatcatttcccctaataacggtagggggaagaaggggaagaatctcacacaagttgggcataagtttgggcaaaaaggaaagtccaggtgttcaacggggggaacaaaaaaaaatatgggtgaactggggccaacagggggccgtggggcaaaaggaaaggggggggaatattttttta

SEQ ID NO: 427262 - DNA, 307 bp, Oryza sativa
gtattcccctccttcgtttcgccgcggcggggggagccacatttgtgatccccggcgccgccagcaactgctccgaccgccgtccccgggcgcgccgccggcgatgtggaagagatttttggagacgacaaataagggcggcgacgccgttaccgctaccgacgcaactggcccgcagctcgacacgcggaaaaacccttcctccaggcgtcggacggccgatacgccggccaccgctggttccttagcaggcatgctgcgactgatgaaggggagcttcactaagaggaccaactctgtgctccac

SEQ ID NO: 427263 - DNA, 522 bp, Oryza sativa
  unsure (1)..(522): unsure at all n locations
gcaatgtttcagaaatctggaaaaactagaacttggatgctgtgatgtgctcctgttctggccactgagagaattccacagcctagagtcgttgaaggaattaatagttaagtcatgtaataatctaaaagttaagccagtcgacggagagccgcacaaggacagctcctaccacatcttacctcgctacaaatagaagattgccaagacttaacagagctttttaatctccccctatccctcaagtctattgacatcgacggctgccctaagttgaagtctgtatgggatgaacaggaggatactgaattggggacaaacacgcaagacccatcaccatcagcaagggtgcatagtctaccatgcctagaaacgttttatataaacgattttgataacttaccaaggtttcgcgatctcccgtcatcgctccagtcattggcactgtttaactgtcctaaggttcagtttctatcanggaagctggatgcactgacatgtctagctatttctggatgcgag

SEQ ID NO: 427264 - DNA, 407 bp, Oryza sativa
attgagcgtatcaagatgcgcctgaccggggcgatataggacacatactaccttgccactactagtggttgccacatccacgacatggacgctggacctcaggcgaaggtgggctgaaggagagaacttcaggaaaatataggatagagcacatgaggagcacgactcatttatgcattgcagatcaggaacgaggctagcactgcataagagatggacccagcatggaggcagtattgccgcgatgggcctggaggagcagcgtgaggtcatccaatgccattgagtgccctatacgcatgattacgatgcctgcgagattacaggggctagaggtgccagcgctggaagggcgggaggtcacatgacgctggaaccggacgcatagtgggaggctcgtgtagttg

SEQ ID NO: 427265 - DNA, 538 bp, Oryza sativa
ctttttcctcccgagttcccccaaactccttccttgttccgatctaccaccgtcgcctgggcgcctggcggtttgctccactccataggcggccatcgtcttctcaaccagaaagcttctggctgtacagcttggcgggatacaagacgacggtctgccgtcggcgatccgcagtcgccggagctgaaggtggaagcggccaacacggcagtccgtgcagccgcttgagaattttttgtcatggcagtgaaaagatgcgcagaagtgccgatatctgctaggccgggaaagatgatgcggattgctattaagtcttggtcaaggttcttgcccccttacatccctgacgatgtgatcttcgacattctgttacggctgccatccaaatcttttatccgatttaagtccgtgtgtaaggcttggcacgccataatatccaacccctgtttcatcagtgctcacctcgagtgctctaagcagaagccatcgatatttatggtgcctggtggttacgaagagcagaataatggcgagaata

SEQ ID NO: 427266 - DNA, 459 bp, Oryza sativa
tttttggttggttttttttttttttttttttttttctttttttttttttttttttttttttttttttttttttttttttttttttttttttggggaaggggcaaccccccaaaaccaaggggtttattaaaaatttaaacggggccgaacgtccccaagcctataagggttaaacccgcaaattccaagtttttttttcctttcgctgaacgggggcgggcttttttttatacccaagcagaacccggccccagggggcctgggggggaaaaaaaacccccaaaaaccccccccctgaaccgggggggcccgggggcccccccggggggtaaaaaaagggccggggttttattccgggaaaaaccccccccccaactttggggggggggcccggggtgaaaaaaccttggcccgaccccttaaatcccgggggggcccccaaagaataaaccggggggg

SEQ ID NO: 427267 - DNA, 508 bp, Oryza sativa
gggttaatttacattggcattgaggtaaatttggggcttatttattattttctactggggattgaactatttagagctatatacccgtatcgttttacagattttatatcgaatcatgatgtattgcatttagatttttttcgctaggcctaccctaggttcaaatcctgggtccggcactgcctaaattacccaaggacgcggtaaggaaattattgggctcagctattgggctttttcatgagcctgtaaaacattagtacatgctgtcacaaaaatattctattgttagggagttcggagaagaaaacaccgaaccccagactatcacagagcagactgcatgtcatgctttcttctgctcagacatcacattgatcagtatttctctcttccctaatcactcaatgacgacatgctatgtctgaattcctttttgtggagttcccttctgaggtctgaatgtattccctcggtgattgaatcgagtcagatcttagtttttttt

SEQ ID NO: 427268 - DNA, 175 bp, Oryza sativa
  unsure (1)..(175): unsure at all n locations
ctcgtttttttcctctctccagagtccaactccagaccganctcttttcatcggtcagatccacaatcgcaggccagcaaggcgaaggttaggttggttcttccagatccgggctcctccccctcgctcctgtcaccagatccggagctggtcgtcgcaggggtgggggtgggtg

SEQ ID NO: 427269 - DNA, 88 bp, Oryza sativa
cccatttttctcggcctctactcggtggtcgacgcctgcacttttccagaccggaccagggttcgacaccgggcacccgagcgccggg

SEQ ID NO: 427270 - DNA, 117 bp, Oryza sativa
atttgtttggtttatataaaagtatattttttttttttttggagcaagaaatgatgggttgccaaaaaaaaaccccagagaagggagggaaaacgaagaaggaaggaaccaaacaaa

SEQ ID NO: 427271 - DNA, 355 bp, Oryza sativa
tttttggtttgttttttttttttttttttttcttttttttttttttttttttttttttttataaagggaaaaagccccggcttttgggagaacggtttgttttgttgggtgggactggaaaaaaaacaatacaatttggggggaaaacacgggttcataagaactttctgggggtcttctacgtccaaactaaaaaggggggcaagaccccatttttttttgaacctttttttgaaaaaaccgggggtttgaaaaaaaaaacccaatactttgaactacaacgtttaccagtttaagaactgggggcgtggttcccgtttcctttgccttggttggggggggcctctttttcccc

SEQ ID NO: 427272 - DNA, 173 bp, Oryza sativa
ttcctattctcgttcttgcacggggaagaggacagaaagatgtttaacgctggggggggaaacccaccgcccctgcgccgagagagcaagtcctccccctgcccccgctcaagccgcgcctctaccagagcaagactcaatccgccgctgctggccttgagatacgccccgct

SEQ ID NO: 427273 - DNA, 454 bp, Oryza sativa
  unsure (1)..(454): unsure at all n locations
gtattgaaaagaaaagaaaagagagagaaggtgggggggtggaaggaaccctagcggcggcgaccggctccgatggcccctccaccgccgtctccgtccccatctccggcgagcggcgcgcagtacgcgcaccagttcctgaacacggcgctctcccagcgcgggccctccgccctgccctacgcggaggacgtgaagtggctgatccgcaaccacctcgtcgccctcgccgacgctntcccctcgctccaccccaaggccgccctcttcacccacaacgacggccgcgccgcccaccttcttcaggccgacggcaccatccccatccaccacgccggcgccttctacaaccttcccgctgtcctctggctcccggagccctacccgcggtcggccgcccttcgttttctctccccaacacgcgacatggtcatcaagccccaccacccccttg

SEQ ID NO: 427274 - DNA, 511 bp, Oryza sativa
cgggggcccacccacccccccacccacaccccaccccaccccccccccccccacccccaacccccaccaccccccaccacccccacccccccccccccccccccaacccccccccccaccccaccccccccccccccccacccacccccccccccacccaacccccccccccaccccacccacccaccccccacccccccaccaccccccccccccaccccaacccccccccacccaccccccccaccccaaccccaaccccatccccaatccccaaaccaaacccaccccccccccccccccaccacccaccccaccacccccaaacccccacccacaacccccacccaacccaccccccacccccaccccccccccccacccccaccacccccacccccacacccccactacacccaaaccccaaaacccacacccctcacacccccccccccccccccatccacacccccacaacccccccacccccaccacccaacccccccccccc

SEQ ID NO: 427275 - DNA, 319 bp, Oryza sativa
catgtttgctccagccacacgagcctagttcagggagatacaatggcgtgcaccgcctctttcatgctcgccgacttgctggcggtggccgacgcggtggtgccgctgagggcggtacggttggcgcgtggcattaaccttgcctaccgcgacacaagaggcagtgatccatatgtcgcgcttcgtctcggcaagcaaaaagtgaagactagtgtaaagaagaaatttgtgaatcctatttggcatgaagagctaactttgtcgatcatgtaccctattgcaccgattaagcttggggcgtttgcaaagacactttcag

SEQ ID NO: 427276 - DNA, 218 bp, Oryza sativa
gcgtgatggcacgcggatccgccgccgcggcgatcgccggagttgtgtgggtgcttctcctcctcgtgggggtggcgtcgggggcgcgtcttccgggcgggagcgggggtaaccgggggcgggagccgcgcgggggagcggcggcggtcgcggtggccacggagacagcggagttcgcgctgggaagctcatgcaggtcggaggccaggttcggacgc

SEQ ID NO: 427277 - DNA, 329 bp, Oryza sativa
ggggcgacgacacacgtgcggattcgtcttcctcctcctcggcggacggcgacagcgccggcgccccatcatcgagaatgaagcgacagcagctcacaacggtgcccatgggccacctaggcgacggcgtcccgtggcactggcggcgtgttctgggcagagaagccgtcgctggcatctgggccatggtcgaccagggaacaggccatggctaccgtgattaccagatgaagagtgtcccttttgtttccctgataaagtctccatagcagcagagcattcattcccaaaaacgacttgcaaacattttggtttttgatgcgttgatc

SEQ ID NO: 427278 - DNA, 173 bp, Oryza sativa
tttttcggcggggagctagggttttggtggtggggggaggaggaggtggagcacgttactatctctttcctttagctttcttcattctttttttctttttctttccacttttcttcatttttcttccctcctaacttaactacttcactttttccatactcttcttattaatc

SEQ ID NO: 427279 - DNA, 336 bp, Oryza sativa
aaacccccaaaaaaagggccccggggtccaaatcgtttccctccccacgaaaaaaaaaaatttttaaaaaaccccccaaaaaaaggaggggggagggaaaacaaaccctttcccaaaaagggaaaaaaaaacccccccccaagggggtttttttagccgtgaccccaccaaaacaaggagggggaacggcccaaaaaaagggggggcaaaaaaataaaaggttgtccccaaaaacggaagggggaggaaattgtttcttgaaacccttcctttgggggattccccccccccggggggaaacctgggaccccctttaaaagggccaaggggcatctt

SEQ ID NO: 427280 - DNA, 101 bp, Oryza sativa
atatgaagaaggtggtttcgctggaagaagaagaaggtgaaaccctagatctgatctcggatgacggcgcgatcgttgttggccggtaggatggtggcggc

SEQ ID NO: 427281 - DNA, 308 bp, Oryza sativa
cggtcgcgtgggaaaaaaaccaccacgctctgagcctactccctgcctgccccacccccgtcaaagcgagagctccgtatgaccggcactatttcccttgccttgccttccgatccaaggcctgcttctcctactcgcggcgctcgctgagcatggcggcagagggggaggccaagaaggacagcgccagcaaccctcccgggggaggcggcatcagaggtggaggggaggcggatcacaactactgttcatgcagccgacagccggtgaggcgcaactgctggggatgctgttgaagaaggccggtg

SEQ ID NO: 427282 - DNA, 572 bp, Oryza sativa
  unsure (1)..(572): unsure at all n locations
tttacgcgtgggtgattatgaagctgtagaaaggaggttttgcagtactaacattgtataggatattactaacattgtataggatataataccagggccaaacatttgggtggtttgtattaatgctcttctttttctagccaatcacttcattcagtttgacaatatgtatatcattttttgtccttaacattagaatggtaatgctttaatgcagccaacttttttacaaagtattttaagcataatttcaccaagattgccttaatgaaatgattgtcagacatagatgcacatgcttttttcttgcgttatgaaatgtcagataaatttatttcaagttactacttgcaaagttgtcaaatcttagtcgagcaaaagtcagcagtacacaatctgcacatatacggtaccgttcattttgagcaatgtctatacatgaaagtcctttcttagcagtcaattccatggtccctgcaagtgtacattctatttgacaatgccacgtttattattattntgcatgcttatgcangatattatcaagctgatacttcgcattttctagattt

SEQ ID NO: 427283 - DNA, 375 bp, Oryza sativa
ctttttggacctgacactgtgcggattcatcgtatcggtgttcttgggagccaggacggacttctacgagtgagtgcattaccgtgtcagcctcatgcgatccgacattctatacagcgttccctggctgatggtgatcaatgggcgcactgatctgatcacattaagtgtcccatctgtgggctatgaggatgcattgcgatgaatatactcagtcctgagaggggcgacacttacactataagcatagaggatagacgatgctttgatgtcaatcacgcctggtacacaggttgatggtacatggggtggtgatgatggactctggagtctcagaggtgctttggagtggatccttggcatccatgctcatgc

SEQ ID NO: 427284 - DNA, 519 bp, Oryza sativa
cacccgggaaatcgccggctgcgagccccctcctcctcctcctcctcctcctcttccggcgacccccgactccgctccagcgacccgatccccacctcgaccaatatggactcagagccctcatcgcagaacccggcagatatgacagcatttgtacaaaacctcctaacccagatgatgaaatgggaaccaagatcgatgagctggagcagagcgtcaacgacctgaaagctgagatgggtactgatgtgcctaccaagaaggccgacgaggcgaagcctgccgactccacataacttggccgcagaccagagattggcccgtaacgatttggcatcggtgatggatttttcagcgttttatgtgtatccgatattagttttcttggaccattgctgttgaatgactcgagagtgattttatgctatgagcgttctcctctagagtatctgctgctgctgctgctaaggcgatgtgtttggcttgtatgcaaatttgaatttagcagaatgccacaga

SEQ ID NO: 427285 - DNA, 310 bp, Oryza sativa
atcaagtcagcaacgaagaactttgatgaatcactggtgattggagttggtgggtttgggaaggtgtctcggggtcctgctgacgacacctcccccgtccttctcctccagccccccccccctgctcaccccccccttctccccatccccccctccatcatcctggtcccccccctcccccccaagtcccctcgcaccatcctcccctgcacgagccccatcccccccggtcctcctcttccacgccctcttcttccccgccccccccacctcgcactttacccactacaccacctcctcccttcctccc

SEQ ID NO: 427286 - DNA, 397 bp, Oryza sativa
aaaaaaccaaaatcagatgggcatagcattctttatttactcgccctatttgcaacttccgactttgaaaaaaaaacccctgaaaatgcagggggcttagcctgctacatttgcatccttttaaatcaccggttgtttagcgaccacaaaagagcaggggcccagacccagcagctggcttagatccccccaaaacccccccgggttttacggggcaggcctattttagaaattttacctggcctcttttttatggacccaaaggggtcggtcatttatctccttctgggacgctaccttatgcggggggcagcttcttcttcttcttcttcttctacagaaactggggacgatgagcagcccgatcgccgtgaccacaatggtcgacggccccccg

SEQ ID NO: 427287 - DNA, 106 bp, Oryza sativa
gttccggacaaggttctggatcaggatatggctctggtgcttttggagctggtggttatggaagcggtggaggtggcggaggtggtggcggttaaggtggcggtgc

SEQ ID NO: 427288 - DNA, 106 bp, Oryza sativa
ctcatcgcgcgacgaaggggattggattgggttgggttggattggagcgtgcttcgtctcgaggagggaattagcaacgtttacggcggctagctcgtcgcgggtg

SEQ ID NO: 427289 - DNA, 150 bp, Oryza sativa
gcggtacatggatctcgcgatgaggaggatggagagcgtcagatcttccttcgtcgcgaggagggaattagcaacgtctacggcggcgagctcgtcgcgggtgtaccacgtgacggactacggcgccgacccgaccggcggcgccgacgc

SEQ ID NO: 427290 - DNA, 331 bp, Oryza sativa
ggggggtaaccttcttcactaacattggacttaactaagaaaaagttgtacatacgttagaccaagccaagggtattggtactgctaaggaccaaacattcagcatcagagtgcccttctaaaatggtgaaattacccattacccagggacatggaacatgactacttaataaccaggcttcaacttgatttcttcatttcgacttaattctacttgcaagaagaaaaaaaaataaggaaacgatcgggggccttgagtaagatttaggagatcactctgtgcatccagtgtctccatgaggagagggggagcgtactgcgcgttcccttg

SEQ ID NO: 427291 - DNA, 80 bp, Oryza sativa
catcttttcttggcttgtgctctgttttaatttctttgcaatgatggggaggcagagctcgtcggcggctaggagggtgg

SEQ ID NO: 427292 - DNA, 283 bp, Oryza sativa
tttcaactgatattcttgtttcccacactgttctttttttgttttgtttttttttgcctctattaatagcctaagccagttttaaatggcttatcaatatgtatatgtaagttgtatgtccagattgttaccttgtaaatatgacaagttgtatcaaaatgtaatttttttactacaacaaaaagaattaaaaaaaaattaaaaaaaaaaaaaaaaaaaaataaaaatatacctaacatagggtgggctttctaaaggacttctgccttctttctcttgcatt

SEQ ID NO: 427293 - DNA, 391 bp, Oryza sativa
aacgctaactttgcttccacttaacacaacagaagagggataccggggcccccccaacaatttgaacaaccacccctttacaagcccagaaatccccgcaggcacggacagggaaaacacaccgggggtttaattttacacgggttttccaaaactggggatgtgcacaaaaccgcaaggccacacaaatagccacaaaggtttcccctttaaagccgaggggggggcgccgtcaaaagaaaaacagttaaagggattatttttataagagagggacctgtcagcctacagatagctttgttttatggtatggaggggaagctaacctctcaaaggttgtggggaaaccccccagtttattatgcgaaaaggggttcttggccggtaacgc

SEQ ID NO: 427294 - DNA, 375 bp, Oryza sativa
  unsure (1)..(375): unsure at all n locations
aatagggaaaaaagaaaaacgagcaaatccaaatccaaatccaccaccacccacccttcccgaggagagagagagaggctatgacgcgctgcgccgtcgtcgccgccgtcgcggccgtgctcctcgtcgccggcgcggcggcggcggggggtggggaggaggaggagtnaatatcaaactgcgcgcggtggggcctgggtatttgttattcaaagcaagacgaatatggccccatctcgattcagctattccactctgttgagttgagacctaatgtgttatattgattgggctatccttctatgctaccgattagcgttgttcttactgttctatgctggtggctgttctttctcttctagtctcgagcatgtt

SEQ ID NO: 427295 - DNA, 328 bp, Oryza sativa
cctcattattcattttattttactggggggttttctttttcttttttttttttttcttacaggtttaaaagggttccaaatacgcgcacaaaaagcacgcaaaaaaaagtttacagattatgcaaaaagggggccagcgccacccgaaagagccccgcaagccaaggtacaaagaggaaaaaaccagaaacaagcgcgaaccggacaacacccccaccaaccccgaaagcccgggggtgtagggccgaccaagtgagccaagcagccccgatgcagccggaaaggaggcagacaccgccgaaaccccgttggaagggcaaccgggccc

SEQ ID NO: 427296 - DNA, 372 bp, Oryza sativa
ttactcaatttttttttaccaccgccccccacacaatcaagcgaggggggctataaagaacatgtgaccccatggttcttaaaaggtcaagaacctgacaacgggccctttgcccccattttttacataggcatcccccccctgtacaagcatttcacaaatccactgcttaactcagaggatgcgataacctctcaggactaaaaagatacccggggtttttcccttggaagctccgatgcaccctctcctgatccaaacactgaccgctcctgcaaactagtcccaatttttcctttcggaaaccttggcggctattcataactcaccctgtaagtatctcagggcgccgagcggcgattagccctggcc

SEQ ID NO: 427297 - DNA, 504 bp, Oryza sativa
  unsure (1)..(504): unsure at all n locations
cccttatggtgagcacgggcctgtcgctgacggcgtcggcgcgccacccaacggagcccccttcaaaccaaatgtacagcagcagcggcagcaggagcagcgccgcggcagcggaggaggagagggagacgggcggcgtggacaggtcatggcctttcatgttcgagggcatggccgccttcaggacgacgacgagcagagctcctcctctggtggcgcctttctcggcgaggacgacgaccaccggcgagctggcagggttggccgatgttggtcctgacctgagcagatacgagttcagagcaacaaattatttcagtgccaatgcaaattattcagactggacatctgactttgctcactgcaaaagcagcaaggagaacggccgtgccagagaccctgcctttctcaccttgagctcacagcctccacacctcatcaagcagccttatgtggtgccatcatacaacgacttcagtgccatggcatctcanggaagcaaca

SEQ ID NO: 427298 - DNA, 314 bp, Oryza sativa
gttgtgctcatacacaacccatgtgagcaggtttcatttgctagattaggatatgacaagagaacatggctgtcaccacacttgagatttcaggattgcacctacatggatggcctattgtatgcagtgacgttattgggggaaattttcgtgattgatcttatcatcattgctatctttagtatacatactttatggacagtacaatggtattttttttgttatattattatatttttcatatctttttactttgtattctctatttcctttctcttttatattttctttttttttactgtttttttattttt

SEQ ID NO: 427299 - DNA, 225 bp, Oryza sativa
gtgtttagagggagccaaagaaagctctcatcttgctcttctcaaactccatctctctctcttcttcttcttgctctcctcctcctcctcgcttggaccccggattttttgcaagggggtaaggaggcgggaggagatggggagggaggagagccttcttttccttccccttaattttgctgttttagcattcatttttaggttctctttatggtcatcatctct

SEQ ID NO: 427300 - DNA, 376 bp, Oryza sativa
tttctttttttttttttccccccctttctttttttttcccttggtgtttttttttttttttttctcctttctttccctctttcttcttctcttctttttcaccgggaaggggaacacctccccaaaatcccccctcccccccccccctttaatatatcccccccccaaaagggcccccctccccccaccaaaaaacccccgcccaccccttgggcccgccccggggcaccccaggcgcaacccccgggttaatgaaaaacggaacccccaacccccaaaacccctcccttaacccccccaaccaaagcccccctaacattgtggagccccccttttgctccttaccccaaacccccccccctataaagggggggcc

SEQ ID NO: 427301 - DNA, 224 bp, Oryza sativa
cagaacccccgcgaccacccccgccggtgatgttagggagccaaagaatgctctcatcgggggggttttaatacaacatctctctttcttcatcacttagcgcaccctatccctcccaaaagaccaccatattttaggcaagggggtaaaggaaggtatcagagatagcgagggaggactatactaagaacccattgctttcatatgcgagctaaacgtaaatc

SEQ ID NO: 427302 - DNA, 241 bp, Oryza sativa
atcgcgccggcgcacttcgacggcaggtacagctggaaccaccgtgacgcgtgctcgcgccagaggccgtacgacggcgacgtcgacggggaggcgaaggtgggggacaccgaggccgtgctaaggaaggccgtgctggaggaggtggcggcggtggccacggcggcgaggcggcgccgccctgggctgcggttcgaggtgctcgacgtgactaggctgggcgccatgcggtcctacgggc

SEQ ID NO: 427303 - DNA, 177 bp, Oryza sativa
attatttacagagagagagtgagagtgagagagagagagtgtgagagagagagagagagcaaccaatcgaagaggcatatggatccaagagactgagaggaaaggagatgagcggcagaaattgctgcactctatcgaggccaagaaagccacccgagtcttcttttttccattaga

SEQ ID NO: 427304 - DNA, 113 bp, Oryza sativa
ggaagcaaaataacatcaccatatatccttccctataaagggcctggcttaaccttacaacagggtacaaagccccccgactaattccaagttccatcgacgggggcgttaat

SEQ ID NO: 427305 - DNA, 146 bp, Oryza sativa
ttatgaagaaccggagaagaaacttcatcattgggtagattttgagcaggagaaactgtttcaggatcaagacgaagagaagaaaacaccaaagcaatatcttgatgaggatcagaagacattgtagcattgttcaagatgaggag

SEQ ID NO: 427306 - DNA, 92 bp, Oryza sativa
gataccaccggcgaggaggacgaggaggcgggggtcgacatgaagtcgaagctgtactgatattactaggaggggaaccaatggacggagag

SEQ ID NO: 427307 - DNA, 195 bp, Oryza sativa
attatattctctttgtgtttgtgtgttatttttgtttctcattatcgagcggccgattaatgcgcggagtttcgaatttttctacgtgctcgttggtgcgcgagacgaggcgatataccgcacctagcatctggttccaggataattcgaccgatcgatcggcgcgaggcagtgtgagaatcatccgcctttttt

SEQ ID NO: 427308 - DNA, 256 bp, Oryza sativa
cccacgcgtccgcccacgcgtccgcccacgcgtccgcccacgcgtccgcccacgcgtccgaataaattgggctgagaaggagtctcatgtagatgaggacgaaatggccaaggttaagacagctttcgttggaaatttaccagcaaatgttacagaggagtatttaagaaagctttttgaacattgtggagaggtagtacgggctgcagtcttatggaaaggacaatatccagttggattttgttactttgttcag

SEQ ID NO: 427309 - DNA, 374 bp, Oryza sativa
ttttaaaaccctcccaaaattcaaacgcgaccaagccgccggcgaggtgaacgaaacccaaccatggcaggcggcggaggtggcgaggggaaggtggcgtgcgcggcgtggatccggcgccgggaggagaaggagaaggcgacgcgcgtcttcgcggtgtacgggcgggcggggtcgccgccggccgtggaggtgctcgggttcgactccaaggagtgcttcctctccgatcccctggcgagggcggagctcggggtggagccgggcgcctcgccttcgtggcatctctgtgctccctagtggcttacttgcttgtctgcgcctcgtttcatgggtgcaggctatctcagctgttttttgtatagtttcttgtt

SEQ ID NO: 427310 - DNA, 293 bp, Oryza sativa
ctttttagcattgtggtggcaacacagatcatggctatatcttgttctatgagcgccttggtgggaagagctaggaacttcctttggcatttctccacctggttgcttccgttggtagcctttgccgtcaatgacagatgcagattctctggaggaaggcacatgtttttttttgcctgttaccttcatgaggaaaactggttcatgcagaggttcagtttgaccgacggttgttgttacagggacagtggtgctagctaggttcacaggttctactttgcacctaaaggatg

SEQ ID NO: 427311 - DNA, 311 bp, Oryza sativa
gtcgcgtgcgcatacgggaggtgctcgacggggtgccatggattcccaagaacagcttcctccgccacttcaatctgtggctgcgtgacatcgacgccggccgcaccgggaaggtgttcattggcaccttaggctatggcatcttctcttacgacctcaacaccggcaagctggagaacctggcaactgaggatggaatgcagtacggccaccccatcttgccctacttctctgctccggtggatgctggctctgactgaacttctggggtgggaggtctctgattcgtgggaattgcgggaataactgtt

SEQ ID NO: 427312 - DNA, 340 bp, Oryza sativa
cactatagggtaagccgctgccccggggggaaccacaccacaaaaacccccaagacccacccgtccggcattttactgcagcatctcgagatgccccaggggaaacaacaaaacggaaagcagcttgataaccaccaactagcaaagccagagccaagggctgcccatcggggtgaaccagcaaaacacagaaatcccacagacttaagaaccccaaatctgtgctacagaagaaaagaacaaaccaagaaaatcccagaagcatcctaaagaaacaagaagcgggaaaaaacaagcaagggcagcaccactctgaaaactcccttggggaaaaagggag

SEQ ID NO: 427313 - DNA, 113 bp, Oryza sativa
gtctccgaggcggaacaattccgcggggagggggctgtttaatccggccgaattctgaaattccccttgagcaatcgggattaggcgtaggaatattgcgcggtaagggttaa

SEQ ID NO: 427314 - DNA, 564 bp, Oryza sativa
tgctagctagctgcgtctttggcctccagagcggttgtggtcgccgttctcctcctttctttgttagtttccctcttttttcttcttctttttcttttttctttctctcatctttacttccttattctttttctattttttttttctcatttttttttttttatttttttttttcttttttctttttctttccctttttttttctctttctctcctcttttctttttttcttctcttttctcctatttttttctttcttttttttcttttatctttttcttttttccctattttttctttttttttatccctttattctcttttcttattccctctctcttcttttcaccttcttttttttcttattctcttctcctttttattttccttttcttctttcttcatccttcttactcttcctctcttttttattcttcctttcttttttttctcttcttcctttttttcctcttctttcctcttttcttttatcctcctctctttttcttctcttattctattacctttttctttattttcttcttttttctcttcctttctctt

SEQ ID NO: 427315 - DNA, 67 bp, Oryza sativa
gatgttgggagctcaactgatcaagacgagatagagttgttttcctctactggggattttttagagg

SEQ ID NO: 427316 - DNA, 123 bp, Oryza sativa
tttggttagcacaacaatttcattattatctttctccagccatcacaaagcaaattaatatctgaaccaaacattctaaggagcgttatgggatacacaggaatccgcgaggtttttttttaa

SEQ ID NO: 427317 - DNA, 340 bp, Oryza sativa
gttgattcccccaaactcaaaactatgttgacatgccccacagtgatgccatccagagattcacataataatcatgttccaaatttccagagacctcttctaaggaagcaagtaatgtcaagggcttctgccagcatcaggcacagctttgacgatagccaagtacagtcaggtgacgtgtctggttatacggatgcactggcttcactaagtgatgctctttctgagggtctcagccctagttcggattgggtagtgagagttctagcttttgaatttattctgaatcttctgcaacaaggccagagaggtattcaggaaattaccacatacttttgat

SEQ ID NO: 427318 - DNA, 125 bp, Oryza sativa
ctgtcgttccagctatagctttccccgccggcggtggcgatcgatcgatcctctcctcgtcggttgattagggtcaagaatttttccctctcccagctggggtgaattttttggtttgttcatgg

SEQ ID NO: 427319 - DNA, 140 bp, Oryza sativa
cacaatcaaggcccccgccgcacctcctcccggactccggcggcctcgacctcctcacggaggcacttggggccgagagcttcgatccggacgacgacgacgacgccaccgccgcctcccccgccatggaggacgtcggc

SEQ ID NO: 427320 - DNA, 196 bp, Oryza sativa
gatcgatccggacccaccgcgacaaacgctgtggccttccctacccctacgcccttcgctcccatccgctccgccccctcgccgcgcagcgccggcggcgagaaggttgagttcgtggggggtgtgaccgaacgatggcgtaccgggcggacgacgactacgactaccttttcatggtggtgctcttaggggacta

SEQ ID NO: 427321 - DNA, 267 bp, Oryza sativa
ctcccccacccttccccctccccccacttctacccctccccccttcccctcccccacaccccccctcccttccccctccctcccctccctttcctcccccccctccccccctcctccccactccccctcccccttctctaccctccccccaccccccttcactccccctactccctctcttccccctacccaccccccctcctcccccccccccccccccctccctcacccttctcccccctcccctccccacccctccccctccct

SEQ ID NO: 427322 - DNA, 249 bp, Oryza sativa
gcggttcatggttgcaatcaagcgcaagcgggagaaggtgcctgggcttgccgaagatggagattcttccccttctagcgctaatcgatccgtcgacatggaggtggaggagaaattagattacttttgtgctggagcctaagaagatgtgagcagcggctgcagaatagagatccaggatgaggctgcgtctttaagaactactccatcgttttctgctcgagacctgagtagagctcgaagaggatc

SEQ ID NO: 427323 - DNA, 470 bp, Oryza sativa
ctttttccaccgtagcacgccgtctccccgcccagcgaccttggcaactccggcgaagatgggcgccttcaggttccaccagtaccaggtggtggggagggtttattacttcttttattttttttttatttttctttttttttctttttttttttatacttatttactttttttattcctaactctttatctattctcatcttcttttttctatatctttctaattttatattccctctttctttctttttctttcactttttacttttcctcttctctttttttttcttatattatatatcttatttttctgctttttactttttattctattttttttctttttatatctatttctttactttttcttttcatcttatcttctttttattttttttcatttacttttttttatatttttttctatttatttctactcattttcttttatattactttctctcttttct

SEQ ID NO: 427324 - DNA, 324 bp, Oryza sativa
tggttttaggaggcaacacgccgccctgcgccggcgtcgttgtcgccgtcaccgtctccgccaccgtcagattcttctaagcggcgatggccatggcacggcgtttccgccttccgtcttctttcctcgttctgtcccttctcgctccttcttcaaccgttcgatgacgcctctttgctcttggtcgtggtggttgtagttttggtccgtctgggtatgtcttttgttttattcctctttttcttttcttttttttttctctctctttctttttcattttttcttcttcttttcttctctgctttttttcttttttactttttt

SEQ ID NO: 427325 - DNA, 88 bp, Oryza sativa
aataatacaagtttgctcgtaggaagtggtgctaagggtgtgtttatatgctattatgatctagacaacaactggtggattagtaagg

SEQ ID NO: 427326 - DNA, 377 bp, Oryza sativa
caagattcaaattttggttgcagttaataaaccaacaagtaacattcagatcaacactaaaaataagttaggttcatcaaactacaagtttggattccctcacatatgactactgacagctcgattctttgaatatcgcatccaaattttcatgcagttcattgtgccaaacaatgagccttgcccatgctatgacatactgttcatgtgcgagtgagtaatcaccaactttagcattgacaccgcctttgccccactccacattgtcgctgcccttgtaaccgatctggctcgctgggtttgaacctatacttcccttcactctggcctttttaagggatgcagaccattttggcagatcggattataaatcattt

SEQ ID NO: 427327 - DNA, 86 bp, Oryza sativa
gtgatctgccgcagcggcggcatcagcatccgggggggttatagctatgtgatccgtgcaccatacgatctcccgtggctcgagag

SEQ ID NO: 427328 - DNA, 95 bp, Oryza sativa
atttctcagcttatagtcaggtgtggtctgagctgtggttgtgagatggctcaggctttggcgtccatgaccgggctgtcgcagggcgtgcagtt

SEQ ID NO: 427329 - DNA, 181 bp, Oryza sativa
aatctccttctccagctctcaaccgtatatccggtcccttctcccgtcgtcactgccgtagtgctgctcctcctcctcggtggaggcccacgcggtgccgcgggaagcccggtgtcacggaagttgtagccgagaaggagactttttcgcatggcgaagaggaggaggttcactctaacat

SEQ ID NO: 427330 - DNA, 211 bp, Oryza sativa
gttaatcaaaacccacctcctcctcctcctgctgcggccaccgctcgccgtcgcccgcgccgccatggccggccgccgcctcgccctgctcctcctcgccgtagcctccgtgtccctcctcgccgcctcccccgccgcggcggctcgcccgtgccacactttcttcgtctccttcgcggccaaccccaaccccatcgtcggcgacggcgag

SEQ ID NO: 427331 - DNA, 170 bp, Oryza sativa
ttgggtttttcaaacggaggggcttcctaacgaacaatattctctggcctgtacgtaactgtataacatggcatccccttataacaatatgacaaagaattgctgtgcggtggaacatttgcatttttgaaaaaagcacaactgtgcaaatgacttttgaaatttacaat

SEQ ID NO: 427332 - DNA, 310 bp, Oryza sativa
gtgactttgaactacctgcagctgatatttatgagcgtcaggacgtgtgtgggaatcgaacagaatattgtcagccttgcaggaagtatgtcagactgcgggaacagattggacatgacatccagtttcattctcaacccattgttgcttcagaatcttcaagtgacagaagcacgctggaagaagaagagagttatccagcagaagaacaaccagtacgacccaagcacactcatggcttacaacgcaagcaatttcttgtcacaattgtgatagctggaatttcaattctggttggatcagttctgct

SEQ ID NO: 427333 - DNA, 298 bp, Oryza sativa
gttattgtacgcttcaagccaaagcccaactgcgtggcgtttgtccatatgataccggtatcaggctatcctattaggctttgaagctatcttctgcttgtagattctaggtaatcttttatatatattgtataatagaaatttataagtttgcactgtgttgtttatttttttttgttttctttatcattcatcttctttttttctttctccttctctttttttcctattctcgtattattttcctttctcatattttttaattcttattcccttcttccttctttaccctttttat

SEQ ID NO: 427334 - DNA, 105 bp, Oryza sativa
gataatgttaggtgaaagtcccacacacttcagggtattgttatcgcaagagggcgtgtagtccttggtcgacccacggtgaccatggacgcatactttgaggtt

SEQ ID NO: 427335 - DNA, 104 bp, Oryza sativa
gtttcatactgagaagcaaaacgagcaccgtgcacaactactctctgaagaacactgttatggctttagatgtgttgattatgatggttgctgattggaagatt

SEQ ID NO: 427336 - DNA, 563 bp, Oryza sativa
gggcaaatgcgtctttttacaatgaagttaacggtcaactgacggtggactgacggcaatggcataaaagggaggagaaacttgaaccggtggcataaaaaggagaagccaatttaaagtggcatataagggagccggttaatttagagtggcatataagggattctctctttttgttttggagtgaaagaatctactgtattttcttatgtacatattttctttgtgttgttctaaagtcttctcatattgcttagcataatttgttggtggcaagcttttgtttccaaataattgtttccgtccaagatcgtgcactcacacatgatctgaggacatactaatctggtccagtttgttccccaaataattgtttggtggttcattctctgaagtaccccctccattcttaacccggcccagattattccccaaataagatgttgctttagaaattgtgcaggcaaaccatgaaatcttagctcactaatatatgccaaaaatatatataattcaagatttgatatgtgaagatgccatcgatagatttacaatgatttttt

SEQ ID NO: 427337 - DNA, 331 bp, Oryza sativa
gttagtgctgcagacaagccacccccttcctcgcggagactgctccccccacaaacaaaagcaatcctaatctcggattcgaggcgaacgagcggcggcgagggagggggactagcggcgatcgcgattggagtcgggtggacaccgatcgcggcggcgctctgggggatcggggtgtggactttagggtctgtgtttcaaatgacttatgtaaccatctatcttgttgaagttgaatatgttgatctggttgatgtacaggctgtttttgacaatattgaggacaagtacgtttctgagcaagtgactcataatgatggtggccctcttg

SEQ ID NO: 427338 - DNA, 190 bp, Oryza sativa
tgatccttctctctctctctctctctctatagggggggttttataaataatcctcggttcacccttctactctccaaaccctagccgagctagatatccaccctcgtcggctgatgtcccgtctctggtgtggactctccgcctcagatccccacaccgacggtgtatatcccgtctcttaatcatcaca

SEQ ID NO: 427339 - DNA, 470 bp, Oryza sativa
atcctgcaacctgcaggacatatcacgggggggttttttatgaaatattcaaccgttaactgcattaagcagggtgaaaaaagcattgcgcgtaactgcacttaaggagggaaagaataatggtacccaaagtaatgattggatgtctgattatagaacttgggaacagacaacagaaaggttattttcacgaatattacatccatcagaggttgacagggggcagtgatctccagatctggatagtgaatctcatgtaacttctggagctaacagagtttggactatccataattgaccatatgtctgaggaaactccaatccttcttgtgcaggtactagtatttagattacttatttggaatgggccatgggatcaatttgctgaaaatgaacatgcattggattcaagtgcgcaagaagatgctctttcgtgttatgcctgtgctgtatttgacgctaaagggtgg

SEQ ID NO: 427340 - DNA, 348 bp, Oryza sativa
  unsure (1)..(348): unsure at all n locations
aatcctccaacctgccactacatcttggtggcttttaataaaaanatcggtcattacaaacatcgcnctcgctccctacccagcttcctcctcattacccgacactgattcctaccgccccccccaatctccaccccgtcccaacattacaaccaattacctccccccttggctcccccccaggcccacctgatactgccaaccctaccactctccatccacccccaatcttcgctccttccctatcaaaaacataaacctctcttcctacaacctttttatctcctatccaatctacccaatcttcaatcaccctcttttcattcccctcatcctactacccgaacc

SEQ ID NO: 427341 - DNA, 495 bp, Oryza sativa
  unsure (1)..(495): unsure at all n locations
gttttcccgctcggcgacgccgacgcgatttcctcgcctcgctcgatactgaattggaggcgaaattgtagatcatatagcanagagagagagagagagagagagagagaggaagcanactcggaccccttgatttctcggctagatctgagatatcatcgcatcatgggactgctggggttgaatcggctcatgtccatacagcgggagcagcgctgtcgccaaatcgaagccaatcgtcttcttgcatccactgataaaagaaaggggtctccctgcaaacaagataattcccgatgcagcaaaagagagagatattctcagccagaccttccggaggacatttggcgccatatacattccttactgtcacttcaagatgctgcccgtgctgcttgcgtgtctcgggcttttctatgtttatggaggtgccgtccccacctcaccttcagtttgcaaactctgggcttgagtgaaatggcatgtaaaaagggt

SEQ ID NO: 427342 - DNA, 308 bp, Oryza sativa
  unsure (1)..(308): unsure at all n locations
tgctctgcccgccgaggaggccaaagagcaaggggggggtttgattataaaaggcgttggccaaaaacgccanccagttagagcattccaagcaaggctagctcgccttcgcctgtacaccttgaagtacatgcatgatctgccctctccgaccccttcggcgactttcctaagctgcactaaacagtgcttgcagccagtgatgagtctactgagcatggactggtactactcgactccgtacgtgtgtgtgcttactcaagacgtggtgctaaataaaatagtatgtcatcaagggccgaggggcc

SEQ ID NO: 427343 - DNA, 179 bp, Oryza sativa
ctacaccaacgactccattagcattcttctcttccgaaaaatacatctcctgcaccagaccttcaccatccccctttaattccttccctaaccactcctgcttcagctcttgatcctccaactgctttcttgctcaacctcactatctccattccccaccatattaccttccacccatc

SEQ ID NO: 427344 - DNA, 377 bp, Oryza sativa
gtcgtttgcgtgcataccggctagacactgatgcctgggcatattgaatgcgcgagcgtgtgatttaaactggtatatatatgcatcttttcgacggggatgctggagaaccggtgtcacgagctgagcatcctagagcggagcaggaacgagcatagctagaggatcccctgtgtgacggccccatgccccgcggcgggtggtgggctggtaggggactggcacgggaacggaccggcttcaccgtcgcttccagggccacaggccaccaagacggcgggccggccgagctcttctcctttaagtggaccaccctgctcatgctgatcgccacgctgctcatgctcatcagaagtctctcagtcacacggatagtt

SEQ ID NO: 427345 - DNA, 264 bp, Oryza sativa
tccgccctacccgcccgcaggtgactaccccttcttctccatcgcccacgagggagagtttggaagctagctggggtttcatccacagccgccgacatggctcgtggccgccgcctaggaggcgagcatgtacgcactgcagcatggcgcgaacccccatcctgccgatgacgctcatgaacgccatccggctgggcctgtgacagacgatctagtccaccgccgccccctgaggaggggggaaggcagcccatgtgaccccga

SEQ ID NO: 427346 - DNA, 454 bp, Oryza sativa
ctaggcagatatagaccttacacaggggggctctggtctgcatcaaggctttgcataactgctccgagctgaagggagcaaagatcaatggcaccaagatcggaggagggatgggatgaccaacctaccaccgcctggcttagaccgtcatggacagctgcctccagatagagatcgacaagatcattaaagccatgatgaccggtaagtgaccggagaacttctccctgatcatctactacgatctgcgcacctacctccagcaacaggaggtcaatggtcaggccctcaaccagcgtgatgatgctcctgagtgaagccatgtccgcgcctgtgctggtaggcactgcgcgataataccctgaggtgatgacgaataccagtttgagacgggctcacgtctgctactacgccggcaaggccacctacttcgcgtagtgattcgacactagtt

SEQ ID NO: 427347 - DNA, 441 bp, Oryza sativa
cacccctgcataccccccgggaccccccacgccggcttttttaagcgccacccaagaacgagggcaaggggggccatttttaaaaccccgggggtgcgtagcataagcacccccgccctcctaaaaagaatacacactgcagtcgccaccccacccccctacatctggcgcaccaggtccgcccaggaagaacttgagcaatcgatcccgcccgatgcccatggatgccgagatctcaaccgggagactgagggccaactcatcttctcgaccaaaggccctgccgatgacacccctcataagctggatcttgagctctttgatgctgtgaacgtccaagcgagcacggcacctccgggggcaaggtccatatgctatcctatcaagaaagcacagagcaagcggtggcctaggctgctcaagaaggaaggcaagccacct

SEQ ID NO: 427348 - DNA, 552 bp, Oryza sativa
aggttgtggaggaggaaatcctcgatgactccgatgaggattgggacccacgcaagaagggtgccactgactccgattccgaagtcgatttcgaccgcaagagggtctccaagggcggcaggggcagcggtgcaccacgcgggaggccacgcgggaggcctaggaaaaacaatgctgggaggcctgcacacctcaaggacgaggacgaggtgatccaagaaacagtggagtatcaatatcccccagccgctgacatgtttctacagcttacatccgttgctgctgatccattcaacttcaagggctatgactctgtgcctgtcattcttagcttcttctcaaaatacaaggactcagaagtgccggccacatacgacgacaaggagctgctgcagacattgggtggcaagaaaggtagaaaaaatacggccagaagcttgtacccagctgcaaaagaagaaggtgacttaaaggtggcggatggccataggggtcggaggaagtcagcaaggagtatctactcagcaagataggcagaagactcatattggt

SEQ ID NO: 427349 - DNA, 410 bp, Oryza sativa
tttttaagcttgcctaaatacacaaatggaagggggggtctgttgagaccttatgagctatgaccacaaggctaagtgaggctatatgagatcctgcaatcataaccaaccttgcatcggagaaacaaaaagactctaacattggaagaacaaagagatctttatgatcaagagattactgattatgctctggtcattgatgatcctcgaaatgcaacaaaaaacttcaaatggcaaggcaagccctgtaagactggacatgcaagaatgatctggccaatactcgctgatctatgacctactattaaccatcttatagaaagtggggacacatgcaagtccagggctggtccatgtgctacatgttaacatatcatggcgctgtactgaataatcattactaatactat

SEQ ID NO: 427350 - DNA, 504 bp, Oryza sativa
ttttcctccacctaaacccccacatcgccctaggggcctgtttacccttcctacctggccgacgccgccaccgccgccgccatggccgccgccgccggcgccatccgccgcccgctcctccgctccgtcgccttctcctcctccaggtcccgctccctcctccacctcctctcccgccccctctcctactcctaccccccttccgcctcccccaaccatctccaccacccccaccagcagcagtggcagccatcgcctccgcctccgcctccgccgccgcaaggacctcctccccagtggtctcctcccggaaactaccaccagcagcaggcccctccccctccgcgccactactacggccccccgcagcatcaacctcgctacaactacggtcctacgcagccacaggcgccgccgtcgccgcgcaacgactacgggccacctgcgccgccgtcgcagcagcagcaagagcagcgggaggctgtggtggggccaggggagctg

SEQ ID NO: 427351 - DNA, 373 bp, Oryza sativa
cgcttttccgcaacccaaccccctcgtggcctcggggggcctgtgtagctcgctcgaggccgtgcgcgcgcgcgctaggtcgccatggcctcggaccaaaccctccccgtcccggtctcggtcgagctgccccccgccgcgcccaaccctcctgacccgaccgcacccctcctcccgcacgcggacgacccctccgcaccccccgccggcgccgccgccgtccgcaagctccccgtcaagcgccggtccccgccgccgcgcccctcctccccctactactccgacccggcctcctccgaccccgccgccaagcagcagcctcagcagccgccgccgccgttcaagttccagcggatttggtccgagtccgacg

SEQ ID NO: 427352 - DNA, 366 bp, Oryza sativa
tctagatctcggaagagaagaacacgcaccgcggggagaggggagagaagcggaaagctccaccgaatcgaagcccccacacacgcgaagctggcgcgggaggcggccgacgcgagcgcccggaagcgcaaggcggcggacggcggcggggagggcgacgccgcggcgacggtcccggaggaggcggtgatgggggaggcggcggcggcagccgcggcccccgagccggtcgtcgaggggggaggaggagggggtgggggagtttttataccctaaccctgccgatgaaggcggatgcgatggtgctaattctttgctccctaggtgatctgacccatgtacgtgccaggatctccccacctctag

SEQ ID NO: 427353 - DNA, 222 bp, Oryza sativa
ggtattcgggagccgggagccaggaggaacggggtgcggtttttgaaacgggcacccggatcaccaccggggcggaggagaccgggcgccgggaggcggccgcccctgtggcgcaacggaggcccccgggaggcggacgcggccgcgccgccgaggaggccgggcgaggccacagcgaaccgcccgtccgctgaagccggggcccccggccaccgggcgggg

SEQ ID NO: 427354 - DNA, 560 bp, Oryza sativa
ttttcaatagaaaggactaaactatacattacgggggtggtttgtaacagtggcgcagtttccaagcttctagccaagaagtaacaagtaatacaaggaactgtatgtcaactcatccaaagattccttgatgtggactgacataatgttggacaaacacaactaatccatctcattgtcctaggctatagccaatggcacgttttaaagtcaccaacataaacacatttgaaattgctcttacaatatttattatgccgtttcaattgtacctaaatgcccttttagacatcagatcttacaggaacaatagttagatattcccatgaaaagtagagttagataatattttgcggctttgcaaagataattgataggcaagatgatgaaccagtgtagcattttgactaaatgtggaaatatgggctgcatctctaatttctatgccttctaccctgaagctgttcttttccactccaagatactgcttgctagaacttgtacttagtgcattagttttcttaggtctcttatcaggtaggtgattttttaggctgatt

SEQ ID NO: 427355 - DNA, 239 bp, Oryza sativa
cggacgcgtgggtaaaatttcgaacgcagccatggccgcatagcccttcgccccaagttcaaacacctcgctctctctctctctctctctgcccgtacactcggcgcatcgcctcctcaggcggcaacagcggcggcggcggcgatggagttccagcagggcggcgggggcggttgctgtgccctgccaggttcgggacaagttctcggtctaccggaccccgaacctcgtccgcgcgc

SEQ ID NO: 427356 - DNA, 526 bp, Oryza sativa
acggttgtgttcgccggtgagccgcgtattccattgcggcgatgttacacacaggtcttgtgggtctaacaatagtaccttaattgtggatgagggagagagtgatttgattacgatagtctggactggcagagatgctgtgtccctatctagtgacatcgatgagagggaggcagtgttcagcttctcacggggatagaaaaggagattgcgtactacttctaagacatgaactcggaaaagagattgaatggctagtgaactaattcctgaaagatcgagtttcaagttgactgacaaacgtatcttactcgttccctcaactgctcgactgaaagaactctgcatacgagtccgcatctccttatcgaaaagtaaagcctattgcataggtactccagcttcagaaaaaaggaaacccatctatgatactaatgcaggcctcaggattgatacagaaccacatcatatcgaagcacttactgcgcattagtttatgctgccataaaggataatcaatccaggg

SEQ ID NO: 427357 - DNA, 380 bp, Oryza sativa
ctgctactcctgggggggccacccctccattcccccctcgacccacccctccgccggtctctttacttctcgtctaacagatcgtaggggaggctttctaaaactattgggctgacaacaatccttgcaggatatcattagcgaacatgaacttctatgtgcacttcttccaaaaacagccacctgatgctgctccttctattggagcctcactttctgccatacattacccgtctacacccctgctcgtgtcgctgaacacctcctgccaagaacggtcaagattgccccacaatttgatctacccaatccatctcaaaagatgacagctcatctgatgacactgcctgtatgacttcgacacaatctaaaggctttgt

SEQ ID NO: 427358 - DNA, 302 bp, Oryza sativa
ttctgtggtgacacggaggcgttctggacgagaagaagatgtggactttcccgtgtgttttttttttcgggatttgctttgatccccttgtttgttttagctctggatgttgattagcgtcttgttcatagcaattccactgccaccgtgtgagtgtgctctgcttgcctgatgagggcaagaaaacttccatggatccgtctctctgggaggaatgaataaaaaggatgaggaaataaaaatgattcagtgccaaaagaaaataatcaataagctttcctggggccccggtgttagcttgg

SEQ ID NO: 427359 - DNA, 300 bp, Oryza sativa
ttttgtcgtaacgctatacacggggaaaccacggggggggattgaggatattggcgggctggacaaacaccgacaaggtgcaagaggacagcgtgccattgactagtgacgctggcaggaacaagaccgggacgaatagagagcgcctgtaaagaagctacaaagagaagggcagatagcacaccctgaggacaccagcccccgcggcggtgttgagctccatgcagctgacggcggcgtggatctgccaactcatggaagagtgtcagaggaagggggcggagcatccctgcgtcaact

SEQ ID NO: 427360 - DNA, 501 bp, Oryza sativa
gcttatttgattctgcaaagcaagcaaggattacgcaggtgcttattgataaataccagggggggcttaaccctgcaaatcttatacctacaagtactatgtcagatgttgaccgggccctggaaagactagattctaaggctgctgctgagacacttaaaaagggcagggaaaaaaaggctatggatcctttatcattgctggctatatctataataaatgagcaacacattgtatgatatactgaatcagagagatctatccctggaccagatgagaaatcaatttatccacaaagggaggaattcagaatggcgaccatcaccaatactgtgcaagctttttgacataggcaatcctttcatgggaaagccatttcatgttctaatggccaagaagtaagatggacagccttatgttcatgtcagaatccaccactaggacaaacgaagtggaaagaccgagtattgttccacatcatacttgtgtggtaagagcaac

SEQ ID NO: 427361 - DNA, 124 bp, Oryza sativa
ctttcttccagaccagcagcaccccccacaccgggggggggttaacaaaaaaaaacggggggggaacaacaccccaccaacacagggcacacaaggcggccacaaacccacccccgaagaccca

SEQ ID NO: 427362 - DNA, 390 bp, Oryza sativa
atttattccattcatggatggtgggcatcacaggggaacaataacataaacggacagactgatctggttgcctactgtgacggtggcatcaaggataacacaaactcagaaggggagttcctttctgagctgtttactatgctgaagaagtctggagctaaatatacaattatttatgctattaatgcctatggcttgctagagagccctataaacctgccgatgggcatgtacctagaagagaagactaatactactaaacccggccgaggaaaatgagatggggagtgcttagtaaaaccaactctgctagaacgaaactctggcggaataacgctgataatcatcttgatatcaagactgatatgtatgacgggaattgattcccca

SEQ ID NO: 427363 - DNA, 451 bp, Oryza sativa
  unsure (1)..(451): unsure at all n locations
actccatatcaaaggacatnaagggtggtgtcaattcaaagcaaggtgtggaagcatcaacatcggttggggcattgcttgcaaaacgtgcaataaaggatgatattcacaatgcgatttatacaccaaggaaaggagatcggattgcagggaagactgaggttgtgctgcgtgcacttattgataatggggtggaagttaaggtgaaactcaagccaaggaagccaacaaagaatgcactggctatgcagcattctacaatctcactgatggctaaactattcatccccatgactcctactagaaatgctcagaagtcatgagagtttctgttactacatggactggaagtctggaagagctggtgctactggagcaccaccctctgtgtgcaaactttgggtcaacacttttttgtcataagaagggagaaccagctctaccttatagc

SEQ ID NO: 427364 - DNA, 544 bp, Oryza sativa
  unsure (1)..(544): unsure at all n locations
ccgggtcaccccgcgtccgtttactccccccccccacaccccccccccaggggggtcctaacttaccccccccggggggaaaacccccccccaaccccancgtgaccccggcccacccccccccggccgcccacccaccccctccaccacccccccccccacaccccacccccaaccccaccaccccccgccccaacccaccaaccctgcaccacccccccccccaccgcccagaaccccccgcccccccctaccccccccccccccccccgcccacccccccacaccccccccccccaacccaacccccccacccccaaccccccaccccccctccgagcccccccacaccccccccaccccccccccccccccaaccctaaccccccccccccaaccgacccccccccccccaccacaaccacacccccccccccccccgaacccgcccccccccccacccccccccgcccccccccccccaaaccccctcccccccccaacaccccccccacaaccccctccccgccccccccgccccccc

SEQ ID NO: 427365 - DNA, 389 bp, Oryza sativa
tttttgccccctctctgctcctggttagtattacccagtgaaattattagcagggttttaaatcttctgttatagctgctatctttcgctgttgctgtttgagaagtgttttaatttatttattctcatatacaatttagctgctaaaaaaaaaaaaaaaaaaaaaaaaaaaaaaaaaaaaaaaaaaaaaaaaaaaaaaaaaaaaaaaaaaaaaaaaaaaaaaaaaaaaaaaaaaaaaaaaaaaaaaaaaaaaaaaaaaaaagggggggccccttttaggggacccaattttacttccccgggcttgcaacgtaaaattttttttttggggcccccaaatttaaatcccctgcccgcgttttaaaaaccggggcacttggaaaaccctt

SEQ ID NO: 427366 - DNA, 436 bp, Oryza sativa
ggcagttttgtttattcaacaggtgaccctatgctcacctagaggcgtcatgacccactgaccggcggccaagaagaggaggttcctcgcgttctgatgaaatggagatcaacacttcaattttcaaaggcaaatccaattcgatcatttcagttgaggatcgagctgggcgagtctacgaggggtgcacgtaccatgttaaccttggagctgaactcctggacgttgtcggcgccgccgccgaagttattgtacacgctgccggtgatgagcagcaacaccggcatcgagagtccgtcgcccacggtgcccaggagcccaagcaccatcaacaccacgttcaccgtgttcgtgtgcatgaacaccgtcatgaacgatccgagcactggcttccccttcccggcgctgcgaacgtcgtcacccatggccgccgtga

SEQ ID NO: 427367 - DNA, 605 bp, Oryza sativa
gttagttgcggcgcggcgcggagaggcgagcggttgtggtttttctctcattcttccctcccttcccccccctacttctgacgagccagctccttatttcttgccctatcctatctctctttgtcaccttccctgcctccttctccttttccttcttccttcttctctcttcttctctttccttccctcttttttcctccctccccttctctctttctctccttcttctttttcctttcctcctctcctctctcttttctcctcctttctcttcccctctctctctccttcttctccttccttctccctcccacctcttcctccctcctctcttttctctccctccttttttctttctcttcctcttctctatttcctccctcccttcaccttctttccctctttctctctctatctccttcttcctctcttttctccctttcccacttctccctccttctcctttctctcccttcttctctcccccctccttttttctcccccttctcttctcctttcttccccttctcttcttctttttcccctcttcatctctcttcttctcttcccctcatttccccttcctttctcccttttctcccctc

SEQ ID NO: 427368 - DNA, 247 bp, Oryza sativa
gtctccttgttttgagaggacattgataactcactcggggactgctttaatgctttagccatattgctgacattgcccgagcctgatcatcgccgaattattgatctaaacttgcgcatatgttcggtctatgagttggtgtctaagacttcagatgcacctccataccgcgcttaggctatttcattatgctagtcactcatacaaagcctaaaatatgaccacgattctttgctggctggttaag

SEQ ID NO: 427369 - DNA, 461 bp, Oryza sativa
ttaagacacaataaaggaacaccaaaaaaatgggtaagaaaggaaattggttcagtgctgccaagaaagtcttcagctcatccgatccagatgggagggaagctaagatcgagaaggcggacaagtcgagatccaggaggaaatggccatttggaaagtctaagaagtctgatccttggacctcaacagtggcagtgcctacctctacagcaccgtctccacagccgccaccgtcaccgtcaacacaccctatccagccacagcctgaggagatcaaagatgtcaaggctgttgaaactgacagtgaacagaacaagcatgcgtactctgttgcacttgcctctgctgttgctgcagaagctgctgccgtcgctgcccaggccgctgctgaggtggtccgtctcacaacagtcaccacggttgtgccgaattcgtccgttagttcaaaggatgagcttgtc

SEQ ID NO: 427370 - DNA, 337 bp, Oryza sativa
gttcattttatactagccaatgacacttcatgcaggtcggtccattatatacagcgacgatcgcgttcaccacctgctgctgatgccgacgcccataactgcgagcttccgaggttcagcgatgtcgtcgacccgagaaccgctgtgcactcccctcctcagaaagaactcagatagatggaaagaatctagcaactgacgtaagcataccggctggacataaaaactggcgcaccaacgataggatggcccgcacatgcatttgctctaggaccaaaaaacccaaatgtgtcaagactgagctccagaccgaccattaagaaccctgtgcctttat

SEQ ID NO: 427371 - DNA, 403 bp, Oryza sativa
gtttggttcccttcgcctaagcgaacgaaccagggccgggttctcatcgggacgaccgcaccaccggagcccgagaagacggaggagcaggagctcctccacccccttcaagagccagtggagggagacgtcagtggcggcggcggggcagacaggacgtgcgggatcgcgacgtgggcgctgattcgtgtccatcgttggagaggcggcgctgccgacagcgagtgtgaccgggcccagagcggcgctggggccagaaggcccgttggcggtggaggtccgggactacatgcggtggtacacgctgtacgcgaggacggggagcaccgagtccgcgcacacgatggcgacaaccatcgtggagatgaccaagaacccggtcacggtgacgctcatcgtggcc

SEQ ID NO: 427372 - DNA, 148 bp, Oryza sativa
gccatgtgtgtctttgcttgttgacagtgttggcatggagataggtttgcatatcgaaagaggtggtacacctttaacagtaaagttggaggttgaggatttgcagtctatatgtccaaatcatttcttgtagggaagggttgctacg

SEQ ID NO: 427373 - DNA, 345 bp, Oryza sativa
gaaaagcagttctcctgtaaggaatttcattgatctgaatgatgatgctctaaatgaagacaattcagagtcatctgtggtgtcacatgaatgccatgtggtctccttacagaacaaccatggtaaacgcaaatttgtcattgatttagaagtgcctgcttgtgaagaaggtgtggcctgggattttaatcaggaatgttctccttctggcaaacttgatgtaactcaggaggcttgtgatgcacactttacatgcactaaaattgcagcagagagcattattgcttttgccatgcatgtgccaacaattgcagagacgcctgatgatatgctgcagtggttttg

SEQ ID NO: 427374 - DNA, 130 bp, Oryza sativa
cagctattacaattcacaagtgtagactgtaggatggccacgctctcttactgcagccgcctgagcaccggcggcggcgcccaccagagccgtacacggctcccaacaagacaaccccaccaacacccaa

SEQ ID NO: 427375 - DNA, 159 bp, Oryza sativa
ccacctcctatgagctcgcttttgagaaagaaagctgaagaatcttggtcggttggcccggccagccagccagccgcctcgcggtcgcggagatgatgaaggagtcgtacatggaggtgctcccgccggcttctgtttcaccttttcgtccgccaccct

SEQ ID NO: 427376 - DNA, 147 bp, Oryza sativa
cccacgcgatcgcccacgcgtccgcccacgcgttcgcggacgggtgggtgtagagtcaatgtcccgcggattcccgagcagcttgtcgaaacccttctggtcttgatttcggcgatcgcggagcccaacccgcaagtggagagggag

SEQ ID NO: 427377 - DNA, 156 bp, Oryza sativa
gaaagtatgaaaagaaaaaaaaaaggaaaatcgtgtctcgtctcgtctcgtcttcgtctcccccgattcccgagcagcttctcgaaaccctcgcggcctcgattccggcgatggcggagcccaacccgcaagtggagagggaggtggaggtcgagg

SEQ ID NO: 427378 - DNA, 108 bp, Oryza sativa
  unsure (1)..(108): unsure at all n locations
gttnctcgttcacatccggctaatcatatcaaaccccgtgggggttgcttccacgagatattttcccccaagaaaagttggagtgagggatgagtgctcttgctatgt

SEQ ID NO: 427379 - DNA, 209 bp, Oryza sativa
caacaactagcgaattcttcttgcagataggaaaaaaaaaacgaaagctgagagatgaggagcagctcggctctgttcttggcctttgttcttctcgccgtcttcctcgcggcgctccccttcgccgaatccagcggtaggcaccaccaccaccaccactcccatctccatggcagaggggaaggcgagagaggaggagaagcacggtc

SEQ ID NO: 427380 - DNA, 117 bp, Oryza sativa
aagaaacatgaaacattacaccaaaaaactagctagctagccaatggtttacatgtcctccttccgacttgccgaggcggtggctgcactattggtcattggctcacatgccacaga

SEQ ID NO: 427381 - DNA, 357 bp, Oryza sativa
tttcttttttttttccccccttttttttttttttttttttgtgtttttttttattttttttccctccctccttcccccttcttcggacaataaaaaaaaaaccaaacgggcccaaccaaccccaaaaccacccccacccccaacccaaccagccccccccggaccccccccaaccccccccaacaaaacccacaacccaccccccccaggcccccccaaaaccgccccaacaaaaaaaaacaataacacccccccaccacccccccacaactcccagacagacaccccccaacccccacccccacaaaaaggggaacgccccccccccccagggccatcccaacaaaccccccccca

SEQ ID NO: 427382 - DNA, 109 bp, Oryza sativa
cgactaatggttggatatgttagcagcgattttgggaaggggcctttctaacatctcatggcttcagtacccgcaatgcatgaccgtgacaatgttgaggccttccgcc

SEQ ID NO: 427383 - DNA, 389 bp, Oryza sativa
aacacttatttgctgggagcaatagatgttatattagaagtcccattggcccccaacatggggcaaagccttcctcgcattcgggacggaaatacatatcaagtagcacgttttgctgttttagcatcccaattccgagcagtttggtgacacgacacactgaaaagatgagcgctttaagtatcaggcctcatacggctggctggagtggcccaagtccggggtccagctttgcttctctatagtaagaacttttcggatgaattcccgcctgtcctcactgaataggggggcagccttcgaggcggctaattaatttgggttagaaaagcaagcagtgagtgtggggatgtgagcttagaaccacaacaactttggcgctccagtgg

SEQ ID NO: 427384 - DNA, 107 bp, Oryza sativa
cacgatctcagcctccagagaaagccagcgtaaaaggggccaactacattctgaagcgcccgctaggcaccccgctcgaaaaaacggaggacaaccgaggtcccaac

SEQ ID NO: 427385 - DNA, 200 bp, Oryza sativa
gcggcagaaccggggggacgaacgaggccgacgaaacatgatacattacagcaaaaagctagctagataggcaatggcctgaacgtcctccaccagactaggcgaggctgaaactaccgagctgcccaatgcatggcgggggaggaggcggaggcggccggtcctttacggcggtcgctcttcgagcttggcgcgctcga

SEQ ID NO: 427386 - DNA, 388 bp, Oryza sativa
atctttttgtcttttacccccttttttttttttttggaaagggggggctgttttttattgggcccagggaaaccccaccccaattctcaagctgggagggtaaaaaaatccacattacagttgcaacacaacgggggccatccagctaacaaagaggcaagacatgtatttaggcgaaacatacagtccaacacaacagctggaaaacaagcccaactaactcattacatttatttcatcccatggtgatccacgaaggatgtatatacccggacggaatttccccagtcctcaaagagatgattaagggggtgggggcggctttttcacgaaggcatatcatggtgacgaacaacccttttttaacgggggggaatgttaggcccaa

SEQ ID NO: 427387 - DNA, 89 bp, Oryza sativa
ggctaatgtctgaagggggcaaaatggtatgtgtgacaggagcaggattcttcattgggtcgtgggtggtgaacggcctcctgatccgt

SEQ ID NO: 427388 - DNA, 144 bp, Oryza sativa
cgcaacctttttctttctcttcatctcctcctcctccagagcggcattttagcgtgccccggcgtggaagcatacgatctagtatctaactacaccgttttctgattttcttgcgtcctttctctcctctgctacaaacttttt

SEQ ID NO: 427389 - DNA, 95 bp, Oryza sativa
agcaactagattcccaaggttcatcaactcctaatagacgacttttttaaaaaactatcccaccttttccccacccccctcatcactataattct

SEQ ID NO: 427390 - DNA, 111 bp, Oryza sativa
ggttagtggagcaaaacagacctgaaatagctgatggagaactgtttatagaacatacctctctgtcaaacaggcgcagagagtatagacattgacaaggttttttgacat

SEQ ID NO: 427391 - DNA, 96 bp, Oryza sativa
cccccgcgaccacacccctccgccctaacactctaagcaacaaactcccctgaacaacaaccgcgaaattctaaatcggctccccccctaaaaacc

SEQ ID NO: 427392 - DNA, 407 bp, Oryza sativa
gggatagtaggttgggcgcttgccgccgccgcagggtaagtaaatcagcgccgctagcgacgcatgacgttagatctaggagccaactagactgttctctgattttcttgggtttttctcttccctgttccaaagtttttgctgtcacatcgaccgttttagcctgccgctgtgatcagatcagtagatctagagctcgccagatccgctgctgccgtggaacgaggaggacatgtttgaaattcttgggacaagaaaaatggaaccactcaaaacatgatgtgaagaaggttgctggagcaccttgccttcagattgggcgtgtgctcgccacaagtagaagacatttggtgagtctgtggcctcttgagatgagattagctgactgcctttgtccgcggtatttg

SEQ ID NO: 427393 - DNA, 381 bp, Oryza sativa
atatgcattatattagcatcaaaaaacaagggggctaagcccatataggcccaacattcaaacataataaccccccttttaggcccaacaattaaacattttaacacccctttttgcacaaagggttcagcccaatttgaatccaacacaacccggcaaacattcaattcaacacaaaatttacaacacagcaaatcagcaaattaactgggtggccactcgggggaagggtttgaaccgggaaagggataggaagggcttgaactgggggtgggacagggacaagaagtgcttgaactgggggagggccggccctaatttgtttaggaaccccccaaggtatgaagtttcagccataaatcacatattttaatcaggggg

SEQ ID NO: 427394 - DNA, 116 bp, Oryza sativa
gcgcgtgcttttgtaagagagagcccccctacgacgacgacgaggatggttttagactccacctccgccaccgcgcccgcggccgtgctcaagacgcccttcctcggggcgaagcg

SEQ ID NO: 427395 - DNA, 140 bp, Oryza sativa
cagcctttttcttttctttctactccctttcttggccgggggtcttatattcctcaatacaaccatcaagggcagccaaaaaaaagagagaacggaagagcaaaataacacattacaccatggcgcgattcgtcatcatc

SEQ ID NO: 427396 - DNA, 161 bp, Oryza sativa
cggacgcgtgggcggacgcgtgggttcctcctccagccgccagctcgttcctttcttcctcgctctcgcgatctgacctccccatctctcctcactcgatttcccggcggctagcgacgcgggaggaggcgcccggccggccggcgagcacgtgctgatcg

SEQ ID NO: 427397 - DNA, 250 bp, Oryza sativa
gagcttttactttactgtggaagaggcgaaaaggacaatccaggatattctgaaggagtatcttgagagtggagatattgatgctgctctctgtctcttcccaccgactccccttcccctccttttcctatctcaccccactttccccttcccccccgccaactttcccccttctccctccctctccttcccttcctcccactcttccatctcgtcctttctcccctctcccccccccctctcctccccc

SEQ ID NO: 427398 - DNA, 64 bp, Oryza sativa
gtcggtggtttagcgagcgcgtgggaggtctaatgcgaggactttttataagctttctacctta

SEQ ID NO: 427399 - DNA, 145 bp, Oryza sativa
gcgccgcatctcagccgctatccgcgtgggcattccgccgagcacctgtcgcgcatggcgatggtttcacaccacctcgcccagccgtccacgcgcgcggttctcttcttgcgccccacctacccgtttttcagtcattaccact

SEQ ID NO: 427400 - DNA, 247 bp, Oryza sativa
cactagggtagagggacacccgcagaggccgggccggaagaaccggggcgacccacgacgccggcgccgatgtttttggccgcagaagaggcgggcactcccaggagggactttgagcccaaggaaacggcttgagaccaccacgccgagctcggaaaccagaccgttgatttcaacgaccacaagcactcccccggatggaaccgtcactcttcaggcatggcgggaatggcaccccgagggcgcc

SEQ ID NO: 427401 - DNA, 418 bp, Oryza sativa
tttcttttgtttttttccctccttttttttttttttttttttggtggtttttttttttaaaaaaaaaggggccccctgacccttcattcaaacgaaaaaaaaagggggggcttttgggacacccaagaaaaggccctccggccgcccacaaaaaagggaaccctaaccccggggggggccctaaataaaccccaaccccccccttaaaaaagtttattggggtggcctgggcccccccccccaaaagaagccggggtttcccccccctgggggggaggggccataagtttaaaaaactttccgggttccccaggaaaattttaaactctccccctccgggaaggagggccccgtggggcggctttgccaaccacgggggggggaaggactcttctctaaaacagagggcccctttttt

SEQ ID NO: 427402 - DNA, 80 bp, Oryza sativa
ccggattgtctccccctcgcgattcctcttgcgccgccgggggattttttaccctcgcgtgctcgtcgccgacgcgctga

SEQ ID NO: 427403 - DNA, 507 bp, Oryza sativa
  unsure (1)..(507): unsure at all n locations
attgaanatggatttttaataattctagttttttctccggggggcctttttataacncgtcccccctcccccccccccctcattccatccctccccccccccatcccccccctccccctccccccctgcccccccccccccccccccccccctccccccccccccctctcccccccatccccccccccccctcacaccacacccctccctcccccacccccccccacccccctacctctccttcccccccccctccccccccccccccccccccccctcccccccttccccccccccaccccccccccccccccccctcccccctcccctccccccccccccccctccccctcccccccccccccctcccctccccctccacccccccctcccatctcctccacatcccccacatctccccctcacccccccctccccccctccccccccctcctccaccccccctttcccccccacttccctctccccaccccctccccccccctc

SEQ ID NO: 427404 - DNA, 57 bp, Oryza sativa
gcggtgtaggcggaggcggcggcggcggagatggctgaccggctgttgagagacgcg

SEQ ID NO: 427405 - DNA, 354 bp, Oryza sativa
gcgagagtgaggccgagcagcgaccgcggcggcgctctcccccctcccgccgcctccacccaccccgtgctcgccggcggggcgaagcctccggtgacaatccccgatccgatcgccgcgctcctctcctctacccccacccccttctccttcgacgccttcgcccgcccgctgtcgtacccgttcctaccggaaagcgcatctgatccgatggatctttcggattgctctcttcaaattttagctgcaccttgtaaggttccaattatctttggcctgcattgtctgttctatcttataaccaaagctcatggcctaacctgctaatgcttcatcccttttcactatggtccc

SEQ ID NO: 427406 - DNA, 100 bp, Oryza sativa
gactgattagtgcagcgcgagcccccggaggcgaggggagtcctttgtaaacttcccccccgagcgcgcggccggcgagaagggcggcaggcgcgggcgg

SEQ ID NO: 427407 - DNA, 159 bp, Oryza sativa
atggctttttctttagcaaagttggctttatcagcaagggatcctggtgaattggtttttccttttggtcctgactatttggagaaccttaatgtcaatcttgatcatcctaaacttagtggggagacaactagccaaagtgatgtcacagaagttgct

SEQ ID NO: 427408 - DNA, 614 bp, Oryza sativa
ctcctttttttttccggccatttctcctctccacctgcgatccatccgttttcgctaggaggaggttgtctttacgccgccgtggtgtgagcttttttgtgttgttttttttctttttttttcttttttttttctttttcttttttttttcttttttttttcttttctttttttttttttttcttctttctttctttttttttttttttcttcttttttttttttctattttgtcttttttctttacttttttttttctctttcctcttttcttttttttttttttttcatcttttttttttcttctcttttttcttttttttttctttttttttatcttttctctttttttcttcttttcttctttttattattcttatttttattatcttattctttttctctatttttcttctttttcttcttttcttttttttcatctttttttttcttttttcttttttttttccttttcctattttattttttattttctcttatctctctcatctttttattcttcttttcttttattattcattcttctctctttttctttttttctgttttctctttttctcttttttccttttcttctttttctcttctttctt

SEQ ID NO: 427409 - DNA, 95 bp, Oryza sativa
ggctcgtgttctgctcaaagaccaaaggaaatctccaaagggggcgttttcaatcattacacggcgcacttcccgaaaaggggcctgatccacgc

SEQ ID NO: 427410 - DNA, 207 bp, Oryza sativa
attttgttagcaagcactcccagacagtaccgagtaatatatggacagtattatcttcaatttctagttacctggagatcaaatgtgacaaatatgcacacaaggggagcatcttcagatgttcttagagcaagcatttctagtgcacctagtacatctagccatggttctgcacaagatgactgtgattctttaggtgaatgttac

SEQ ID NO: 427411 - DNA, 95 bp, Oryza sativa
acggtgatcaaatcggccatgatgaccacggcttatgaggtggtttaaagcgggaacgccattatgtcgccagcgaatgggcggaccgctggact

SEQ ID NO: 427412 - DNA, 111 bp, Oryza sativa
gccgtcgtgaccacctctcgcaaggggattttgtaggggggcttttttataaaaaacatccctcttttacaacccagcacaaaccaaactttatatcttccctgttttata

SEQ ID NO: 427413 - DNA, 173 bp, Oryza sativa
cagtgtctctctagcttcttcctctttctctctatagggcttttctcgagccaagaaaaccactcattaaacccaccaccaccgccacctcctccacctccatggcgatggcgatgcaccggttcagcctctgctgcgtcgtcctcctcgtgctcgcgccgctcgccgccgtc

SEQ ID NO: 427414 - DNA, 145 bp, Oryza sativa
  unsure (1)..(145): unsure at all n locations
ccggatttgcnttccctcgcgattcctcttgcgccgccggcgggttttcttctcatcgcgtgctcgtcgccgttgcgctgcgccgggttgtggttgttcttggcggctaggtcgtggggttttcttgtttcggaggtagggagag

SEQ ID NO: 427415 - DNA, 603 bp, Oryza sativa
  unsure (1)..(603): unsure at all n locations
ctcgagctgaaccgaagcaggggaggggaggggccccccgcaggccccttttaaaaacnaccccccccttccacccccagccaaccaagtcgcaacgcccccccctcccccccccccccccccccccccccccccccccccccccctcccctcccccccccccccccccctccccccccccccccccccccccccccacccccccccccccccccccaccccccccccccccccaccccccccccccccatccctccccccccacccccccccccccccccacccccccccccctccccccccccccccccccccccctcccccccccccaccccccccccccccccccaccccccccccccccccctctcccccccccccctccccacctccccccccccctccaccccccccaccccccccccctccctccactacccctcccccacccccccccacacccaaccacccccctaccccccctcccccccccacacccacaccctccactactcccccccccatccccccccccaccccccccctcctcccccccccacatccccaccccccacctccctccccccccctaccaccctcccc

SEQ ID NO: 427416 - DNA, 354 bp, Oryza sativa
ccttccccttttttttatttcctcctcctccttcttcactttataaaaaaaaaaccaccctcccccccgaggggggaaataccccccacccaaacccccaagggggaattttaacccccaccccccgggggtgggcctcccgcgccccggggaggacgccaaaccaacctgggggggaacttccgggccccctccccccccgggggcccgcgcgcaacccaaaaggggggaactcccgggggcatcgccccccccacttgattccccccgccccccccccaattaaggaaggaccccccccccccaatgacccgagaaccccctaagaaaggaagggcccaaagccccccctgg

SEQ ID NO: 427417 - DNA, 145 bp, Oryza sativa
gaacaatatcttgctgtagctactaacttggagcaggtccgtgtttatgacgttgcatcgatgtcatgttcttatgtgctgtctggccacactgaaattgttgtttgcatcgacacttgtattatttcttctgggaagacactcg

SEQ ID NO: 427418 - DNA, 289 bp, Oryza sativa
atttctctagatcgcgagcgtccgccctaggtttcttcacctatcttgggactgcacgagagcacacatgacggcgagctccaataacctgttaatgaattctgtcgaacagaccaagtaccagacaacagggactggatgctgctacatgctgcctaggcggtgtacattacacaagaaattcacgagagccgacagttctgcaggttctcccttccctgctaggctgttactcctctatggtcacctgtgcttgaatttatcatctgccttgatctcagaaaccatg

SEQ ID NO: 427419 - DNA, 107 bp, Oryza sativa
tttgtggatgccggcaagagcctcctccgcgtgaccaaggactttcaccgcctactgcaaggtcctccaccgggcctcattgagcagagcctgctccggctgaggga

SEQ ID NO: 427420 - DNA, 165 bp, Oryza sativa
aaggaactataagtttggttaaatggttatttatacatgttttgaatcaatttacaagcaaaggattcagaataagtggaggtttgactattttttttgtcctctaatattatttaaatcgagaaaattctttgctttttatttgtgcattcatttttatttatt

SEQ ID NO: 427421 - DNA, 106 bp, Oryza sativa
agttggcctacgacgctgcagtgaaggggggcctcgcaagtcgcagatctccggctgacccagagttggaagctatcaggcagaggagattgcaagagctaatggc

SEQ ID NO: 427422 - DNA, 63 bp, Oryza sativa
gccttctccacaacatctagagatagaaacgcaacggatgatattgaagactccatatcaatc

SEQ ID NO: 427423 - DNA, 61 bp, Oryza sativa
acgatagtgacacggaaacgccactacaccggccagagcattgttgcagtgttacatccac

SEQ ID NO: 427424 - DNA, 94 bp, Oryza sativa
ggtctattcccttttccctttctccaccccagccccaaccatctaccgccgacgacctatcctcgtaggcgccgcggattcaccagcgagggag

SEQ ID NO: 427425 - DNA, 103 bp, Oryza sativa
gctgattcctagacgtgcacacaaacacacgcctgcttttctatatgccacagctggtgtgcgcaagctaccgagtgcagattctgagtggcttctggacaag

SEQ ID NO: 427426 - DNA, 106 bp, Oryza sativa
catgcctcgccgtcccaccaaaccctactaaccgccgcgcgcgagagggtcccatccccgacttcgccgccatggccggcgctcccccgacggaggcggagaagga

SEQ ID NO: 427427 - DNA, 299 bp, Oryza sativa
tattccatggctgcaaatgatgcctgcaaagtgcaaggtgcatcagatgttcatctgatttctggtcacccccttgctgattttgagacttttatatattctgcaagttcagtcattgctaagacatcttgcatgaggaatggcaactgtttgcaggacccgcaagctggcagcttaccatatcaatatcagatatcggatgttttcctgagaaatgtgtgggattggcttgttgcttccctcttttattattattttttttttatctctttatttttttatatcttcttatttttttt

SEQ ID NO: 427428 - DNA, 70 bp, Oryza sativa
acttcttctggacagcttacagttaaatgggatggggagagcttaggagaagttctgcccgagttatccc

SEQ ID NO: 427429 - DNA, 51 bp, Oryza sativa
tcatcgcagagatccaaattcgcccacaagaattcacctctgcttgttgat

SEQ ID NO: 427430 - DNA, 376 bp, Oryza sativa
cttaagaaaatcttcaacttcatatacaattaattcgtttgtacactcgaatagtgataacaagttaaatcaatgagaaaaaaaaaagcatagtcaacattgtcgacgtagtagtagaactagaaaccatcagttgaccgttgaacaaacaaattccacctcgcctgcagcggatccgccaccatcggatcggccaccagcacatgcacatcctttccggccgtcgtcgtcgccgctgccgccgccgccgtcagtttgcgccggcacatggggcaggtccctagcttcacccgagcccaagactcgaggcaccgcgagtggaagcggtgcgcgcacggtgttttcacccacgcctccgttgtggtttttttcccac

SEQ ID NO: 427431 - DNA, 386 bp, Oryza sativa
tggtagacctcccaatcagtgcgagttgtcaacgtaactcacgtcctccccggcggcgcatcagcggcagcgccaccgcacgccggcggcggcgacgtcgacgtcatcgagctctccttcctcgacaccatgttcttcgccctcacgccgctcaaacgcctcttcttctacgaggcagcagagccgtcgttcccggccatggtcagctccctccagtcctccctcgccgccaccctcgccgtcttcgcgcccctcgccggcaagctcgcctaccgcccctcccacgacgacgtcgtcatcgactgctccgtcgccgccgtctcccccggcgccgcgttcatcgaggccgtgtaccacgtcgacgacgacgccgttgtgtcatgtgc

SEQ ID NO: 427432 - DNA, 52 bp, Oryza sativa
tcctatttctaccacgtacaacagcagaagtgagagaggtagaagaagactc

SEQ ID NO: 427433 - DNA, 74 bp, Oryza sativa
ggtctttccttgctatcaagaggctacaggatactcaacattcagagagtcattccgcatctgacatcccaaca

SEQ ID NO: 427434 - DNA, 60 bp, Oryza sativa
ttgtagagaagaggaaggcggaatcagtcgagggcgaggcgtcggcggctgctgcgatgg

SEQ ID NO: 427435 - DNA, 164 bp, Oryza sativa
tcctctccctagcagccaagccaccaagaacccaatcccccattgctagggttcctcgcttcgccgccgtcctcccttctatccacggtattgccttcaccacttcccctcctcccctgccgccgcaaccattcattctttttcttcattctccaaggtggtgt

SEQ ID NO: 427436 - DNA, 56 bp, Oryza sativa
tactctggagagatttgttccatccgctagctggattttgagaagactccgccccc

SEQ ID NO: 427437 - DNA, 82 bp, Oryza sativa
tttttgggggtttttttttttttttttttttttttttttattattatttcgtttaaaaaaaaaaaaaacgtccgaggggaac

SEQ ID NO: 427438 - DNA, 278 bp, Oryza sativa
catctttgtattctttattcacgaccgataatctgtcttgcctagtcatggagtattgccctggcagagaccggcatgtaatactacagatacagacaaccaagaccatctcagagactgatgggcagctagacgagagggaaaaaagctgggatccttcacaaggatatactctactgttcagacagctatggaggaggcatcttcttcggatcttaaccccaaggcgacctattgacatattaagggatgtacatgctgccaaagagcgcgagaag

SEQ ID NO: 427439 - DNA, 58 bp, Oryza sativa
ttaatccccccaccatggatcatccgcctcctcctcctcagactactaatattttccc

SEQ ID NO: 427440 - DNA, 221 bp, Oryza sativa
gcccggactgaccggccggaccgacccacgcggataattccgatacattgctccctgtgatctgccgcggagccgacatcgatcacatccctaacataccacacgcatgtacgcgccacggtcgccatcctgtactacatcctcacagccgcgcgctcccatgcagagcggaggccaaggtcgcttcggcgtcgtcgtacgcgagcacgggcaacggctgc

SEQ ID NO: 427441 - DNA, 101 bp, Oryza sativa
tctcgtcggctggatgggtcttgatgttggcccagatgcctttatgacttgctgagccgcatctgccacctgtaccacgttgattgggaacggagctatgg

SEQ ID NO: 427442 - DNA, 186 bp, Oryza sativa
gttctttgcgatcgtagggatttagccagcggctcacgggacctacgcgaacggggccagtctgggcatgagctacaggtactgcgcgggccagagaccggcgaactcggcgcaggcggagacacttgcgggcatcagctacccggtcggccagacgccggataacgcggcgcaggcggaggcact

SEQ ID NO: 427443 - DNA, 210 bp, Oryza sativa
gctcgtcgccaccctctgtctttcagaaatgggtcaagcgaactcggcgcagggggacagactgggcatcagctacagctactgcgccggccagacgccggcgaactcggcgcaggtggagacacttgccggcatcagctacccggccggccagacgccggcgaacgcggcgcaggtggaggcactgggcgtttgctacttggccggcca

SEQ ID NO: 427444 - DNA, 90 bp, Oryza sativa
ttctgagtactgcattgttgcacctgatacggagatattctgtgatggtgagcctattaagaggcaggatttctctattctatttttctt

SEQ ID NO: 427445 - DNA, 121 bp, Oryza sativa
ttgctgtgttcgagcttcccggacacccccgaggacgccttccttgccggcctcgtcagcggcacggaccagatcatagactggagcatccagtacgcctacatcagcgtaattaggaggg

SEQ ID NO: 427446 - DNA, 66 bp, Oryza sativa
tcttagactggaggtggttcctcgcatgttgtgtatgtatgttagagcatgttacgcatatccccc

SEQ ID NO: 427447 - DNA, 81 bp, Oryza sativa
cctctcttttcggtagaaggtcacacagcccaattggaaagcttggaggcaagtctgcctcttacggctctatagaggaaa

SEQ ID NO: 427448 - DNA, 91 bp, Oryza sativa
cttctctctcagcctcccccgccgcggcggctcgcccgtgccacactttcttcgtctccttcgcggccaaccccaaccccatcgtcggcga

SEQ ID NO: 427449 - DNA, 702 bp, Oryza sativa
caaaacaaacaggggggggaaaaaaaaaaagcaccgaaaaaaaaaaaaaaaaggaaaaaaaaaaagcaaccaaaaagaaacaaaaaacaaaaaaagaaaaaaaaacaaaaaaaacaacaaaaaaaaaaaaaccaaaacaaaaaaggaacaaagaaaaaaaacgataagaaaaaagacacaaaaaaaaaaaaaaaaaaaacaaacaagaaaccgggaccaaaagggacaacaaaccaaaaaagaaccagaagaacaaccaaaaaaaaaaaaaacaaccaaacaagggaaaaaaaaaaaaaacaccagaaaacaaagaccaaaaaaaaaaagaaccagaaacaaaaaggaccaacaagcaaaaaaacaaaaagaacccccaaaaaaaacgaaaaaagcacaacaaaaaaccccgccccgggacaaaaaaacaacaaaaaaaaaagaccccaaaacgaaaacaaaaaaaaagagccacaaaaaaccagaccaaaaaaccaaaaaaagaaaaacacgcaaaaaaaaacgaacaaaaaaaaaaaaccaaaacaagcaaccaaaccaaaaagaaacaagcgaagaaaaaaaaagacaaaaaaaaaaaaacaaaaaaaaaggggggccagccaaaaaaggaaaaagaaaaaaaaaaaaacaaaacccccacacaaaaaacccaaaaaaaacgaaagaaaaacaaacaaa

SEQ ID NO: 427450 - DNA, 66 bp, Oryza sativa
gttttgtctcggttcgggtccggttcgattacggatttttcttttgtaagggggttggcgggaaag

SEQ ID NO: 427451 - DNA, 146 bp, Oryza sativa
cgtctatttgaggatggcgagcccaacaacaatggtgggagtggcaacctcggcgcatctccacaccaccaccaccggccgtctcagctgcgcctgtgcaccaccgacgaggggaacaaggcggcggcggctcgcggtggcggcgc

SEQ ID NO: 427452 - DNA, 142 bp, Oryza sativa
cttgccggcccacgcgtgcggctggttaaaacccctacattcctccctcttctttgccgcggcgccgacatcgatccatccctaacaaataacacgatgtcgcgcgcctcggtcgccattcttttttacattcttacagccg

SEQ ID NO: 427453 - DNA, 73 bp, Oryza sativa
ttctcgttgagtgaccacccaccaggaccatggtagatgatgtgaggagctccctcggtgttcccccccccct

SEQ ID NO: 427454 - DNA, 129 bp, Oryza sativa
tctgtagctcgactccgcgcgagccgaggcctcgaaccctatcccccattcgatttccggcgagatgcccacccgcgtctgagccttgctcgtcggcggcgaggtggggtggttctttttctttttttt

SEQ ID NO: 427455 - DNA, 65 bp, Oryza sativa
agcgtttggttgccgccgtgctcttctcgcgactccgcgagcgctagcctagcctcaccgtcgcc

SEQ ID NO: 427456 - DNA, 333 bp, Oryza sativa
ttcttctgagaagtctccacccccgccagctccggtgatcttgtcgtctcctccaatctaaatctcctcccccaccggctccagtcattttgccaccttcttcagttaagttcccaccaccaccagtaccagttttcttgccacctcctcctgtgaagcctccctccaccacccagatccggtcatccttgcccaccccccccctgtgaagttctccacctttcttcctctcccagatttttttgcctcccttcaccctgtgtaggtctcccccttcatcctgcacccggttaatttcgtccccctccttcagtgatgttttcccccccccct

SEQ ID NO: 427457 - DNA, 519 bp, Oryza sativa
tcccttctcttccctctcgtccggcttcatccgtctgcctcctccctcctcgtccgtggttgttttcttcaggtcttcccctggtgcccctcccccccctcttcttttctcctcttcctttctcttcttttctttctctttccttcttctcccttttcctttttccttcttctcttcttcctttctttctcttcccctctcttcttttttctttcctctttttcttccctctcttttccttctctcattttttattctcctccccttctcttttccttctctttttttcttcccccctttcttttcctctttctttttctctcctcctttctttctctcttctttttttctctccctctttctttctctctctttctcttctttctctttttctctccttttcttctctctctcctcttccttcctcttcctattctcctttcctccctcttctctttcctctttttactattattattctctctctcctctttctctcctctccttctcttcattttt

SEQ ID NO: 427458 - DNA, 121 bp, Oryza sativa
gtttcgttatgcctatttcggatctatccattcgggtgaccgtggcagaccggcaatcccggcggacaggaggaggaggacgacgacgacgacgatcgtgatgggcctccctgaacaagct

SEQ ID NO: 427459 - DNA, 441 bp, Oryza sativa
cccgcaggcacgcaaacgaaagcatggacccaccagagtggccgcccaaaaaaaaaacacggggggggaaaaaaaagacaacgcgaaagcaagaaaaaggaaaaaaacccaaaaaagaaacaacaacacaaaaaaaaccaaaaaagaaaaaaacaaaaaacacaacaccaaacacgaaaaaaaaaacaacaaaaacaaaacaaaaaaaaaaaaaaaaaaacccaaaacaaaaaaagaaaaaagaaccaaacaaaaaaaaccccaaaaaaaaagaaaacacaaaaacaaaagaaacaaaaaagcacaaaaacccaaaacacaccccccaaaaaagggacccaaacaaaaaaagaacacaacaagaaaaaaaaaaaaaaaagcgaaaaaaacgaaaaggaaaaaccaaaaaaaagaaaaaaaacaaaacccaaaaaagaagaa

SEQ ID NO: 427460 - DNA, 283 bp, Oryza sativa
ggtcgccctttttttttttttttttttttttttgttttttttcagcccaccgatcttgactgtatatatacccacagagttacagatacactagctatacacatgccgagggagaaaaacgatcgagaagagattaacagatggattaatttctgggtatactgggatggatcatacatgagagattgtagttaaaagaggaggatgaagaagatgagaatcagaggctctggaggatcttgggggcttcgccaaagtgcttctcgggctggaactggttgtt

SEQ ID NO: 427461 - DNA, 173 bp, Oryza sativa
gtcatagtcttttgtgcgttagccaacgagttcagggcgggacatgatatagttgtcgacctggtcaaccaagacgacctcgacgatggccgacgccgtcgacaatggcgtagtcggcgactacttaaatttcggtggggcggagcgcgagccggagtcgcacgacaggcagg

SEQ ID NO: 427462 - DNA, 260 bp, Oryza sativa
tttcctatattccgactctcgtaagattaagggcggaggattattaaaaccaaaccgctgttttacccaacccccccccctcccctatcttctccccccccttcatcttctccccacccctccccccccccatcccccctcccctccccccccttccctccctcccccccccccctacttccccccctctccccccctcccccctcccccacccttccccttccccccctccctctcccccctctcttccccatcccttc

SEQ ID NO: 427463 - DNA, 202 bp, Oryza sativa
ggacgcattgtatcaaagtgggcggctgtacaagtacaattcatatatacaaaaggacaatgacgccttaccttgatgcactggatgactgtccagtgcttacaatgaaagactaaaaagaaggcattgattcatcaagccatctaatattgtgttagctggacaaatgcatctatctattgaacaacatctatgagagaca

SEQ ID NO: 427464 - DNA, 103 bp, Oryza sativa
gcagagtctcagccgagtccattttggacggggctattgacagcatagggagcctgactcgatcatggctctgaagacaagaaacccccagaacaggtaccta

SEQ ID NO: 427465 - DNA, 201 bp, Oryza sativa
tgctctttgaagattcgccagactaccaatattgggagagattgttcatagacctttttattcaagagggatttcagtttgattatgtttttgaccggacatctcctgcagtatcaacaggtcccagaggaccagggctccaccatacgccaatgcccctgccacaggacacaggtcgccgatggctcctataccaataaa

SEQ ID NO: 427466 - DNA, 335 bp, Oryza sativa
gcgtgcgtccaccaccgagcggcgtagcttgagcgatggcggtggtggagatcaccgagggggtgaggaacctggccgtggagggggagcctgcggcggcggcggcggcggcgggaggtggtgtcgtggttgtttttctctttttcttggtttgttctctttgtgcctttctctttatatccgtctacttccttctatctatttttttgttcttcttttgttttctatttcttcacttctgttttattcttttttattttattcacaactttattttcttctttctcttcttttatattatttagtttttctattttatctttattttctttttt

SEQ ID NO: 427467 - DNA, 352 bp, Oryza sativa
aaaaaaagcttccttagttcccaatgggaagggtttcccttacataggggaaatttttgaactgggccggcttaaagtaaatttaacaacttagccttttaggggggaaattttttgccaatttaatccttttgaccttgggggccatcaaaagactggggggggtttgcccataaggaacctaatacggggttaattttttgaacattgtttatcactcaaaagactggggaggggctaacaatttccaattcggggcaaccttatttacttgaagacctgggccccaataacaaatttttggggcctttacataaggggggggtttcatagggggaacctgttttttttt

SEQ ID NO: 427468 - DNA, 126 bp, Oryza sativa
aactttttcaaacaacgcaaagcagtagcagcagcgagatgctagcatgaagcgatggggatggggatgaggagggtgaggctcccttttctcctccttcctcctccctttcctttttccccttcc

SEQ ID NO: 427469 - DNA, 86 bp, Oryza sativa
  unsure (1)..(86): unsure at all n locations
atactgtacagatcgatcgcaataaaggcanaggggacgtcaataaaagagcgggggcttaaataacccccctagaagaccgcaat

SEQ ID NO: 427470 - DNA, 342 bp, Oryza sativa
aaattaaaaaggccttgtttaatggcactaactgcgcatgggtaatgtatcatactattagggaaatatgtactgatgtactttacactcctattatgcaaatgctaagttacaatatgtactttacactctattatgcatgttataaaaccagcctcgaaatcaacatcggtagctaaacacggaagaaaacgccataggagatccaaaatgatgaccacaccgaggcacgatatttgataatggagttcagctcaggcttacatattctgggcacttgattacgggcgcttctccccgatccaggatatacagcgtcttagagttacaacgacttagggc

SEQ ID NO: 427471 - DNA, 234 bp, Oryza sativa
ttttgtttaggacgaacagggcgactgtgtctcgggtactggtttgtgactgggaaggaccttttagatcttcaggtggttggcttcttttttgtagaataggtttttgtttttttactttatttcgtgcttttttagttattccgttcttttatgttcaggagttttggagggtttttgactttttgttctaatatcttgagagcctttacactttttttttttttttttgac

SEQ ID NO: 427472 - DNA, 110 bp, Oryza sativa
ggctttcttctgaacactactctagggtggtacaatggggggcttcgagggagttatcggcttatttacacatgggtggggagaggtcccacgtcatcgatgtgggagat

SEQ ID NO: 427473 - DNA, 120 bp, Oryza sativa
ctgactcatacgcttcagttttatctttgcttagcttatttcgtcacaaaaccgggcgctccaaaaaacaacaacccccacactttgacctaaaaataagttccagccctgaccgcaaaa

SEQ ID NO: 427474 - DNA, 97 bp, Oryza sativa
tctaacatttttttttcccacccgaacgaaaaacaacccactgggtgggtttgggacacgaaccccccaaaaaggaacaaaacaagcaccctgaaca

SEQ ID NO: 427475 - DNA, 132 bp, Oryza sativa
gccttgcttccgccgcctcgcgccagtgcgtctcgggctgtttcttttaaaatggcggggcggactgaaacggcattcttgaagcagcctaagggtgttctctggtctaagaagaccaccaaggggaagaag

SEQ ID NO: 427476 - DNA, 293 bp, Oryza sativa
catcgcccgcggggaccgacccggacttactggctcgacccacccacgcggccttgcctgggtgctcttgcatccgttccacacgggggggctcaattaataaatggggtgcggacttagagaggcctactgaaactgcgtaaggctaatctatagcctaagaaaaccatagctagggatgacatgatctacttggctcaacactaggcctaagagcaagcattcatactgcttagctaagacgcttagggagagataattacggaactctacatacgacaggaagatgccca

SEQ ID NO: 427477 - DNA, 89 bp, Oryza sativa
cggtcgctcgggcggcgacatgacgactacgacggggggggtggattggaatttcctgcgggttctctcacgatcccatagcgaggcct

SEQ ID NO: 427478 - DNA, 147 bp, Oryza sativa
ggccgacccaaaattccccgaccgacccactcacccgagcttattttggaccaaccacacccgcgacacacgggggggattaattaaaaaaaaggggcccataacaccccaattacagacaccgaccagctctacattaaagcccca

SEQ ID NO: 427479 - DNA, 98 bp, Oryza sativa
ccactctctccctcccacgccgcacgggcgggattctctaaagaacgccgcggcgagaggagagagcaccatggccccgtaggttcccacccataaca

SEQ ID NO: 427480 - DNA, 202 bp, Oryza sativa
ctgttccatacctgctgcaacgcttttagcactcgagggggatattgtggaggctcctgcctctgctgacgtacataataacatctctccacgaatacgtccaccaaacccaatgcttccattaccaaaagcaactcttatcagcttatcaataactgttaagatggaggaatttaatcacttccacggtctatttgaccca

SEQ ID NO: 427481 - DNA, 243 bp, Oryza sativa
gaactatttattctccggtgcgctcccatccgccgggggggcactatagagcttcaaggcggagaacaaccagttctccggagcactaccggatgacatgtcgaggctcgccaacctcaccgagctgatcctcgctggcaaccggctatccggctcgatttcgtcgcctatcacatcattgactatgccgaccccactcaaccttagtagaaacccgatttccgccgagaacctctccttcct

SEQ ID NO: 427482 - DNA, 89 bp, Oryza sativa
ttttccactctctccctcccacgccgccgcgccgggataccttagcgaacgcagcggagagaggagagagcgccatggccgtggaggtg

SEQ ID NO: 427483 - DNA, 58 bp, Oryza sativa
tagttagcaatcgagatcgaaatggaggtggcgagaggcgtttgtaagctgaacccgt

SEQ ID NO: 427484 - DNA, 142 bp, Oryza sativa
ctcctctctctctcaccgactggaggttgggagcgggcgggagtggttgacccggcagcggcgggcacggcaacgaccgtggcgggtggcgggcacggctacagcctgcggtggcggatccggcggtgccgtcctctgaagg

SEQ ID NO: 427485 - DNA, 159 bp, Oryza sativa
ggggtagtttgcatcaggggcagaagcattagaagcggggggcagttgtatagagccatctatctgtacagatcacggcatggagattagagagggagcgaaagatctttccttatttttttttgtatcaaaaatctcagaagagcaggaggaatgagg

SEQ ID NO: 427486 - DNA, 425 bp, Oryza sativa
accccgggggggttttttttttttatttttttttttttaaataaaaaaattttccccttttttttagaattttttagggtgggggaaaaaaaaaataggggcaacttgaaaaaaaaaaattttgggggaccaaaaccttatttttttaaaaaaaattttttaaaagtttgggggtttggggcaaaaatttgaaaacttggttggtaaaacaaaatttaatttcactttttggggggaaaaaagggttttaggaaagggcctttttttttcaaatggccaaacccggtttttcctttgaaaagggaatttttcaaagacacctttttcgaggaggtgcttagcatttaatgggaaaaaaaggggattttttaaaaacttcccccccttaaaaaaaaaaagagtgctttatttcgggggtttttttt

SEQ ID NO: 427487 - DNA, 149 bp, Oryza sativa
cggcccggaactgtactggctggacccacgcatccggaccttcgtgttcagggtctgcacgcaccggcggatgaggggcatttactaattttccccagcaggtcgctccatcaccatagccaacgtcgtgctggaggcagcccgaggtg

SEQ ID NO: 427488 - DNA, 199 bp, Oryza sativa
catgtattgaagggtcctgcagttatcatgaatgggaacagtacagtgattgtagaaaaagactgtaaagctatcatcaccaagtatggtaacataaaaattgagataagtgctgctccaagcagtgtagaagtattacagactgctggtgttgggctatgcccttctatcttcagcatgctttctatgtgtattgctg

SEQ ID NO: 427489 - DNA, 74 bp, Oryza sativa
tcgttagtaccgatggcgcaccagcggctggactgcccggatccgttgccactcctccggcaggtctcacatgg

SEQ ID NO: 427490 - DNA, 101 bp, Oryza sativa
taaatgtatcatgatggacgcccttcttatcgggggggtaatgctgatgagagtgcggcgggcactggcacggccggagaaatcatgcggcacgaccccca

SEQ ID NO: 427491 - DNA, 95 bp, Oryza sativa
tgttttccgcctcttcttcggctgctggatccgatcgggtttcttccattctccgccgccgccgccaccgcgtcgcaggcgccgttcatgggggc

SEQ ID NO: 427492 - DNA, 156 bp, Oryza sativa
tttttaattttttttttatttctcttttttttttttttaacacgcgggagttttttatttgaacaacagtgaatttaacaagcttcatgcttccagagacaaccccaaaggcccagaagcaacagtggcagacagaactcagcatcacgcaaaatt

SEQ ID NO: 427493 - DNA, 116 bp, Oryza sativa
atttatattataatgataccattcttgataagtttgagggggggtatttacggatacggatggcgagtagcaactggttcttacagcaacattttccgtgtgcttggttgtgggcc

SEQ ID NO: 427494 - DNA, 197 bp, Oryza sativa
agcatattctgttcctgatgctgaacatggtgtcaggggttgggttcatactgacattcaagccatttttcgccttgccggatatgcgatgatgtgtagttaggtaacaaaaaggccagaatttatcagacttcagcctggatcctaacctgcaagaggaatatatgtactgtaccgtgtgtaatgtttagttgtgt

SEQ ID NO: 427495 - DNA, 110 bp, Oryza sativa
cacttctaacctcccaaaccctagccatggcgtggggcggttttgactaccgcaccgtcctcgcggccgtacgacgaccggggacctcgtctaacaacaacgaggactca

SEQ ID NO: 427496 - DNA, 255 bp, Oryza sativa
accccgcctcgctgtcacccacgaggggggttctatttcaatcgcgggggcgggttacacaacctactctactacacgcctcaggggtaatgggggctctatcggggcatggccatcctacctcaggcggctgtcaccatcagaactgacccctggcacgggcgtcacaggcgaaacatcctccggtcagggaaggggccaaccccggcgagcctgaggggcgaaggccccgtcgaatccgagggggacaaggcc

SEQ ID NO: 427497 - DNA, 193 bp, Oryza sativa
ttaattattccaaaaacaaaaaataataaaaaagaaggaatgagtgagacatttcgcatctgctgccctgcctcctctcccatcacctgcccattttttcacattgaggcccctctgaaaatacttatatttacaactaggtccctggccgggccggtcggccaccggaaggagcacctcgcccgtgaaggtc

SEQ ID NO: 427498 - DNA, 468 bp, Oryza sativa
aaagcaagcaaacaaaacataaatggccaagactttagcaaacggaacccggacccccccctgaaacccgcgattgcctacaaacaagccttaaattttaagggggggggggagctatggggaagcaaccgggatgatgtccaggcaaacaaattaggggaaccaggggggggggaaaccagggaccattgcccaaacaggctttaccccgggatgggggcctttttttcctaggacccggccttgggggggggggggccccgaaaccggggggacccggagacgagggcgctcatggtgccccccccctgggggaaccccattttggccatgcccttgcccggggaccaagggaagaaccccctcctcctgaacaagggccgaaactggttcttgacccgggggaacaatttctggaaggggggggagttgcccaccaacgtaaaccccctggggaggccccccggg

SEQ ID NO: 427499 - DNA, 235 bp, Oryza sativa
agcaaacaagggattggttcgtcgttggggggttacttagagccagcggactgtacctagcatttctggatgattggacagatgcgaccccctattggcgctggttactgaagccatctgtgttaccgggaccggtgatgacgattggccggcgagcttctcatattgctgttcctcgtgcggggttgaccgtatcaactaaggggtgggagggaacaaatcgagggctaacttg

SEQ ID NO: 427500 - DNA, 323 bp, Oryza sativa
acattattattgattaagaagacacatttacacaagcagcagacaatctagtcgccaaagaaagattttcatgtcaacaaaaaaggtgcagatatctgtcaagaactgtgcataaatagtattgttatatttgataatacttttcctccacttaggaatttgctaatgctttctttaattggaagagtagagagctcagttttggccagtattggcacgtgcgcggaagaatagcatgagacacctttttcttcgaaggaaaatacattgcttatatgtagcaatattgtaatttatgattttctttacttttagcttaaatt

SEQ ID NO: 427501 - DNA, 213 bp, Oryza sativa
tcttggacgagtgcgcgccggtttcggacgggggcggcaaacgcatatacgatggttaggatgatcactcttcctaccagagagagacagagagagagagagagagagagagagagacggttattccttgctagggatctgggtaacgcagcacgagtgcggcgagctgctgcagctgagcattatcaatcgtgcggcggggctgccccacct

SEQ ID NO: 427502 - DNA, 301 bp, Oryza sativa
gccgctggtcctttgcctgcagttgcgtgcagcagtgggcggaaggttaacgccggcgatccatcctcgtcgtgggcgtctctgcacgaggacttggtgagcctaatcggatagcgagtggcagccggcgacttccgcgactacatccgcttccgggccgtgtgtgcccagtggcgctccggcaccatctgcccgcgccgccgtggcatactcgacccgagcttacacccgtgcgggtggatgctgctgcccgagggcacgtggcctacacccgggccacggcaagctacgtggtcacgtc

SEQ ID NO: 427503 - DNA, 336 bp, Oryza sativa
ttttgggtttttttttattttttttgcgggtttttttttaattttttttttttttttttgaggggcaaattaaggcgatttttcgcccttttccataggggcctggccaattttggattttaaaaaaaacggggttttttttgaccggccctgggccctcaaattttttcaggggccccctaaccccagtttttttgttttccatggggggagcccttaataatacgagcccggtttttttcgccgattttaaagcccaatctttcccaggggggggggacccaaaattttccccctttttaaacaaaattaaaagggtgcctgttttggccccag

SEQ ID NO: 427504 - DNA, 301 bp, Oryza sativa
attcttaggggggacccattgagtgttaactgacatgaagagcaccgcaacattggtgtgcaccaaaacaaaccatatagggggaggactcacccccggaagggcaacccagcaacaagccctagtcctctccaggcgagacccaaccgcgttgggatccatttcaaaacaagaacatgaatcccaaccaccccatgccaaagagagaacaccccttcgcggaccaaaccaggagctatctcgccgagagttcaccgggcacaccagcttcctggcaccacccccttggccgccttggcct

SEQ ID NO: 427505 - DNA, 393 bp, Oryza sativa
cgtccgagtctgacatgcctcacagtgacctgtactgaaccgtccccgtcaccgataaggattgctgaatgctacctggccatatttcccttcagttttttttttccatcttgggatgttgagcatgggggccaatgcccatgatccttgggacttctaagagttatccgctggttggttcgtgggcccgaaggacaccgtgtgcatctaccatggttcatgcatcatgcatagctgcccctggaccagtgtggatcccatgccaggaaggatggctggggaggcagcatttacatcacctggcattccctgcgcgattggcccattcgtgtttaattctgctgtgtgggggttgtaggagccatggcattctttgtccagggctcacttttg

SEQ ID NO: 427506 - DNA, 372 bp, Oryza sativa
  unsure (1)..(372): unsure at all n locations
ggtgttcacgctggaatccggcgatccggatcccttggccgccggtgagggcgtcgaagctcccgctggcgaggatccactaggatcgagcgccgccggcgaggacccgtgggcgaaggatttccgcgcggaggacagcgagaagggggacgtgttcgaggagatcttcaaggaagaggctgccaccgccgccgtcgcttctggagagaaggctccgggggcaggcgccgacgagctgtggacgctgagtggggaggatgagaaggatcctttcgcggaggccgtgctcgggggtgggcttggggatcngcaggtgagggcgctgcgattgatgaggccgatgcgtgggtagacgaggaggagngaagagcg

SEQ ID NO: 427507 - DNA, 363 bp, Oryza sativa
gtgcgcctgctggtgccgctgcggcagtaaccggcgggatccgaccacgccggcttgttactgctggaatctagcgagccagctgcggtgggtgtgccgggccttgctttggtcttcatccgcctaagatctgattggatctagggtggtctgcggaagatggcgatcacggggaggcggtctacgatggtgcggccggcgtgggagacgccgcgggtgcccatgtggaactcgtacctccgcctcctggtgccttggatagacacctcaagcggctacttctaccgcggggggcccgatggcgggggcgcgtcggagggatacttttacaggtcgccggtgcagaagtcgatggcgatcgtc

SEQ ID NO: 427508 - DNA, 152 bp, Oryza sativa
tagttttcgagagatcaatacatacatctcatcaatgtggggttgctatttgagagagaggatgaggcagaggaagagaggaggagaagagcacggtcgctagggctgcttgggcctggccggccgccggttgctgctggcctcggcggtgg

SEQ ID NO: 427509 - DNA, 337 bp, Oryza sativa
ccgggccggaaccgccgggacgaaccacgccggcttgtctcgcccctgctaggagacccgcagcggggggctgttttgttacgggtccccccataatccctgcctacccgcgcccagttgcctctatcccacgggagcgcccactcggagaagagctccagaggacgacatataccggaggacggggtggcttagattcgccattaccgtcgttattgcttccaccaagattaccaccccctcctcctcctgtgatcgagcgctcgcatcgaatttcaggctgattcttgattctgccaggaggttgaaatctctcgtggtatgaacctgatttcgg

SEQ ID NO: 427510 - DNA, 431 bp, Oryza sativa
gcttggtgaaggcttactccttagcatcttggccaccctcttgactcctttgagatggatattttcgaagtttgcagaaagctattattccattccaatgaagaagtatggcatggtgcctgaccatagcctatttgaagctttgattacatgcttgattgccattacacccaaagaccattacaagagattagaagaaggcagcatcgttctcaagaaatcaaagacatttagcttttgcaatgaaggtgtgcttgttgaaggcgaatcttcgccgataaagagcgatatagtgatctttggaactggattcagagggggacagaagataaggaagatgttcacttctgaatactttcagagcattgcagtaggctctgcatctatcactatacctctctacagggagatcattcaccttaagatcccgc

SEQ ID NO: 427511 - DNA, 495 bp, Oryza sativa
gttctttagagagcttgacggagaatttctcatggtgtaaaattgttgtctgatgccattcgcatgtaatgatattggtttttatgacatcaaaacatagaacagtttttcctatttgttcttgcgcatgtagtaaacttgaacaaaaatgtatcttctgacttctgatgagagcaaatagaagctagaagaagggataaaatatggggactcagctttagtctcatcggcaagaatcatctaagatgaaattcagggagaaaattcatagcgtgcaagtgcatcattcaaaggacgaaatgcaaccatgcttatatgaatctatggataatctgaaaggtcagttatatgctcatatggctttgtttcaggtgattcattgtacagaagaaatgacaaagcaaacgttgtgggatgccatgcacactgagcaacctagtatagaagctgtcaaggtctgaatcattcattctcattattttcacgtttcttttc

SEQ ID NO: 427512 - DNA, 495 bp, Oryza sativa
  unsure (1)..(495): unsure at all n locations
cttttgaggaatatgatgacctggccatgcgtgatgtgcatggagaatggttttttgaccgacgatggtgttgttcacaccgtatttgatggcaacggacagaagcacagcacattgagaaagcgtcaagttaatttgcgtaccctatcaaagatcgacttagactctcctgacactgcacgctcttcttctgctcttcctattagcgcaagcagcaagcgaaatggcacaaggaggtggaagcggtccttgagtgaatcatttcgttcacggccacggagtgctccatctttagtggaattgacgccaaagcacaagggctcaaccgttccagaagtggctcccgacaagtagaactgcatataaccagggtatatctgcctaactagtgttttgcaggaggcctagacttaacagatgaataaccgattttttttctttttttctggnctttaaccctcatgccttttttttcctggacttggagaggatgca

SEQ ID NO: 427513 - DNA, 486 bp, Oryza sativa
gcgattttcttggtttcactactttaggtgatgttgcagggtcagttgatgatgatattaatgttttgagggtttcataccgcactcactagttttgtgtaatctttgttttttcccgtacttattgtaattgctaatatacgcttttgcttccagtatggaacttattttactcagtcataggtaaaccttgctaataagatggtggctcaatttgtttgatataaaccgtgcatttgttgctctctattaaatttgtataaatgcggcatcccaaaactcagtaccagatgtatgtagaatcgtacatgctttaccctactgacaatttatacattttacttaaagaaataggaatgcacggccaaatggaaatttgtaaacatccttagcccacttatgttatgctatgtctattgtttaaagccttcagattgctatatatgtccattagcctttttaatttctggtgctcatttttgtttg

SEQ ID NO: 427514 - DNA, 61 bp, Oryza sativa
tatataaaaaaaaaaaaaaaaaaaaaaaaaaaaaaaaaaaaaaaaaaaaaaactagatcgg

SEQ ID NO: 427515 - DNA, 484 bp, Oryza sativa
tttctccgtccgccgcctccgccgtcgcgccgggctccctcatcacggcgagcagcggtgaccggcgtcctgctgcttcaggccgccgcgcacacccgcctctgactccttgcgccgcccaagccaatctccctgtccccctcggcctcgcctcccggagaggtctccttcgcgatcgagttcgcctgccgcctgcgcggctgcgccgatcccgagcaccggtgccggcgccctgctgcttccgcctccgaaatttgaggcttcagatgaatccccaggcccgaagttaggtccgcccctggttagaagatggctgaagcatgtacggtttcacaagataatggtaggcgctgcctccccgcatggatgctgaagccatgctcaaacgatgaaagggtcaaagcttgatatcggagtgagccggtgttggaatccaataaacaaccagctgatttggatcagaacaagccagccaaaggaaaag

SEQ ID NO: 427516 - DNA, 231 bp, Oryza sativa
ccggggggtgccgcgccgtaaccgccgggaccaaccccgccggcttgtatccatggatggggcaagggccccaccgggggggaggttgaagaccaactccgccttcccccaacgccagtagacaagcctgtgccactctctcttcaggacctgaccacgatcgtgcgggaatgggaccgtgcctgaggggcccgtccggactgcacccctcacgcctgggagggcggggac

SEQ ID NO: 427517 - DNA, 336 bp, Oryza sativa
atgtttcatcaccacagatcgatcgagacagctactgacatcaacgtgaaaaagggaagatgaactaaccatgtccatgcaggagatgctccgcattggagacgacgactgccggagcgatgctggggaacgcgagctcaaggtgaagctgaggtggcgcggggatgcctcatcggccaacggtaccaggcaggagcagcggaggcggtctgagcattgcgatcgtcgacgagggcgaaagggaggcgctggctgattgggttgttgctgtcgaggtcgaggccaaggcctagggggtccgtctcttcgggcgcgaggagcttattcacaaggtct

SEQ ID NO: 427518 - DNA, 406 bp, Oryza sativa
acctccaaggtccactctaggttcttttggtctaacaagaaaagggaaaattgggggcagcaggcaacctatttccaaaatggggacagatttttatttagagaaaaggggagggtttcccctttacaaactttttttgtatgttatgtttgaccactcccgtcagtaagggctcaactcaagcaacatatttggattatctttcatcggttttttttcttccttcagggcccacaccgaatctgcgctgtagggggggaccaggatccaaccccacttattcagggtgaaaatgccttagggggtaaccacagttttacctttttggcccccccagcagtcgctaaaacaaaagggggggttcccccctttggaattgttcggggggccccggcaatgcccgtta

SEQ ID NO: 427519 - DNA, 349 bp, Oryza sativa
ttgttatcatggcatcgggaaatagcgatgggggggaggatttacaaggcgggcccgatgtctgcaaagaagacgacttggcggccaggaactaatccgctgacacgaagcctcgcgacataccaagtttgaagtggtgcaggcgtacagctatatgatttcataggctggggtaaggacacacgagagaaacattgagagcaccaacaataggctagccacctactaccggccggagaatactcctggagcgtacaaattacaggcgcgagggagagacccctcaaatgaaagctggatactgagcaacaggggtgcgcaagctgtagcaaacagacaaacgtcggga

SEQ ID NO: 427520 - DNA, 237 bp, Oryza sativa
ggactgaatggccggacccacccacgcgaaatcattgaagaatatgacgaaccgatcgacgaggagatgtatatatggcttgcagagggtcgcctgcaagaaagtagataccaaaccccatgcaggactatggacccactcggataagcacaacatgcagggagggaaccaggggatggacaatgacggtatcaccataactggcgcaagggagaacggcgcacaacaggcccagaa

SEQ ID NO: 427521 - DNA, 446 bp, Oryza sativa
aggttgttctcaagggccccttctccgtccgcttgctgggcaagatacggcggctaccgcgttgtcgatgacgtcatccccgaaagctttacggctggctctgaatataagagtggcatcaacatctaagtgatagacatgtgtgcttttttttttgaaataattcttaacctgtctataatcctttttttttcaaaagagagatcaagtctgcattcggggaagccaaaaattaagtttctatggttattttgtgaaatatgccatcaacaaaataaagcattccatatgccatgtccgcatgttgctgcagaggtatatatccagactattttgaggatattactgtaacatgctgaaaataagatattttctaataatgtatcatgccggttcttatgttcttaataaccttccaaaacttaggaaattatgaatagagggac

SEQ ID NO: 427522 - DNA, 393 bp, Oryza sativa
ctcaacctgatatttgctgtttattaaaccgatgactgaaatttatgtcctaatcaaaacctcctagctacttctttcagggttcttgctaactaaagcctaatctgcgacaccaaaaaaaagaaaacagacccacaaaataatgatcaatccaagctccaggcctccagccatggcgcatgggcatggcgcccccctgatgatcaactctcctgcgtcttgacgacgatggggccccgcacctggaggttcccgtccgaccagacaatggcaccaaacgcctaattcgccgccggcgcggggtccctcacggggaacttcacccagaacgtcctcacctcgccggtgctctcgaacgtcagcgtcgtcggcgtcaccgttacctgcaccccc

SEQ ID NO: 427523 - DNA, 387 bp, Oryza sativa
ttcaacccccattcccacgcctcgccctcccctgctccacctcctccggccaggcgaagcacggcggcggcgatggaggaggacttcgcgcgggcggtggaggacggcctcaagctgtccaagcgcctcgtcctccccggcggcgcgccctcgccccgccccgtccccgggatggaccgggggctgctgcccgacgccgccgacgcctcctcgctgctgccgtccgcgcccatggcgtacgccgtcgtcgtcgacccggccgccgtctacagcctcgacgtgcccagctaccagccccacgtttacggtcggctcgacccccccgcgctcatcccgtttcacatgcgcgagggtcgccctctccgtctactgcgcccgcccccggtt

SEQ ID NO: 427524 - DNA, 357 bp, Oryza sativa
ccttcatccaccgcgctgcttccatctccgcccccagccacctcttcgcccttcccagcctcactcccccagccagggaaggacagtggagcgcggatccgccgcctcccgtcctcggtaacgatggcggcgcatgaatccagcggcctccgtcctcgggaacggcctggagcacgcggatccgccctccggagcggcggcggtgtgcttaggcaggcgggagcgagcagctacggcggcggcggaggctaccgcgaccacggcgccggtggctgcaacgaccacgacggcgccgatagctgcgacgacgacaatgacgatgaccagcggcaggtcggcggcttgcaatcgcggggc

SEQ ID NO: 427525 - DNA, 188 bp, Oryza sativa
ccttgttgctgctgctgcagctgagcctccgttcttggaagcgagagagagggagggaggagggaggcaattggtgaggcttttggaggaggaaagggaagcttctggccccaacatcctcctcctcctcttgctcactcaccacgctctcctctcaccaaactctctcttatctccttccaagaccc

SEQ ID NO: 427526 - DNA, 405 bp, Oryza sativa
cattctcttaggctcatatgggctctcagagacgggggtttttgtgaatccccccacggttgcccccaagacctgggggaccacagagagggtgcagtgcaaaggtggcagccgtgagcttgctggagaggtggcactgactgttctatagatgaaggccgctaatgggatgaccatgcgcgtgggagcgcagacagcaccccataccagtttgttggaggaggactctgtgctcaacagctttctttggtggcctcaagtcaggtggcaatgcttatgttattggtgatgcattcaagcccaagaagaagtggcatgcctacctatgccacagaagagcccgagcagcccatggctacactcgagacgtgcatgactgggctggatgctaagaaagctgaggtg

SEQ ID NO: 427527 - DNA, 329 bp, Oryza sativa
atagcgcgcaattatcattggatagcagcatggttaatatagggtaagtaacatttcaaatcacagataacagctgctacaggtagagcagacaacaagaactgcgggcatttcgactgaaacaacaggcatcagaattcagaagccgttatgctgtggcctatggataatgagaaaagtgtttgctagtagatttaactcttacagttgtgaatgtcaaaatgccttttgttttccaagcctctaatggtacaatgagaaacaaagaactggttttgctgaggctgtaggccgatctacttcttgatctttttatcggttttgcccct

SEQ ID NO: 427528 - DNA, 246 bp, Oryza sativa
gatgtagttcgttagcggcgcgcgctcattgtcccctggggtagggtttaattttaatgaccctgaaccacattacacgttacagatggtatcaaatcggcgatcgactaaggaaaattctgacagatacgtgcgccactttgaactggaaaatccatcctcccggaccacttatcaagctggccacccgctagaaattctaccaagtcagagcccatcagctgatgactctctcaccgaacgctc

SEQ ID NO: 427529 - DNA, 145 bp, Oryza sativa
tatttcctttttcgccggctcgccctcagggagttgcgagagtataaatttaaatgccgtttcacacctccctatcttttgactactatattatttacaactataattaatattattaatattcattttttttatatcttttatt

SEQ ID NO: 427530 - DNA, 197 bp, Oryza sativa
gactagatgagaatcgagagagagaaaaagaataaagagaggaaatgttgtgctactccgtccggcgcctggacaccacccgtgccgacgacgtcgacggccgcattatcagggcgcttttgacagcggaggtgcctgccgaggcggtcacctactccgccttcgtggaggcgttgaagatggtggtcttctatatg

SEQ ID NO: 427531 - DNA, 293 bp, Oryza sativa
atgcacttttacgtatttttggccccatgtgagcccccgccctttttttttgtgtttggtaaactaacacgcgccactatttgacattactgaattttgacggtcaatttttgcagaggacaagaaaaggtcaaaattttgattttccgatgtctccaacgaattgcagataatgatatatcatcgtttccaccagcaagggctacaaacaagcatggcagtactgcacacgttacaagtctccatctgtgggtcagaactgctctgctctgttctgaacaggctcaggatca

SEQ ID NO: 427532 - DNA, 185 bp, Oryza sativa
ttgcctttttcaacctacgcgccgcaccggacgggcgcacgcgggtttgcaacctccccggcggcggatcccctgatctgcgccggtcgactccttcaagccttcgcgacgcgcacggcagagatgtaccgtatcggcgggagccacctgcgctctctcaagagatacagggatagtaggtttgc

SEQ ID NO: 427533 - DNA, 114 bp, Oryza sativa
ttggtttttttttttttttttatggtcccatccaatatgcattaataaccgattcttttgttggatacatttttggctagtacaaaaattaattaggctaaaggattaaaaaca

SEQ ID NO: 427534 - DNA, 217 bp, Oryza sativa
tttaatattgaacggtggaacgcggacttacacacaagttaggggcatgagatggcaccatgcatggagagcgcctcgcccacggaacttacactggcactgtttgcgaaaagcggcagcccttgtccgacacttcatgcgcggagggcgtgcgacagaagtcatctaatcgactacagcaacaggggtgggattgacagatttctccgcttggcat

SEQ ID NO: 427535 - DNA, 79 bp, Oryza sativa
attatttgggtttttttattattttcaatttttctacatttattttattaaattttctattttttaaaaaatataattt

SEQ ID NO: 427536 - DNA, 209 bp, Oryza sativa
gtggaattaaaataagagatggataaaccccacataaggggagatggtcgaatacaacctggaccgccggtcgccaacaccacgcgctctcatatcccaggcgctgtccaaccgactaagagcctacaaggccaaataggaaaccaagctccgaattctgacagcggtactggcttaggtaatcaccataacgtgatcgacctataggt

SEQ ID NO: 427537 - DNA, 350 bp, Oryza sativa
gcctaatttgattttgacaaataatacaaccattaaagaggctggggtggattaaaattatgatcgcggattaaaacaaccacctacgtggctttctttttctacgatattgtcatactgcgtaccctttatgaaagattactgtacattgctcttctgtacagggctgttttatagagcaatgctattgcgctgcgatggctctggttgaacgtctacagctgtttatgaggtgattacctttcgctaaatagccgcgatagtcatatcctgggcataccaaaacttgacgttggtttcctagtgtttgccaattcctatcgattagctgtgggccaaacccgttctat

SEQ ID NO: 427538 - DNA, 82 bp, Oryza sativa
gtcgttttttattgaaaactgcacaaactccagggaaggggttaatttgaaatccggtgccggttaccacacgagctcatct

SEQ ID NO: 427539 - DNA, 188 bp, Oryza sativa
gtaaatttttgttgaaaactgcacaaacaccaggggaggggttaaatttaaaagcggtgtcggttcccagacgacctcaccagctagaggaattcactctcgttgaagcatccatcgatacttcacacaggcagacatgaaatacgagtctatatctgtaacccagcactgcttaaatcatcaccctc

SEQ ID NO: 427540 - DNA, 501 bp, Oryza sativa
catctttttgatactcaagaagctgaatcttccagaagcacctcagatgatgcaaatcaagagaccaggaagtacaaccagttgttagatataattggtgatatccttcagcagattgtacgaagtgggggtagcaattcggagatatggggtttatatgcgaggtggcataagacgaagggtaaccttatcgcatgctctgaagctatgttgaagcaagttcggtctctccagggttctggactatggcatgaccagacgaagttcactaagtatgctcaagcttccctgcagctttgcaagatctatatggaaatttcttcttcgactggaagccaaagagagttattttcagctgagatgcaccttaaaagctccttaaaacaggcttcagacttcttacatacccctgagtataaagctctcgatgactgccttgcagaaataaaaaaccttattggccctgcctagagttattaagggtggtttgagctgtcttaa

SEQ ID NO: 427541 - DNA, 104 bp, Oryza sativa
gacaaatttaatttttacatgcaacaaccccacatacggggagattttaaaaacctctgtgggttgcctcacgccctctccaagtgtacacctaacaattacat

SEQ ID NO: 427542 - DNA, 140 bp, Oryza sativa
ctcgaatttagttttcaaatagaaatatgccacatacggggacattttggattcttataacgatggcattgcgctgtcaccatgtggtgcactggccattatgccaaggcctggatgtctgggactacattggcatgaat

SEQ ID NO: 427543 - DNA, 142 bp, Oryza sativa
gttgatttttgttgagaacggcacaaagggcagggaagaaaatttatcggagtgctatgatgctcaccagtcgagctcaccagcgagagaaagatcaacgtcgttgaagcatgcatagagaggtcactaaggcagaggtgaa

SEQ ID NO: 427544 - DNA, 83 bp, Oryza sativa
tttgcattttgagccaaggggtgcaaaacgcaggggagaatttgtatggaataccactgatggtgatggggagatcacactag

SEQ ID NO: 427545 - DNA, 96 bp, Oryza sativa
ctcgtattgtaaccagacccgcacccaccgcagggaacggtataatttcgattccggatacgatcgcctctcgacctctccactcagacacataac

SEQ ID NO: 427546 - DNA, 268 bp, Oryza sativa
gttggttttagcaccggcgaaatacacgcagcgggagagggtagatttataaattgcctctcccctcgctaagggcagcttattccgaaggtcctaagactcgtaggagcgagaacattatttttaccaaacgcctgggcgtattccgtaccgaggaggatgcccagccaacctatcccagcatggacctccgctcacttattattaagaggtagctaacgaagatcaaggagaatgagacctgacttccgccacctcaaggggacca

SEQ ID NO: 427547 - DNA, 294 bp, Oryza sativa
cttgaagtttctttctattcctctcctcctcctccgcctcctccgggggcgttttaagcgacagtagcggctcccggccatgggttgcggaggcaccaacgaggacgtggccaccggtaacaccaccgcccccgccgacactctcagcagctatgcttttacggatgaagtccaaccgtatccgccagccatccgttcttcctccatgtcgtcttccaatggatgcacctacgtctccgtcaaggacgtctcgacaaagaatgatgaggagaccgaggccgtccccgtcctgga

SEQ ID NO: 427548 - DNA, 167 bp, Oryza sativa
gagtgaggagcacgtcgattgattgattataaatccatggatctcccggattaattccaggtacatggatatgatggatgggatatggtttacacgttcgtttcttcgatcgatcggtctttgccttcgttttagtttcgcccggtgattgaatgatttcgctttgc

SEQ ID NO: 427549 - DNA, 210 bp, Oryza sativa
aagatgtctaattttaacaacctcgcctagcggaagaagcagcacgagttcgacctccaaagggaaaaggaggcgaaggagaaactggccaagaagctgtatgccaagacatccatgatgaagatagatggcgatgtgaaaaggaagggtggcaaatttaatgttggtaagattattgtccatactcaattttttgctttatacacaagc

SEQ ID NO: 427550 - DNA, 114 bp, Oryza sativa
gacatatttagatttatcgcccctcaacgcaagcgaccgggcaaggggccatttgtaagctgcttgccggtctcgctactaaatctgccgaataggcaagcctgcaacaccccc

SEQ ID NO: 427551 - DNA, 224 bp, Oryza sativa
gagagaatccacttttggatctatccattccgcacaccagcgcaggttgaaaatcaaggaggcgagcaccacgaccactacaaccactaccacaaccatgggtactccccccacaagcctccaggaccacacccgccacggaaccccacccccacaccagccttagccagctcacgcaagcacgccacaccccagcccgccgccctcaagatcaacaaccccac

SEQ ID NO: 427552 - DNA, 121 bp, Oryza sativa
ttctcactctgtctccacccccgcgtcggtcgctacgggggtactgtaggagagcaaaggcggtggatgctgacacagacaaatcaaaagcatgccacaccacatcaagaagccactgact

SEQ ID NO: 427553 - DNA, 159 bp, Oryza sativa
ttacattttaaacgttgccgctgcagcgctgctggacggggttgcttgtgaaaacttcatttctcatttctgccctccttaatcttgggattaatcaccgcagccaatgacgctgccgtgtcggcggccacgtctacggcgctctcggccgttagcttc

SEQ ID NO: 427554 - DNA, 157 bp, Oryza sativa
ttcatatattattcagaaatgcaaaaagtgcgcggaagaaaatatttccgagtccggtgatgatcacttctagccatcgccatgaggacacataacacttactatgagccaactatcgtggggtttctaaggcagctaagaaaataagcagtaaatt

SEQ ID NO: 427555 - DNA, 77 bp, Oryza sativa
ttagatttttatctggagccgcacaactgacgggggagattttaaatttgatcggggtcttaccactcatgccaaca

SEQ ID NO: 427556 - DNA, 224 bp, Oryza sativa
gatagtttcagtttgtcgctcgacaagacacaaggagaaactagggcatgcttaaaacgcgccttgctttttggaagagagcaacgatgcacccatcattgcagccatcacatgaaatacttacatcagtgatgtaacgaacaggcaacccaccttacctaattacatcaacacatacacccattgctacatctacaagatcgaacacatgcataaacgcaggg

SEQ ID NO: 427557 - DNA, 390 bp, Oryza sativa
tttctttttacactacaactggcttgagctgggggctcctttaagttaacaatgggggtttccttagtgctcaacctgcaatctgcatcgctcgaaaggagctacttattcgaaacggcctctccacccatcacaacaggatgaccacttggcatgttttgctgtccctcgcctctttgtccttgattggaacctgcatccaagatcattagcattcctgacttaacactacaggctcttggtcatgctgacaacaatcaaactgaagccctacataggaactattgcaagaaggattcaagttctggttccgaagtaaagaggacttacgccgcgcttgatttgaaagatatcttctccgaattccaacggcgaacctacaaccacctg

SEQ ID NO: 427558 - DNA, 574 bp, Oryza sativa
tttgaactactgtgaatagttcaaatttgttatgcttctattatgattgggtgcgtgtgtaattatagcttccacttcaaacttggccgagcttttaatctgatttaagtgaactatgcaaattgcctcaagctctaaattctaatgttgtttagtgcttatcacttctgaaatctggtgggctaacttgtatcaaacattcagattctgagtcacttgagatctttgtaaagtgatgggccagattgagactgatgtgaatgtttaaactaattgtagaacgctaattttttgcatcctgatttggctcagaagtattagctttctaggtcttcatgtagaattaggtgcacaatcagatcacactatcattgtttgtagacaaaaaaaattcaaactaatcctaaatgattaaacataatcatgttaggaccctatattgccattgatatgagttctggaggtggtttttggcctgataataacctttccactataatcgcctatgaacaggattaatttcataagataaccgatgaagttgttgagagtttgaatgaggagggcaatgtct

SEQ ID NO: 427559 - DNA, 305 bp, Oryza sativa
ttcgactttcccaagcttgaacccgttccgagaggacccgggcgattttggaaacctaagccactgccaccttgcgcgccgcgagcaccagcgccctggaacccgtgcgggcgaccccgttctcggggatatcctcttgctgatgctgagggcggctcgggagcgcatagccacgcaagacagctgccctggctgactgggacaaaagcgaagccgatcaaggaggagaggatgggccgcaaccaataccgaagactgaggacgagctcgtccaaccccacggcggtaatcggagaactaaggag

SEQ ID NO: 427560 - DNA, 361 bp, Oryza sativa
tttgtttttagtttctacgcgcgcgacctgttcaacgaaacgcctgtgcgcgcgtgctacgacgacatggaggggtagactagcaagaggaggggggtcacggccccagcgcacactgacgactgggactggttcagcgacgacccggacgacgtcatcctcaacatcatgtctttcctgaccacgcgccaggctgtgcagacgtgcgtgctgtcgtggcggtggctcaacatctggcgctccgtgccctgcatcaacgccgacgtaggctaagtccagcggagcgacactgagtgggaagagtatgatcaagagagggagtcggcattcaagatgttcatggatagggggctagagcttc

SEQ ID NO: 427561 - DNA, 273 bp, Oryza sativa
tttctttctcatctcacatcgactctatagctacctacgcggcatctttgtatagagctagagctagcacacaagagagagggagagaggtgtggtggatggcgcaagatgatgaggacgtgggtctagctctgggcctctccctgggctccggcggccacaggcggcagagagaaagtagagacgaagcgcccgcgtcggcggcggcgtccctgctgacgctgaggcctcccgcagagagcggcgggctgtctcaggtggaggtgaagaggg

SEQ ID NO: 427562 - DNA, 172 bp, Oryza sativa
agacagtttagcttgctcggagctgagagagatccttcggtctcgatttaatttacggagaccattacataagcaatggaagctctactctccggcgctgatgaatctgcaagagccaatggccgttgcggaactattagggatgctgatgattatcttgtaagtcctcaga

SEQ ID NO: 427563 - DNA, 130 bp, Oryza sativa
tgtttttttccccgagagagattcgttccaaccaagcccggccgctttcagcgacttcttcttggtgagcaaatcatttgagagtttagtaacgcgaggaagcgaatacgaggatgactgtgtagttgcc

SEQ ID NO: 427564 - DNA, 451 bp, Oryza sativa
tcacgtctgacaatttgggttggctgttccaatgtaaggggtattattttagattattaattaatttctaatcgccggccgatttgatttcctggcaatttttgttgtttttcacatgctggttgagatcacgacacggccgccatcgtcgcctactcggccactcgggtgcctcttgccgtgtccgagtgctcctctcttcccttacatgcagatggacgtgctgctagataggcacaggacacaggaatatactcggccaccaggagcaagcacttgtatacgtcgatttaatctacatgtacatagcagcatggaaccagcgtgcaacaggaccatgcaggccatggagggagtaaacacattaaattacaaacctgctcccataataactgctgcacttttatgcataaatttttggatgctaaaatgatcgtatgccaaatattta

SEQ ID NO: 427565 - DNA, 424 bp, Oryza sativa
ttggttttttttttttttttttttttttttttttttttttttttttttttttaaaaaaagccagctttgccaaaaggcttttatttaaatatagacttacaaagaccccaacaaggggtccaatgaaaaatatccagggtctcccccccctggggtgctccttacattaaaagaagggggataggtttggccccccttatccaaattaaggcgtagcccattgcccctaaaatttaacaccagttcctccccccctacaagcgactcaacagcaaggcgcaaccaaattttacccaaaatttgaagcttttcacattttaacaggacgcgcgatcttgaaccactccgtgtggaaggggccgggcatgtcccccctctcgtgggggggcgcccccaaaaagcccctttgggcccgcaccaggtt

SEQ ID NO: 427566 - DNA, 211 bp, Oryza sativa
ctgcgcttttgacgagctccgatccgacggccacggggacggtcgactgttaagagcacctcctgccgcgacagaagggacggcgcgctcggtagaaatggatcactttcacacgtgggggtgagcttgctaggcgaaacctccctcacaggataaatttaaagcccgagggtctcctggaccgtttataagtgttttactactttaatag

SEQ ID NO: 427567 - DNA, 510 bp, Oryza sativa
gcggccggcggcgaccggtcgccggtcgagctccgcagccgccgccgccaccaccaccaccaccaccgcgcggcgcagaacgcagagcgccaccggcccgcacctcccagcatgggcattgccccgggatcctccacggcatcatcgcggtttgccgaaagcgcgacgcctccgatgctctcctggtggtggtcacggtgggcatcgccagtggcgcggtcatggcgagccttcgcccctcgccttctcggcggctgtacccaccgtgcctcaggcatacatatctctgagtaggattttctaatgactggttacatcgcattcagagctagtgtaactgcgtaagataccacgtaagagagaaagtgcacataactagtgtacgataccaccaaagagctaagaacggtcctctccacatattccatgactcttcacaggcagtatgattcccttgcattaatgacctaaactttttttgggcatcctaaaagcttctcatgagcatta

SEQ ID NO: 427568 - DNA, 294 bp, Oryza sativa
ttattttttatgtacgaaagcaccgccctttggcagatgatgaattttccaggcttagtagcgaccattctgcgcagactgatgcactctttgatattccacatcttcgccttggaggcccgtcaccgctcagtcttttccgtgcattcaatgatcctctcactgataaacgcacgcattggtttggaccttattaccgactcgatgatgaatctgaaaggaaatgccttctttaaataaactcctttaaactttcttgcgctatcatttatcacatcattgtctatatttgac

SEQ ID NO: 427569 - DNA, 238 bp, Oryza sativa
gcggattttatgttgagcctgccgctgtcacacaggctgggaggattcggtccgacgaacttggtgaaatgaacctcaagatgcaataaatccggcgacttttgcctaagttcgggtggtagtacgccggtgagactattatggaataggcgtatcggcttcaatgccggacaccgaccgcatctcgccggtgtgctacctgagaagttggtagagtgctcagctatgatcgtactct

SEQ ID NO: 427570 - DNA, 254 bp, Oryza sativa
ttgctgcggagttagagtctcggacgcagcgacggcctctacctgcagactcgcgacttggggctgctgaggaagaagattctttcgagttgtgagtttcgacgccatgccctagccggagcaacaagcaagtcagacaggcaagtttaattttcttcttttcttcttctaaacttactattgttccttttgctcctttcaaatgtcaggcaatgaggatagacagaggattagatagatggaagatcataact

SEQ ID NO: 427571 - DNA, 315 bp, Oryza sativa
acgcgaccttgcgctggctctccgccttctacgaggaggtgcgcggggtttatcggaatcgctctgggaactacccatcctttcaggtcgcctggatgggactacgggcgacgaccagatacctgcttcgacatcatgccagcgcaaccccgcggaaggacacctgtgcgtcggctggatcaaccggggcgaccgggacctgtaggggggcaggcgcaacctcctgcacggatacatctccaactaccacggcatcctcacatgagagctaggcaggggcccggtcaagttctagaagactcgaccctacggctg

SEQ ID NO: 427572 - DNA, 303 bp, Oryza sativa
ttgagttccttctcggccggtgatcacctcggggggggttattacactctgtggggcacgctcatgatgatcggtaccttcgtcagagtgggacacgttgaccggtgccggcggttgtttgcaagctgtacataaccgaactcgacgagcactatggatcagcgacgaacctggtgtagagacccgcttgctttgtaatctaatcaggatctaatgtcttcttaccgatggccattgatgctgggagggtatgactattgattgcttttggtttcttacgtctagatcgttattctagagggg

SEQ ID NO: 427573 - DNA, 304 bp, Oryza sativa
gcgctatgctcctgtttccagaaaatctaagggcttgaactaatcaagaagacggtgaaagcattggagcacgtgatcgtgaggcgagcttgggatgagttagattagtattatactggcataccaccgccacaattttatgtaaccattcaagaatagatatttatgtaggttcatttcgacgaattagctattttattatttgtgaagctggatcttggaaaatttgctcatctgttgctacaaaagcatatatggaaaatttgctcatctgcttcctcctgacaaggaataacaaaagttg

SEQ ID NO: 427574 - DNA, 450 bp, Oryza sativa
gtggtcgccgcgagccaacgagcgagaacgggcgacgcacaaacgctgtccacgccagcggcaagtcgactcgtgcacctggtctcgtgctgctccatggggtcctcgcccttcgcctgccgatggcgacgatcgccagggcggactcacgctacggaccgtcgtgccgccgaggctgtcttcgagcgacgtggcgcggaacggccgcctagcggcgtggcgcgctacacggcggcggatggtggagatggagccaacgaactgtgcccagtaccgggactaagacgcgtaccgaagcgggatacgatattattaaggacgctataactcaggctttggtagaagcaaatggcgtaacacggacattggttctgaaatcgccaaaacggatgaatgcactctactgtgcaatgaaacgtgttttttgaggtgcttcactgctaatgagga

SEQ ID NO: 427575 - DNA, 154 bp, Oryza sativa
aaagaaaagaataaaaaaaaggaaaatcgtgtctcgggtgcggttgtcttcgtctcccccgattcccgagcagcttctcgaaaccctcgcggcctcgattccggcgatggcggagcccaacccccaagtggagagggaggtggaggtggaggag

SEQ ID NO: 427576 - DNA, 468 bp, Oryza sativa
ctcttgccccgacagcaagtgtgagctactgggcgcgagaccctcctgtcgcgcggcgcggcgcggcgagagtggccttttgatccgacgaagctaccttttatcagtctaagaccctgccaatgtccatttggagataggatgtcggaacagcaggatagtactagtaaaagctctagctcaagcatcagcagcagtacacaggagagcgaggaggaggtatctataacaataggtagcctcctcgcccaagcaaagaacaacagtgggcatagtcttggaaggcgcctctctcaattgggttcaatcccgcacactcctcgagttaatggaaaaatccctaatcttgataatgcaactttggatcatgaaagattgtcggaaaggttgggaaattatggtttggccgagtttcaaatagagggtgatggaaattgtcagttccgagctttggcagaccagatattt

SEQ ID NO: 427577 - DNA, 287 bp, Oryza sativa
gctgtctctttgtgatgaagtgcaagtccactgagtgcggctttttaagaagaagagtcgggtgaaaggtcacaacggcggtagtggcatcagctgtatgctcatctgcattatcatagcctcctcgcctgatgatgagcaggctccaaaagaggaattcggtcgttattttccagatatttcacctgaagttgattctttgggatttgctgacacggggagtgcgtctaacttataaaactttaagaaatattcttatgagactatcgatgtgatgaacggatgat

SEQ ID NO: 427578 - DNA, 105 bp, Oryza sativa
ttccctggtccacccacgcctgcagagggattcgagggcctcgaagctctcgtgtggcacattcccccttcgcctcgcggggcggaggccggaggaggagaatta

SEQ ID NO: 427579 - DNA, 440 bp, Oryza sativa
tttgtgtttttattattttttttttttcatgatttttgttttttacaaatttttttgttacactggggagaaaagccgaaatgacttatcaaaaccgaaaaggaaccgagaaccgttcaagaaaggcatagaacggggggggggagtccccccggatgggggaagggggagtacccaccaaacccaaaatacccttgaattacctttttttattcccgcatcccacgcattgagggaggggaaattcttttcttaaccttctaagatttcgagcttgcatttttttaaatgcaaaaaaaaaagccaaaggcgggggggtccccacaaggtcagaaacggggggccccggacaaatccaccaccggggcccactggttaaaactcattttaaccggttccggggagttccccgggaagagggcggccatggggcttccgag

SEQ ID NO: 427580 - DNA, 272 bp, Oryza sativa
ggcaaggaaatggtaactgctatccaaaatcttgacttgttggtggtgtaacaagccagatcattgcctggttcaacctatctcaagcttcctgtggctataaaagtgcgagagtacttcattgcgcgctcacagccttgtggtcatgaatatgggcctatcagttgccaaagaaccaatattccattggaaatttctcagatatctcaagatgtgggcaaagtgaatcaagatttctctacttgtaccgattcttatcatgaatatttcta

SEQ ID NO: 427581 - DNA, 201 bp, Oryza sativa
gtcggaatcaatggctgcgacttccggcgacgggggcgtctctacactgcccgggctacccgtggccgaacgacggagcgcagcgagggcgcaaggtgttcatgcagagcgactgcgccgcgtgccacacctcgctcccctacgccggcctcagcgacgacggctcgcgcgcgcggtcagcggctgtggagccccaaggcg

SEQ ID NO: 427582 - DNA, 206 bp, Oryza sativa
ccctccctcttatttacaccaacacctacaaccccaccggggggggacttcatacaacacggcggtgtacaaaaaacctcaccaacaaaccttacaatacattgcataacaacatggaacccactaaccaccccctaatccaccttctccaccgaatcctcatcaaatcccactactcctatacacagacgcatcctttcaaaccc

SEQ ID NO: 427583 - DNA, 252 bp, Oryza sativa
gcgctagacttggccgccaccctggggggggtgatggtaagatacgcagtggggcgccaaacccacccaggctggccgccgacaccgtcgccgatgcggcggatgcttcccacgctcgtgtcagcgccgggacggccaggggaagagggggagggggcgtcccaggccgcgactaccgagacacgcgccgggccgggttctgagacccatgttaccgagtataccaagggtgccaaggtccggctggagtgc

SEQ ID NO: 427584 - DNA, 67 bp, Oryza sativa
tccctgttcaccccacccttccgttcttttaatctaaaataaccaaatttttttttattgccatatg

SEQ ID NO: 427585 - DNA, 394 bp, Oryza sativa
gtgggagagagacttctctacgcggtcacggggtccccagcggcggagaaagatagatagagagagcaaagagcaaaaaaatctctcttttttcttcttgttgtttctgcagctacctttgtcttgccttcaatgccaccgctttactgccggatctgaggaaagctcccatccttgctgagttcttgtgctgcttcttccacaattcttccttttgttgagaattctgccttccatctgcttaatcggtgacaaaggcgctgggattcccgcctcttttcctgcctgacaagtctcccctttttgccaagttggcttattattaaatggcccccccccatttccctttcccacattttgccccccctttttttcttattttcccccccccttt

SEQ ID NO: 427586 - DNA, 180 bp, Oryza sativa
tttctttcgcagaggcggcagccaccacggggggctcttgctactcctcatgcggcggtgtgcaaccaagcgatggagttctccggcggcgcgaccgtgtcggagccgatcggatgctgccgtgcggcatgtggcgcggggggggcggttgcgggggccgagggaaggagccggggggtt

SEQ ID NO: 427587 - DNA, 270 bp, Oryza sativa
tctatcacccccccacgcgagcccgcgagccggggcgtgctttgccaccgatctccggcgaccccccgggcgccgtcgtcgtcgtctgcgccgccaccacccggagatcctcccgggtgcctcccccctccccgccgcgtgctcccggcgcccactggcctggccccgaggtgggggctcccctgctccccgcaaaccctaaccctagccctagcccacccccggcgcgggggctgcctaggaaacaggttgcacatttggcggactttt

SEQ ID NO: 427588 - DNA, 204 bp, Oryza sativa
atacaatccccgtgcctcccttgacctcacaccccacaggtgttcgccatttcgccgcccccaccaccgcgcgccgccgccgccgccatggcctccatctccgccgcctcccccgtcgctgggaaggccgccgccttcgcccacaagaacgagctcgccgccgccgccgtggcgccgtcgcagcagcagctgcagcggagggtg

SEQ ID NO: 427589 - DNA, 414 bp, Oryza sativa
ctttagccttctcatggatattgcttgaacaaccgagcgtgcaagggaggggcgttaaaattaatcaattaacccagccctaaaatatcaccaatatatctctttctccatttcttgagaacattcccaggtgtatctggcagtggggataatcctacatttaagtcctctccccaccctaaatgcattatgtgtctgcacatatacatggcaaagacttagatgaattgatctgcgaatacctttagcttcactagtaatagtgcatgagcaagacacgttccgcacgtataaatgcgaagttattaatgtttcccactatgcaaaagaacaagaaaatacttgttaccaaagcaaaaggaattgatgcaaattttgcaagagaggaaagaccaacctctgcggcaaaaatca

SEQ ID NO: 427590 - DNA, 455 bp, Oryza sativa
cttctccaacagccgagaagaggcagagagagcgccgtcccccgtccctctctgtccctcacgacctcgcgcccatgcctctggcctgtcccttgccggcagcagacgaggcggcgctgggaaggccagcggcttcgaccacaagaacgagctcgcggcggtggcgtcggcggcttccgatggcgaatccggcgggaggatacaaatcagtgttccgataggtaaaaccctgctctcagcatctgcccttttgaattcgccaagagccagcatctgcccttttgaattcgccaagggccagcatctgcccatttgattttgaattcgccaagagccagcaacagttgccccgtgcccccttccttcttcggaataaacaaggcacacgcgccgccccatgttcacccttattggcacagtggaacaacaccaccaccaccaccaccaccaccacc

SEQ ID NO: 427591 - DNA, 327 bp, Oryza sativa
tctattcgcgccgcaccgaccgctcaactcttggttcgcgcaggctgcggcggtggcgcaggcgacgtcttcctacacctgatccacctacactttctccggaccggacaagaattagaagacgatgaagtgcaggtacggcgcaagtgcagacccaattgcgagctcacctgctctgccctgcccactaccaagtagtaggctgcttgtggttggctttctccccgacatactacaccatatcaaaggctactagactagagctgggggtgatgctcaagatagggctgaggccctgcgacctgaccatgcctgtcgagaccatca

SEQ ID NO: 427592 - DNA, 207 bp, Oryza sativa
gtgtgaagatgcttaatcgcattgctgaagctggtggtaccttcattccggggccttacctgctggtcgatatgctggaaatgaaagaacttggagggaggccagatgcccaaggcaaagcagcgaatcaggcgagccctcaacaagctgagctgacgccacgacagcaactgctcaaggatcaagtgcatgcatgtgtggccaatc

SEQ ID NO: 427593 - DNA, 95 bp, Oryza sativa
attggcttctcctccccctctttaccttttcctgctcggttcaactccgtggttcgtctagggttcagtggggtgagatcacagaaaaaaatgac

SEQ ID NO: 427594 - DNA, 121 bp, Oryza sativa
tttagagtggaagaatcgacggcctattccgggggtttaattaaagtggcggcgattacacaagagctaagtgcttttgatgtagaatgaggtgattgacccttgtgggctggtagcaaac

SEQ ID NO: 427595 - DNA, 222 bp, Oryza sativa
cctggacctcctcttcatcgcgacagggtggtggttcctgtccagcaagcagagcatccccagctcgctggaggcagggtacaggagggtgatgacgagccagttcaggcggttcacgtaccgggagctcaaggacgtgacggccaacttcaaggaggagctcggccgcggcggctccggcgtggtgtaccgcggcgtgctcgacggcgggatggtggtggc

SEQ ID NO: 427596 - DNA, 236 bp, Oryza sativa
gccggccggcgagcgagcgccgcggcggcggcggtggatactgtctaccttctctcctcccctccccgcccccgcgcggtctggacaagctctctttctctggctctgtctctgtctctgtctatctgtctgtctgcctactttcgcctcgcattcttcccggctcgaatcgaattgaaggataaacattgatcttggaatagctgtttttatgtcacatgttgctatgaaggaat

SEQ ID NO: 427597 - DNA, 138 bp, Oryza sativa
attagggagcaacctttaaacggggttacttaaaaaacatcacagctgcaaacttatccaattattttttacacaaaatttttaaaaggctacataaaattttccattcatataaaaaatgaactgtctaaaaggata

SEQ ID NO: 427598 - DNA, 140 bp, Oryza sativa
tcagcatgagtatagactggctcggctcgctcactgggtgagttgtacacacactgcacttcggctcactctgtccactgttcttcctcctcggcgaggggggaaggaggaggcgacagcccccggccgcccggaggagg

SEQ ID NO: 427599 - DNA, 401 bp, Oryza sativa
aaaaaaaaataaattttttttttttaatttaaataaaaattaataaaaacttaaaaaaaaaaaaaaaaaaaaaaaaaaaaaaaaaaaaaaaaaaaaacaaaaaaaaaacataaaggaaaaaaaaaaaaaaacaaaaaaaaccaaaaaaaagaggaaaaaaacccctgaaaaaacaatgaaaaaagggattaggaaagttttaaaaaagggggagaaaaaaaacacaaaaaaaccaaaaaaaaataattattggagagcccaaaagggaaaattataatcaattaaaaaaaaaaaaaggtatgcaaggggtaaaaaatattgcaaaaaaacacaaccacaaacttttatttgaaataggtttaaaaaaattcaaaaaaaaagaaggggaaagaaacaatttt

SEQ ID NO: 427600 - DNA, 275 bp, Oryza sativa
ccgattgagggaaaaaaaagagaaaaagaaaagaaaaaaaaagaagaagaagagagaactcgaactctcgcctaccatttcgcccccctccgcaagcaatccaccactgcatcggcggcgagggctcaccggcggcgagccatgtgcggcggcgccatcatccaccacctgaaggggcacccggaggggtcgcgccgggcgacggaggggctcctgtggcccgagaagaagaagcccaggtggggcggccgcgggaggcgccacttggggggttc

SEQ ID NO: 427601 - DNA, 357 bp, Oryza sativa
attatatacccatttattttttatgttatctatgtcattatctacttcgttcatggttggtccggtggaaaacaaattattcatggggccgttgccactgacagacaggcccgaggagctcaagaccagcctcctcacaacaacagaggaaccatcacagaataacaccgggccattttcaactgggagagcagggtcattactacatgcattaacaaggcggcccgcagcagcaacatgttatatatgggaggccgtagcctcctcaagggggggtggggccgggggacacacagcaaaaccacttttttgaggccgagaatgaccgcggagggcggggctgaacccccccggggc

SEQ ID NO: 427602 - DNA, 224 bp, Oryza sativa
ggagtctagggttatcgcgctccctccctccctccggtcccatggcggacaccggagcggcacagcctccgccgccgcccctgcgggcgcccgccgccgtgccggagaccctgcgccggctcctcgcgctggtcactgacgtactggcgggctgcttcctcgccgcgaagcgactgacgcgaagcttctgccggggcgctagaaccttctagtaggagtgtggg

SEQ ID NO: 427603 - DNA, 240 bp, Oryza sativa
cggtcgcgtgggcggacgcgtgggctcgcaccaggggtctctctctctcccttgtctgtccccgattcctcctccgcctcgccgtcgagatctcgccgcgcccgcgcccgcctccgccggagctctcccgcgccatggcgacgcggaaccggacgcctctgtaccgcaagtaccgcgacgcgctgcgccacgtccgcgcgccggcgggggctccgtcgtcggcatcgttcggaggaggag

SEQ ID NO: 427604 - DNA, 484 bp, Oryza sativa
tctttccaacactagttggataaagccacagagagagctgttgtagtagcgagctcgccggagaacggtcgatctccggagaagtgggtgagagttcctcctcctttttttccgttagttgtcaccgttttatttctctttctttggtttcttcattcaccttttttttgttttccctgatggcctattccttattactgtttttttcctctgacccttatgttcttttcctctttttttttttttttgttttgtcctccttttttgttttccttttttcttctttcttttccttttctttcttttcttcttttttctttttcctatcttttctctcttttttttttttttctatttttttctttcctcttattttttttttcttctcttctttctcttttcttcttttttcttttctttttcttctatttcttttccttttttctttttctatttttttattattttttcttttttttctttt

SEQ ID NO: 427605 - DNA, 268 bp, Oryza sativa
  unsure (1)..(268): unsure at all n locations
ggctgctgccctgctgagcgcaccgctgcgtacttgctgatcgacccacgcgtgcgtatattctgctgttcttgctatcttccctggtctgctcatctcctctgctccaggtcagaaattgctgctggttcttgcacatcggtgctcatcacgaactgatcaggagctgcagaaatcttgtgagaagctgaagaaatgggagggaagaatctggtggcgttgctcaaccggcttcnatgatacttagttgatgccaaaatacctggag

SEQ ID NO: 427606 - DNA, 417 bp, Oryza sativa
ggagaactgcataaacagtctggtttatttttatagagaaattgccgaagttatgtcattacatcgagaatgatgtaattacacagaaaacatcattctgtaattgctaggtaatataccatttattgaggcaaatattactgtataccaagaatagcatagaccttcaatgaatttttcaaatcttcctacatttcagacagataaattccagataaatgaccatatgtcaagcaacgtttagacatccacaagctaacaaggcttgaagaagatcaaggattattgggagggaacaatgtcatacttgttacgagtgttcaatagcacatggtagatcgggtcttggtacgacacttggaaaagttgtatgacaatgtagccgcatgtcgtgatgcttccaaagctttttaacaa

SEQ ID NO: 427607 - DNA, 54 bp, Oryza sativa
tctgtggagaaggagtggcacttattctgccggggggactttaagtacccgacc

SEQ ID NO: 427608 - DNA, 123 bp, Oryza sativa
ttctttttctccgtccaaacccaaaatcttcggggggttttttttgagaagaaccaggtttccacatcctaccaatcattgtatgggatctagctcgccagcggctatgggcaaggactgcgg

SEQ ID NO: 427609 - DNA, 201 bp, Oryza sativa
tgtttgtttttttatttttgttggttttttttttttttttttaggaaaggggagccatggataattaaaccttttatgagcgaaattaaagcataaatttaaggcattattatcccggcaaaaaaaaaaaaccttaaggaaaccaggtttttggttccgggggaacccattaactaaccgctagggaaataacacacgttt

SEQ ID NO: 427610 - DNA, 51 bp, Oryza sativa
atatgtgccacctctcctatgctcttccttgtggtgcgttctactagtact

SEQ ID NO: 427611 - DNA, 66 bp, Oryza sativa
ttctttccctccttccagagaaggcccttggatccctttttaaggccttctcccccaattttccac

SEQ ID NO: 427612 - DNA, 172 bp, Oryza sativa
tttcttgcagcaaggaaaagtaggcttaggaggagggtttacattcagcagctggagtcaagtaggattaggctaagccagcttgaacaacaagtttacgtggcaagaggacagggtgctatcctgtgtgctggagattcataccagggccttttttatggccctttagctg

SEQ ID NO: 427613 - DNA, 270 bp, Oryza sativa
ccccaagacgggtgctttttttggggccccccctggggttggcggggtaataccatccaaaaaacgtgacccgaaaccgactttatttctaaactggaattatggggaaaccctttttaactttcccccctaccggggtaaccccccctttcacaaaaggcatttttccaggaggggaaacttttacgtttaaggataaaaaaaacccgggtcctggtaactgggccaatttttggggaaaatgactttgggggctttttgaggaacaaa

SEQ ID NO: 427614 - DNA, 251 bp, Oryza sativa
ttaacactgttatggttaatgctggtgagattcttcagattctcactcctggtggtggtggttttggctctccttgatggctattcttgtggacgatcatctacctcgcttctggcgttaaggtgagaccacaccctgttaagagggtcaatacatgctttgcatgaatgcttagttcaggttctgtcacctctgaatctagtggacacccactttctttggctaggcagcttatttagtggactccactg

SEQ ID NO: 427615 - DNA, 402 bp, Oryza sativa
tttttgtttgattagttttatttgattttacgttgtttcatttcttagttttttatttttttttaaaagtgccgaacgtgaagaggcaatggcttaaataaccctacaaacaaatcggccttgacctttaggggatatattagaacacaacactggtataagcacttcccattagaaaagtaactggccccctcatgggacccgcccattgacaccccctgggggggatcccttggcggcgactgagggttttatcaacagggggcggtccttgagtgatcgaccgggattaatctacccgggggctttcttagaaagactgtggggacccatatggaggggccgtgtgggaacttctttgcaggggatcgcaagaaccccaggtaaacgcctgtgggtggg

SEQ ID NO: 427616 - DNA, 383 bp, Oryza sativa
tcttttaattataactcctttagtttactaaatggctgattgccttttgatctagtgcattggtggatattacactttgatacataataataatatggttatccctgcaagaaaattaatatggttatcatttactctctctctctctctctctttatttttgcaggaataactacccctgaatgtagaatggagtgctatattaatatggttatcatttactctctctctctctctctctctctttatttttgcaggaataactacccctgaatgtagaatggagtgctatttagtaaaggaccaatactgaattcatgtaagcagatgatcaaagacatacgttggtgtttcttctttattaacacttctgtgaagataca

SEQ ID NO: 427617 - DNA, 386 bp, Oryza sativa
ttagttggcgcccttccttttttttttttgtttttttaattatgaggaaatttttgcttttttaccttttcaaatatggtgtgtaaaggttacacctcacccaaaaggaagttgactcatatacaaggcgcattgtggacgatatcttggccctgtctttactcatgcacacgccctaatcaaatgtacggatctacatgatacactcgagctagcagaggctatcagcatccttccaactacaatttgtacacaactttgttaatggtgatatatatatctcagacaatttctaatttgccaaaggaagatttgtcatcaatgttcttccccttttgagaagacgacttctttttccggctatgtcacctgtgccgaactttcat

SEQ ID NO: 427618 - DNA, 105 bp, Oryza sativa
agctgaactcctgcaggcaccccccctggaattccccgttctgacccacgcctcctttattgaacagggaaaaaggaaggggtcttatcgcgactagtatcctac

SEQ ID NO: 427619 - DNA, 327 bp, Oryza sativa
tgaaattttgacctggattggcttagatatgtaccacgtgaaagtgcaaaaaattacctcatcagtattctggggcttggagataaaagtgttgactgcatccgtcttttgtcattaaagcataaaggtttcccggttgatgtcaatgtagctcgcatagtcacaaggctaggatgggtcaaacttcaacccttacccttttctgcagagttccatttagttggcttgtttccaatcatgcgtgatgtgcagaaatatttatggccttggttgtgtaccattttctcagtacaaattgtttgaactacacttctattatgatacctt

SEQ ID NO: 427620 - DNA, 76 bp, Oryza sativa
tttctatttgaggtgggtaggcttctcctaccccggtatacctttacctcctcgggtcggttccgtggttcgtcta

SEQ ID NO: 427621 - DNA, 289 bp, Oryza sativa
gaagagatctgccaggtgagatacatggcattgtcatgggtttacccaaaggagttggattgacctttacgtgtatatgtattgcttgcgactaggtgccagtaaaaaagactcctcgatgacccagttatgtcacttaaactgattgtaagagccaattttttgcagaaattaatttatctatataccaaacacaaatgcattgcctggaaagaaaaaaaaaaagggctgacgcccttttttttttttatcctttagctctttactttatatctgacactgattaact

SEQ ID NO: 427622 - DNA, 499 bp, Oryza sativa
tcttccatatacaactctctctctctctctccaactactgtgtcgtctcgcatcggtcggtgtcgcgaccacccggtcgccgacggttgaggtttcatttcatatatatatttttctctttttcttcattatttttttttatttttttataattttcaatataacataattcgtttagttatatcctttgagcatacaaaagaattgactataatagaaagttttttcctttttttttatcatattttattttttgttatgtttatcttttgattttttaaaagaaacaaccctcttattcttactttctattttatattcatattttcttttatttatataacttttctataaaatgcaaaaattaatattcttatttcccttttcatagctattttttttaaatatatttccttataatatcttatcatctattgaatgaagcacccccagtggggattgtttttattggggccttgttatcatagaaatttctttt

SEQ ID NO: 427623 - DNA, 211 bp, Oryza sativa
tcgctcccgcttcgcgaaccacccacccgtccgtttctcgcctcgcctcgcctcgccctccctctcttccttcttaacaatggcggtacaggcccagtaccctttcagtctcctcttccacgataggtgcggcttgtctcctcttcttcgttagggcggctacttgttttaaaggcttggcctccttagggctgatggattattctgtcgt

SEQ ID NO: 427624 - DNA, 190 bp, Oryza sativa
ttccgccgccgccgccgcctctgcctcccccgtcgcctcgcgccgccaccaccccctcgcgccgccactaccactcccgctgctgttgccggcccctcaaaccctagcgcctcctccttcgccaactaccggcgccgtttctgagcgcctcccctcacgtcgccgacgccgtcgtcgagagcagccttgt

SEQ ID NO: 427625 - DNA, 117 bp, Oryza sativa
tccgaggccggcgccaccgacgaggtggtgatggtggtgccaatctatcttgatatcactccgatgcgtgagcagtaggattttttcagatatttagtttattttataaaatttatc

SEQ ID NO: 427626 - DNA, 94 bp, Oryza sativa
tttttcaaaatgatgctacacaagacggggcaagcaactagggcatctggagccttgatgagctgctcatggcagctggtgcctactgaggaag

SEQ ID NO: 427627 - DNA, 426 bp, Oryza sativa
tttttggtttttcagggaaaagggttaattaacataggagtacaggagaaagataacaattgaacgatagcatggaattggaggctatccaccaatttaccattccaatggcttggttcctggtggactcaaaaaagtacggccgatgaccgggcttacttatttaaaagtacaggttgagaatattgccacaaaaggtttttgataccctgaagaatggacgctggatagccccaccacacttggaaccctgattctgactgcggaggttgatactatcttgacgaccacaatcactaagagattcagaacaacatcagactgacaatgctaacaatgccaagcagcagccccaatacttgccttcaaacccagcagctccattaaagccccagacgcgcacatgattgatcactggcccacaga

SEQ ID NO: 427628 - DNA, 264 bp, Oryza sativa
ggcaggttcgcccgcgggtcccgccccggtattactttcacgacccacacatcctttttttcaagcaacccaagccgctttccccaggggggtttttttagaactagaattccttcaccccaaatccctaacatggaaggactaccgggtgatgcctgtccaaaaccctcgcttccgtagccggtacggagaggtttttcctccctacataaggacaactacgctccttgttctttttgttgccccaggtttcatatcttggat

SEQ ID NO: 427629 - DNA, 172 bp, Oryza sativa
tgaagaaaggctctcaccaatccaacggtgctcgatccatccatccatccaatccgcctcgctccatccatggcgtctgcggatgcggtctcgccggcgccggcgacgtccgccgcggcgcagcagcaggtgagcgtgcgacgccggccgatgtggatggttggagttgggg

SEQ ID NO: 427630 - DNA, 199 bp, Oryza sativa
ttgctttcgatcgccggcgactaccgaatctgtgccggtcgttaggaaggagagcggctatggcagcgatggcattcctgtaccggcgtgtccttcctttcgttgttggctgtatgatattatttattattaatcttttttgattttctttatttctttttatattttaatttttcttctattttttctttactttttt

SEQ ID NO: 427631 - DNA, 357 bp, Oryza sativa
  unsure (1)..(357): unsure at all n locations
aaaggaaacaggcccttttatttcacaaaggggggttttcttacgaagcaacccatttttcccccgccggggagccactaggcgggggttatggggaaaatttgaaacgaatttttccgcaaaaaaaacaggttagggggccttttcctaggtaaacaaaactacggggtggctggctggctggcaatgcaggggggggggggatccaaatgaaaccggggggctggatatacccaacccttttgctaaagtaaagggcttccttggggccccggctgccaggctggtatggaaaaaacctcaccttgccttcnncgatgtcgggccacaggggagggaaaatttgccaagcaacct

SEQ ID NO: 427632 - DNA, 401 bp, Oryza sativa
tttctcgtcctagctccaaattgaacgagccacgacccgtccgagaggtgtatcgtcggcggcgacttcatccgtgggcagatcgacctccacaagcttcgcggcgaggtctagtctagacgaggtcggcatcaacttcatcggtggccgtgcttcccccttcatcccctctgcttggacggggatccaccggccagatccggcgcatcttcaggccaagggtgagctcgtcgccctcccctcttgggccaacgtggattcccggtgactggatccgattcattcagtaaaataatttggaggaatccctccaaacggatccgatttctccctgccatgtcgcccttggcaggaccttgtgcatgccccagctggtccgacctctattgatcccctcctaa

SEQ ID NO: 427633 - DNA, 526 bp, Oryza sativa
tcttccgctcggaaaaaaaaaaaaagaaaagagaaacagtgtgcgcgtttcgtgcactagtacacaggacgttggcgtggtttgttttagttgttagttgtttttggtttatttttgtttttttctttttttttttttttatttttttttttttatttatttgttttttattttgtcttttttttttttatttttttttttttttttttatttttttatttttttttttttttttttttttttttttatttctatttatttttattttttttttttttcttttttctatctttattttttattttattttttttttgtttatttatttattttttttctttttttatttttttattctaattttttttattactttttattcttttctatttttttattcttattttttcactttttttttttttttttattgtttttcttattttttatttttcttttctttttttttttttttatcttttttttattctttttttatttgtttttttatttttatttttttttt

SEQ ID NO: 427634 - DNA, 147 bp, Oryza sativa
ggttgggttatatttatattggttgttttctatatatttttttttcttttttagttttttttaatcttattatgttgttaaatttaatacagtttaattatttaaactttcttttgggggcaaaaaacactaaataaatattggggg

SEQ ID NO: 427635 - DNA, 253 bp, Oryza sativa
tttcttctggaacccagatgcaattgtattcagagtggcttgtaacagtatggcactcctagttattggatgcaaacatatttccgtgaatcaagtggttctgtgattcatccaattacgatcggtttcagctactccgattcactggctgtatctgcaatcacctggaaagacacacatgatatctttctgagaataaagatagtttactttgggccataatgctgttaacctcgcaatatcttcaagagga

SEQ ID NO: 427636 - DNA, 493 bp, Oryza sativa
tagtgccgctccgacgaccagatccgtaagcgactttttaatcacacgatccagtatgccaatgtgatatgacgacaatgcaaggattattatgtacaggccttctatgatttttattatattaatttttatatcttttttttttacttttaaaattattttttttattattaacattttctttattttctataattttttctattattatttttttctattactttattattttttattatatttttttattttatattatttatttcattttattttttttttcttatttattatatatttttttttttttatttctattttttattttttatttttatatttaatatatattatttaattttattttctaattttatttttattttcatatttattttttttatttttattattaattatttattttttttatttttatttattcattttttttattttatattattatttaaatattttttcttttttt

SEQ ID NO: 427637 - DNA, 65 bp, Oryza sativa
tttctttagccccctccttccatagcgaacgggggggcattttataatatacctctcctcctact

SEQ ID NO: 427638 - DNA, 480 bp, Oryza sativa
  unsure (1)..(480): unsure at all n locations
gctccgccgccgccgccgcctcttgctactgcctccctccctccgccgcatactcccctcgccctccgaccactccccctcctctactcccccgtctcctcctcgccacttcgccaccccgccgccttcgccgatcccctcacccatcccgccgcgagctgagcagaggagccgtgggtttccgtcgtcctgctgcttccgcctccgtgatcgagtggtgcgttctcatcaacgggccttgtgcgctaaattatgcgatcttcatgggctgactcagctgcgaacgccgaggaatcggcgcccgcggctgctgctaaccacggcaactcgcgcctcccgcgcagctcatacgttcccccgcacctccgcggccaagcggctcctgcagcgccggcgcaagctggcgcgctgccctcggccgccgncgncgcgcagccttctgttggccagctggtgtggttgggtggccctcgctgggcg

SEQ ID NO: 427639 - DNA, 107 bp, Oryza sativa
ttttccttaaaccctagctccgcctcccacggtggttttctttactagggttcttgtgccgacgccgacgacgccgtcgattccgaaggagttctggggtctcgaag

SEQ ID NO: 427640 - DNA, 254 bp, Oryza sativa
aactagcgcctcatgctcacctggggggcttcttttattatccgccgtggtacaccaccaccaccatgtctggccggacggtgagctcctgctactacttctccccgccacggcacccaccatgcctcgcgactacgacggagccgtcgccaccttgttcccgtcggcacaatcgtcgtgcgaccacccgcagctcgacctgagcctgtccatccgcattgggccgacgccgccgccgtcgttgtacacgctca

SEQ ID NO: 427641 - DNA, 218 bp, Oryza sativa
gtccgctctaacaaaatacagtatcgtgggcttgtgtcgcgcgggtctctcatctacgatgagatcggaacctcgcgttgccgattaccttctccgtgctatgggcaaaggcgcggatcaacctgcacaaggcctccgttacttcaacgccatccgctaatgaggcgtatcagtagtcccgtcctaacaaggaccagtatattggacggttttctaga

SEQ ID NO: 427642 - DNA, 289 bp, Oryza sativa
ctcctctttaacgtgcgactactctaccgaccgggcttgggtggggtgtatataacctttagacgaaactggcgacggcgaagactactccgtttgtggtgccaaatgtgtgaatggctcatcgaatggaatgactttctagcacatattgttggcatggggcgattggataggcacgaacttagagagacgcgcacaatggatgttgtgctagagggcctgatgtggatctcaatatgaagactatctcggtcgaaggttggggtgtaacaaagcaaggcagacaatg

SEQ ID NO: 427643 - DNA, 131 bp, Oryza sativa
ctccaattttttttatacctctcacaactcacgagcgcggaggggggatatttaacattgctgcagcaaatcccctctctcgaccccacttcctacctgattcctgcgggctagatgaccgcggttgtagg

SEQ ID NO: 427644 - DNA, 149 bp, Oryza sativa
gtccagcgcctttactcgatcgcagtgcgacccaccctggaggggggagctttaagaaccatggtcgcctcctcgctgtcgacgcctaccgtggccgggctgtggttggcgccgatgtcgctcgtgcggtcgccgtctgtggctttcag

SEQ ID NO: 427645 - DNA, 182 bp, Oryza sativa
gtgtttttaattttctaggagctggtcactgatgttaacttgcgtgcacttgtaataggcgaatccgtcctaaatgatgcgatggcgatttttgtctacaggacaatgtcgttgttcataagtcaagcgtcagctggtgagaacttctttatgatggtttagcagattgcttggagaccttt

SEQ ID NO: 427646 - DNA, 284 bp, Oryza sativa
atttaatcactataaattggtctgtgaagaaaagggcgtttgtacattgtgaaggctgcaagcatcaggttggctcaggagtccgaggtgctcgtgggcctgatactgttttatatggcccacgccgcgcggcccgtgaagaaacccgccgtcattttttccttcatcttctccatctttgtcgaggatgttaatgccgccatttaactcctgttattatccttggggtttcgaatatgcatgattgtcaatccatacatttcgcggttgaaatctagatcaac

SEQ ID NO: 427647 - DNA, 468 bp, Oryza sativa
aacagacttggtggcgccagattcccttagtgcaagcgggctgtgaaagagcttgagaccttcaaggtgtcactaggaggactaaatggaagatatgcttgttgaagagcacctaacaattgtgtcccaaccactattaccggtctcaacggatcattgacatggtatggttcgttctctgctatgctatcgttagcttatatggctgagtaggaatatattgaactagagaaccacccttgtaacaggagaatatgaactaggactacttgaacattgcgctgagacagaccatgaaaaaaatattgacatcttcatgaaggcccctgagatgtgcctctctgctattaggcgctcttttaccagaagaaatgaccccatgacagttttaattaccattgcatattggaaatattcctcttttgctgtagcttttcccagtggacacgtggtctcagcaagatcttt

SEQ ID NO: 427648 - DNA, 117 bp, Oryza sativa
atcctcctgatttgcgcagaacctttactagaaatgctggagggtcgttaggctatcttcatagccaccgctcccgatccctaggttctacgccactcccgcctacatgagagttca

SEQ ID NO: 427649 - DNA, 281 bp, Oryza sativa
ccactcctcgcttctcccgccatcttctcctcctccacggccagtggccgccgtcgcgttccgctcgctgctacaccccgccgccgcggccctcaccgagcgtgtgccactgcctcccgctcacctacggctccagggccttcaccgccaccgcgtcggcgtactcaacctcttcgtcgcctccggtcatcgccgccgcattctgcttcccctcgccgacgacggtggagagttctcttcggaagaggaggagtacgcccactaggaggaagaagaggggg

SEQ ID NO: 427650 - DNA, 399 bp, Oryza sativa
cttctgccgcagcacgctggaaggggaacaaacactccagggtgtttagcaaccgccgtctaaacacaagggcgtaagacgcaatatgtacaacaggtcactcagcacagcaggtcaatgttgggagcctgtgccagtaagcatggtcatcttgaagaccatcaggggagcagctgtttacacccatccataaatcccaagggagataagcaggaccagagccacagagagaaccagccaaatgatgtacgatgggaatcccctcttattgacctggtgctctcacatgtgaatcaagaacgctctattttttctactgcttgttctgcgtgaatttagcctctgttagcttacgcatccttagaacatatatagcattaggtgtgatggcaacatgct

SEQ ID NO: 427651 - DNA, 195 bp, Oryza sativa
accacgtctccttctcttctcctcccctaaaatccccaattccggccaaaccctaggcccccccaaatcgcctcactccaccaccccacgcttccttcgccgctaagtatatccctcccggcgaccgcgaatcggatcttgagagtgagagagaggatgggggaggtggatgagagggcggagatgactgcgatg

SEQ ID NO: 427652 - DNA, 76 bp, Oryza sativa
accagatgaaaaggaattcttggtttttttaaatgtatgactctacactaggcgatggatttttctgatagtactg

SEQ ID NO: 427653 - DNA, 133 bp, Oryza sativa
cttgctcgcgcttcctcgcaccccgtacctatgaaagcggacgctgtctacagaggcggttcaccccgcaaactcgaacgacgagcaattagtttcacacagcctacatatttgaggtggcaatcctgattgc

SEQ ID NO: 427654 - DNA, 524 bp, Oryza sativa
aaaacaacatcattttttcttatatgtcgcttaggacgttgacacggtctccaatacaaaaatgttagtgagactttgatgttttactgtacgcatctaaaacaacataaagaaggaacatagtattttctatcttctatggtgaaacatttgaggtcattttctgaaagtattagcagtatgtcaatgtgtcaccttcagtggattcaccttgaaatacatatccaagacagcaagtcactgaccaacaattagctccttactttccaactagttcttcatgagaaattttcacaacataattactgtcagatggtacagtactcttgcccatccttcacactgtgaaatgattttaaaagataaaggttgcaataccagatttgagaatcacaagatggtaatgggaatgtcatgcttagctatccttccagaatgcagaggatgggagcattcaacagtggtcaactggtcaagtatccaggattcctaaagaaataggttatgcaatggtgcaagcacac

SEQ ID NO: 427655 - DNA, 133 bp, Oryza sativa
gtgctttttcaatatattgacgaacacacaatataaaacacttgcgttaatgctgttagcgtcacggaaaggatcgactaagatgtttataactctcgtacccaaggtattcattaaggaccattggtgagta

SEQ ID NO: 427656 - DNA, 165 bp, Oryza sativa
ctcgcctgcgcttcagagcatcatggaccaactaaggccaacagtgtttaagatccgattaacccggttaactgcaacgaagagcaattagagctagccagcttatctatgtggggaggtaatttgtatggtgtccgaaggctttttattgagaagatggatgac

SEQ ID NO: 427657 - DNA, 117 bp, Oryza sativa
tcgtattttaagagaggagaagccaaggaggataggcggtggctgtgactgggcgaaagtgatcagagctcgtgaggatgaaggcgactgtgaagggcatgtactagggcgacaagg

SEQ ID NO: 427658 - DNA, 334 bp, Oryza sativa
aaaaaaggttgtgttcgatccccaaccgcgatgtgctagggtttggaggcccggtgttcaatcccatcttccctccgtgcagccgctaggatcagttttatcttctttctttctttctttccgtgtcattgttattagattagatcctaagttccctgttgagattccttgctgctcatgggggcctgccgaaaactacctcacctgattacgttttgtttttggttttagccccttatttttttttatatgcagatagcgctcaccggaaattccaagcagtatatagaattatagatcgccgacatgtgtaggcgtttcttgtttcatgatt

SEQ ID NO: 427659 - DNA, 63 bp, Oryza sativa
ttgataattttcataaaaacatgttttgtcttaggcactcacctatagtttaaggggacacgc

SEQ ID NO: 427660 - DNA, 116 bp, Oryza sativa
gttggtttgaagagagagacaagccatcattagccaccgggatgcaggcatgcatcacatagctgacaggacaagaatcagaggaagaagacaaggatgaggaggaggaggaggag

SEQ ID NO: 427661 - DNA, 144 bp, Oryza sativa
ttaaatttttcacctggagcgagcagttatacgatgtggggtaagttttagcaggatactccatgaaacccataatccttgaggtcgactagcttattatctctctggtcttaacttcactaatctatagctgactgcttgatc

SEQ ID NO: 427662 - DNA, 396 bp, Oryza sativa
aggagcacgcggatacattttcccataatccggagatgataatacctgatacaaacttccagactacagacctacaagctgcgatcggacaagagaaggaaacggccctgaacagtttccaatcatctccacggtagcagctatcttaacaagttattacatcacaacttagggggatttttggcctttgaaaagaaggcctgaggggaagaactatacgaacttggccttcacaaatcacaaacccagcccaaaacgctgggctgccaccaatgctcagttgagaagaaactctaccactagcaaccaacctcgccggctttgtaaataccagagccggatcttctacaccattacatggtagctgatgaaaacatggaagagttcagtctgccc

SEQ ID NO: 427663 - DNA, 395 bp, Oryza sativa
cggacgcgtgggtgagaattgatagtaagatttcttttcattctttgaagtggtttttaggcacctttggtgctgaaggccaaatgtgtttgttatcagttcacttatatgcatgtgtgggtggtctctgtgttcttaaaacgaattgtcacattcataccctgtgatttgagatagtaagagatataagcacttataagaaacataaacacaatgcagttgaagaattgaacctttaaggaatagaggcattgagttggcttcattatctagcaatttggaaagcatttatgtggacctgcaacaggtggttcttagttctaacattattgaaaattattcatggattttatacttcgacaaactgatgttttatacatgacaatgagattaac

SEQ ID NO: 427664 - DNA, 458 bp, Oryza sativa
ggtttctacagatggctgtgatgggatcaattcagttcaaatgagtgaactgggatccagagtgaagcctttcacaagtaggttagtttctgaggaaagcacaaaccttgcaacagtaactgttttcaataaaagttctactgatcttggctggagcaatgataaacttgggcaaacatctcaacaaagcatatctgaattgaagaaccaggatcttttggatgttgattctggaactagtaaaattggacagtcaggtcacgacaaagttgaacatgtcaccaatgaattgagcatcttcaagaaagctgcagatgtagatgatgatttggacctctccgattctcatatgaatgacaacccaggttcttctgatcgtggtatgtcccatgcccatgaagaagagggtgctgatgcaactattagtaataatcttacctgtactgacagtagcaatg

SEQ ID NO: 427665 - DNA, 368 bp, Oryza sativa
atattgtgtttgtgtttatagttcacagtacataatgaaactatacgctacatggaaaaatatcgaagttatatatatctatcagactatcaaatatcctcgattataccagcagagaataaaacccagagctggtgaacgccctaaaagctcacaatagggccagacgctgccctggggaacggaaggacatcacgtggctgacaggctaacctaccgggtaccattcctgatgaatgcgagtcaaaaattaaagcatctggccagaggatcacgcccagggggggatgctggccctagtgcggcactaggcacgactgcgctcgcctgcgtctggagcagagccatcgacctcccgatcgaaagag

SEQ ID NO: 427666 - DNA, 513 bp, Oryza sativa
ttcgttacgacgaaaaccctagccgtcttcggaatgtctaaggcctaggccgtcgccgccggctacgtcctcaagccttacccggagatgggagtcgtgttggagaatgatgtttttatatattattttatcaaatcttattcatttgttctttcttttttttttttttttttttttttcctttttctatatttattttttttttttttttttttttttctttattatttattatctttgttctattattttgtttttttatttttttaattttttttttaaattgatcattatcttttctttttattatatttatttattattcatttattatattttttttttacttcttatttttaatctcttttttttatactctgtttttttaaatttttattttttcttttatattattatttttaattattattcctattattatattattatttttttttattttttttcttttatattttttcttattttattatttttttatttatacttttt

SEQ ID NO: 427667 - DNA, 135 bp, Oryza sativa
ttttcttttgatcagagactgaaggtgataggaggagggggtaaacatcgagagggcgctcacaatcgtcacgcaccacgtcatggtcagaggttagggtctgggactacaactagtggtgcttcagtcaattcc

SEQ ID NO: 427668 - DNA, 413 bp, Oryza sativa
gtgccttttggtatcagctctaatgctctcgttgatatactccgagatactgaagatgctacgattgtatggcttactggaattcaatgtggagattttctttccacatgatcttaacagtctgcctaggggttatgacaaacacaaaagcatgttgggcgattgaaccgtatattatgacatcaaagtcactttttggttgagattttgtaaactctgaagaatacattttggcctttccagaccaaccagtctggtagcttatttttaaatgctgtttctgcaaaccaacatggccctggtaatgtaggttataattatacaacgccacatggcaatttaagtaccatagcgatggttgttgtatatgctgttcaacataagttgttgcgtggagattggactaatgtccg

SEQ ID NO: 427669 - DNA, 439 bp, Oryza sativa
ccccgacaccatcgcacccagccgccatggcctcctcctccaagctcctagccctcaccctcacctcctccttcctccgctcctccctcctgcccgccccgtcccgccgcctccccaccggcccactcctctccctccgcttctgctccgccgcgggggatgtcgccgacgctcctgccgccgccgcagcaccagatcatccgtggcccgagtggggcgatttcctcgagaagcttcgggccaaggggtacttcgagcagcccaccctcgcgtctcgcgctgatgctgcggagggggaggtggctgcgaccgccgcggcggcggcggcggctgatgtggaggaccctggggcctcggtcgacaattacccatcccaggacctgaacaggttgacgaacccatgccttcagttcggccgagagcgcttccatctccttag

SEQ ID NO: 427670 - DNA, 117 bp, Oryza sativa
gtcgtcttcgtcctcaccaagtacccgtcctacgagagcgactggtactacctcctagccgccaattaacaccaccactacttcttggctagtacttacgccgtcgttagcctaatc

SEQ ID NO: 427671 - DNA, 511 bp, Oryza sativa
gttggaggcggaagccgtcatccaccggatcgccgtgacgccatccacaacacctgagctgaggccgccgccgcgtcgtcgtcgtcgtccgtacatcgccgccggatcgagccgcgccgcaagcggtaggagatgaggcccgcggtgagcagggccgccttcgcgtccgtgcttctggcgccgcgcgcggtcggggtcgccgtccgctgcgcctccttcttctcttcggtcgtcttcccgtcggtcgccgtcgtcacttacgatcacgcgtagattattaaggaggacgccgtaaccgatccaccggagcatcttagcttgttgctgaatgtgctccatgcacgaggtgaaaagcttgtttcttcaggggcgaaaagaggcccgatttccttgttggtcccttagcagaaagtccagcagggtaattaacattactactgagaagggcaactgttcctagcgggatggaaatgccctggtggaagtttgtaatacggcctattgctttggc

SEQ ID NO: 427672 - DNA, 404 bp, Oryza sativa
tatgcctcctttcttgccgccctccttttttttttgggggcttttgaaaggggggaggtgcacacatcgtcaagagtaatgagctgacttgatccggtacaaatgactgcgaacactgcccatcgacatttatctgtagcctagctaccagattgcttgcaggaaaatacctgggtgtcacactgtgacggcatagctgctatcgtaatttctaccacggggtcggacgtgcttagtttcggtaactcggggcatgcgatctgcggatgcttacagccatcctctgataaaatcgagcttacccgggctctcaggggggtgactcgcctgttcctccatgatctgccccgggttggtccaatgctgcacccagccaccgctgtttggaatgatgccaagtcttg

SEQ ID NO: 427673 - DNA, 441 bp, Oryza sativa
gacaaactgagtttggaagttaagagcagaagaagatgcggggagaccacgggtactacggcgggagggactcgccgacgcaggggtacggctacggcggcggctacggctacggaggcgggtatggctacgacgccggtgggtactactccggcggcggcggcggctacccgacggctggggcggcggcggcggcgtacgaggacccgatggtcgggaggaggacgcacgacttcccggcgccgatgaacgagctggagttccagccgtcggccacgtgccccaagaactacgtcatcttcgaccagacgtgcaccaagagccgggtcatgttccacccctcgctggcgcacaagttcggcggcgggtcgtcggcgtacgacaacaacgtgtacggcggcggtggagcgcacgacgccgacaagggcgcgttcagggaca

SEQ ID NO: 427674 - DNA, 428 bp, Oryza sativa
tcgttaaaaaaaaaaaaaaaaaaaaaaaaaaaaaaaaaaaaaaaaaaaaaaaaaaaaaaaaaaaaaaaaaaaaaaaaaaaaaaaaaaaaaaaaaaaaaaaaaaaaaaaaaaaaaataaaaaaaaaggggggggccgttttaggggacccaattttccgtccgggggaatgcaacttattatttttttttttgggtaccttaatttaatttctttggccggtgtttaaaaactttgggattggaaaaaccttgggtttcccaaattaattggctttgaaaaaaatccctttttcccaagttggggaaatagaaaaagggcccgaactgttcgcttttcaaaaaatttgcccatcctaaatggcaatgggaaccccccttttacgggcctattaagcgcggggggtggggggtttcccccaagggggacc

SEQ ID NO: 427675 - DNA, 235 bp, Oryza sativa
  unsure (1)..(235): unsure at all n locations
gttttatctgggggggggggggagtgataaaggtgggggtgttgtnttaaaaatgagaggagggctctgcagctgccacaatttaaagacatgacatggtaaatgttgaagactttactattagctgttgagcttgttaggaagcatcataatttgagtgataacaggtttattatctcatatctttattatccatatacttgatttatttgtgatggttagctataaaattttt

SEQ ID NO: 427676 - DNA, 496 bp, Oryza sativa
  unsure (1)..(496): unsure at all n locations
tcgcacatccaacttaagcaaagcaaagtgagagctcgccgatggccatggccgtcgagaggaacaacgtcgccgcggcggcggcggcgctgctggcgctcctgccgatgatgatgctgtcctccacggcgacggcggcgcgccccgtccatggcggcccgcccggcgagctcccgccgatcatcatcacaaccccaccgacggcgataagcggggagagcgacttctccgttctgaggaaggtccccacgggtcctgaccccatcacctccgacccgcctccgccgccgccgccatcgacgccgactcagttctccgttctgaggaaggtgcccactggtccggaccccatcacctccgacccgccgccgccgccattgtcggagttcccggttctgagggaggtcccctcgggtcctgaccctatcacctncgacccgncgncgncgncaccgncattgacggagttcccgattctgaggaaggttccccgagg

SEQ ID NO: 427677 - DNA, 515 bp, Oryza sativa
aatttcactagagcaccggcggcgtggttgcgggcggcggcgctggttcggctccttcgctcggctcggctccgccaccgcgccggaggctagggttctgcgaggcgggaggcgtacgcggcggcggcgacagtcgacggagcttccggagcaggagagctccgacggcgcacgctcctgcggctcctcctgcttcccgtccaatctcgcgacgccccccgggcagattcgaggacgaccggaggcggcgaacggcgacccccccgccggataccggcagactaggttttctttgttagcataagcttgtgaaaatttagcttgtttcttacttatggataactcacacgaacagccattaccccctggtgtcggggcatggccgccgccaccttccattcatcctgcaaaatttcaacctaatccacagccttatgcaacaccttatggcgctacacccaacaatggcagcaatcacaatgcagcgagctactctgctgctgcacaacccacca

SEQ ID NO: 427678 - DNA, 79 bp, Oryza sativa
tcgttggaatgctcattatttggacatagatcgggtctatgaagaagtagattgcattgcatacgcggcgacattgaat

SEQ ID NO: 427679 - DNA, 415 bp, Oryza sativa
ttcagacccagagcaggagaggctaacacttccacggcacaataatgagtaacttgtgagctctcggttggtcaagaacagaaaccttgtgaacccgccctaaatctttgcaggtgatcgttggcaatcgcgacttgttcatggattgatcagacatcatctatatgcagatcattcttcagtacctaaaaactcattgaatcctacattaaggcatttgctccaagacttctcttctgatcttatctcttgagaggttgttagaggttgtctgggatgtgattcacacgtacttgtactgtggattgtcaggtacaagttggaccaaactgaagctccaaagatttatgttagtgtaagtaccattcagcgagtacatgcatgtaacaggaatacaaagtcatcgatacaatcc

SEQ ID NO: 427680 - DNA, 510 bp, Oryza sativa
tgttgtttactaatctgctcaatagtgcacgtccatcacaaactccaagctttcctactatgagttccttccctgaagtgaaaaacaactcatcattcggggcttctcaaaccaatggaccacctgtgttcagtagtttcagtcaaattggagcagcaactaatattggacctgggccaggaaccaccacaccaggaatgccagccagtagtccttttggtcatccaagctctgcaccacttgctgcccctacttttggcagttctcaaatgaagtttggagtttcgagcgtatttggaaaccagggttcaggtcaaccatttgggagctttcaagccccacgttttcccagttcgatgtctcctgcttcctctgtccagcacagagacattgataggcaatcacaagagttgcttaatgggatggtaactcctcctagtgtgatgtttgaggaatcctgtgtgaacaacaaaatgaaaatcaggatgatagcatctggttgaaggaaaa

SEQ ID NO: 427681 - DNA, 169 bp, Oryza sativa
tttgtatgctccttatttggaatttgatcccttctatgacgtagcagattgaattgcattaatggacgcatagaagaggtgcatggcgatcgaatagctgtcgattacgggatctcgaatatggatgggggatacgcgaatagagtgatacgccatttgcaggactaca

SEQ ID NO: 427682 - DNA, 73 bp, Oryza sativa
aaaatgaaaaacaaaaacgaaaaaaaacaactacaaaaaaaacaaaaacaaaaaaaaaaaaaaaaaaaaccac

SEQ ID NO: 427683 - DNA, 62 bp, Oryza sativa
tcgtttcattgcacattatttcgtctacgttccttactttgactaaacaaattccattggga

SEQ ID NO: 427684 - DNA, 57 bp, Oryza sativa
tttttatgctcatttattggtctatgatccgttctacgacgaagtaggttgcattgt

SEQ ID NO: 427685 - DNA, 185 bp, Oryza sativa
tttgactgctcattagttggactttgatcccttctatgacgtagcagattgcattgcatacatgtacgcactgaaaagctgcatggcgatcgaatagcagtcgaatacgggatctcgcatatggatgggggatacgcgaatagagttataccccatttgtaggactacatctgcgataattagct

SEQ ID NO: 427686 - DNA, 73 bp, Oryza sativa
ctttttgttaatctttccccattttccctccccttcttctcctgtccttctcttttttttttttttttctttc

SEQ ID NO: 427687 - DNA, 128 bp, Oryza sativa
tttttgtttaaaataaagtgagagcagcatgaatcaaaattccaagaagaatagagctgtactgtggcattgaacacacatcacacgtttgtgaactcacgagatacgatgcatctaatctctgcact

SEQ ID NO: 427688 - DNA, 71 bp, Oryza sativa
tcgtttgaatgcaccttccttggtatctgatctcgtctatgaggaatcagctggcaatgctataatgcacg

SEQ ID NO: 427689 - DNA, 183 bp, Oryza sativa
tttgaatgctcattatttggaatttgatcctgtctatgatgtagcagcttgaagtgcattagtgtacgcactgaaaaggtgcatggcgatttaatagcagtcgattatggggtctcgcatatggaagggggatacgcgaatagaggcataccgcatttggaggactacatatgcgaaaattag

SEQ ID NO: 427690 - DNA, 523 bp, Oryza sativa
tataggatagctggacgcctgatgtaccgctccggacttaattggctgcgaccgaccgcatgccgttctgtttcctatcctatctgaccatacacggcacattacctcggatggcctcatgctgggagctggaccaataacaattgccaccactgtcacgatggacgactccagccttacaaagaccactgctattttcatggaccttcctacgatgccaccttcaaaatattctgccaagactactaagggtactgacaagcctgacgctacgagaacagctcgctttgccatactaacccgttctaaaagggctaacactgacacaaggacatgcgctctagccacctgatcaatgtctaacagggctaacgcttgttaagactgggacacaaggatacctaatctcctgataatggaataattctgacttgcacaagcggaacggttaccacagcgacactcgagagaacttacgaaatgagctctatgacatgagattgaacatgagaacagaagctgc

SEQ ID NO: 427691 - DNA, 523 bp, Oryza sativa
  unsure (1)..(523): unsure at all n locations
ctactcctcgtccgacgaggaagacgccggcggcgagccgccggccgccgcggcggcctctcccgctcccgtcccctcatccttcggacctcggccgaggcctccctctccctcgacgtcggtcggcgccgctcctcagcctccgccccacagccagaatatttcttccactagttcaagtaatatctccctgcccacaccgtcactagaccttccagatgttgcagatctgttttcttccccttctctgccctctagaggatctacttctatgatggacagcacatcaaggaaacgagaatcaaatggatctgcatttcaagacccacgcagtaaatttccaagggttcaatcgggacaatctcgtggtgccaggatcgctgctgggaacacgttagttccaccacagcttagtggaaggagcaacgttgtcactgaagatatgaccaagttgtttgtggctagacgcanagagtagtgctgatgtttttggtagcctctaattganaccatcaacgaatct

SEQ ID NO: 427692 - DNA, 444 bp, Oryza sativa
cctgcctgcacgcgccgggacggactggccgggccgacccaggccgtgtcggttccgtccgcgctctcttacgcggttggctaagggtagacaccctagcgcgtccgtgcgggcgccgttgcgacccgctgtagaggccctcgacgctgccgaacccctcgggctgaaacctgaccgacgagcgatagggcggccgccgtgaaaaccgagcggagacgaacctaccgctagatgtgggagggggagcactgagcgggatgctgacgatacgcctccatgaggaacgcaaggcaaatccggtcacacggcaagggcattccgccgcctctgcagctgatctggagtgcccgaggtcctgtcgggagctggccagtccagtggcagtacaactcagacagccacgcgtctgctgtgaaaggaggctgacgtcatcgccaagcacgt

SEQ ID NO: 427693 - DNA, 452 bp, Oryza sativa
tggtttaactaatggagctctgctgaatggtttcgtgcgacatgtggggcgtgctggccagctgcagggtagtccagcagaccaacatgatggtgaccaggggtggtctcagacaggcagggagagggagggggtagctggactgcgcagcgtgtggccgtgatttctgaagatgattcataaaccatgcgtgctgagctgcagtgagagcagagtaaaaactggttcacagtatcggtgtacgattgcagttggcatgcatgcagaaaccgacagggaggaaaacggctacgggagccggacaaacacaagcagctaagctaagctaccactcgctctcatctgcattctgcattgcatcatattcatgctgatttcatatctatcgatcgatttgtatgatatgatttttgcagcatcgatcgagaacatgcatgcatatgatcagatgc

SEQ ID NO: 427694 - DNA, 185 bp, Oryza sativa
ttgttcgaacttttggtcaggctagtaacggatggatggcacaaagatgcgcacactttgtgtgaagcatcttctgctgatgtcttctgctgtttttgtcagtttgtggtagccagagacaagatgctgatgtcttctgctgtctgtattttaatactccaagcaacgctgcaaaatgttaactg

SEQ ID NO: 427695 - DNA, 341 bp, Oryza sativa
  unsure (1)..(341): unsure at all n locations
atgttccaaccatggcgaccgccgccgaccaaaaccctaacgacgcggagcaccgggaggccgcggcgggagccaatgcggcggcggaggagtacgaggaggaggatgaggaggaggaggaggtggagctnnncngtccgtcagtcgtggtggcggtacggtatatggttcatgtcgcgttctttcctttgttattggatcctgtgggcattcgcgatcacgacgtgtttcattaagggcaacgccttgactaaggaggagctcattgaggcggaggtcgtcgatctcctctgcgccgtactcaccgtgcaggacctgctgggcaacgccagtattgtctg

SEQ ID NO: 427696 - DNA, 427 bp, Oryza sativa
gtcgtccttttttttttaacccaaaatcccaatgcattttataacttataaaggaaacatacatctgacccaatcggaagaacacacggcgtaccaaacaaaaacatttcgtgctaaccaaggcaaattatacactacgttgccgtccccagcaataagagggaagggtaacaaacaaaacaaaggcccaaactgtggaaattataagaggtctagttaagatgccgggaggcatgaacgaatgatgacacgccgggctaccccatggccgggtacccaaggtttattttaatggggaaacacccaaccgaaaaccaccaaattttgccgtggaaaaaaaccccgggggcagtttaaaaaaattatggggggaagggccctggctcggcccccaaaaacccaaacacggggcggggggggcgcgaaa

SEQ ID NO: 427697 - DNA, 290 bp, Oryza sativa
ctgagaactttcccttccacaaagaagggagggagcttagggggggaccaaaccggccttttgcccgcaaacgggcactaacacgctactacccttttttaccagggggaacatatacatatttggggccaaaaaagggccaaagacaaaaaaatggggggccaaagggggcatgccgttgctgaaagcagcgctagaaaatttcctcccaacagggaggaaaaatgggggaaccagtttggaaggggggggcccgctcaccaggaaaggccccccgaaccattgggggg

SEQ ID NO: 427698 - DNA, 418 bp, Oryza sativa
  unsure (1)..(418): unsure at all n locations
agccaacccaggcaaaaaaaaaacaccagccggccaaacctagtggtaacgaggccttgaacgaaaataaaagatggctgccggcctggccgaaagatatggcatatcaacaatgcacagaagccccccaaccacggcataaaaactgggaactacacaagacactcccagcacacaaaactacagacaggccatatatgtaccaagcaccaacaagggccaaaccaagtcaaggactcaagatccatgcatatgttgcgatgtgagatgccaacactcccaagccaggttccagggggatatggngtttcatttctaggtctgcttcttatctttggctggacccctaggtatctggctgagaacctttgcgtcgagaccagagaccggcctgctgagttccacatgcgccttccca

SEQ ID NO: 427699 - DNA, 245 bp, Oryza sativa
gacacaaaacgtctcccaatatgcttttttaatagatccatactactaaacatccacacccacacaagcaggcagttaaaccatttacatcagggggattgagattaaattatgaaaaggtcaaaaccattataaaggctcctatctgaaagaagggaatatcctttataaaacaggggaaataggggtggcatgggcccagcacaaacatcccatcatatccagacttgcccagcggcatgagg

SEQ ID NO: 427700 - DNA, 399 bp, Oryza sativa
cggaaaaaaagggcccacatggggaaaaaagattttttttttagggggacattaaatcttttttttaaaaaaggggggccccaaaggtttaaaaaaaaagggggttaggagaaaaattttttacccccccttaaaggggggcaaaaaaaaaaaatttttttttaaaaaaaaggggggtaaaaaaggtaatttgtttttttgaaaaaaatatttttgaaaaaaaatgggggaaaaaaaaaaaagggggtccccgggtttttttggggtttaaaaaaaaaaaaaaaggggggccccgggtaatttctttctcattttggggggggggaaaaacccaatttgtttttcccccccaataattatatttttaacccgggggaaaaaaaaaaagggtaattttaa

SEQ ID NO: 427701 - DNA, 384 bp, Oryza sativa
agcatgaattacatattctagcattaatacgttaaattccattaagatggtagcattaacaggtcgtattatccataaaacaacccctagattctagtattcaacagaactgtttcggttaataccaaaaattacacattagctctacatcactattcctgttgcgaattctttcaccctgtcaaaaatttacaccgaaaacttctgcagatttcacgagaattacaccatgggcacatttaggatgtgaatcttattaagctcagtctcacaatgcactcagctctgggttctcctgcactggagtgatttactgctgacagtttgcttctttttggacgacagtgcaccgatgtttcagtcattgccaaagccaaaatgacc

SEQ ID NO: 427702 - DNA, 418 bp, Oryza sativa
tgtttttttttacattttgtttcatttgcactgtgttaccgtacggttacttttttttctgtttttttcaaaaccaaaaaaaagggttttttataaccttgcaaattacattaaaaatttttttaccacatacccaaaaaaaaggggtaggaaggatttttactaaaacacacccatgagaaaaattttttccaacttacattaaaacttgggtaaaccaaggggtaatttttttaggagcaaaaattggtgcatacattggaggacacccccaaaaatgggggcgggcccggggtgatggggtccggcccttggggaacctttcttaaaaatgggaacttcgtaaatggccgaggcggcggcggtgggtccgaggtgaaagggtcaagacccgaggggaccttccttaaaaccggga

SEQ ID NO: 427703 - DNA, 513 bp, Oryza sativa
  unsure (1)..(513): unsure at all n locations
tttttgtataaattataatttttttatatttttttttttatttttttttataatttttttttatttaataaaacaaaattaaaaaaataaaaaaaaaaaaaaaaaaacacccactcacgaanaacggaaaaccaaaaaaaaaaccccaaaaaaaaaaccaaaaaaaaaaaaaaaaaacaaagggggggggtttaaaaaaaaaccccaaaaaatagggggagaaaaaacaaaaaaccaaaaaggccacaaaaaaaagggaaaaaacaaataaaacccccaacccccggggggaaaaaaaaaaaacccccggggggggggggaaaaaaaaacaaaaccccaaaaaaagggggaaaaaaaaacgggggccacacaaaaggggggggggaaaaaccttttagggaccaaaaaccaaagagggagcccccaaagaacaaaaaaaaaggcggcaaaaaaaaaaaaaaggggcccaaaaaaaaaaaaaaatggaaaaaaacccccgggggagggcccccc

SEQ ID NO: 427704 - DNA, 428 bp, Oryza sativa
agcatgaattacatattctagcattaatacgttaaattccattaagatggtagcattaacaggtcgtattatccataaaacaacccctagattctagtattcaacagaactgttttggttaataccaaaaattacacatttttttttcatcactatccctgttgcgatttgggacccaaggcccaaaaaagccctggattacttgtggcagccttgcaggggaagggcccaacaaatcccggaaggccaatgggggaaaacagccatgggatggggcctacattttttagccatcccctcccgggggggctaaaatgggtggattttaaagggcggcgggggaaaaattgccgtttcggggatatgctgccttttcgcccagggggttttgggcccaaattaacattttaaaaaggctagggaggttt

SEQ ID NO: 427705 - DNA, 122 bp, Oryza sativa
attgtaacattttttctgacctaattggtttgttcacacggtttttttatatacattatcttttttgctaaccagagcaaattattcatcctacgttgccggtcccctgctttaagagggaa

SEQ ID NO: 427706 - DNA, 428 bp, Oryza sativa
ttgcggtctgtacctgccgtccttttttttttttttggtttttttttttttttttttttggaacaaaacattaaatttcttaattgtaattcctggtttaaaccccctagggggattaatattggttttttccaaaaattttttaaatttacaaaccgtttaaaactaactggaatggcccggcccccattggaaaaacaattttattttaaaaaagccggatagtccgctttgttaaaaacaattcaattagagctttcccggaaaaaaattttaagggcccgggaaaataaaaatggaaaggaaaaatttttgggggggggggaagaatatacggggggttgatctttaaaaaacacaaaagctttttggggcacccgggggaaagccccttggattttttgaaaacggccagggttttggggttt

SEQ ID NO: 427707 - DNA, 418 bp, Oryza sativa
cgtcttttttttttttttttttttttctttttttttttttttttaaaccgcgcaattgtctggttatataatttttttaagtcatttttattgaccacttttgattttaaaaaaccatacattctaaaatttgttacatctgcccaacctatattagaactagtatttattacaaatggaactgcgcctttccaatgatcctttagttgaaagccaaaagtttcaaacaaaccgtttactgtctttccgcactatttcaatacaacaacaatcagactaaactttctaactatttctatgaaaccattcttcaagtccttaaccaaaagcaaccggagaaacttcataaggaaaccttaaatggtacttgtatcgtcttgattgctgtcttcccaacctatatagcccttttacctta

SEQ ID NO: 427708 - DNA, 250 bp, Oryza sativa
tttttttttctgcagataaattcttccatcggtttactgctacagacgccgcgagaaatacaaagcttgaacacactgttttcaagtcacaagcaccgcattacatgactataattggaaaagaaaaaaggtggtacatgtctcacgctattgcaggtgttatgctggaacaggattacaagcttctctcttgtttcataagttaacaaatccatcacactgcatgatggctggcggcacaagggaacgg

SEQ ID NO: 427709 - DNA, 395 bp, Oryza sativa
cttcctttttttgagattgaatatacataatatacattccggatccaaatccaaagcacacgagaaccatgcatatgcgtgactccatgaaccgagatactaacatagcaaatgaaccgaggtaaatgaagatagcaatgtgtgatgatgcatatatgcacatacagattaaagcaatggctatatacataaaacataattcaagggcgaaacatgaactgtatgaaatagagttaaaaatttgaaacaaggatactcaggtgcagaggaacaaacagtcaaggtcatgagggtcaagcacacatgaactaatacagtatataaaggtacctagtgatcataaagcggaggaaatcatgaataaatctccaaggaaaagcccaaatagcaccagt

SEQ ID NO: 427710 - DNA, 101 bp, Oryza sativa
gctgcagaaaagaaacttagggacgcacgagggaaacaaaccaaggtcaaaaccggcagaaccatgcacaagaacaaaggtaagccagaacacggggggaa

SEQ ID NO: 427711 - DNA, 72 bp, Oryza sativa
cagaaacgagacaaacagacgcacctgagaaacaacacaacgtcaaaaccggcaaaaccatccacaataaca

SEQ ID NO: 427712 - DNA, 108 bp, Oryza sativa
catgaaccagattgacgcccctacctgagaaaaaatacatggttaaaaacggcggaaccattcacaataaccaagctaagctagttacaagggggaccgcattccgat

SEQ ID NO: 427713 - DNA, 470 bp, Oryza sativa
  unsure (1)..(470): unsure at all n locations
gacaagacaatgttacccggccatcactcaatattgcaataattactgtttcttattccaataacttcctaacaagttttggaataaacaattacagattaaaaaaaaagaaaaacatactattggaataaacaattacagattaaaaaaaaagagagaaaaacatactaactcgacaggcaagactgcagttagctggttgttagctctagttgcccacattcatgttccaggaataaataagtggtaccaaacaatgcattggttcatcagccttccttcactgttcactcttgcaaattctcttgtttgttgaataattcttttgtatcgncatgaagctcgggcaagaaaagtacgacatatggtggcaacccaactacaaggaagtcagatcatagctgagtagttcatggtctcatgcctcaacaacacaaaaaaaaaaacacctttgagttcttaaaacacat

SEQ ID NO: 427714 - DNA, 65 bp, Oryza sativa
ggccgccctttttgttttttgggttgtttgtgttttatagaatgttttattacttgttttttttt

SEQ ID NO: 427715 - DNA, 431 bp, Oryza sativa
accaaaagaaacttttatatagggggggagacatgaggatttacccatatatatttttcacggagagcacattttggtaaatataaattaacctcggatcatcactggtttgaacaaagtcattgggggggcaaaagctgaaagagcctcatgggggagaggggccctaggttggggttttcccatggggtttgggcttggggtttatgggcactacagggggggggcctcccggcactccaaaggagaagctgatgtcctcctttttaagggctcccttacttgccttgccactgggattagggagctttttggggggaaacgccacctcctgcgagagcaggaggggagaccccgccacgactaacaggaccaccctggggttgggccccatgaccaccggacggagggttagcttagcttaactggga

SEQ ID NO: 427716 - DNA, 424 bp, Oryza sativa
atacaaaaaaaaattttcattttaaaaaaaaaattcaaaaaaaaaaaatacaaaaaaaaaaaaaaaaaaaaaaaaaataaaaaaaaaaaaaaaaataaaaaaaaaaaacctaaaaaaaaaaaaaaaaaaaaaaaaaaaaaaaaaccaaaaaaaaaacaaaaaaaaaccctaaaaaaataaccccaaaaaaagccctaatcccaaaaccattcttatctacaaaaaaaaactaaaaaaaaccactaactaaaaaaaaatccttattcccaaaaacacaatttaaattcagacggataaaataaaaaacctgtaaacaaccaaccaattcaaaattgaaaccataaatttaaaaaaacccaatacaaacaaaccaaacccttttgcttaaaaaaaatgtaagattaaaaaaaaaaacttttaaaaa

SEQ ID NO: 427717 - DNA, 180 bp, Oryza sativa
agagtggcaatagttatggggcaggaaagacttttctagacgcaggggggaaaaaaccggaggtcaagaacggtagaaccacgcactaaaacataggtaatccagaacacgggggagggattcagaaaaaagcgggagtgataacgaaggggagaacatagggacaatacaggtaaggga

SEQ ID NO: 427718 - DNA, 109 bp, Oryza sativa
gcaggaaagacttttacgggacgcacgacggagacaacccaaggtcaagcccggctgaaccatccacaaaaacaaaggtaagctcaaaaaaagggggggcggcatcccg

SEQ ID NO: 427719 - DNA, 108 bp, Oryza sativa
ggtatatacagtttttttgtttatttacagtgacacgtttacggcccacatcgccagaaacaagccaaggtcataaacgctacaaccattctctgtatcatagataag

SEQ ID NO: 427720 - DNA, 274 bp, Oryza sativa
  unsure (1)..(274): unsure at all n locations
gaagaattaaaaaaattcccaaacatttccatgaatacaaataaccggatccatttttttaccagtggcgggggtatttagctgccggccgtgcagagggggcagcaaaaccggngtggtggtggtggtcggcgaggaccgccctgaggacgggcacgaccctgcccatggggggcctgaccttggggttctggctgaggcagtcgtaggcaaggcgcgccacccgtttgacgggggtgtttacccccccgcccaaatccgccgccggggccgg

SEQ ID NO: 427721 - DNA, 258 bp, Oryza sativa
ggcaaaaggatatattccaggggataatatccagggaaagccaaagcctacacaaaccaaccccagaaccccattttcaccagggcacctaaacttttaaacaagtttttgggggagaaatccaggggggatatatattgggaatcctcacccagggtttaccatgtaaaaaattgggatgtcctgcccacaggaatgggcatcagtcccatataacgggcgatgggtgattaccattaccgggggcaaaggaacact

SEQ ID NO: 427722 - DNA, 245 bp, Oryza sativa
cgggggaaaaaaaatttttttttttgggggggggcatctcaaaaaggaaaaaatataggtttttttttttccccaaaaaaaaaattatccccaaataaaccccgcctaaaaaaaaaaaacccccttcttaaagttggggatgaataaatttttcccaaaaaaaaaaaaaggggggaaaaaatttaaaaaaaaggggggccccattttttttgggggggcccccttaggggtaaggggtttttttt

SEQ ID NO: 427723 - DNA, 281 bp, Oryza sativa
  unsure (1)..(281): unsure at all n locations
aatccttcttttttttttcttattcttgttttgcaaaagtttttatttcccagtgtctgacttgcgaaaacaccctttttctccacaaaccaaccgcaaaaccacctttttaccagggcccccaaacttaaaaacaagcttttgggggagaaatccaggtggggggtgttttgggaatccccccccagggtttaccatgtnnaaaattgaaatgtcccgccccccggaatggcccccaaaacccaataacgggcgatggctgattactattaccgggggcc

SEQ ID NO: 427724 - DNA, 89 bp, Oryza sativa
ctattgttcttttgcaggaacgaattttaggtacgtacgtgtgaaaaaacacaaggcaaaaacggcagaaccatcactaaaacaaagga

SEQ ID NO: 427725 - DNA, 391 bp, Oryza sativa
gtaaaaaaaaacccccccttaaaaaggaaaaaaaaacgggggaaagggccaactcggggaaaaaaaaaatggcccaaagaacaaacatttccccgggggaggggacacccacggccaaacaaggggggatactatttccccccgacaaaaaaaaaacaaggtcctgggggagggaagcgagcggcttcaaattggaacgcttaatggttggccagggggaccccgtttaaaaagaaagggaggaatccgaggggaacccgggtgggggggaaaaaaacgggcacgggaaaaaaaaaaaagggttttgcacaaaaaacattgcgcaggaaaatcccgggatttccgcgggggaccaagaatatcaaaaacccccttatttttttctccaaaa

SEQ ID NO: 427726 - DNA, 570 bp, Oryza sativa
ttgtcctttgttcttcttttttaaccaaaacattccctagatattccatatttgccttagcttgacactgtaattcctcaactacatatatttcagaactcgtttaaatcccaacacaactcaaggttcactcaaggttcaacaataaatttgcctcgttagccttcaaaagaaaaaccatgataaggcttaaacatcctcctcgctactctcaacacaaataacatcctccttatctttcttttgcctcttcgatgcacaggcctttcctccggctacttctgaatcgacatgtaacagcatgagctcaatgatcgcgctcccgtacttaactgtcttaacctttcctataagcttttcaagctcagcaacagtggttggtttttggcggttcaggagggaaatttgctgggcagaaagaacagcatgtgggaataccccttcattactggaagagagcttttttcgcaggtcatcaagcttagcttccaaattactcatctggttgcgcttagtccgtttgatccactacctttatcctgagagtgaaaagcaacgctaagcttgacc

SEQ ID NO: 427727 - DNA, 363 bp, Oryza sativa
aggggccgaaaacggggtccccaagggggggacgggaaaatttttatgccgggaaaaaaaaaaaacaggggcaatggccaaggccccaggaaaacaccaaaaaagacccaaaatccccgggggggggaaaaccccgggctgaaggggggggcagcccccaagggggccaccaattccccgggaaaaaatcccccaaccgggccccaagggagcccggggccgagggccaagcccatatggccacctttcccccccccccggtgggggggccccccaaaaaataaaccccccccgggggggggggcccggataatacccgaacggggggggaccccccaaaacccactggtgtttaaggggggg

SEQ ID NO: 427728 - DNA, 482 bp, Oryza sativa
attcaaataccactttttttgaaacaaccagcacaagatattgcgacgtttctattgatattgaagaaaaaaaatacaagattacgatcctgggagactgcagttaggaaaaagaaaaaacaatggacatcatcgtaatcgtctgatcccactggagaaacgaaaacagtttatctgatatggatgtgacatgtaacagcttctaaaactatatgtatggttataaagagactctggaggaccatagcttccatagttccaatcaacacttatacacaccatgtaagaatgacaactggaagggggggaggggcagagagacttagcttatgatatacggcttcagtgtaccactgtctaagctgatgattataaggctggtgctagctatgacatgttgatcttaacgctgtaactcttggggaacagggagacagggcacacgttagcatttttctcgcattagcacacaagcagaggtg

SEQ ID NO: 427729 - DNA, 61 bp, Oryza sativa
aaactaggtaatttatctcttgattaatcagaataaaaacgtcatgagcaaccgtacaaac

SEQ ID NO: 427730 - DNA, 178 bp, Oryza sativa
cttcgattgccctgccccgccgcccgcccgtctgcgccgtccgttgcccccgccccgtcgcggagtaccggtctcgcgatgtgtcgctgacacagcccgccgtcccaagtccacggtcaggccctacacgctcgcgccgccccggctgccgccagggggcaggcgaccacgccacggc

SEQ ID NO: 427731 - DNA, 539 bp, Oryza sativa
tttctctttgtctccagcgcacgcacgcacgaccacctcgcctcctcctctcctctcccctcccctcccccacctcgcctcgcctccacgcgcgcgacgcggccggcgacggcgagccgcacggcgcgtgggcgtgcctctcctcagccggcggctagccctctcctcgcgcggcggcggcggcggcggcggttgctggcctcattccaccgccatccctcctccgtgtctcgtgctcgactcggtggtgaaggtcaggtgctgatgcaagatataggttgttctatgagaaggatagctgtgcacatcaagacccaaatataatctcacttggttgtactatagtggtggttgaacactaagatatagcttattctgttgtttcaaaaacatgggttcgaggtttccatcgcatcagcttagcaatggcctgtatgtgtctggccgacctgagcaaccgaaggagaaggccccaccatttgttccactgccatgccatacactggtggtgatataaaaaatctgagagcttggaagat

SEQ ID NO: 427732 - DNA, 197 bp, Oryza sativa
ttttgatttcgagctgccgcccttattatattcgggagggtttaaattacaaacggtgtggctcaaaagacacgcaccaaaggaggatgtgattaggcacgaccatccgttaagcaccttggcagcggatcatgccggaacagggcgcgaaagacatgcatgggactggggataacctgacaagcgctctaaagcgg

SEQ ID NO: 427733 - DNA, 530 bp, Oryza sativa
gttttcttttggaacctactgccataacttggaagtcctatccgtggagtccaagcatgttaatgaaaacaaaggaataatctctgttgcaaaggatgccaatatttggaatccttaaagatggtatggcttggtgtcggcgacgaagctttagaagctattggttcatcttgctctgcattagaaaatctgtcacttgacaaccttaataagtgctcagacaggtaataggtccaattattaaatctactgttgcatttttacagggatggaagtatcggtgtctcatttctcttagaaatttgatatagcttatactgatactgcattgtgatgcttatagacttgaagagtagaaatgctgaaccatttgttaacaattggtttatattttttttatattgatttgaacacatgctctttttttaatttagtagtgagccacctgagtataagttctaaataaatgcttctgtaattgacatcatggtgtattttaaatattctgcaccgatagtgacagttattga

SEQ ID NO: 427734 - DNA, 222 bp, Oryza sativa
tttgcttaagttgacgcatttgtaactgtttttgctgactatcaagacactgttgctaggcatgaagctgctcatatatgggggataggactatagtgttgcactccacgtgtttggaggactgccttacggaggagcattttgcgctctgatccatgcctagcagacgggtgattgctaggggcagagcactccatgggatactaatgcttgaacaaactg

SEQ ID NO: 427735 - DNA, 532 bp, Oryza sativa
tcggctgcaattggcgcatttttaactgtttttcctgactatcaagacagagttgctaggcatgaagctgctcattttttggggatagttctctcgtgttgcactccaggtgtttgtagttttgccttacggaagagtagtttcagttctgctccatggcttgcagtggttgattactaggggttgatcactagaggtgtgattcatgcttgtcagtactggctgtggtccagtatatgaatgatttgaatgctgtaagaggaacaaaccagaagaaaacagatcggggaagcttctggacctggctcttctcgctgtttggttgttgcaaaaaggaccaagagctgggattgccagtatagctgaagcatttcatctgtatgtatgttgtgaattactcaggtctgcaaagaaaggaaacgtgggtaatttggttcctcttctttatttggcttccttttttttgtgtgtatatatgtaattttgtcatgaacctgttcccgctgcttcccgggcgttcagggccaatagc

SEQ ID NO: 427736 - DNA, 255 bp, Oryza sativa
ctttagctatagcgcacgcctcctgtccagctcattagggttggactaagacaacgccctggtccttgcagccatagcggcaacggtcgtgatagtgcaagaggaatgcgacgcccccgtccagaagagctataacaagggcctccttggccctgtcgaatagcgctgggatgagggaacataaggcaccaacgaggcttgccgactcccgttgtggctgcttgccccaccagcaaaaaaagatgacatttgaag

SEQ ID NO: 427737 - DNA, 315 bp, Oryza sativa
cttcaccttgccttcagctagagtgcaagctggcggcggcggtaactgcggcgccggcggcggaggctcggggaggttcaagcgggcgctgctccggaacctcatgctagggctcaggaagggcggcgtggcgtccggggagatgggtttccacgagaggaagagcgccattaagcgcgccgacgacgccgcgctcgtcgtcttcaggggcgccggcgacgtgctgatgtcgttcgctgtcctttaaagttctcacgggaccgaacgatacaactatttgcacctcgattgatctacatcatatccctttatgca

SEQ ID NO: 427738 - DNA, 239 bp, Oryza sativa
gttttgctttggctcacggtcttacacgctcgcgctggtgttttgatcaaagatgacagcggtacatagctttaggggcaagtgaggacgctggtgctagagctatagaactaccaggtgatacgggcggacccactcatttatgaatggatcattgcaaaagaaagaatgatataaggatgactatgaggaggacagagagcgtgaatggagagacataaatgaacaagacggacgtg

SEQ ID NO: 427739 - DNA, 481 bp, Oryza sativa
ttggttttcatgatacataacaaagtagccagtagttatagaaacacagctttgggcagattcgagaaattcttagctgcagctgaataagccaaatgaccatgttaagcaggttggtgagcgaagctccatattccacaaaatcctccgagggcatggaagcatcagggatggaagtaactgctgagggcaaggcccagtaactgtcaacttcgaatggtggaggctgacgtttggagggggaaggaaggaaaggcgtcgcgttcattgtttagatggtgtcgcaccctagaaccttactaataatcgaacctatgcccttattatcgttgtactgttccttatgtgctagtctattctgtcatgaatttgtttactcgaacagcaaactgctatgatagtagtatatcattgtacatcatgcatatcattgcctgacaatgttatcgtgttcgtctagtaatgatatcatccaggttaa

SEQ ID NO: 427740 - DNA, 369 bp, Oryza sativa
tttttttttttttttttttttttttttttttttttttttttttttttttttttttttttttttttttttttttttttaaaaaaaacccgcgggattgggggcccacgtacggggggccccccccgttttaaacgacgggacacgctcggtttatgggggggtattattattttcctcgaaacaatttaggggggggatatatataggcctttttccgtttaaaattggaagaatttttagcaacggtaaaattcggtaaaaaggtaaggaatttaaacccatatttttggctagatttattaacatctttttgaaattgggcaattcttgaaaggcttacctagggaaacgggggaaggagtttgcctg

SEQ ID NO: 427741 - DNA, 185 bp, Oryza sativa
ctgtcgcttgggttcttcttcttctcctcccggcaagcatcgtcccgccattgttgggatccatttgtttattatggtgtttcttgacgtggtttagggcttcaagaacgccgccatgatcgggacaaggtgtgagacgacatgggtttgggtggtgatggtggtggtggtgattttttaatccg

SEQ ID NO: 427742 - DNA, 458 bp, Oryza sativa
atgttgttatagcaaaccggagcaatatgaagattctaaaagaaatgaggaaattggcaattgaatgcctaacactggacattcataaacgtcctcaaatgaatgttgtggcaaaacgccttcgtacacttaaaaaagaattaaaagacatgcatggaagatactcagaacacattttggcatcacaccgctcatggcgaaaaaatgacaaccaggggccgagctataattctaggatgcaactgaagaagagtttgagcattttcaagagaaatcttagcaattcttctaagatcctattgggactcggcaatatgagaattttcacacaggaggagctaaatgaaatcacacagaattactcgtgtctactcagtggaggtacttcgggtagggttacaaggaacgcttgaggacaatacagtggtagcggtgaggatatttttcgaggtacttga

SEQ ID NO: 427743 - DNA, 485 bp, Oryza sativa
ttcgatttatggacccaacatgacattcacttgggaaaggttaaacaagttttgtcggccgatacgctctgactataatgcaacttcgtgtaattcatccaaggatcaggttttagtaccaccagggactaatgccttagtagcgactctgaaagatagcagccaggtccatagtgcgtcaagtcagcagtatgtcagaactgatccatgcacacaaagggctcttcatgaagtattatcacctacaacctgtggtttgaagccttctttagatcccactgccatgaaaaatctgtatgggggtgtttactcaaggcagtgcccatcctggacctccaagtttcagtaatcagctaccgaatgatgggcgaatttaaagaacatgtgaatctctaccaggtgtggaagcttgagctaggggacatccaactgacacggaacagcctgcactagaaattcacagcaggaatggaggcgctcagaat

SEQ ID NO: 427744 - DNA, 465 bp, Oryza sativa
  unsure (1)..(465): unsure at all n locations
tgtttttttttttttttttttttaaaaattaaaatgccttgtataaagggacgggggagtatcagcgtatctcctctccaccctcgcagtccaaaccgagcaagatctcccctgtttctctctctctctcaactgtgaactctgaactcaatccaggagatctctccatcatgtgttaatctgcatctttgtctccatccatctctgccgcactcaatcacactgcaactgcaactgcatcaagaatccatccatcctttctccctgccaataatttctcaagaaaaaaaagaagaaaaaaactgtcgtctctctccgttgatagcgaccttgccttgcgttgtctccggcttcttcgcctataaatcatcgncttcctcctcctcttcgcttccaaaatcctcgagattttcttgttgcattgcattgtggaggggagaggaggaggagagattagggagtact

SEQ ID NO: 427745 - DNA, 308 bp, Oryza sativa
gggcccccgatttaaaaaaccccggggaaggggggttttaaattttgggggacaacaaaaaaaaaaatcccccacgggtttaaaaaaccaaaaccaaaaaagggcccataagggtttatttttggggggaaaaatggccaaaaaaaaaacccggttgtttttaaacaaaggaaaaacccaaaagggccccattttttttggggaaaaccttggaaaaaacttttttggggaaaaacccgaaggggaaaaacgggggggggccccaaaggggggtaaatttggggtttgagggggcccaaacccttttt

SEQ ID NO: 427746 - DNA, 161 bp, Oryza sativa
gcccctgcgcgtgccggtaccgatccgcaggttcgggccacacccacgcgttctgtttagccggacgacggatggggtcaccgccgacttgagtgcggataggggaggatccgtgcggaaagcggggcatttgaggaggacacctcgcattgcccgcgcga

SEQ ID NO: 427747 - DNA, 544 bp, Oryza sativa
  unsure (1)..(544): unsure at all n locations
acggtttaatttttttcacgatctcgatggttatcatcaacttggggcccaaagcgtataaaacaggcacttcgccaaaaaggggtgcaagatgcagaagtagaccaggcgacaaggagagtattccaagatggtcattcaaaccagacaatgtatggcatttccgaggattcaatggatcatctctttgagtaggcagctaaacagtggcagcgggggcaaagcttgccccttgagaatcgccgtgcacgcgtagtgaggtggcttcagtaccgagggttcaactgggctgtaaccaatgccattgttaggaagctggaagcacagaaacctccctgagtatggaattgatccttctcctttgctgcttttcaactntgcaatttacaatggtttgctatttctgtcgcaagtttagcttgcacgttccttctatagttatgaatctggtttctgattaacatgccattttgaacaacggggaacgatgattaacatggtcatcattcaacttacattaactcatccattgcatgattacatg

SEQ ID NO: 427748 - DNA, 211 bp, Oryza sativa
tgttgattttgtggactatggaggctacaaacaggcccggcttaatagatccggccgggcttaagacagggcgaagagatcaggagagctacagtacactgtctgaggagcagtgtaggagccaaattgtaagagctaggctgacgaagaacattgaggcgatggatgaaggcttgcacgctcggggcaggtacacacgaggcttcagggg

SEQ ID NO: 427749 - DNA, 162 bp, Oryza sativa
ttgttttttttttttttttttgttttttttttttttttttttttttaaacacaaaaaaaaaatattctattgatcatttccattagcaaaacaaaatgccttccagaacccaggggcgaaacttacatgtattattgggactttctataccttgctattcca

SEQ ID NO: 427750 - DNA, 427 bp, Oryza sativa
agattgagaacatttatctttaaaaaaaaacagagagagaacattgttttcactaataatttcaagtttcctagtacagagatgccaaatcacactgaaaaaacatatattgatcatgtgatatacaccgttacaaaaaaacaatctcactaatgtaaatgtggtcttagtcaggattcaggaagaatacatcacatttcacaagtagttattttgtcagttcagacttcagagccgagggaatgaaagaaggttggatagtccaagggtcggatttccttcgagctattgggttcaaggaagctgcccagggtaagggacccaaccaaagtattgagaacagacccttcagcttagggcaaccattcggatatggaaaggcacggtgaaatggatcccttttaagcctttttatatgaagagaacc

SEQ ID NO: 427751 - DNA, 114 bp, Oryza sativa
tggatgctacctagcttaattacctagctactcgatcgatcatcagtctagatatggcggctttgaacggtaaggtggtggtggcggtgatggtggtggcgatggtggtggcgg

SEQ ID NO: 427752 - DNA, 474 bp, Oryza sativa
ggtcttcgttcgcgcacccggccatcggcaccacctcctcctccgcccccaagtcggtgcctctctttccttcctttagtttttactctttttctttttttgattgcggattgattgcttaagagctcctagaaggaaactccctcagctcagatgctttgctcaacttgttcaaagtcatccatcctagggagaaattcactctgtgcggcgtaattagttttgacgaacagagatctgaatcatcaatgcccgtactggcttacaatacagagaggcatagctgcatagtagatagtacatgttcatggtgttgacaactactgctttttctatgtgcttgtagtaccttaatttacagacctctacaaaccttacatattgcgccactaatgtaaggcagatcaaggcgagtctagtctgagatataaaaatcacactagccaaagccaataaataaatgaatagagaatc

SEQ ID NO: 427753 - DNA, 490 bp, Oryza sativa
gtttgtttgcgccgacaccgccttcttgcggagcctgcggccagcgtcgccgctttcttgtcgagtttctagagagaccgaagacatcgacggcatttgtaaatttttggcgtttacaatttgtcctcaactggttgtcgcgatccctatctatattctatccacagcagagcaagaagctgatccggactgcctgccgtacgtcgcccggccggctgtcgcggccttgtccagctgtgagagacgcacaccgcgcacccaccggcgcccccaatggaccccgcggatccggtcgctgtcagcctcctccgcaatccaaatgtccaattgacgcaccacctcgatccgtaccgtcgattgcaccagtaatccgcaattccgcatcatgccgtacaaggggagctgtacgtcggatgcgagaggccatcggcgggcattaaacaatgggcatttgtttgggttggagggggttttgagagagggaatgggg

SEQ ID NO: 427754 - DNA, 422 bp, Oryza sativa
tttttggttttttttttttttttttttttttttttttttttttttttttttttttttttttttttttaacccggccaaaacaaagccttattgggtggggaacaaaggaacaggggggggggaacaaggaacaaaatccgatcaggcgggcccacgggaccaccctgggggggccaaacgcaagggctccggggaaaggaaaaaaccccttacatccatcaccggggatatgcataggggggctaagaggggcgggaagcccccctggcttccctggggggcagggtttaaggactgggcaccgggctttaatacggccgggcacaacttggccgggttggccgggacgtaccggaaccccgggggggggcccaagggctcattcccccgggggccaaggggaaggggtgtaaagggagggg

SEQ ID NO: 427755 - DNA, 356 bp, Oryza sativa
ttaaacttttcgagccaaaaactctaccaaaatgcttcgaaattcctgcgtgtttcaactcggatcaggcattcaggcccttgtccccggcaggatcggtggatggagatcatcaacgggccgcttctcccggagctatgctgttgcggagaccggcgccctgacctccgacgccaagatcagcgggcagctgcttaggcgcgtgcacctgatgagacgagcctgtgggctgcagggagaccactaccgggcggcgcgcaagttcttcggtttcccgtccgagcgggatgcgcgaagcggctgagtctggcctgtttgttgcagttacggctggggttccgacggggacggcgccg

SEQ ID NO: 427756 - DNA, 425 bp, Oryza sativa
cgcgaaaagcactttgctaaacgttttgctaaaaacaatcgtgagtgacaaacatgggcacctttagaggaaattttacaaccaacgccgccccgaattgaaagcacccaaaatcatgctctataatgaatacgaatctatgaataggttcttatgtaagtattcacaaagtacttgacgttcggctcaatgcacttcaggcgggactagttatgaccacctaaccttaaggaactgttaaatcatgaagctttattcattgggccggagacagaaaagatgatctgtggatagagcaccatattagcagcgctcctaaacagcagcgaccagcatattgcgggccagaccaaacccttgggccttaaagcaaggctgatagccaggcctgtcaagtcttgtgtattggaataggaacgagctta

SEQ ID NO: 427757 - DNA, 421 bp, Oryza sativa
ttgggcagatgctgagggccgggcagtggagcgaccacgattgaatctgaaaccccgctccaatgcagtaggacagtctgatgaaagtgctccaaaggaaaggcaatccctctttggtggagctcggcccagggaacaagttctcagagagcgtggaatagatgctttagcaagtgaccttgataagacatctccagttggcaggtctaaaagtgaatttgcaaagggtgagcagaaggtcgaagctatgtccattaacccttcaggtgaaaaggctgagagttttccagctggttctagaggcccaaggaatgctgataagaaagactacaggcgggatacagaccggagtgatgtgtataggcctacacgacgggaggacaacaggagagttgctagagatgtggagaagcccgagcac

SEQ ID NO: 427758 - DNA, 342 bp, Oryza sativa
atgggcttatcattctggcatagttggtcgttgtctggtgtatattgacaccatgttttttaccggcacgcaagacaagtgcacggcgtgcgacaagaccgtacagtggattgactctacttacggtgacatctgcgttgccgttccacaagacctgattcaagtgcactcactgcaaagggatttttctcgatgcgcagatacttatccatggacggttgtcctctactgcaagacccactttgaggcagctttttaaggagacggggagctttttcaagaagtttgggccagagttgtatacttcatacaaggaactgggctgggccccaagcaagaata

SEQ ID NO: 427759 - DNA, 139 bp, Oryza sativa
gttgtcttgctcgccacggggctgtgggtcctactagtgctgtccccggcgtcccacacgaggggcccatccgcggggctgacgaaggccgcggacgcataggcgtttgcggtgacagtcggaggaagcagaggctgct

SEQ ID NO: 427760 - DNA, 408 bp, Oryza sativa
ttgaggagtagccatggcgcgtgggaagaatcacccggacggggaggaggaggaggcggcggcggcggcgggggaggaggaggcgccggtggagatggacgaggagggggagatggaggaggaggaggaggagcagggggaggtgtagggggtttatagtttctattttgttttctttttttatcttttttgtttctcttgttgtttttggttgtttatttttctttttctgtttttactttgttttattttttttttatttctatttttttttattttttttactatttacttttcttcttcttcattttttatttattttttcttttattcatttttttattttttctttttttttcttctttttttttttcattctttttatgctttttttattctttctttttt

SEQ ID NO: 427761 - DNA, 412 bp, Oryza sativa
ctttcctttggatggaccaatggggggcttggttggggtggcctcggagagttctgtcagttgatgggtcattgcttaaaaagttattcctttcaacaacttccttgcaccaagagcttatttgttttgagcttccatcattgcattctactttcttggatttgctcactgcaacaataaaaggaatgcgaagccaacttttgccacatgctgctaatattgttcggttcataactaagtactttgaaatagcgaagttgtctactatgaggacaaaaggatacgggattgtgcaacaattgctgacatccatgggcgttgggatatccatgcacttgcttgaggccataggaagcaattcagttgctgatctggacaacagctgtggccaagatatgacgttattaagcac

SEQ ID NO: 427762 - DNA, 495 bp, Oryza sativa
ttcgtgagttcgttcgccttcgccgccgccgacgccgccgatccccacccatcccgcgagcggagcggaggagggggggcgccgccgttcgtcctgctgcttccgccgcatcctgcgtcttcataacggaaattcaagacaggtggcaagacaaaatccaattggacataatggacaatatattagtggtatgcaagtccacattagctgacgatgaatcagctagtgaggtatcttcagggagtgacagtgacagtgattgcattcttggagatgattgcccatcagatgatgatgaagaggctgcacagatacacaagcgttttaaagaactgaaggataagttaaagacaggaaaagtagataagttggatgatgttgtttttgaagctggtgctgaacaagatggtaatgacaccccatcttttgatagcgatgatgaagagtcggtagaagaggttgcaagcgatgaaagggttctgctgaaaactcatc

SEQ ID NO: 427763 - DNA, 277 bp, Oryza sativa
tcttctcctcctcctatacataggcgtcgccgcgtacgccattgccagcctcgtcccaatcccaccacctgcgccacgcgcgcgcgcgtccttcgggcaccctcgcaccgcaccgtccgttggcgcgcggttggtggggcggtggtggtggtggtgccttggctagtttggccggcgcgcgcggggagggagggagggaaggagaggaggatagaggatgctcgggctcaggtcgcagtcgccgtggtcgggggcgggggcggagccgttttgtggt

SEQ ID NO: 427764 - DNA, 419 bp, Oryza sativa
tttgaacttcaatagacagctttttcttgaatcagatgttactgttcctggttcagaggttgcagtttattctgctcatagaaatcctgaaagtttagagagaactccttgttgagaaaatggaagtttttttactgctgagtttcgttgtctgaaatgaaaatgatgcatggaagatgcttttgttgtctgaaaatgaaaatgttagctgctgaaatgcgacattcagtcagtctctgaatttcaggggcccaaagccagctcgtttgctctgggtgccgtaatctgctcatgtatccagccggagcaacgtcgatttgctgcgcagtcttgcagtaccgtgaccgtggtgcctgcccccgaaatctagctgcaatgttcacgaaaattaagagagattaaaggggaatacaaatggc

SEQ ID NO: 427765 - DNA, 272 bp, Oryza sativa
gctctctctctctctctctctccctctctcagctctatctctcgaggcctctccctcccccgcgcccggcgacggcgatgggaggctcggagttggcggtggcccggcggctcggaggtggcagctgcggcgcacaaggcggtggcgggcggcagcggctgttgtgggaggggatgtggcgggcgccccctccgtcggatccggcgtcccctccgccggatctagcaggaggggaggcggcaggcggcggtgaccgctgtgggaggggaggc

SEQ ID NO: 427766 - DNA, 69 bp, Oryza sativa
ggaaaacaccccaatttttaattgccggggggtgtttgtcccaaaaagtctttaataactttgggtttg

SEQ ID NO: 427767 - DNA, 52 bp, Oryza sativa
gcaaaatctgctctcattcatgatatcttagcacaggtcccagacctccagg

SEQ ID NO: 427768 - DNA, 402 bp, Oryza sativa
tctgtctgtggagacagcgcaaccatgggtgctgaaggcgcaagtgaatgtgtggtagaaaatggacctgagaaaacttcattttgatgcggtcccagtatttggtatgatgatcaggcagctaagacaagaaactgaactgacgtatgtagagggaccccccaactcccttggaatgttggcaggaaaactgtaccggcatccaacattttggctaacactcagcatattgttgtcctatgatatgctgtaaatgtacaaaactaagtagttcgatccactcattttctcgttcttcggctcgtatgaatgatgagttgtcggttatcttcaaggctcttgcactaatctgattagctacagttcctttttcttgtttctgaagctgaaaacagaattccc

SEQ ID NO: 427769 - DNA, 277 bp, Oryza sativa
tctttgcgtcgtactctcctttcgtgtgccatgattttctgctccgagtttgtttgctcttcatcgaaccgtgggctaggagaagtcgcacaccaacacagcgaggattggccacggccaccgccttatgtcaagcacctcgggtcatctgtgctaccagctagggggcgtcgacaggggcgcgaccgagagggacctgaaggcacccattgaaacgaacatgacggccctacagcccgcggaaatgctcgatgagctaagagactatcgtgagaga

SEQ ID NO: 427770 - DNA, 283 bp, Oryza sativa
tcgtatccctccacgagaaggacgacctcgtgggtatccgccaccaccgccgccgccatcgtggaggaggcggcggtactgatggagttcgtggcgttcgtcacaacacaacacacgccgggcacgccggctgagccagaggctgaagcggggggcgcggcggcgggggcagacaccggcggaggcgaacacgccggtcacagccgtgggctgcaggggcggaaccaatggagccggaaggtccggtggacatctagcaccttgggcccgaaaggcgtcggga

SEQ ID NO: 427771 - DNA, 376 bp, Oryza sativa
tttttgtaggcgccgacgacggggctggcgctgacgccttcctcggggatggcgccggcgccgccggcgccgccggggctggagttggagctggaattggagccgtcgtcaactgtgccgagttctctcaccggtgccgctgagggcgccgccggcgtggtacccaaggtgcatgtgtgagatcgatcgatcgatcgagcgcgccgtgggtttcatttccacgaattcatctcggccgcagttgggtccggcgatccatatttttacaaattctgaatgcgattgtttgtagttaatcaaagattggctaattcaatccggcgtgtgtttggatgtttatttaatatgcaaaacctggtgattagtgataaataat

SEQ ID NO: 427772 - DNA, 189 bp, Oryza sativa
ttatgcagcaatggcggtcgtcggcgtcctcgcgctgcagggctccttcaacgagcacttggccgcgctgaggaggatcggggtgaggggggtggaggtctataattctactattttaatggtgatcaactcttttatcatttatctatgctttacctctttattcaacaatcttattatataccttaa

SEQ ID NO: 427773 - DNA, 128 bp, Oryza sativa
acgcccaccgttttttactccaaagaaaactggatgagacgggggactatggagaggaagggggggtgggcacaccaccgccacaaggagacccggggaaggacgggaccccgccgccgggggacccg

SEQ ID NO: 427774 - DNA, 400 bp, Oryza sativa
tgtgcggaaaaaaagatttcgcccccatccggcgggcactcgcgcctcgcgagccgcgtccacctccgcgcgggcgccacgccacgccacgcccacccaaacagcttcgctcgccttcctcctctcggccctcgccgtgtccaccccccccgatcgagccgccctccccctccgccttccgcctccgcgcgcgtttaggagggggtcgggaggcccgaagctgggccggcgtttccgccccgcagggtccgggaaggagagatagggagaagggtcctcggctttctcgcgccgcgtgctttggactgggatgagctggtgcttgacagtatttctggaaatggttagtgggaggtcagcaaatggggaattggatgcctgctttagaagcctcatgctt

SEQ ID NO: 427775 - DNA, 76 bp, Oryza sativa
aacgttttaacagaactactaaactccgaagacgcggaggctcgattctagaccgcagaaacggaacccgacacaa

SEQ ID NO: 427776 - DNA, 405 bp, Oryza sativa
ttttgaagaggaagtggttgcgccgacgacgaggtgagcgggttgacggaggaggaggcagcgcgcgccggcttcgggtgtcgttgtccctgctcgccaggtgctcggtacaatgccccactgtgcgctttgtttcttcagaatattagtagaactctttgaaagaagttagaagttagtaccttgttctcttcggaatgtttgttttcctatgttcttagggtgcatggcatcatttgtgatgctgttagaaatggtcaaaccacttaaatcaccaattggcattggcacacttggaattaacttggaagtgatttgttcatgcatattgatatcagcgtttccatcgcctgcagttgctccttcagacctgagctagcgtgacgagaaacatctttttgagac

SEQ ID NO: 427777 - DNA, 189 bp, Oryza sativa
tttcgacgcgtgggacgtcaatcttcatggggagcttctgaagcatatgcaggatcaatggtcttagtaacaacaccagttcctgggtctcctgacatcaagtccatcgacagtccatcccggcggcagttggcgtgtcattcgccgacggtcgcggcgccatacgagcctgcccagattctgggccgc

SEQ ID NO: 427778 - DNA, 343 bp, Oryza sativa
ggggccgaaaatccgggggaaatatatatgaccaccgctttcccataattaaaccaacggggcccccccccagaaagtttttgggcgggggattggaatacccaagggggggaattaattaaattaaaaaagggacccttttagggccccacagtaggaaaccaagggcacaagggggttgcaaaaaggaggggaggcctaatggttcccaagggggagtcctttgccccaaaacgttaggcccccttgggggcctccaggaaacttttgacgggttgccttaaaaacccatccccctgctccacccgcatcgtaattttaactcttaccccctggcaaaact

SEQ ID NO: 427779 - DNA, 328 bp, Oryza sativa
aaatcagggcccaagctcaccatagaaaagtggtcgcaacaaaaaaacgggcgccgacaaaaaaaaaaaaggggggccccaccccccgaggggggggggggaaaaaaaaaggggcccccccccccaaaaaaaaaaaggccccccaaccaaccgggggaaaaaaaagggcggagccccgcgggccccaaaaaaaaacccggagggatttttgaaaaccaccgtaaacccaaaaaaaagtggggggggaaaaaaagaacccgggggggaaaaaatccccggaaggggaacacaaaaaaaaaggcgggggggacccccaaaaaacccccca

SEQ ID NO: 427780 - DNA, 401 bp, Oryza sativa
gaataaaatgctttcaatttccaatagttgagaggacagaggaaaagcaaacaacttcttcaatggaaaacccaaacaaaaagctgggaaaaagaacgggaaaaaaagggactttttttttccaaagggcaccacatcaaggggggaaccaaaaaataccccttttcttaggaatgacacaaagatgcttgggccaaaaaaagggcctttcctaactttttggcaaaaacgggcttcttgttgggcgaaacttggcccaagagaccgtgcttgcaacaatgcgcccctacggggcgggaggacaaggactgcacggcccccaccggtgcgccagcgggggtgggagaggactacggttggccgggcgagctgctgcgggggagccggcccttgaaggaacc

SEQ ID NO: 427781 - DNA, 457 bp, Oryza sativa
gaccaaacttgtaacatataatttcaccatattgctacgaaatcatcatcatcacgtcacaaacgcctcaacatatccatcccgatctcggccaccagctcttggagcagatcccgttcgatctgggcaccaatctcaaacgcctcgtgcaggacatccacgccgatctccacccccgagtgctggacgtcgctcgcgatcagctcatccacctccttcccggccatgccgctgcacctcgcgatctccctgtccacctgagcagccagcctctcctcggggcagatcaggggaaccctcgagaacgacctgtatccggagtcgcagaactgggtgaacagcgagtccaagcactccatgacggaatcgaacgcgaggcttcccagcgggctcctgctcttctccccttctgtggccttgacgacgccggcgttgaagctgaacccgttcttcttct

SEQ ID NO: 427782 - DNA, 419 bp, Oryza sativa
tttttttttttttttttttttttttttttttttttttttttttttttttttttttttttttttttttttttttttttttttttttgttttccggacaaaaacaataccaaaaaaacacacaagtaatttttttgggttccccgaaatggggggggacccaaaaaaacacagggacccttacacccccggggggggacaaaaaaaacctgggcctgcctcccaattagagaaaccactttcaaaaaaaacaggggggaggggggggggaacccccttcccccggaaaaaaaaggggggggggcattcttttttttaaagaaaaaaacaccctcttaggggggggatggggggaataagaggggggaaaaaaaaatggtttcaaaagggagggccccatgggtgcccggggggaatgggtg

SEQ ID NO: 427783 - DNA, 362 bp, Oryza sativa
  unsure (1)..(362): unsure at all n locations
aaaaagcaaacccctgtttttccttgcaaaggggaaaaggaagctggcttgtcaaagggaagccggcttgtaggggccctggccaagcattaaaacgacgggtggccccccctgccactagcaaacccccacatgacaaacaaaagggaagctcgttgttgcccacaaaaaatactttagcccaaccggaactaataaaaacaagttttctcggaaagggaatctttctcatcaatcgattagaaaaaaaagggccacaaaaaacaagctccccgggaatttaaacaccaacacttcggccaagggggcccgnccagccccttcaaggggacatggccaagggggggataattcctaccttt

SEQ ID NO: 427784 - DNA, 295 bp, Oryza sativa
gcaaaccccaatttttttcagctttagaatgtgggaaggcctatttaaaattcaaaaaagtgctctgacaatccgggacaagcattgaaacctcaggcgcttgaaaaggaagataaacaacaatgggggctgggccaataacaagcccgtcatgaatttgggggggtgaacccatactgatgaaaaaccagaatcgagagggggaaataacaggtcctgcaagggggccttgccacaaaaaagggcctttacaaataaacccaacttggaaaaaaagggggggcggccattcttg

SEQ ID NO: 427785 - DNA, 297 bp, Oryza sativa
gttattgatatttaggttgaggaataagaaagaaaaaaaaaaaaaagcggcacaaaaaaaaaaaacaaacaaaaaaccaaggagggaaaaaacggacgggggggagaaaaaaaaggacaaacacagaccgaaaccaaaaaaaaagcaccaagacgaagaagcaacgggttggcaccgagaacgaggaaacaaaaccactgaaaaaaaaaaacgaaaccccaccccccgtccttaaaaattcagaacgggatcagtaggaacggagtggaaaagaacacggacgccaaaaacaccccc

SEQ ID NO: 427786 - DNA, 295 bp, Oryza sativa
aaataaaaaaaaataaaaaaaaaaaaaaaaaaaaaaaacccaaaaaaaaaaaaaaaaaaaaaaaaaaaaaaaaaaaaaaaaaaaaaaaaaaaaaaaaaaaaaaaaaaaaagagaaaaaaaaaaaaaaaaaacacacccaacaggaaaaaaaagttgaaaaaaaaaaaaaaaaacaacaaacaaaaaaaaaaaaaaaaaaccccccatcaacacaacgacaaaacaaaaaaaaaaaaacacaaaacccagaaaaaaaaaaggcaaaaaacccccccaagccaactctcgaaggggg

SEQ ID NO: 427787 - DNA, 451 bp, Oryza sativa
gttcgcacaaggctaaaagccgaaatcttgtgccaacctgaacaagtgaagaaatgaaatgacaacaaactgtaacgatttacaattaagagatatacccccagtttccagtaccccaccatatagtgtcagtaggcacctggaaatacaggcatctccatgacattttaagtatccttccaagaaacctaataaacagaacttcattattccaacacactttggtcctaactaaaatagattaagaccagactagtgtttacttgacgctaggcaccttccacaccagtaaaacgacagacaggaaggccctagtacctgtacaaccactgctgctaagcccactaatcttggacgtcttcttcgctggggaatatgaatgttaaaaactaaattttgcccccaacgagttggctagttcatcacagcatagtgttacaacagtgtacgt

SEQ ID NO: 427788 - DNA, 398 bp, Oryza sativa
cccctgggttttaatttaattccatcccgagggaaagcaacagggagttaaaaccccatacccaaggggaactaaattaaggggaacatccggggcaaaaaaccccaaacactggggggggggaaagggggtttttcgactggggagagccccgggacacaaaaacaactcgactggaaaaaaaaaagattctgccccggaaggctaaggaaaacgggccacaaggggccccaccaaaaagttcctccagaaaccaaccttggggccatccaccccaaggggggaaccattatgcccaaggaaatccagtttgccccgccaatccggggggagggggggaaaagtgccttttttaaagggggtgggtggggaaacccccaaacgaacgggggggaaaa

SEQ ID NO: 427789 - DNA, 365 bp, Oryza sativa
agcagcatcttctccattctatgctccgctcattaatccttgtggacaaagcttcggaaaaccttatggcggccggcctacgaggagggggaacttcactactactggctccacggatggagaaggctggccaggaccctgggggaaaggagatacctggttgaaatttaaagccctaggcttttgagatggggtcccttgaaaccaaatgaaggttttttcactttgacccccgacccccggagatggagaaccctaaggttttgtttgagacatggttcagggtgagaaggtccccgttcatatgttggccgtggaaactcaataaacatgagtttttttgtttcaattcccgattgaatgga

SEQ ID NO: 427790 - DNA, 399 bp, Oryza sativa
  unsure (1)..(399): unsure at all n locations
atattctgtttgggttttttgttccttggtgtgttctccaaaaaaaaaagggcgcgggggggaaaaaacaaggggggggggcccccatggaacccgacaccggggggggggccccccggggggggggggttttggggggggcccccccgggaaaaaaggctttaagaaaaccaaagggggggggggagcccccctgggttgggggtctggaaccaaaaaaaccggggggggtctggaaacacccccgggggggggaatatttaaaacccccccggggggaccctggaggggggccttttcacctggnaaaaaccccggttccccccccccgagggnntttgaacccccccctttttccccccccgctttttcggggggggggaaaaaaacccggggggg

SEQ ID NO: 427791 - DNA, 474 bp, Oryza sativa
  unsure (1)..(474): unsure at all n locations
ggcggttagacaatgtggatagaccactccatttcagtagattgcaagtagcgtacattgcggttacacaaatattcccttccctgcttccctatacagcatcaaacagacaacctttctcctcagacaaaaacactgcatctccatgtaccacacggaatgtttaccatatcagcctcagaaatcatagtcttttaggtccctcttggagtcggctaattccatttccaccaagcactcctcctggctgagtggaggaaggccgttcttgtggcgtgtgtagttgtgcttgtgccacccagatttgcaatgctccctatacaacttgtcctccacaagcacgtcacattctttgcatcttctctgctgcttgccttgtccctgcccaggattttntggttnacttgagatggactgtttctgcatggcctcacctatccgagtaacaggatcaatctccactgcaggcactga

SEQ ID NO: 427792 - DNA, 364 bp, Oryza sativa
  unsure (1)..(364): unsure at all n locations
aagaacaccaaaacacaaaaaagaacacaccaccattggggcgagccaaaaaaccaaaaaaaaaaaaaacacacggagcgtaaaaaaaacccaccaaaggccccaaagaaaacagagcaccccaaaaaagaaaaaaacgccagggggaacatggaaaaaacgcgaaagaaaaaaaaaaacccgctaaaaaggtctgggaagaaggggcccccccacccacaacagtggggctccaaaaacccgggaaaaaaaaccattccgcccccccccccccccatnaaaaaaaaaaacaaacaacacccgccataattttgtgttatttntgttgtttggcggggggggggaaggcccccctcgccccccc

SEQ ID NO: 427793 - DNA, 360 bp, Oryza sativa
ttttttttttttttctcaaacatactattaaatcgatggctgtcaacattgcatctgaaacatacgcaaacacaatgcatatcatgaaaacattttaggcatgtgcatctccagaataaacattacaggcaataaacatagtagcttgtcaatgaatccgctcgagaagaccactttccaacttcccaatgtttactagaggcacaaaatcatatagttttagccttttgagcagcagagacgagagatgcgatggatgcctttcctctgccagtacctagggctcttctgcatgtaccacctaaagggcaacaaaacaactccacacaaatattagcatggggtttgcactagtacagg

SEQ ID NO: 427794 - DNA, 479 bp, Oryza sativa
ttttttttttttttttttttttttttttttttttttttttttttttgttttttttttttttttttttgtttttttttttttttttttttttttttttggcccggggggacccggggaccaaacccaaagggggaccattggcccgtgcaaaaccaaaaaaaaattaatccctacccgggaaaaaaaggcccaaaaaagggcccctacccccaaaagaaaaaaacaccccaatttcctggggcggggttaaactaaaaaaacacccctccgggggggaaaaaagcgttttcccttgttaaacaaaggggaaattaaaaaccccacaaaggctaaagcagggcccctgaaaaaaaccgccaaaaccttggaacgagcggaaggtaatttttttcgaaaaaaaagctatttcggcccctggggaaaaaaaaaaaaacttcttttccatccgagaaaaggtttttattttggaaccccggggg

SEQ ID NO: 427795 - DNA, 355 bp, Oryza sativa
aataaaacaacaacaggaggggaaaagaagaacgcggggggaaaggaaaaaagggcggagggcagggaaaaaaaaggaaggggggggcagggcaacaaagggggggaaacagcaggagcagtcgaacaagaaagggcagataacaaaaaaggggggaaggaacaagaccaggggggctaggggggcggggaaatactaaggcatgtgggaggaggcccggttacgggggggggagcggggcacacagggccccaggacacaaaagacggcaattcaaacaaacaagagtcagcaagcaagaaagcgccctcaaaaaacggggatatgccccaccgttccaagaacttaaaggccc

SEQ ID NO: 427796 - DNA, 362 bp, Oryza sativa
cccccaaaaccccttccttttaaaaaaaaaaaaaaaaaacgggtcccccccccaaaggggggggacccccggggccaaaaaaaaaaaaaaccccctggtacaaaaaaaaggggggggggggaaaaaccaagggcctttccccaaaaaatttgggggcgggggggcccccccgggggaaaaaccaaaattgacgggggggccaaaaagatttcccttttaggggttttccccggggttgttcgggcccaaaccgggaaaaaaaagggtttcccctccccctcccaaaaaaacccccccgggggggggccccccccccttggggttttggcccaaaattggggtaaggggggggggcccccccc

SEQ ID NO: 427797 - DNA, 214 bp, Oryza sativa
caaaaatgatgatgacgaggagccccgcccccacgacaaactttaagctaatttaatggggggtttaacaacagaaactggttcccgttggggggcaattgatcgacgtcgaaacaaaataagcagttcgttaattaaaccacctggagttgatttgatggcatgctcgttttttttacttaacaatttttttcaaattaataatcaataatcc

SEQ ID NO: 427798 - DNA, 465 bp, Oryza sativa
cttaaaaaaatcactttgcttaaatgttgaatgctgatacaagtgcataattatatgattgccgacaccttgtaaaaatgcagcatgctttgttgcatgcgacaaagtgtccagtcttctttaaaaaagatgaaaaacatagcaagagcctcgagagagaaatacgcccagatcgatctagccaaccaatttcgcatatacacacggcttataattctcgagtacagtaccatgcatttccttcctacacgcatttcggggctcccctgtttcatcgccgccgtccatacggatactagtaactaactaatgccattccatctcccatctgacggctaccaataactcggccgccatccaacggccaccgatcgattccagcggctcgcccgagccaccccgatagaatatcagatcattcatccctcccggctcaagccgccgagccgagccgagccgtcagaa

SEQ ID NO: 427799 - DNA, 412 bp, Oryza sativa
atctggcaaaaaaaagtttgatttgattcttacagtcccagtcaacatattgacaactatgttgggcagcagttttatcaggttggtccaggtaaaaaataaaaaatgggggcctgatgtccctattttacatcttcctagaaaaatcaggtaagctcaaattgcagcacaactgcatgactgcctaaaaatatgtttttttttttaaaaaaaaagaaagtttaaaggatgccaccatgtgcaactgcactttatgtttttttccaaaactggtattctggaacaactttttttcaagtttcaactggctttaaggttggaacaatccctgttttcctccatattagagcaatcattattcaaaaaccagttattaacagataatttggtaatatggatagacttttgaaaa

SEQ ID NO: 427800 - DNA, 485 bp, Oryza sativa
acacgtgcatattttcataaattgatctgagtaggccaaccagtattgtgcattgtaattagttcccaaaaataacagcactaactattttcatcaaaaatagaaatttacagggatagttataaaccactgcaataccaaacaaagcattgcagattgccttaaaaaaatgaagcattacaaaagacagttctaccttgctaaaccatcatgagaaactgagaatatgtgtgttcatcttcatcacagtgcagaattcactgagtaatcagtgtcagcaagtgggattcgattgagtatgaactaactacaatgtacaacattttagacgccttgcctgatttgtggtaatgtaaaactgcacctgctgcccaaaaagtacagggcaaaccaaagtacaaaacagcctacacttcttcagcccatttctccttcggtatctcaccagagtcggtgattacaactttcttcctaggcttgccatt

SEQ ID NO: 427801 - DNA, 105 bp, Oryza sativa
tttttttttttttttttttttttttttttttttttttttttttttttttttttttttttttttaattttttttttttaaataaaaaaataaactttgtgctggat

SEQ ID NO: 427802 - DNA, 476 bp, Oryza sativa
agtagtaaccaagttgtattaattagttcactcatctaagtgtatttacagtcccttttacacgagcagtgtaaaaaaaaaactaaaaatgttacaagatggaattaagaaatattcaagcatatatctacttaattgtgatcttaatttaattttgtgttgagttagctcgtaattacagagctgtgactactgctggtttgctcacttgggctctgcgcctgcggctcaccgtcgccggctagaaactccggcgccgccgccgccgccggcgtcttcacctccgtcgacgacgacgacgacgagccggaggcggcgccgcagctgcagcacacggccgccgccacgtgggcgccgccggctcggcgcggctcgacgccggggtggcgaggaacgtcggccgctcgtcgccggccatgatcaccaccacgtggtcccggcacttccgcgccagcccgtcgacgttcgcgcccgag

SEQ ID NO: 427803 - DNA, 412 bp, Oryza sativa
ggggagttcagttcccagtttaccaaaagtaaattctttgttggaggggggcaatccattacaaacacatgcataaactttcagtttttttttccattttctaccattttactatgaaaaattttgggaaaaaatggcaacattggaaatgttttacataggcaaaaatttgaaggctctggatatttttcctttcattccaaacaaacaaaaaatctacggtttttgaacctgaatacctttggggcgttagagttttgaacaaacctggttaaaaaggtttactaaacattttggctcaaccaaatggggatggtttgggataaactatgcctaacacaaggtttgtttgagctttgttaaaggtttttagcattttaaccactacaaccccaaagccgttttcttggag

SEQ ID NO: 427804 - DNA, 134 bp, Oryza sativa
ggttaaaaaaataattaaaattataatacaagggaacaaaaaaacaaaagaaacgacccaaaagagaagggggggggttgcctacacggtaaagccgaaacaccagaaggccggggggaaaccagccgaagccc

SEQ ID NO: 427805 - DNA, 396 bp, Oryza sativa
ggggtaaaaaacccccccctttgggggccccaaaaaaacaaaaaggggccccccgatgtataaaacccattcccctaactttccccccaaaaacaatcccggtttttttcccacccccttaactcccccacccaaaccacaaccttttcccccccgggggatccccccccagggcccccccattttttttttcccccccccggatccccaaaaaaagcccccccaatcggaccccctttttcaaaaacccaggaccggggggggggggttaaaggccccccttatctcccccggggaaacccccccggggccccctccgccggattttcccccggggggcccaaagccccccccccggtttaaaaaaaaactttggtccccaccgggagggggggg

SEQ ID NO: 427806 - DNA, 430 bp, Oryza sativa
aacacgacaaacaaagatttttcgtcagggtgacagactgccagaatgatttcatcacacgaccaccgtttgcacgctcccatggcgcgccgactcgttcgtcgccggcgccggcgccggctccggcacggtcgggaagaccagggcttgatgcaccagcgccgccaccgccgcgccgaccatcgggccggcccagtacacggcctggttgctgtagtgcccgctgacaaccgccggcccgaacgagcgcgccgggttcatcgacgcgcccgtgagcgaccccgccgccagcacgcacgcgcccgttacggccccgaccaccagcgcgcccagcgcccgcgccgggggccccttcctgccgccgaagcctccaccccgggggtcgccggcgacgtgcaccgtgtacaccaccatgaacgtgagcaccccc

SEQ ID NO: 427807 - DNA, 302 bp, Oryza sativa
cccccccccccccccccgtttttttggtcccaaaaaccccggaaaaaaaaaaaaaaacgggccccccagggttaaaaaaaaaaagggggttaccatggggggggggacccttgtaaccccgggggaaaaataaggggccccggccccccccttgtaaaaatggggccacctaaaaccaaaaggggaactgggggtttttttttccccccgaaaaaaaaaacatggaaaagtttccccaaaacggggaccaaaacgggaaaaaaggaaaaaattaggggggggggggggcccttccccccgaa

SEQ ID NO: 427808 - DNA, 429 bp, Oryza sativa
agaacaataattacatgtattgaattctgcatcacagtttgctcatcaattctccaatccaaaccaaccaatcaatctcaatttcacatccccaacaccaaaactctcaaacgaaaagaaagaaaaagaaaagcagagaactttacattccacacgcgtcgagtcgagtcggatagatgaagtataagagaagaaggatgatgaatcgtgtcagatggagacgctgttgggtatccctctcccggggatccccttctccttgccggcgacgtcgccggcgtccgggtagagcagcgtgtacggcaccctcacggggcccctccggttgacgagcctggggtccttgttcctctcctccaccctcttctccacccgccggagctcgtcgcggaacctgtccagcaacagcagcacctcgccgtcgtccgt

SEQ ID NO: 427809 - DNA, 456 bp, Oryza sativa
atgggaaaacggtaataccaatcgttatagacttgattgatatacgaatgcaagtgttacatgtaaataattggggccagcagcaagataagataaggtatccatctaaatatctaattgacggactaaatgttgaaacgataactttacattacttttttacatggggaataatccttcctgatgcttttcagcttcacgaccacattgtttatttccaacctttttgcaggtgagctgttgcaacacatcaagccaaccttgaatactgccacaagagggtcttcattggcccaagtagttgaacaaggcaaggaagtaacattgttctcaagaacaccttgttgtatcaatatttcaccttgcagaagaatatcattcgcaacatccgcaagcactggaaatgcttcagaaacccacttcctaaggctcatatcaccagcaaacatgggatca

SEQ ID NO: 427810 - DNA, 388 bp, Oryza sativa
ccccccccaaaagggggggcccaaaaaaaaaaaaaaaagtttgccccccccccccaaattgaaaaaaaaaaatttttaaaaacccccccattggggggggggcccccaccaaaaaagggggcaaaagggggggtttttattggccccccggcccattgggaactttaaaaaaaaggagcaggggcctaaaatttctaggaattgagggccgccaacttgggcccaagggaaccccccccctaaaaaaaaaaaacggggggggctttgggggggaaaaccgggggggggttggcccccccccccacctgaacaaaagggaggcctcggggggggggggtgggggaccccccggggggggggaaaaaagggggggggaaaaggccccgcg

SEQ ID NO: 427811 - DNA, 344 bp, Oryza sativa
gggaaccgggggggaccccgggaaaaagcagccgcgccccggggggcccaaaaaaccccccagagggggggggaaaaaacccgggggaaaaaaggggaaaaaaggcagccggggggaaaaaagggagcccgcaaaagccgccaaaaaaaaaaaagcggggaaaaaaaaagaaaaaaccggggggcccaaaaggggaggaaaaacccaaaaaatggggggggggccacccccccataacaaaggagaaaacccccccccccccctcaaaaaaaaaaaaaccccccccccccgggggggggatatgaaatcgcgcccgcgggggggggtttttttttccaggggga

SEQ ID NO: 427812 - DNA, 379 bp, Oryza sativa
gggggggacaaaattttaaaccgggtttttttgggaattttttttttgggaccaaaaaaatttttatgaaaaggtaattttaattcgccaccatttttttaaaggaaaaggcaattttaaattttgttgcagggggcagggacaaaggaaaagttttttttggccaaaatttaaaaaacgggctttttctgggggtgaaagttgcctaaaaaactaagggccccccctgggtttatagcgaggccggggaatttttttcccccggccctcttaatttaaaaaatgtggttttcccgagggagggccaggggggggcccttaaaaggaaaaaccaggcccggtcccttgggtttggttcccggggggccccaaaagaaaa

SEQ ID NO: 427813 - DNA, 92 bp, Oryza sativa
cgcgtcgtagcttgaccctttttagcggcgccttttttttttggggtcttttgctacgccgggatatcccggatggaggcaaccatagcttt

SEQ ID NO: 427814 - DNA, 345 bp, Oryza sativa
gggaaaatcggctttaattaggggtttttaagcaagggccccgtctccagggtggggggattccaaccgggaagatgaaaaaaccccgggacaggtttttaaacccccccaaaaaaaattggcagtaatgggggaacagggataaatattccggggggccccggcaaggggccctggggcgggtttttttaaggggggctcggggtcctaaaaaaaagtttccgggacctgtttgggggaccctttttttttttcctggggggccccccccgcccccggggttttttttgggggctccgggagggggactcctggttcacgggggttttcggggggggggggggg

SEQ ID NO: 427815 - DNA, 419 bp, Oryza sativa
agaaatgctgggtttcattatcaaagtttagtttggggaaaaaccggcttcataagaaaaaatgctaaaaaaaggggccacacccaggggaggcgggggaaccccccccaagggagaggagaaaaaaccccccgacaggtgttcaaaaagcccacccacaaaaaaaatggccccgaaaaaaggaggaacaatgtgaaaaatattcccgggggggccgggaaaaggggggaggagggggggcgttttctaaaggaagggcgcctgggggccctaaaaaaaaaaagttcccgaacacctttcgggggaaccctctttttaattatgccgggggggggccccccccagggcggggtaatttctcgggggccccggaaaggggaccagggaattcagggggttcaggggggcggggggggggg

SEQ ID NO: 427816 - DNA, 61 bp, Oryza sativa
attctgggaggtcccaaagttttatttttttctttaatattttagctttttaaatttaatt

SEQ ID NO: 427817 - DNA, 432 bp, Oryza sativa
aattacgactgcatttcttacttgaaaacatttggcatgagaaatacatgtataatagcagataagtggcaaaacagatgttcccggctaactccaagggaataaagatggcaacattttgcgaaggggccagtaacaagttacaagaaacttctcaagagtaatacataaattacacaaaaagaatggatggcacataatccagatcaacgtgtaatgaattgaacatggtacggcaggaaatacattaagatgatatgcctaatgacaaaccctggatgaagttcctttgaattccaatgcgccagccaaggaagagtatatggacatcgctaattatcacaacacgaactcatgtgtccaagttgcatgtattgattccatccttgcaatccctcgtcaagttgttgaaagtttcaacttgagtctttg

SEQ ID NO: 427818 - DNA, 429 bp, Oryza sativa
tcgcgatccttctacaccaccatgggcaaggaggatgtgccgatcggttgggacggttgggaagtccagaaacccgagcatagtgggatatactacggagagtacaagtgcagtgggcccggggcgctgcctagcaagaggaacggctggtcgctggtgctgagcgacatccaggccaagcccttcaccggatcacactattggctaccgcaactcctgtaaagtggcgactaccaataacctgtaataagctatgggctgggctaactaaccacaacatgtgttgagacggagacgagattcttggcaggctattgaggcgagactcttttttttggaaggagttaagcctaagatggctttaataactggacagaacaatgacagtaagaggatatctaaacctgcttaccgagataatgaattgat

SEQ ID NO: 427819 - DNA, 330 bp, Oryza sativa
gcgaaaaaacatgctccatttttaatccccccaacgaaaacaacatcgatcctactcgcattttactaaaaactggcacatcacacgggggtttttggtcaaaataaatgggcaagccataaaaaggccaagctggttcatgggtacttttaagggcccacaagggggaaaagcgtgttcatgtagaaccccgacctgtcgccccggaccttgggggggacccggggggtgtacctgaccttggactcctcctttaccttttccaaggccacctccggccgggaaacgaaccctttttgtgaggaatttctttggggggccaaaccctaa

SEQ ID NO: 427820 - DNA, 393 bp, Oryza sativa
gggccaaaaatttttttttttaggggggggggggggggtcccccaaaaattacaaattttttttcaaaaaaaatttggggaagggttttatcaagttcatataatggttttaaaaaattgggaaggggaaaaaatttttttcccaaggctttaaactaaggaaaaaaggggtttttttttttaaaaaaaggggggctccaaaaaaagaaatccccgggtcttttaagggaaaaaagggaaaaatggggggggggaaaaaaaacactttttggggggcaaaaaggggtgttttttttttttacctttgaaaaccattgggaaaacttggtggcccctctaaatttaagggcccccgggggggctttttttgttaaaaaaattttttgggggggg

SEQ ID NO: 427821 - DNA, 555 bp, Oryza sativa
acaaattataatttactacaaaatattttatttccattatgtgtgtacgctacaactttgcattcaatgttttgtaggaatgtacaaccctgaacaaatgatgggatatgctggcagcacatagtcctacggagaaccatatagctacggtggggggtcgtcaacagcacaacacgagataggaccgtcacagcttgatgaatcgccaccagtaactcagcgacccaaaactacggccacgttgatctcagcggtgttgaggtggtccgtaggtctgtccgcgagcgacattcacctaaaagattatctttgtcaggatgcagacctccaaccggtgctagaagaaagggaaagaaaaaggacactaacacgtcacgaaatttcgatgatgaggctaatgagtagaacgcttttatattttgctcattcaaactaatatgtaatgttgtgtgttaaaactttctaatgtctcagctacatttctaaattaataacacttaaatatttacctgcctttccatcccgaatacttacaatatttacctttacataaca

SEQ ID NO: 427822 - DNA, 529 bp, Oryza sativa
gaagttgtcaacagggaggcttctctttctggttcaagaaagacacctctttttctcatagaccacaccaattccgtgatgatatactctccaatttgcagcatttgacacaagttacatacacacatacatgtatagctcgtgatagaggcactgctccccacagtttcttctctacacgttgcaatggcaaaaacaaacaaaaaagaattaacctatatatatgtatataccgctatacataaagaacgaatcgagtgggtgttgaatccggttgaccctctaagaccatgcacacggatatgcatatattcctctttcaaaataaacggaaaattgccacatcattcggtttattatcggcttgagatttcttttctttgctcatctatgtgaagaacttggtggcatgatagacttgctgctgcaggctcaacctctaacaaccagcagccctgcgaaaattgcgtatggacttgatgccggcaaccttaagaatgttgctgggcttgctcaaagttggctggga

SEQ ID NO: 427823 - DNA, 256 bp, Oryza sativa
ttagttatcggccttcctttttttttttttcataaagtacactttgtttgactacgcaccatattcaacacatactttcactttacactagagcttatttatataagttccacttaacaccaggatatacatggacactagcaatgtattttgatggaaataaacaattgcactggccttgcattacatgcatgattagctattgccaatttaaagtggccgtcaaaccagtcaaggcattaaggccagagatttg

SEQ ID NO: 427824 - DNA, 156 bp, Oryza sativa
cacaaaaaaacgttgggataagtaacgggaatttttgaaaattaagttaaatttttaaaaaaatcccaacagagcttttgggggacattttatgggtccccatttttacggggtttaaggaaatcctttcgaaaaaaatcccttttccaaattttt

SEQ ID NO: 427825 - DNA, 326 bp, Oryza sativa
ggggggttattttttaaaaatattaaaaaactataaaaaaaaaaaagggggccgaaaaatcgccaaaaaaaataaaaccccaaaaaaaaaaaaaaaaggggcaaaattccccccccccacccttttttgaaaaatgagtttaaaaaaaggggaaaagcccccaaaccataaaggagggggcggcatcaaaaaaaaaaaagggagtgggaaggaaaaaaaaaaaaccccggaaacaaggaaaaaaagggggaaaaataaaaggggctgaagccttaaagcaaaggggcagaaaaccggcaaaaaaaaattgggctggggggcaaaaa

SEQ ID NO: 427826 - DNA, 486 bp, Oryza sativa
ttttttttttttttttttttttttttttttttttttttttttttttttttttttttttttttttttttttttttttttttttttttttttttttggcccaaacgggggttaagccaaacccccgaccatgccccccaggggggttctttaaaaacaaaaggggaaaaaacccatggggggggactttaaaaaaaaaaaaaggggaaaaaccaaaggccctcggctgccgggggggggggtgccaaaaaggaattaaccccccaaatggccccaaaaaggaatattttatcccaaaaaaaacccaaaccaaagcctgggggggacccaaaggggaaaaaaaaacccccccaaaatcttactttttaaaaaaataaaacggagattacggaaaaaattcattccaaaaccccgggggtaatttacgaaaaaaatttaaaaagccaaaaaaaccccgggttggctacaaaaaaaaaccgctaaggaggg

SEQ ID NO: 427827 - DNA, 461 bp, Oryza sativa
aagagcaagaaaaaaaatcagtagattaatttgttatatttattatgagctcaatatatatactgtttaagtatgtacaatgcagtgtgttgctactgaactttatcagggtagtaaagtagatctttgtggactgatgaactgaacctatctctgcctatttggagtgtttcataaagggaacactccaaactctgaaatatcttcctccactgcagggtagtcactgaagttaactggactacttcagatcctttaaccgatggttaatcttggtcagaacgacagatttcttgttcaaactgaggttagattatatccacagcttcttggagcacaacaataacacataacctagaggttcctcaactaagatctcagttaagttgtggatgctcccttgctagtttatactcagctggtaaaaaagaattgaagacactagcctttaatgttaagag

SEQ ID NO: 427828 - DNA, 267 bp, Oryza sativa
tttttgaatttgaataaaaacaatggctggtagggagagttgagttaaaatgtacttggactcccatactaaccagtatatacagatgtgggacacactgatgcagaaaaatttagtgtactacaagcttatggcctttgcttagtgctgtaccacatttacatccagttaattagctggataactaatgtgtggcaaaaccaaaatgactgtattatgcgtacacttttatagtgggcgtatggagaagagtagagggcatgtgct

SEQ ID NO: 427829 - DNA, 493 bp, Oryza sativa
attacatattttatttatttttttatttattatttttatatctttttttttcattttttatatgcaaaatcatatttcatttactactattttttaaaaaaaaaaaggggggtacaaaaaaaaaaactacccggaaaaaaacaaacccaaaaaaaaaaagggttttaaacaatttaaaaaataaaaaaaggccccaaaaaaacacccccaatatttaaaaaaaaaccacacgggaaaaaagaaaccctttaaaaacccgaaaaaaaaatggtttaaaaaagaaaccctttcaaaaaaaaaaaagggaaaaaaaatggggggggccgttcccccccaaaaaaaaaaaaccggcaacttgaaaacaaaaaggggggggggaaccaaaggacccgaaaaaaccttctggggaaaaaagccttccccgcccccgggggaaccccaaaggaaaaagggcccccgggagggggggcgggcgccacccccccaaaggccc

SEQ ID NO: 427830 - DNA, 472 bp, Oryza sativa
  unsure (1)..(472): unsure at all n locations
gaaaaatatgagctactatgatggaataaaggagaaataacctacagaacacagccagtttacaaaatggaagattggtacaagaatcatgagtccccggtagattggcccaaaggccttaaaatgtagtaggaaagaacatggcttaattcggatgctaatccagtagctggtccactggctgtcgcaccaccgtttctgaagaaactcttctattcgtgacacactgctgctgctcccaagacaactacatgtaaggtttatatagaaggcagcaaatacgccgtagttactagaaactaatatcgctatgttgctagagttgattccacacgacatccagattggatgaatcagttgagccgactgccgcaatatcatccaaaacctacaagaatccagcttatgctacccgttcttgtcggntgaacttgcttgtccagccaaagcctcagcagtagcagcagcatgc

SEQ ID NO: 427831 - DNA, 341 bp, Oryza sativa
ccccggccaaaaaaatggggggcctaaattttttggaccgaaggggggccccaaaggaaagttaaaaaatcggaccggggcccgaaaaacccaggggggggcccaaacacaaataaaaaagggggaaaaaaggaaaacccccctcccgggggggagctttttggcccccaaaaaaaaaaaccatgccgggaaaaaagggagccctttgtttgggccccgtctaaaccttggggggggaaaaataaaccctgggaaaaaacccccctttggggcaaaaaaggggggggtccccccccccctggcggggggaaaacaaggaaaatttcgggggccccgggcgg

SEQ ID NO: 427832 - DNA, 436 bp, Oryza sativa
acatgataatataaaccatgcgtattatatgattcttgagaagcgaaatgcatatgccattcaagttgcccctaggagaaaggtgtgtccacttcgtttgttccaaaactgtatgcagcaaagaaacaagaagctgtcctaattcgtgtcggcgtgtcatcttcagtaaacttatgtacaaaggagggcgcggccacattcatgagtaaggccgctcactatagtacagtattgttggcctgagatccccaaaacatgttcattgcgccctgccgttgcaattcccggtagccttcctcctccatgaacctgccattcttgagcaggccacgggcagcaaaccccatgagctcagaagggtccgtgtgctgtctgaagaagagcggagcaccgaaatcggagcagatctcggcacttggagctgcaggaacccatt

SEQ ID NO: 427833 - DNA, 405 bp, Oryza sativa
atactgtagtttaatttttttttttttttttttctatttttttttttttttttattatagtgtaatatatactaataaataaaaagtctaataaaaaaactcagataaaacccttaaaaaaaaggaaaaaaggtaaaaaaaccaattacgcgggggagaaagaagaggctaaaaaaggagggtccagaccggataaatcagcgggatcagaggtcagttgatggagagaaaaaaaacccctccccacataatcgagaaggcgcaaataaaaacaaagatcaagcaaataaataatggtataagaaggagacgaacacaaaactccctaagaaaaaagaacaaagggtgcaaggccaaaccccccaaaaaaaagacccatcccaaaaaatgaagggaaactggggg

SEQ ID NO: 427834 - DNA, 518 bp, Oryza sativa
tagataaagacttcaagcagctgatatatgaagatgttcagttagttatgcccatctctgagattggccgctggtccttttatacgctgtggcattatgttgcacagtacaagtgtgacccaaccgtagatttgagcctcaggtgcttcataggtgatgaagcacatggtatttcaggaatacagcaccttgttcctggatttggtcggaaaactgcagtgaaacttctaaagaaacatggttcattggaaaatgtgcttaatacagctgcagttagaactgctggcaaggactatgcccaggatgctctagttaagcatgcagattacctgcggaaaaattatgaagttctcagcttgaagagggatgtaaaagttcagcttgatgacagatggttatccacaagggactcttgcaacgacagcagtgttttgtctgacttcatccttaaattaacgaagggcagaatatcagaggaaattagtgtattcttggatccatcaaataactccttgcta

SEQ ID NO: 427835 - DNA, 273 bp, Oryza sativa
ttttgcatgctactgtccaccgtacacgggaggcccactcgcagcttcctacgctaggagcaactccccccaaaggacttctggtgcatagtcctactgactcagagaagaccttattcaccatgggagtggccgatcatagccagctcaacctcatgaacgagactgacccagattagcccaccattaccctgagaccagaaaatcgctcatgctcctgagacatgcaacaagggccgccagcctgctccatgtgtgctatcatggaacaag

SEQ ID NO: 427836 - DNA, 400 bp, Oryza sativa
ttactaaatcatcattacaaaggatattgcatgcagcaacaaaaaggaaacagtagctcctacattaccaaatggcaagccagtgctattcaatggatctcccactgccaatgccaatgtgtctcccaacaatggcgtcattgagaataatcagaaggctgtagctgcagttctcacgagtgttcctgctaaaaatgtcagcagcccagcaccactttcagtgccagaggtggaccatgatgggatcgaacgcattcaaaacggcagttaagtcccagaaatacctgaaaatggagggccagttatggttccaccacctcctgaagttccaggggttaacctgggaccaggctaaattaaaagggccttcggaaccaggccttggtttcctaagggttgg

SEQ ID NO: 427837 - DNA, 207 bp, Oryza sativa
ctcttcccgcgtcaatccgccattgttactagtagtagtagagctctcttgttgttgttcttcttcttcgtgttcttcttcggttgattaaataatcgtagcagcagaagaagcagctgtttgtagacaaggtgtttgtggaaatgtcgtcgtcgtcgctgtcgccggcggggtcgtcggacggggactcggcgggggtggtggtgg

SEQ ID NO: 427838 - DNA, 251 bp, Oryza sativa
cgcctccttttttttgggggtaattttggggaaattgacaaccataggttgcactcgcagggggtacacgagagctgccgctgctcccaatccactgggttcagagttcataattgtgactgacgaatacatcaaaagacctatacaatcttttggtaacaactaacaagcaaaactgaaacctgcgatgcacaactttaaaaagcttaaaccccagaaaaccaagttagtcccttcaaacaatggattta

SEQ ID NO: 427839 - DNA, 540 bp, Oryza sativa
actggctatggaaaaacagatcacacatcagattgaagcattttttgtgtgtgcacactttaaatttggttcctatgccaaaaaataaataaataaagatcacatatattgaattttttttctaagtagtgtacaaatctccagttgcacagtcctgattctacgcatgatttacagaattgatgaacattttattatttaacctttcgtacatctgatcacttcagcaaggaaatgtttgtggatttactctgttaagcatttgcagaacacccatggacagaagttgcaccatatattgctcaaaatttcaggtaacaactagatgacgaaacacattttccgacaatacctggctgaggcactgtcttttttttagaccccaaatagatgaaaattcctcttgagtatggatacagatttttgactgcctttgttaactcctagcaagatgctgcagcatgtgagtgcatattttcacccaaatatttccattcgatgcgtatgaccagtactccttgacaagatctcggaagagag

SEQ ID NO: 427840 - DNA, 521 bp, Oryza sativa
tttgttgtttttttttttttttttttttttttttttttttttttttttttttttttttttttttttttttttttttttttttttttttttttttttttttttataatatattttttttattttaaaaaaaaaaaaaagagggattataaaaaaaaaaaaaaagggtatataaaaacaaaatataagaacaaacaaatgttttttttaaaaaaaaaaggggtccaaataaaaaaaaaaaaaataataaaacttttaaaaaaatatgataaattaaaacataaaaaacaataaaaaaaacaaatttatttatctttctacctaatatcttaaacacaaaaacaaaacattcggtttttaaaacaccaaaaaaaaaattaataaaataaaaatataaaaaaaacccttccttattatttaaaaaacaacaaaaagtaagaaaaaatttttcgtggacgagggataaaaatagtaaaaaattcccccctaaaaaaaagaaaaataaaaaaaccacccctcttttt

SEQ ID NO: 427841 - DNA, 333 bp, Oryza sativa
gggtttggttattgtaattcttttttttctttttttttttttttttttttctaaaaggactggccccaaattttaaaattttaaaaagattgcgcagaactcaggttttacaaggggtttttaactttttagcaagattgaatcaatttacaggcccatgggtagaaaatttacagtttgggcaaaagtaagcctgaaatggaaaaggggtggttttgaaattaaagggaagcccttattcttagcaccattttgggcccctttgggagaaaaatttacagctggggcaaaagtaagctgaaatggaaaatgggggttttgaatttaaaaggg

SEQ ID NO: 427842 - DNA, 337 bp, Oryza sativa
tggttggtttttttttttttttttgtttttttttttaaacaaaggaatcattaattatttttttcccatattgaatatggctcgcaggtacagcttaataataatcaattcttattggtcgtactgctaataatactcattaagtaaccaattttgttaagcgtcgtgcgccaaacaagcttagttgcagcgcacgtaccccaagaagaacgcgacggggtggatcgtacggcccggattgcccaaccgggtgggcggaaatgcgaccgcgtacgtacacgtgtacgccttttcagaggggacttacgagacgtccactggcttgcccaggaagagc

SEQ ID NO: 427843 - DNA, 306 bp, Oryza sativa
cttgccaatgtgccaatgtcatggctccatagcctcatacagaaataagtacaacagttgcagtttgtcaaagaaatgataagcaagttttcggtctttaagaggtggaacaaaaagaaagaaagaggaagcaagggaggataatacatcaaattactagctgataattgaggatttttcttatgtctatatatatatatatatatatatatatatatatatatatatatatcacatcaagattgctcctgtgcgtgcgtgtgtgttgttctaatctttcactctctctcgggccctcacttttct

SEQ ID NO: 427844 - DNA, 349 bp, Oryza sativa
accagtaaactcagaacatttgattaaataatgttgtacattaagtgccaatacaagctagcagatatcgaacagactatatatctacacaaaaaaaaagcatcggtattaagttgctccatttggtttacactccaaaaacgtgacatcggattgacatcctgctggacaccggcctcctaccgtttctggaagttcaagcacttgatgccgtatccaaagaggaagaagaagatgatgacgtagccgaaatgggccagcacaacgtagccgaggaagtcgtgcttaaagcccatgttcttttccaagaaattcttcaccaccatggtgtgtgcttggccaggaacgg

SEQ ID NO: 427845 - DNA, 533 bp, Oryza sativa
ttgttttaagtttggaaacctcaatctagcaaacgaatggaatcttaaccagcaaagtagatcctcattggagagtacattgtacacataaaaagagtataaagcagagcctaatctatttggtaaaaaaatcatacaaatggtaggaacctgagagcaaaattaacacatggctcatcctttggtgctctttttcagaacgtatagttaaggattgggccaaaatgctgtctattctgaacatatacagttcttggtacagactagcagaattttcatctcatctagatgagtttcttcttccgaaagaaccgtttgaggtgccacaattgcgcaattgaggcgataacgcagaccgaaagggacattaagcttaaccatgtgaacttaaaatttgtccaatcacttacatctctcatgtctgattctttggatcttgaggtacatccaagtttccatggactgcttgaacagctgtctctagcttgggtaatttcagtgcaactcccctcgagtctatctatcttggcaag

SEQ ID NO: 427846 - DNA, 330 bp, Oryza sativa
tttttggtttttttttttttttttttttttttttttttttttttttttttttttttttttttttttttttttttttttttttttttttttttttttttttttttttttttttttttttttttttttggggcccaaacacaattttaaaaaaaagactcagagaaaaccaaaaaaaggggggaggcacaaaaggaaagtttcaagcacttcttttaaataaaaaaacccttggggacttggtgcataaaaaaaaaaaatgtttatttttttcccaaaaaaaggaggaaaccccaaaaaaggggttaaaaccccccctaaaaaaaattgggg

SEQ ID NO: 427847 - DNA, 106 bp, Oryza sativa
tttgctttcgcccttccttttttttttggcgggttgaatacgttcgtttccttatttgatttttctgtcctgaccccttatctttttttcatagaaaggaatgaat

SEQ ID NO: 427848 - DNA, 89 bp, Oryza sativa
ggggtgggtaaattaatacccttcggtctcaacatcatataattttttctttaaaacaagtaatccttaaacgaaccaaacaaaaagct

SEQ ID NO: 427849 - DNA, 59 bp, Oryza sativa
ttgatgggtttttatctcttttctgctttatccttcttaacttttctctttttcctctt

SEQ ID NO: 427850 - DNA, 151 bp, Oryza sativa
ctggaaaagaaggacaacttcaacatttttgttcaaacgggcaggcttaggaaaccgtgaccccgagacgttcttaagcttacatattaaggttttgtatccacccaacaaggtttctaaggaagtccacagatcccatttgggatatcaa

SEQ ID NO: 427851 - DNA, 420 bp, Oryza sativa
ggagaaaagctgcagggatgagacctgaaaaattgcatatcccacaacgcgggaacacacagggaactgctctacatatagttttcggatctcctttataaaacctttgcatagccactaaaagggtgtccaaggattaactacctcaataatgacataccctctttttccgctcatttagggatgctgatacaacagcaggacgcacacccttaggtggaaacagaggatggagataaggggcaaacaaaactttttacccacggcgacggcaagggcacaaccgccatgtatttagaacaacttggtgcgacttaatcctcagcttactcctcccagcaagcttaactagttgaagcaagcctatgcaggcagagatcgacctgaaattggagaactcaatcgctaaatgatttatcc

SEQ ID NO: 427852 - DNA, 114 bp, Oryza sativa
cttctttcggtggtaacatgagtaagcttctgacatgtctcatcatttcttcctcagcctaagaacagcttgcccctaaagctatcacatcatcgtcccccaatacattccaca

SEQ ID NO: 427853 - DNA, 145 bp, Oryza sativa
attatattatttttttattttattattttttttttttatttttggggataaaattcaaaagggcataaaaacgggagaacaaaaaaaaaggaacaaccggggaaaccacaaatggtttaaaaaactcgtagcagtgttttaaaac

SEQ ID NO: 427854 - DNA, 167 bp, Oryza sativa
tttttgggtgggtttttttagaggagtgcaaacattctttattgattggattgaaactttgtttatacagcaggccacaagacccaactcaagcccgcaagacacggatacataggcccaaaagtgtagacacctgggaaaccgcaccagaggccctccatggatcc

SEQ ID NO: 427855 - DNA, 450 bp, Oryza sativa
aggtaagcaacagatgcaaatgctgaggcagggagcaacttttacatgacgggggttcttttctctgtttttacttgcgaagtaaaaaagggcctatgggggaagatcaaaatggaatgtagctaacaacagcaacgggttgttgtcagaggtgaaagattctagacacattaagccaccactaacaacccacaagttatgaggggagtcgatcacgctacctacacggcgcaagcacatacgaccaagcatacaaaaatacgcaaaatgaaaaattcatcaacctgggtaatatttttggaatgcaaccaaatatgaacggttatggtgcctgtctttgcttccgttgccatcatcggacgcggtcccagatcgatgctttcctggtcactcataaacattgggtgaagcttgaagtcccgatggccaatgagggctgaagccatcccc

SEQ ID NO: 427856 - DNA, 197 bp, Oryza sativa
ttggttgtaatattacgtaatcaatgatcaaattaattaattcccaaacatgtacatctatccatataaccggccggcggtggcggtggtggaggccgcggcggctgccggccgtgcagcggcggcagcagcaccggcgtggtggtggtggctcggtcaggacggcccttgaggactgtgcaccgacccctgcccat

SEQ ID NO: 427857 - DNA, 95 bp, Oryza sativa
tgctgggggttttttttatgttttgggattttttccgtttcttttttctgtgaagccgagtgataaggttaatggcctccaacgagcgaagagaa

SEQ ID NO: 427858 - DNA, 375 bp, Oryza sativa
tactgatcagtcccatgcctgatgggcagcgtgctgctttttatggcaatgagagcagtaacaaccgggttttgcaactagagagcgagctaagagatatgaaggagcggctactcaacatgagcttgcagtattcacaggtagaggctcagcgtgaactactatggttggaactgaaagctaccactaatggaggagggcggcggggctagaggtgaagtacaagaattgcctgccataacagagactgacatcacactaacctgtggctacattcttgtcacataggatgcttccagttattgaaactcgtactctgaaggcctccaagaagctttcttgtgaagctgagccgagctcctgactaatgggacc

SEQ ID NO: 427859 - DNA, 464 bp, Oryza sativa
cttgtgaaagcagttggttccatgctattacttgaaaaagggaaactgtttgaaaggtgacagatgcgcatattatgatggaccacactcagtgggaaataatgcatcaaaacaggtggcaaaagttgctgccttacctttggagcagcttgagactcacaagaatgattggttgagcattaaagattctgtgcattctactaattacattcaggatggtgctccaataactaatgagaggggcaaaacaggcgctgatcaaccaccggttaattatgccaggacagctacaggtgcaataccggctgcttacaatgcaatgtcttgtcctaagtcatagaaggtgaaaagtagtacgccagcaggacttaaggaaagcttcactacgttttcaagtggggatcatcctgagtgctaccaggaccattttccaatggatagtgatcctgagcgagattggaacc

SEQ ID NO: 427860 - DNA, 517 bp, Oryza sativa
tggaaagaaaaaaaaaagaagaaaccctatccaaacatttacaaagggaagagagaagaaagccggagacttggaggaggaaccctccaccaccagcaaagccaatagagggatcatccgccgtaatctatctagccatcaatccatctccctctcctcctctgctctccatgaagagcaaatcctccaggaaggccgccgacgaggatgaggccaagtccaagaagctccgatcctcccgcggcaagcagcggcctaagcagcgccggcgaggccgctgcagcagcacctcctcccgctctgaatccccaccccgcaagcgctccaagaagctcaaggtctctgacaagaagagcaccaagaacaagggccgcagacgccaccacagtcttagccccagccccagcccttcatcgtcgaccgtgagttactcaacgcgcagcagcagcggtggcggcggcggcgcttctgagaggacggcgagcccaccgcgtaggagccgctctagagatgttag

SEQ ID NO: 427861 - DNA, 460 bp, Oryza sativa
tttttgtgtaataatgccatctttcatatatatttttatttatagttcattcgttttaactgggacatcatcattttccattattgcacatgacagtacacattaattagtacatacaaaagacatgaattgtttatatatccatgctaccacatatataggagaatctatatatgcacatatataatcagaggcgcatgaacacactaattacttgggggctggaagccggtggagcaagaagaaggcgcgctgactgcatctgcatattaacgcaaaaactatggaggaaagaagggagaggggaaaaatgttcaaagatgataaacaagtaagcctgcaacgtgatcattgctgcacggaaagagcaccgctgcacctcgaacgaacggcaaacatgaatgagaacattcgagcttgctaaacagctttatgggtgcgggctgcaatgcaaccacca

SEQ ID NO: 427862 - DNA, 465 bp, Oryza sativa
tgtacatgcacaagacgatggcgtccggcggggggaggagggcctgctcggggagcctgcacgcaatgcacatcaagtgcgccgacgatacgcgcttcgcgcaggagttcacgcggaggctgacggactgtgacgaggagacaggtggacaccgggcagctgagcgcctacaaggtccacccgtttcatgtccactctacgcccacaggaaggatgtgaaccattatattcattggaagctgtaggtcgttgaataatgatatatatttatctttgagatgtaggtactattagccaaatctccatgcttagatctggataggagaaaacatactataatatatcattgactatatttgttttatcaaatatggctgtatataacctgccacttgtttacttattcttatgtatggaacggagacaacatatattatcatatatcggatactattaatggtttat

SEQ ID NO: 427863 - DNA, 270 bp, Oryza sativa
ttgtaaggccgcgctgtggatgatagggcgggcgggctttcaagatgggttggttacctgccaggtgaagttctggtagatgcacagcatctggaaagagatgaacggaaaagcataagcttcagcgaacctgacgagggatgcgtggactattttcacaagctaaactaagatgccattgctgaacatccacaggtccgaagagttccacctggctggatcagctgcccagtttggaaaactagacaatatggatccaataaacgaggg

SEQ ID NO: 427864 - DNA, 570 bp, Oryza sativa
tttattatgccagcaaattcgaagatgccaatgtaacgattaactcactacaagatgcattgtcacaggctagagtgaatatttctgttcttgatgctgaaaagaaggaagctgatgccaagcatgaaacagaaactagtgctcttaatgctaagcttgccaaatgtttggaagagttggacagaagtcatggaaacttacaaagtcattcaactgaacatgatgtttaccttgagaaacttagtacacttgtaatggataacagcctcttatcattaatgactgaagaatttggaaagaaggtcagtaccttgagagaaatggcccttattgtgaggagtatgcgtgaacagcttgctgcaaagggttttcagattgacccaacaatggaggattcagaatcgggaatgcttctctctttcccagactacgataactttgttactgaaagaatggcatgcagcaaaatcagaaaagggaatgtcgatggagctttgcccttctctactgctgtagacagttgagcaccaagctgatacctgttgagaatttaagacttgcaggtacatg

SEQ ID NO: 427865 - DNA, 188 bp, Oryza sativa
tttttttttttttttttttttttttttttttttttttttattttttttatttattattttttttaataaaaaaaaaaaaaaaaaaaaaaaaaaaaaaaaaaaaaaaaaaaaaaagaaaaaaaaaaaagaaaaaaaaaaaaataaagaaaaaaaaaaaaaaaaaaaaaaaaaaaaaaggaggggaagac

SEQ ID NO: 427866 - DNA, 322 bp, Oryza sativa
tctgccgccagtcccctcctcccccgcgctctgcctctccccctgacgccggcgcgtcgctgtccccgacacctccgcctccgtctcccgctcccgccgccgcaggtccgccgttcgccgcctccgttgccgaccgccaccgccccgcgccggcttccccgcctcagcctccgcctccgcctccgcctccgcctgcgcgcatcgcaacgcaacctcaggcgcagaggcggcgacttgactcccgcctacacggcctatcgctatggggttgcctacgatcccaggcaggagattacaccccagaggctagccaggggggccc

SEQ ID NO: 427867 - DNA, 517 bp, Oryza sativa
attattcaatactcaaatctcaaaagtagcaaattacctgccaaatttggttctgttggcattttcatcttgtggtctaccatattataagctttgccatatggtcatcgaacaggtgagcttgtgttatgtcaaaatcgaatccaagccagtcaaacagtcaaaccacattttcaccatcttccccatccctatagctgcctttatgttcctcctcatgtctccttcaatttgacacccagggggattgatcaaatcggcttggcctgtgagcagagctagtcagtatttatgatatcagtagccatgtgatggtggcaggtcacgaagatcaatttaggagttattttttatccaaatgtttcctataattaatatcatagaagatggaattcgcacatcgtcagaacttagaaccatgccgtctaattctcttacattaaaatagaacacactttagatcgacctgttgtgatttatgttatggaaggaatcttatacttgcaattttactcta

SEQ ID NO: 427868 - DNA, 218 bp, Oryza sativa
aggggggtttttttaacaatttttcgcgtttctaactcagacaattttttttaggcatggaaacaacactcatttggtcccgcaaaaacttgctccagccaccatgaaaaaaggggatttggaaacctttacttattgctgccgaaaaatctaaaactgggaactgtttccccaaaccaattggtacagattatgggggggactaaaaatacccccca

SEQ ID NO: 427869 - DNA, 211 bp, Oryza sativa
tgactccacgcggcgtcgccaccccaccccaccccaacccaagcccaaattcccacgcctcctcctcctcctcctcctcctccgccgcaaaccctaaccccaatggcggaggacggcggcggcgacagggaccagcagaaccagcagcagcagcaggaggaggcggcggcaccggcagccgcggcggcgggggtggggggaggggaggaat

SEQ ID NO: 427870 - DNA, 224 bp, Oryza sativa
ttctgggtttcgcaccatttggttccaaaccgtccttataaacggataatgtaacaacacgccgcccaccattgcgtcgagcggtgcttctggccttcgcgcatcatgtccagaactacagatgctgcaaaaccaccttcgctgacagttctagcaaccccatcctcacaattcataacatagtccagcttagccccaactgcaatcaatgccaacatgattcc

SEQ ID NO: 427871 - DNA, 194 bp, Oryza sativa
tgtggtgcccggtgcgaagggaggtgatatgtggggaattgaaaggggctttcgcgccgcctccctgctgccagaatctgcgaagcatcctacaagcgactccgtcgttcatgcagtcgcgccggcaatgccggttctccttgttccatacccaaccccgtctgtgctcattaacacctcccaatggggctcaa

SEQ ID NO: 427872 - DNA, 63 bp, Oryza sativa
tttctgcctttcctcgccccgtcgcgcggcgccggcacttaagcctataaccgcatccgcccg

SEQ ID NO: 427873 - DNA, 406 bp, Oryza sativa
tgctaggagaagcttgtatccagaaaatgataacccttcttcagtagaccgctctgagttctctggtgaagcttcttctgatgaagtagtgaaggacatgagcaccattgatgaagtagccaaagacatgtgccccagcgacgcagaacaagaaactctcaccagtgacatcagttgtctcaccaagatgaagaagactgatagtgaccatgaggatgaacttgatgagtatcaggatcagtctattagagatggatctacaaccttgagaactgtcaaagatgttggcatagattcatcactgagtgcctctccttctcgttggcctattgattttgagaagatgcggcaagagattattcagttgtggtacgaatgcaacgctcccatcgtacacagaacttac

SEQ ID NO: 427874 - DNA, 205 bp, Oryza sativa
cggccgcccttctcttttctggggttctttgctaaagaacgatatttattatgaacaattcctgtgagcacggctagcatcacattgacactgatgaatatcgccgtatactcttcgctggacagctgagaaaaatcgtgtcgccctccatcgtttttcattctctccttcacctatccactcatatcctaaccgtaccagcctc

SEQ ID NO: 427875 - DNA, 417 bp, Oryza sativa
tcttattgaattaaggaagttgatgttgtatcaagaaagaaagttccttattatgaagaaagacaagtatatgaaggtccagcacaaattgatgtgatacaaggtggtgctagagaatacgcttctgctgcttctactgccgtcaatggtagattaattgctcaccaaaaattacctggtcaaagaattaaggaagtcgatgttatttccagaaagaaaattccatattatgaacaaagagaattatacgaaggtccagctcaattacaagttattaatggtggtgaacgtgaatacgtttctgccacctcaaatgccaggggaggacgtttgattggacatagaactttaccaggacaaagaagcaaagaaagtgatgtcatttccaaaaagaaagttccatactatcaagaaaga

SEQ ID NO: 427876 - DNA, 89 bp, Oryza sativa
tttttaaaaaaaaaaaaaaaaaaaaaaaaaaaaaaaaaaaaaaaaaagggaaaacgataaaaaaaaaaaaaaggtacaacactggggca

SEQ ID NO: 427877 - DNA, 212 bp, Oryza sativa
gtgtgaaccccctccctcccttctcttcctctggtccttaccgcagctatcggggagcgccgccgccgtcgccaccgccgccaccgctaggctttccttccccttcccccaccagaagcttctcgccggagaaggaaaggaggaggagagatggctgatctcttaactgcccaactccaacctcagttaagataagttcaaccccaccaaca

SEQ ID NO: 427878 - DNA, 59 bp, Oryza sativa
taggcgggcagcgaggagggaggagatcggcggccagcgtccagaggggcgcagaaggt

SEQ ID NO: 427879 - DNA, 335 bp, Oryza sativa
cgtttaagatcgttctggatggagaggtgacgagaccaccacgagcactcgatgccacccacccaccacacaacaccactcaccaccccacgcacgcgcctccactccgaatactcaccgccggaacggcgaatggcatccccgcggcggacggcggcggctaatgcaaggaatggaggaggggcggggaggacgagccggtggatggcggctgacgggagcatgcggtggggggagacgatcttactgatctacacacccttctggctaacgctctgcctcagcgtcttcggcccctttaagctttacgagaggatcacggagctggagtacct

SEQ ID NO: 427880 - DNA, 294 bp, Oryza sativa
cgcgcattctctcatccacactgctcttcccccccgcgcgccggccatggccaccgcgacgctgcccctccgcctgctagcgtacaaaaccctaggggtcccctccgccccgtccctcccggcctcgcgatgctccctccccgtcgccgcgtccgcgccccgccgctgctggcggctcctcgcttccgccgaggagccggcgcccgcacccgtggaggcccacgcccatgcggacgtggcagaggaggaggaggctgaagaagaagaagctgcaacgcacaaatcagacaaggt

SEQ ID NO: 427881 - DNA, 525 bp, Oryza sativa
aaggtgggacccctggagggaccgggccgggatttccggggcggaccacacgcgcgtgtttagtgagatagaaggaaggtcgggagaagcggtcatgaaccagcttcattcgatgcctacctgaacatggcaagtggtatgtgagccgcagcaacacagatggctcccacggtgggtgatttgaccttgataaggttgaagaacctttcttctcaaataaataatctggttttatcagtgtactttcgagagacgggatgcaggaaaacatgaaatgcattgtttttgtgaaacgaatgactggtgccagaaggatatcaaacattctgcaaaacttggagagacttgaattttggaaacgcgagtttcttgtgggctgccactcatgatcaaagaacatgtaaggaataagatggatgctattgctcaacggctttcttctgtgaggtgaatctttggctgctacaagcgtaggcgaagagggacttgatattcagacgtgttgccttggtgtgcgatttgatc

SEQ ID NO: 427882 - DNA, 82 bp, Oryza sativa
ggtgatgacaccagggggaggcaggagcggccggcgcactagatcggggcgggcggatttaggggaggagcgcgctagccgg

SEQ ID NO: 427883 - DNA, 272 bp, Oryza sativa
aaatttccctatgtccaacttcaaccagccacagatgttcaaagatgctcctcctgatgctgaaattcatgctgctaatacaagtaacaatgcattgtttggaatcaatggtgatggtccgctgggcttccctataggactaggaacagatgatttcctgtcgaatggaattgatgctgccaagtacgaagaccatatctcaacagaaattgatgatagcttcagaaatttcgaaagatgcccagcaaggaaattatcatcttaatggtttc

SEQ ID NO: 427884 - DNA, 208 bp, Oryza sativa
gcacgccccgactatctaaggcagtgggggaatggatcatgcttttgccatgcattgggtgtgtatgctactacctgatggaactctgctgcgatgctgtttcaaggatcggattgtgagacatccggatcaccagtcacaaagacgggacagcggatgctgtttggtgtatatagggggcattccaattctgcaaatgaggtcgcaa

SEQ ID NO: 427885 - DNA, 482 bp, Oryza sativa
ctagacaagcttgaaattgataccactgtgttatttaacacagaagtttgcaagaagcttccatctcttcgacatttagtgtttttcatggccaagaatgtgagatccttcacagaagaagaagaaaaagcactttgtcacccttacatctctcccatgtacttgatttttgttattgccctaatcccctatcactgcctaaaatgttgcattgcctttcttccctgaagcagttgccaatcaaggcttgtccaggaattaaatcattgccagaaaatggccttccaggtttcctttacacgagctctacgtgagcagttgcagcgcagaactaaaggagcagtgcaagaagacaataaatgccagatgtgtttatgttgaatgaaatgcaagcaaattcatagctattgcaagctgctacggttctatttaggaaacggagagatgagaaaaagagaccactgttctgaatgaccttcagt

SEQ ID NO: 427886 - DNA, 163 bp, Oryza sativa
tgtcgccggtggtgaggagatcggatgggggcgggggtgactgcggtgatagccatcgcggtggtggtgctgggctggatcaccatcgagatggcccgcaagccctgcctcgacttcggtcgccgcgccatggatcgtgcccttgaccccaactaacgacccc

SEQ ID NO: 427887 - DNA, 319 bp, Oryza sativa
cgatttggtagaatgaaaatagatgacatcaatgagaaatgcagaatgatgtattaatgtatcgcaaaaaacttgtgaaggacatatatgagaatcctaacaacaatcctaaggatgtaagtgacgaggtcatagctcaagatgaatatcacattttggacgacaccatatgtttgtcaccacccccttcagatttgcgaaattcccctccacgcccaaatctgacagtatcccccatgagtcatgaagatggggcgtatgatggtcctctgtcaccatccttaccagggacaagcgatggtaacaagaattttggaag

SEQ ID NO: 427888 - DNA, 129 bp, Oryza sativa
ctgcatacattggcttggacaagtgcccgcacgcgctgattccagtgcatggccgaatcaacctatctcccaaagataggctctgtggatacctaaggcacctaacggcaagggtaggggccattctac

SEQ ID NO: 427889 - DNA, 417 bp, Oryza sativa
cccagtctggtaagccggtcgactgaatttgaagctgctatacagaacggggacaaaagttcactgcgtgctctgtgcgataaaaaagcacaagaatctctatctgatgaggagagagaaacatggggctttctaagggtaatgtttgaggatggggatgctgccaggacaaagctgcttgctcatcttggctttaaccctccttaagaacagacttctagttcaacagatgaactgaacagaacattggcagatcctcttaaccttgaacatggcgcgccaaccgatacattagattctcaatttatggttgataatggggaagattttttcaacaatcctaaacctttggaggcttagtttggcagaagaaatcaatttctacaaatggtcaacagatcgagcatgaaatgcctg

SEQ ID NO: 427890 - DNA, 387 bp, Oryza sativa
accagtccactctccacctacaccagtaaaacctcctccacccccagcaccagtccactcttctcctccaccattaaaatccccaccaccgcccgcaccggtgagctctccacccccactgataaaattcccaccaccacccgcgccggtgatctctccaccggcaccagtaaaatttccaccgcccccggcaccagtgagctctccaccaccaccagtaaaatctcctccaccttctgcgccggtcaagttcttccacctccacctatggaatccccaccaccacctgcaccagtaaagcttaccgccttcttctgtaaggcttcttcccaaccgcgcctggaagttcttcacttcaccagtacatttacccccaacttctttttc

SEQ ID NO: 427891 - DNA, 320 bp, Oryza sativa
catctgcccagggagtggattagggatgaagaattggctccggataaccttcgcggttgatccacaattactagaggatggtctagagagaaccaagtgtttctgcaagaggcatggtaaaatcaaggaagccagctagctcgtgaatagtttcaggctttcagcatccgtactcatggatgtgtagaaccggcatcatgtgagaataaagttgaatcaagttggacacttaaatcagcacacattatgtcgtcaaattcctcaatcgaggaacttgtgtatcttattagttattatatattcgaaatcaaatttaagtt

SEQ ID NO: 427892 - DNA, 344 bp, Oryza sativa
atattcgtcggtactccactacataggttgcttctattttatttctacacgatgcaggtaataagtgcgtgtgtttctgcttttgttagttcaggcgtactgcccatgttcatccgattgctgtcctaatcgttcgtgcattcattattagaatcaaacagttggagttagcatgtatgtcttaatctgctcaagaaacttcttgcaacccccaagttttcccccaaattgaagtctgcagttgactgcctaccatttagattctctatttctatttcatcgacttatacatccatcaacattttgttggtagaatgccctcttgaagtactgcccatgttcat

SEQ ID NO: 427893 - DNA, 381 bp, Oryza sativa
ccccagcgccggctgccgcgccccactccggcgaccccctcctcctcaacatcctcctctgaagtgccgtcacccagaattggtcccgcagctccccgcgaatccggtcccaagctaaccctagccgctggcctcctcctctgctgctgctgctgctgcgactccctaccgccgccgagatggccggtgctgagcaccgtgcaactcctgtggcgtacggttggctatctattccagaggcagctttttctgaaattggctaaagtgtttcctctccttttggagcttggttggcccctggagtattagcccttcctggaacctgaacaccttcctgatctgaagctccttggtcacttatcactcaaaaaataccaaaat

SEQ ID NO: 427894 - DNA, 133 bp, Oryza sativa
ttattttgggatactaccaggaccaggcaggatggatgaattatcggtgcccagcatcaccatatggcatccttcaataattgaaaagagacagtacttacacgaacgcgcgttacacaaaccaactctgaac

SEQ ID NO: 427895 - DNA, 272 bp, Oryza sativa
actacccattgttgcccagtactgtaaaccagacttgtgaacactcagcttgcacagtttaaccatcaaatcctgaccaggggacacattgtgttcaaggttctataggttccatggacctctgccactcagcacttgcaaacaagcaggtatatgatagtgattggctcttcacaggacgagccaccaccatgaaatgaaagaggcttgtctgacacattcggtgtccaatgattatatgagttatcgttacagacatatacactggttgc

SEQ ID NO: 427896 - DNA, 381 bp, Oryza sativa
agtatgtgttatatggaggacaacatgatttctgataaaggggtctactcaaatgatctccttatgctaagatggaagattcctttgttgagatctattgcatccatctttagtacccggccatctagtaaagagccgactactgttgaagagctttggaacgagaatgcctgtgttgaagaatgctcttctatcatgtatcacctcttgatgttatgccaggttctgccagttggacgggatatgtttgcatgttctttggcattcaaggaggttgcttcttcctattcctgtagaggcgcagtaacttcaatattttcacaaattcaaacttctaacaaagatgagtcccaaaaagtgagagtgagacctgtcatgaca

SEQ ID NO: 427897 - DNA, 234 bp, Oryza sativa
ccccaccatggcgtccctgacacctgaagctgaagctcccggaggaggagtcctgttcgtcgccggcgacgacgttcgccgccgtgaatctgctcgccgccgccgtagccaccgagggtcctgtatttgatatgcctgacttcaagatgggtgggaagaagagtgatgatgctgctcccactgatgccggggatgaagatggtggtgatgatgacggggacgaggatggtgact

SEQ ID NO: 427898 - DNA, 255 bp, Oryza sativa
tatggttgctgcattgtttggcatgttacaaggcatcacactacttttgcccaaaggtttactcctgtccggtaatgatgaggcttattatgaccaatatgctgctggattctctggaggactatttggtatgaaggtcgcgccgaatgcctggccagacgattatgcctttatttatggtgtggctatcacagcaaaatatgctgcccgggatgaattactacctcactcaggcctttattcctgggacatctt

SEQ ID NO: 427899 - DNA, 256 bp, Oryza sativa
ccatgttttgtagtagcgtcagctttcgtttgtctgagttctggtatctgaatcgatatgttggttgctgactacattctgttagatgatccggaactctttgtcataaaaaaaaaaaaaaaaaaaaaaaaaaaaaaaaaaaaaaaaatttaataaaatatctctatcataaattattttatttttcatatcatactcattatttctcttatattattttttactataaattttatctttaataacctatatttac

SEQ ID NO: 427900 - DNA, 405 bp, Oryza sativa
taagctgagccgcctccccgggccgtaccggacctgcattcccgacccaacccacccgttcagttagaacctatgtaaggcggacccttacaagcgggctcatttgaaggaacttgcgactttttgctacaacatcggagcttatactgtttaactaataaatgctcacatttatggacatggatgtctcacttgacttatctgaacgggaatatatttaaagatgcagcctcttgggctaaacatacatacccccttatggtaactgatgtgctatataacacttgttctagcgtacgtagcacgactgatttatgaattctatttctctaatcattatgacatcgtggagagcttattacgagacaactaatgcaccaaatgagagcacaagaaggcccgtta

SEQ ID NO: 427901 - DNA, 223 bp, Oryza sativa
gaccggaactgcagggccgacccacgcgacccgttcgtgttactccccttggacgccgactccgaggagtgggtcgtgtatgagcgcccacgcggttacttcctaccggatccggaccgtaagaggaattgaccttagacgtgctatacaatgggaggatgcgtagcatgcttagtgcacacagggacctgggatacctggaggacggtggagaagcttctaa

SEQ ID NO: 427902 - DNA, 319 bp, Oryza sativa
cctcttaagacttactctttttttgtttcatcaatgagcattaaaccactaccttgagcaatcatacggttttgtcaccaccagaacacaaggtttattcatcaaagacccacgcacaaaaacggaagctttaggacgccgggtccatgaaaaaacaagcaacaggatgaacataccatcagcttatctgacaggaaggtgttgacaaccacacccctagcatcaccccgaggccgaaacagaaaccgcgtacacaacatcaaagttctgcgcacaccgggagcggatacacaggatggccggttacttatggaaaaac

SEQ ID NO: 427903 - DNA, 314 bp, Oryza sativa
aaccgccggttcgacccacacccacgcgtgcggctctgtcctgtccttgtatgacactccgcctgcggctcgcttgtagctctgggtggccgagaattaggggcgagggcgctgctgggcaagaaggcgactgccgcgggcttgccgggcgagggactcttcttactcctgtgaagggagtcacgagcggcacggtgcgaggcggacggagcccggatccaccctccgccgaccagagtgcgaggaggagtccctcttccacccttacccacacgagggcgacaacgactaccacgacaaggcgggagcaaggg

SEQ ID NO: 427904 - DNA, 218 bp, Oryza sativa
acccgtctgtttggcagaagaggaatccggtatggccggcgggggggtgatgagaaaatggcgtggacctaccagtggaggacctagcgtacttcgaccccccagccggcaccgagtgcataccaaaggcgtgcgtggagaccggattcttctacgtggtcaaccatgcagaggaggagggatggctataaatgacttgaatggacagctcactggaa

SEQ ID NO: 427905 - DNA, 260 bp, Oryza sativa
tctgtttaaaagaaaatacgccccaaaaaggaagacgcgaggttcgtaccgcgcgccggcatttatccaccttgcaccgagcaccggcttctgcgacaaatgcaccgacgcgtgctgcgggcttctccttctgcaaggggtgtctacaacttgattctttttgcccatacaccgtgctgtctgaggcgacctggtgccctgccaggaagaggggcgcgtctggcaaaggcagaagatcaaccgaaggcatgaaacttgtt

SEQ ID NO: 427906 - DNA, 370 bp, Oryza sativa
tcggtttcgagcgtccttgggatccatcgctgcggggtgcgactagcacggagatggcgttgagcatgcggcggccccggtggtcgatgacgacgtgtgggaggctgaccatgacttcaaggacctgtagcagaagagaaggcgctggacaatctcaccgaccgcgtcaaggaccgacagcttgattccttccgcgtacaatccgctatggcagctcttgcttcttccaaagaagctgattggaatgccatgagattgaaggaaaaagaattagcttccatcaagaacaaccctgcttgatgtgaaattatcgctaacgagcttgaattggacaagaagattgcacaaagaacactaccggagcacaaag

SEQ ID NO: 427907 - DNA, 401 bp, Oryza sativa
catcattatctactgatggccattttaatcaatcattttggggcattactctagtatagttgagtaattaacaattttttcaaaaaagtagacactttaattactcacagccactaatcacacaagtttgcgtcatctcccccatctacgggtctccggggccggacagagatcgacccagggaagaagctagccctcgccgacgccgccgacgccatcgacgtcgaggactcaatcaatcaaccaaccaaccaatcaatcaatcaagatgatggcggcggcggctggtgaaggggaggcggaggtgacacgtgaggtgattatctgcgacgcggagaaggacttccgaggggaatgcgctgtcggcgtggtccgagcagatcacggtgaggtccctggtg

SEQ ID NO: 427908 - DNA, 326 bp, Oryza sativa
tcggtttcagcaagtggagccgacaatcacaccccgcgggcgcaaacagtaaccattccggcctcgaggaccccactaatacgggaattcctctacttccaaaactagccactgataacgctactcctcctccgatcccaaatggaagaaggatttttcgacgggtattcccgtgacgactacggggaaaatcgcggtaacattgcaacgaatggggaatcctgccgggatccagcttcagggtgcaccaccacaccatctagaagctgcaccttttccgcggcgacactgttctgctcacgggttagaagagaaaagacaccatg

SEQ ID NO: 427909 - DNA, 208 bp, Oryza sativa
tcggtttgactacccgctgagtttaagcatatacaggggcttattgagaagaaacttacgaggatggctctagcaacggcgaggcgaggataatggcggcagagcacgcgcacccgctctccctcgccgtcctcccgtcggccccggtttaagcgacgcctgcggcgctatttctgagggacgctgctctccgtcgcggcgggagatg

SEQ ID NO: 427910 - DNA, 530 bp, Oryza sativa
tcggttgtgatgtgccaatggcacagatcatcgaatgctttaatgcccgaattagacaagttcatcttgcacatgcttgatccaacgcatatgttagtgcagactgacgtgggggatatgatcagaagtacgatatcagagttcagggacgcagaacatgctactgagagcatgattagtgatactatcgaaggactcatatctgtcctgagactcccatatatgcatacgaccggttgttgctaagactgtaatgtggagtagagataaggtgtgaacatcagagctcactcatgactgacaagactgattgacatctcgtgtcatcatgctacttttagagcgatagaccctgcaattgtgagattgtcacggaatcactggatacgagtatgagaaactagtcgagttgtgatggtggaatcccgacgactgggagccgaggccggctaggtaccaggtgcgccgcccatgttctgccgtgcgcacggcacgttttactttggtccaggttaacgacgtaagcattc

SEQ ID NO: 427911 - DNA, 411 bp, Oryza sativa
cgcgttcggtttggctacgcgctgagatcaggtatttgaatgattaaatgagcagaaacgaacagttcatcttgtacaagctggaatcagagaatatggacgatcagactcgcgtactggatatgatcagatgttacatgtgagatcgcaggtaccagaacagttacgagacaccatcatgaactatcaaggatcatcctgtcctcagactcccatatgaacataccaccgtttggcgataagtatgtaatgtggagtagagataagttatgagcatcacatctaacttatgatgatcaagagtgattgacatgcggtttcagaatgtcactttgagagtgacagatgacgctgctgagaagaggtaatggaataacgtgattttaaaataagaagcaagtcgagattgtg

SEQ ID NO: 427912 - DNA, 207 bp, Oryza sativa
ccggaactgaatggccgacccacgcgaccggttcacttctcctcacgataaggcacgaggagactatatgctgccatctactgctcctatccgcgccgacgcaccccgccgagctacatctccgccgtgctgatcgcgtggagccgacgagaggagcggcggacaacgctacgaggagaggagagagggggaggggaggctaccgta

SEQ ID NO: 427913 - DNA, 211 bp, Oryza sativa
tcgttttaaactaaatgaagaatcaaacacacggaggcgcaaattaaaaaaggagtggcattttctaaaatggccaaagaactgtgtatggtaattccagagaccaacccacaaaatcttagattcaaacagaacctcataagttggttaaaatcaacatttgcccgacccgaaaagccctgagggaacaaacccgatgcctaaatagctc

SEQ ID NO: 427914 - DNA, 107 bp, Oryza sativa
actgcctggcgtgccgtaccggaacggccgggccgacccgagcgacccgttagctttcgatctatggatggcatgcatgcggtcgggttttgattcaaggacaagac

SEQ ID NO: 427915 - DNA, 228 bp, Oryza sativa
tcgctttttagatcttcatacagtgaattttctgtgggctagaaagaaggtgatcgaacatcttcaggcatagctataactgagaatcctgagggtgcagcaatgagaacatgcagtgcttctcaaacatccagctggtaaaataacctactgctgcttctgtgtccattactccctccgcccccttaaaaattaaaccttcgtaccggtggtgcaacatcctggact

SEQ ID NO: 427916 - DNA, 240 bp, Oryza sativa
gcttaacatccaaatttggccatttgtccattccctcttcaaaagtataaaccatttttgggtcctcaaaatttttcagaagaacatactacgaactcaacacgagcaatacaaaacttttacaaattgatctttttgctgcccccctatgcacaaatttttagaaatcgttgacgcctttttttattagttgatgcccgactgcttgacctcagggcccttggccttgatggtgaaggg

SEQ ID NO: 427917 - DNA, 295 bp, Oryza sativa
cccgtcacctttcgagatctcgatccatcgcctccggtgggggctagaatgaaggtcatcgcacctcttcaggcatagctatagactgtgaacactgagggcgcagcaatgagaacatgcagcggtcctcaaacatccagatggtaaaataacctactgctgattctgtgttgcttactccctccgagccatataaaatctgcctcggaccggatgtgacacatactacgactacgactctggacatatctctatgcacattcactatactagaagaccttgcatccggtactag

SEQ ID NO: 427918 - DNA, 209 bp, Oryza sativa
gggccaataaaaaatccactcaaaaaatggttcacaaagcaaaagaaaaaattcaacatatcaggggggtttatctagccaaatggcccgatcaacgccccttcgagccagggggaccaaaccattaccctgactaaaaccatagggaaaaacccgggttttacaagaagaaccgggaggccactcaaaacaattgggggggggtgggg

SEQ ID NO: 427919 - DNA, 458 bp, Oryza sativa
gttgaacacaatcaatgttcattatcccgaccaaaatgccaatcataatatgtaccctggcacatggtctcttatgcctccaaacactggttttggtgtgaatcagcagaactacctaatgacgcctgacatcacactccctcaaaggtctcttaatgccaagtttggtgggaatggagcattcacttcgcttcgggcccatggcattgatcagcgctcctctggttggcttgggcatattgagccaagttctcacattgatgatgcctcatcgagtcttatcaagccacagcctttggttattgatcacaatgttcagaaagctaaaggctgttcatgcatgctatttgggatttctcttgacagccctgcaaaacctgaactattgatatgcccaccaagtgttgcatttgatgggaagctccaacaggatgcacttgaagaggatgaatgctctg

SEQ ID NO: 427920 - DNA, 151 bp, Oryza sativa
tctgttttctgctggattgaacaacagtctggggacagggtgtttcttatactggagcgaggttcttgaacatcaagggcatgatcggctcagcgtccgtattctaattccacgctggtgagaatggttgaccctattcgaatcgatctat

SEQ ID NO: 427921 - DNA, 239 bp, Oryza sativa
ctttaatttatttaggaaatatgaaagtatcatgagaagggtacttcatgaacttgcacacatggtgcactccgagcatgatgcaaatttttttgctcttaataagcagttgaatgatgaagcagcttccttggactggaccaagtcaagaggttatgtgctgagtggtcgcaaaatattagattcctatgaagacgaatttgttctggagccagacagtggtgttgttggccacaaac

SEQ ID NO: 427922 - DNA, 160 bp, Oryza sativa
gcggttgtccgagcgttcattgcgacatcgctgctcaggtgctattatggagatatagtgtgcttaactaagaataagagagagcgagacagacatttggaggggctccacaagaaggcaaaggcgaggggagctagcctgatcgttgggaatgacaact

SEQ ID NO: 427923 - DNA, 156 bp, Oryza sativa
ggagaacagaactgcattttacctggttctattatggaggcctgccaatgcaatgaatgttactctcttcatcaaaggtcttaccgtaagctgcatgtttgcttccggaggatccagctttctccactccacttacgcagggaaatgcattcctct

SEQ ID NO: 427924 - DNA, 414 bp, Oryza sativa
gtcctttaaaggaaaagacatatttgttatctttgaatgtatgctttgtactgggaacagggttgtggatacacaatctggattgcactaatgaaaacaagagaaacaaagctggggtacgcaagtcatcgtgaaccacagcagttgtgtggcagccccttcaccgtatcttatgaactgccactgggttgcaaagaaatatgaatggcggtcccaaaaaaaaaaaaaaaaaaagaaaaaagaaaaaaaaaaaaatattaaaataacgcaaattcaaaaagattcagaacaaaaaaaaataaaaaataataacaaatatataacaataatgggggggccgttttaagggaccaaagttttcttccccggggcttggaaccaaaaagttttttttatgggggccctttaatttaa

SEQ ID NO: 427925 - DNA, 90 bp, Oryza sativa
tcgtttatacatgagttattgcaacatggatgcgggagaactattgtcgagaagctgtctgtttcactgttgatggcgcccagggtgaca

SEQ ID NO: 427926 - DNA, 275 bp, Oryza sativa
ccggaccggacattgccggcccgacccacccgttcggttactggctgaagaaaagaatgaccccatgcctgaatgagcggatactgtcgccgctgtcgaacacgatgcgaggctgcccattcctgtcatgatcttgagattggacctggagctgctcagggcttcaatgttggtgttgagatcacaactgtgaggaaagtgaaggctgagctttgcaagaatactgcaatgatcaaggctgacatgatgctactactattcggggcgccccgggc

SEQ ID NO: 427927 - DNA, 131 bp, Oryza sativa
cttttacttggagatgacaagtctgggcatgtgggtgggctttgactaaaaacaaggcctaaacaagttctcgatgctgtcaaactcccccacgcttaaagaatataaatggtactagactggatgataac

SEQ ID NO: 427928 - DNA, 195 bp, Oryza sativa
gcggattaatcgccatatgcgcgggcaccagggggccggggcacaccgacgcctgcacccacgctgcacgccgcccgtgactccgcccaccggcgttctgcgcccctgcgcccgggcgattactccttctccttctgtccgtcccggccgtcgtccgggggcttgttggccgcttcccttcttgggccttgactt

SEQ ID NO: 427929 - DNA, 183 bp, Oryza sativa
cttatacttggagatgacaagcctgggcatgtgcgggggcttggactagttccaggggctaaacaagttctcgatgggtcaaattcccgacgcttaaagaatataaatgttactagactgggtgataactggagagaagatgttgcgggtgctaaactgcacttggaaaagatcgaaaatcat

SEQ ID NO: 427930 - DNA, 83 bp, Oryza sativa
ccggaactcccttttcgacccaccccacccgttttatttccactccgagagcaaaaactctatggggccggttgaatcaaaag

SEQ ID NO: 427931 - DNA, 227 bp, Oryza sativa
tcggcttccaggcgttgttgccggaaatgcgggtactggtttcttgatggctataatgggctcatgtatgatttggagagtcagaagctgggattcagtgagctaccgctggatgcgaaggatgatgaggatttccctcaccggtgccggtgtcagatcataccggcgggtgatggccggcttggcctcgcggttatagttggatccacattgcaattatgggagag

SEQ ID NO: 427932 - DNA, 154 bp, Oryza sativa
ctcctcgccgggaggattagctaaacggccgcgccagagaatccaaattgacccggtacttggatccggaagtgtcctgggacaaggatcaaacggtggaactcgcgtgctggtactcctccgtgctcggcatccgcaagaacctgttcttcag

SEQ ID NO: 427933 - DNA, 533 bp, Oryza sativa
ttagtgaagctggccctgagggccggccggattcccggtcgcccacctcactgtcccccttaattaaacaacaggggcacgcttgtctgagaaaaatggcggatctccttaaattagggtttcgatcattcgatggaattcacatgatggcgtcgttctcctcgttctcagtgagaattgccttactctttctggttttctgcttgatcggtttacaagctgcggatgggcaagctggtggcgacatctgcggcggggttccggatccatttgcttgcccaataaactgtgtccaggaggatctggtttgcggagccaatggagtcacgtactcgtgcggttgtgaggactcagcgtgcaatggagctcgtgtagtcaaaagaggagcttgcgacgctagtaacgctggaagtgattctgtacgtggataagctttgttattgattcatatcgtttggctcttcttgttcggactctcttttctcgttggtgtttctgatctcaagacttgtgtttgagatgttgatcatgtt

SEQ ID NO: 427934 - DNA, 375 bp, Oryza sativa
gttgattgcattagacacggccaactacacctggcgggggatctttggaagtttcgtacggctagccatactgacattaatacgaccacgataaacggtcgatctaccaggtgggaccacctctaaaggcatatagggtgggattaggggagcgatcttcttctaggactaccacctgctcgagaaggtggatgacttagcccaggagcacatccacgagtacgtggtccacgcccagggggtctccgccacggtgtacttttagtgcacccacgatcgtactcaacatctcctgccgcgacttcgttcggaccgcggactacaagaccctcgtcatcggccacttctccatcatgatgcacaagcgcgggaacc

SEQ ID NO: 427935 - DNA, 231 bp, Oryza sativa
  unsure (1)..(231): unsure at all n locations
ctctctctctccccttccttccccgtgtcttccagaagggtgcctttcgtcaccgcgccacgcctcgccctcaccccgcgctccgtcgccgccgcccgccgcgccatggcctncgccgccaccccgcagccaagcccgcccagccccaaggcggtgcgggttgtggtgaaggaccggctgcagggggacttattccgggactggacggcggagacggcacgcgcgctgggc

SEQ ID NO: 427936 - DNA, 235 bp, Oryza sativa
gtgtaaagaaacggtcaaagaaaacgccatgtgagaagggacttaaagtgccagaacaggatatagttcaatgtaacagcatggctgataagaaaagcagtagcaagaatgtcaaaaggacaaggaaaaatctgaaaagtgcactttgcaaccaaggaactcaaacaacacaagaaattttctgaacagccactcggggaaattccgctgatgatgcacccagagcttgaaacat

SEQ ID NO: 427937 - DNA, 402 bp, Oryza sativa
tgactatctccttctggcgagcagagcaagggaggggaggtgaggggatcctgctgatactatgcccttgacgtcctctgctacttgactcgtctgtaaccagtcatctgcctcgtcaattacctttgtgatccttcaaacaaaaactcagtattacttgcactctattggcaaaattagtcaagatagatgctctttgctgcatcatcgctaggctccatgggacacagacaaatcttgcatgcagatactggtctatccatcctaatgaaccttgctggaagcttaaatcaacactttcttctccaatgtcatcgagatggtactgcaagaatccatttgatagattgccacaccatatctatgatgctcctccttatgtatcaatcactgtcatcccat

SEQ ID NO: 427938 - DNA, 413 bp, Oryza sativa
agtttttccatcgttgacggcctcaagcccgagagcgggcgctctttcaccgacctcgtgttgccccgcggcgccaacgacgacgacggcttctgcgagatcgtcaatggcgcggcgaatcgcatcgtggatctggaggggatggtgcggcggatgatcctggaagggctcggtgtggcggagcaccagaggcgcatggcgatgcttctggacctgactcggagtgccgatgacagggcgcccaattacgacgagaaggcgaccgggtacatcgaccatcaggacaccaactggctcagcattgtgcgccagaacgaggtgaatgggaacgagatgcagaccacggacagtgagaggttacttgtcttgccgacgcttacgatcataatcgtcaacgtctgcaatgcccttcg

SEQ ID NO: 427939 - DNA, 464 bp, Oryza sativa
atggcaggccaggaaataataaaaagagggggattgttttgcctggggaggagatcgcacaagagcagatagttaatggccccgggttctcctccctcatattgttcacgatgcctgtgatcgttgctctcgctcctggcgatcagctacgcacgcccaatttttgcatcgagcacggacatctaccacaaaaacatggagctacgacgcgattaccaagggacaatcggacatcatgttcaaacaattcttaagtcctcttgcgctccttctattacgagcaacgttgtatattccgtgcttgcataataaatcaaagaaatactgacaccaatcgaactgataatcctagaacgcacgatattaccagcgacgtccgcttcacccaggtcgattctcagacatataatactaattgtgaactccaatgaactacaccaaactgagtgactaatcagcccatg

SEQ ID NO: 427940 - DNA, 321 bp, Oryza sativa
ttataaaaaaaaaaaaaaaaaaaaaaaaaaaaaaggaaaattttaaaaaaaaaaaagggaaaaaaaaaaaaaaaaaaaaaaaaaaaaaaaaaaaaaaaaaaaaaaacaaaaaataaaaataaaaaataataaaaaaaatacgggtgggagttttaaaggatcccaataagtcacatattttaaagacacttaaaaaattttttttattttccttctataaaaaacccttggtaaaggttttaaattcactttgatggtaaacccgcggagataacaaataaattgcttttactaataaccccttttcacttgttaaaaatt

SEQ ID NO: 427941 - DNA, 188 bp, Oryza sativa
cgcatccatccatggcgccgccgtgctccatctcctgcgggtcccacctgctcatcactgggtgcctccccaagccctccctccgcccacctagcctaccccaccccaagcccctccccgccgccctactaggcctagccgccgacggccccacgctacccgcccttgccgacggcgccaccaacccc

SEQ ID NO: 427942 - DNA, 353 bp, Oryza sativa
  unsure (1)..(353): unsure at all n locations
acgctcattagtggtatcactgtgggagctgccaccaacatgcgcgttattttaaaagagaggggcggtaacaacatcnttctgaacatctaacagtcatacagggatgcaatcgtggttgaaaataatagagatgggatgacgggcaccattcacaaatccgctaacatcgtttaatacgacgctggtcgcgtaggtttcttgttatcaagcgccgcgtaagtcctgggacctcttgtttcaatcccaaaaacgatccaccaaaataaattttgtaccttggaaccaaccaacggatggattgtttatgtgcagttttcgtagctaattcaactggcggtgatttctttgcc

SEQ ID NO: 427943 - DNA, 472 bp, Oryza sativa
cacctgcgtataaattgtaatacaacactgaagggatgccccctagatcaatagtttcgtatgattcaatccacccacaagtcaaaattttaatgtacaactaggtggattctcaatcgacaccactgctctcttttactaacgcagacagtgcgcattccctgaagtgaagatttgctccttttaactgacgcagattccctgaagaattgctccttttagccagctaccttctctatcgcagttctcaaaagtcctaaaggaatcaaggtgcatgcaaatttcaaggtcccggcatggactcaactaaaggacctgaccttgccggtgaaagatatgaggctaacaagaagcgtttatgcagcttgatagctggatggggcaaatgacagccttggctttcatgttgttgctgcagctctaggcttcttgaatctagaagagcgatcagatgctttacccccacgatttt

SEQ ID NO: 427944 - DNA, 542 bp, Oryza sativa
gcgttctgtgctttgtaaaggtgttggtaacatcattgcattcggaaaaactgttggaattgcaagcagatatcatgagcggcatattaccatggtcgtctgttacaaaacaccatttcaaaggaaaggttgtgttaataatgcaaatactgattaggaaatgtggctttgatgctatcgacttagttacacctgaaaagtacaaggcttttgttagaagcgttgaagagggccgcaagggaaatcataatccagcagatggcgcagagtctgaggcacaacaacctacgcaacatgctgctaagagaaaacggtctgattctgatgttggaactggacaagagggaacacacactcgggcgccatcgaggagtttgccagctggaaagaaggaattcttcgttaaaggggccaggaatgctcgctctcctggtgtgaaaagccaacgaagcaaaccatcaggccgcaatggtgatagaactaatttcaaatccaaatctgaaccacggtcaggaaatggccaaaataccaagggcgacaaa

SEQ ID NO: 427945 - DNA, 408 bp, Oryza sativa
gaagcggccagaatagggctgttcaggtcttcaaattgaaattgaagttacaattattatgttcttaagcgaaaggaaaattgccctgagaaccaagcaaataacgctgggaccaaacacctattgtgaaaaacggatgccatgtctgtatcggtcataacacaggctttcattgggaacacacaactggggattcactttccaaacacattgctaactgaaatttgggctaccaatgcgggcgcgaatttttccggcgggaaatacacatgttccaggttctggtcccctggtggatgccatatgtttactggaatgggcaggtcccattttctggttccctggtggaggccatatgtttactggaatgaacatttccttttatctttggcgcctgtgaacccttta

SEQ ID NO: 427946 - DNA, 500 bp, Oryza sativa
gcagcaggtacaacagctgaaccaacagatggtactttgggagcaacaagtacagcagcagtatcggcagcagcagcagcagcaggatcaacagcaacagctacagctacaacagcatgcactgccagtccagttgcaggctgaccaaaaatacagtcagttaccttgctcgggggatactagacatgaacaaaataaaccgcagaaacttgaatttgaagtggatcatcaaagcgaacttgtgcagcagcagaaagcttatttccagcaacagtagcagatggatattatgcagcagcaggagatgtatcaacagcagcaacagctgcagcagcagctacttgaacagctattattgcagcaacaacagtatctgtcgcagatgccacagcagtaacacaacatgacacagcaacagcagttatctgaacagctacagcagcaactatttcagcagcaacagcagctaatggtcgttatgcagcagcagcagcagcaac

SEQ ID NO: 427947 - DNA, 526 bp, Oryza sativa
  unsure (1)..(526): unsure at all n locations
ttattttgcaatggtatgagtttgttggccgtgtttggagttttcgatggttacctgcggatttgaagctaattaactggaatatgtgtgtatttcaaaggtacaaagcattgtgcatagtctctatggatcaccaataatcactctaaagctacatttgtcagcaacgctactattgacatcatccagattttttgctgctcctaattttgatgttccaaatctctataagtgaaagattaatctcaaaacgccacatgattgatccacataatgaagaaatcagacaattcagtaaaagaaaaaataaagagatgaaaaagatatccatcagacaaaaatagtaaagcaaaggggacacgaggagggtttgagaagggggaaaaagaaaaaggaaaaaaaatgaccgacttcggcgatgccacatcgcttctcctctatgctctccgactccaccgctgcttaagtgctttcaccccatgcctcccccgccactggggacctaaattcataattggngatctag

SEQ ID NO: 427948 - DNA, 344 bp, Oryza sativa
cgcgtgccgtcgccgccgcgctcgccacgccacgccgcgccacgccgagcgcgcgcacagcaatggagctctcgcttgcctccgcgaagccctcgcctcgcgccgccgccgccgccgaggaggcggcggttgcatcgtagtcactgatgtcaatgcgggggaggaggaggagggaggaagataactgtgtcgggtaccagatcctgccggcagggcggatacggttacaccatcaatggtgccacgagggggaagaaggaacagtatactgcctgcgtgcttttaatggagggacctcggcggcaggcgagaggactaccaccaggtggtcggatgcccgcatg

SEQ ID NO: 427949 - DNA, 275 bp, Oryza sativa
caaaaaggggggaggacctgaacaaaaaggggggcacatgataccagcaaaacagaatccacatgacaaaactgtatctgtcaaggcccacctacccaatttcacccaatcgaatcattatctatgggcaaaagctaacgtttttctattcctccccttcactagtcaaaaacaataaaccccacaacatatcctaaaaagggacggcatataagatgatcaaatcaagaggacgatactccagaagagaaatttcttgcgttaagttgacactt

SEQ ID NO: 427950 - DNA, 374 bp, Oryza sativa
atgggggggggggattccaaaatgctaattcccaactactagtataatgggggttgaatgacctacccccccccacccaaatgggggttgccttatttaagttcccaaaatttattttacaggacttttttaaaacttaaaaattaaaaaaaatttttaattcagtcaaaaaataaagcaaagtaagggaagggaaaaagctcaatccttacccccaaaaaccttttggccagctcaatgtaattgcctttttaactcgcctggttaacattgttggacctaaagaacttcccggaaaaacccttaacctgggggggaaaagaaacaaaaaaagggggggcccccccctgttaaccttttttaagccccaattt

SEQ ID NO: 427951 - DNA, 55 bp, Oryza sativa
tttttctatttttttttttttttttttcttttctttttttattttttttgggggg

SEQ ID NO: 427952 - DNA, 529 bp, Oryza sativa
acttgttccctcttttgtgttgccgtggtttcgtgttagggggatgatccaagaggaggaggaggaggaggagaaggatgacaagtttttcatggcgcggtcaggggctttgtgcttgatttgattggcggctaactatcgagtagtgattcttgaatcagaggctaggacatgaggtttcagtggcggattttgaattagatctgcccgattttgctctgaattagcttagcctaatcgggttccagctcctggctggtgtgaggatgtggccatgattttgaatttgaggagtgtttgaaaacgaaaagtctaattctttgtaagggcatatggtagaggaattaacctttttcttgtttgatgtgtctgtgtgtagcaactgatttttatggagtgttattagttgtagggatctgtagtctgatctgatttggtaggagctccaaaaataaaaaaacattcatgagataacatgtgagaaatcgatttatgcagacacgttctttttgtgttcatttagtatgta

SEQ ID NO: 427953 - DNA, 522 bp, Oryza sativa
tgcacgcacacgtgcgcgggcattgctatacagtgagcggcctgtccttttttttttttttttttttttaattctttttttttttttatatttgggggggttttttaacaaaaggggggggaacaataccctcaaagccaagtcctcaagacaaaaccgttggtggcctagcacacctacccaacgtcacccataaacatcactactcctaaggggatgctaaccagttgacggatttcacccttcaccagacttaaaccataaacctcccatcaaatcctcctaatcgacggcatataatatgacaaaccccatcccggactctccaatggcccccaaacgaacttcaaggccccactttttattcccaacttcgattaacgcgcctggcaacccatatcctacaagtgccggacctaaaataacccctaaactggaccgtaaccaagatcagcctgaaacttgtaaagcttcgtcagcctggcaccaagcttcccaaaggggagggcggccaccttctcg

SEQ ID NO: 427954 - DNA, 467 bp, Oryza sativa
ggttggcctcacattcatatgggggaatcacaaattttatatcataattattcatttttcagaacggccaaaaaaaaaacaaacaacccccctagctaaaacgacaaaaaacacacaaacggcaccaccccaaaaaacccaaaacccccccaaaaaaaccaaaaaaaccccccccccccggaaaaaaaaaacccaccacgaaaacacaaaaactcccccccccccgggcacaaaaacaaaaaaccccaaaaaaaaaaaacgaggcccaacccccccgacaagcccaaaaaacgggaacgaaccaccaaccccccccttggaaaacccaccgccccaaggcctaccaaaaaattagagacccctaaacccaaaaaccccgccggagggaacaaaacccaaaaaacccaaacaaccgatcccgccaaggcaaaaacgggggcacaaaaacaccacaaaaaaaacccccc

SEQ ID NO: 427955 - DNA, 223 bp, Oryza sativa
tttcttttttatgcagcacacaaaccgaacccgactagggggggctttactgtgcattagcggggcgaacacccgtaagcaagagaatacactggagcaacacacccggatcacggccgcgaacccccacacggcacactttgcagagcgcacatggcaggataggaaaccccacatgggaggggggcctccacccctagaagacaagtgggcctaacggaag

SEQ ID NO: 427956 - DNA, 425 bp, Oryza sativa
ttttctttgtttttttttttttttttttttttttttttgggttggttttttttttttttttggggctcaaacttcccaacttattggaagatgcttaaaaagggacctccaaaaacttgtcagaggttgcttccaaaccaaaaaaggggcctctcaacttgacagggggtcaaacttctcaactcgttggaaattgaacttgcccccaatgctttacttttcctggaaaaagctgtgggaaggaaattcaaacaagttactgtggggccccatttaaaatggtcctgtcttgcttcaaaacttaaaaaaaatactttgaggagctcctccgggtttggccttcagaaccggaacaaaacttcccccatcacctggtttttgaaagctcccaccaagccccgggaaaaaataaaacttttttttta

SEQ ID NO: 427957 - DNA, 346 bp, Oryza sativa
gttggggaaccctgccttcgaagccaattatgccatacaaaacaggggggggcctttccagcgtaaccaagggtaaccaaccacggggtaacccgaagggccggcatacaacatgggggattccccttcaaaaaaacttaaactttgatcttcccggggaattcaaggacccgggggaatgaaatctgaacctctcggttttggactcttccttgggcccaagctggtctttggggccccacttcttatggcggaaacggacagccctgggggcaacccaggcctagcagtggggggaaaacaaataagcctaaattgccttgggggcgagggcctgcggggaggg

SEQ ID NO: 427958 - DNA, 337 bp, Oryza sativa
gttttattttagctacgaagggaatgacaatggcatggggggtttttttaataatgtcacggggggcctgccctacactgttggaaaaataaagcaaccgcaaactgaagatagcacggctcgcatccatattatgcagccaatattaaaggctatgcccgagtgaaacacctgaaaaaggctaacaccgatcgatatggacctcctgctaatgcattcagtgattctccctataactaagcagtgggccatggcacgacgagcatcgtgtaacaagagtggagacacaatcgtagtctctacaagatgtgccagcagagaaatgctcagcacttct

SEQ ID NO: 427959 - DNA, 242 bp, Oryza sativa
gtccaccgtctgatgggcaccgcgagggtcgacgccggcacggacgccgtcaccggcgtcacctccaaggacgtggtcatcgacgcccagtccggcggcctcgccgcgcggctgtacctgcccggcggcgtcccgaggtgcgagaagctccccgtcgtcgtgtacttccacggcggcggcttcgtcgtccactcggccttctcccgcgtgcactccaggttcctcaacgccctcgtggccgg

SEQ ID NO: 427960 - DNA, 416 bp, Oryza sativa
cggattcgtttgctgagcagtattgaggaagcaattattgggataacttaatatccaagagcggctcctgatgcgcaggttatcttcatgggtgtagagccagaatctgcaaataagtaaacagtgtgattctgatttcctagccatgctgttccatacattcatccaacttctaagatgttctttactacacttgacttaaaaattccttccggttcagtcttttatggacaccctatgtgtttttagtattcttagctgttaatattgtctatagcgtaaattgtattatacatacctaaacttgcttgagtgcgaaattactccctgaacttataagcatttttttactgcacatccaataactcttttttttctcagtgatatgaatggtttactggatttattccgttgag

SEQ ID NO: 427961 - DNA, 276 bp, Oryza sativa
aaaaaaccacttcccggggggggaaagggccaaaaaaaagggggcccacccttagaaaatcccctaaaaaaaaaggggccttttttttgggtgaaaagggaaccaccaacgccattccctgggctgtggccgggaaaaacccctttccccccctccttttgcccccccccaaaaatcccaaccccctattttttgtcccctcttttttttaaaaaaaccctttcccccccgcccccccaaagtaaaaagggggcccaagacccccaaaaatccccc

SEQ ID NO: 427962 - DNA, 399 bp, Oryza sativa
aaacagggaaattcctccagattgcctcggcaagaagctgccaagctggggtcccttgttagcttggcccaagtctggacaagatgcaatttatcaacgggggattccccctccccaggggggggtcccgggtcaaaaaaattaaaattgcttgcccccccggggggggcaacataaagtttcccgagttagggggggggttgccccccccttcattgatttgccccacctgttatttttactggagcttttatttgggctagttgaacaactgggagccagcatcgatcgatttatcgatcggggggcccaagcgggattaattgatctagctgcccttggttgaataaggggagaggcttatggggaagcccacttttcccccccacttgccgggga

SEQ ID NO: 427963 - DNA, 407 bp, Oryza sativa
aagctacctagcttaattacctagctactcgatcgagcatcagtctagatatggcggctttgaacggtaaggtggtggtggcggtgatggtggtggcgatggtggtggaaacccatgcattcatggttgctagagacgatcttgcaatggagattacagctgagaatatattctttgaccagaagcatatgattttacaagagcatccttgctggaaagcctgttgctactgctactcagatgctcgagtcgacgatcaaatcaccacgttcaactcgagctgaggcatctgaccttgcaatcgcagtttatcgctggaactgactgcgtcatgcttagtggatagagtgctgctggaccatacccttgacgactggtatatatcatgccaccgatattgtcttgag

SEQ ID NO: 427964 - DNA, 442 bp, Oryza sativa
  unsure (1)..(442): unsure at all n locations
taggtatatggccatggctgccacgtcccgcgcgccggccacgctggcacccggcgtgggtctccgccgccggcggcagcaggaggcggcgccggtgcccgaatcccagggtgcgggtgggggtgggggtgcngttctctcctctgcagccacgactcgttacttgggctgaatacggtgagaggggttgtgatctccatatgccgagcagagcagaggatcggaggtgatcctggttgtaatagacgcacatgttttcatatgatgctgcctggtgcagctcatcctttatgagtatgtagaagagcctagactgatgatgacaggatgattgcaatggctcttctggttgattatgttgggttggattgtgtttcgccaagtggttctcgatttatcatctattcctgacgttccctgatcaacatatacttgttgacat

SEQ ID NO: 427965 - DNA, 236 bp, Oryza sativa
ggggactagttggcaaaccagaggaaaacaaaaaaaacccaccaagaatgcagataccttggcaggcactgcaagaaacccctgaagggagactcttttctcaacccggtgtttgcaaattactcaccaaaaagaggattgtcttcaatattatttttatattcccaagaaggtccacacgatccaagggcataaacccccggaccttcctaaacacggggggccccaccggccac

SEQ ID NO: 427966 - DNA, 573 bp, Oryza sativa
  unsure (1)..(573): unsure at all n locations
agcgtattctctgaggatattcatggtggtgagggacttcctgtcaacgttggatcaagtttgcagggaggttggccggatgcagcaggacagaacagtcattggtggatcggctaggtcattccgcatctcagcaacatcctcattgccagttctaagtctctatggacaacggagagaaaacaactccgatgatgatagttcatcgtcatagggtaagaaggataaggaacatactgaattttggaatgaacatagacgcacaaacttttacagcttatagcagatgcagcaaatgctacattgctgctacaatgacgatgacaaaggaagcacatgtgtaccgtggggaacaccatgtttaggagagatcaggggtttatacacttggatcatgtggaaattcttttgtacaaaagaataataattataacaaagctctttttgttgagtaatttgcaatcagcaggctgagaaaagagtctcactttagtaagtatctgcagttgcttgcacgataactgcaatcttcttatgtaantattatattcatctagttgccactagtactaa

SEQ ID NO: 427967 - DNA, 232 bp, Oryza sativa
cagggggatcttatttatacaacaccacacatcactgcacgtccatcaaccgagagaaatggctggcccacggggaaaaacaaccacgcaccgactaccatagagacagacattgccagacaaaaaaactcacccattacacgacgaaaaccaatcaacgtcgaaaaaacaaacccggggggggacccacctccatagcccgcacacaatcaaggaatgtgccggcccaaaa

SEQ ID NO: 427968 - DNA, 370 bp, Oryza sativa
atctaaaggcaaaaccaatatattgatgaaaacactggacggcaactcctgtgatgctcatacattctgaagctatcgtaatacacaatcgtgacatcctacatggcgcatacacatgagcatataagtgattgggctagtttacaaaatggcaatatcctcgacagaaagcgagtgaaaaacaaggaaacgaatcaacccaccccttgtccaacaacttgtatgacgactggcgcttcacatcccagttgaaagacgcgctgcctatcctttgcgcgccaagcttcgcctgagctgcctttgaccctcgacccctacctgatgaagctagaggtctagcttttggtgatgtgggggcgctcttatccct

SEQ ID NO: 427969 - DNA, 293 bp, Oryza sativa
atgcattctattatattagcatggagcgggccaatatatataatggggcggaaaaaaaaacagggcctcaccctgcaaaaggggtcctcccaaaaaggcggatccaagggagctggcaaccccaggttaagcaggggggtgcccggacaaggggggaaggggaaccgccaaccacaaaacattaaaagggggccacgggacctgcccccaaggggaggaaagccaaatcccccctccctatgctgaaaaaggagcggcccccccctgggggttcaaaacggcgacgggtcaca

SEQ ID NO: 427970 - DNA, 79 bp, Oryza sativa
gacatctacacagggcacacatctttagagccctttaaatatgctcacagtctgaggaacataaaaattccagaccgag

SEQ ID NO: 427971 - DNA, 325 bp, Oryza sativa
ggcacaactggggacgggtttttatacaaggaatacaatacagagaaccgggttacatgcacatttacatgtttgacgctgaaatttcacaaagttttcacaagggatagttccacacatacatacacgatgggatatcattcacaactaaaatgaaaatgttgcccgggcgcgcacacacgttggtcggacagcttgcatgaaaaaattacaagacatttttaatcacccaggacaaatcaagagaaacaggggtttagcaatcccacaggtggggtcccacatggatgctatgggggggggggggtaagcctggccctgaaaa

SEQ ID NO: 427972 - DNA, 542 bp, Oryza sativa
cttgtggttcttggaataataaatgaacgcacaacttttgacgtatcccctggtcagccatctttaatctctgatgacacggatgttgttgctctagttggaacaaagaaggatttggcaaaacaaataaatctgaaggaggtgcattgggggttgcttgaagattcagttgaagagcgcatggagaaaacacttttagaatcagataaaactgaagcagaaagcaaggatgcagatgccgaagataacaataagagaaaatcttcggaaggtggaaagcagggaggttctgttaaaaaggtcaaaaaagataagattgcaggagccacagggaaaaccaataaatctgaaacaagcatagtttcggtggcacctcgtgtgaaaccagagcttacacttccatcctgttgaagtcgagcagtcaattcttgaggatttgcgaaaccgtgcacagttgaatagcctggcattgccatctgttagcttctacacattccttaatactcataatgggctaaattgctcatcaatttcacatgacg

SEQ ID NO: 427973 - DNA, 391 bp, Oryza sativa
agcggccacccttttatttctttttttttttataaaagaaaacaattgccaaaaccgatgatggcattgacgcaaaaagaacacgaccgccaaaacccaaatatgaagaaagaaagcaagtgccgtcccaaaaaaaagaaaaaagtgaacccaaacaaaccatgacagctacataaattccatatagaggagccgaactacagaggttacaaggggtaaaagaaacccaaaaaggggaaccaccacttggcagcagtcttatcaagggaggactaacttaatttctgatgccacaaagggtaagctcagctaaaatccctcaaaccctcctttaaacacatccaaggacttctttcgagcacccatcactggaaccttggcctgaaaggct

SEQ ID NO: 427974 - DNA, 234 bp, Oryza sativa
gcgctagagcccgccgccgccgccgaggcggaggccgaggaggttcgagccggcggcgcaggtggcctaggaggtgaaggaggaggaggcggctccggcgccggtcgtcgtggaggtgatggtggaggaggcggctctaattccgtagtcggatgtcgttaaggtcatctagtgagtgtatgtcggtgaaggctggcttgtcgtcgtcttacaccgtgtagtacatgcatggtc

SEQ ID NO: 427975 - DNA, 501 bp, Oryza sativa
gctatacgtacatgcacgcgccgtacgcttgatcgctatgagcgggcggcctgtcctttttttttctttttttgttctcaaacatcacatgcagtatatattagtattatcagtaaattgttataggccctcgtgtgcccttttttttttctatagtcaattcgtacaaaacaagtgtaagcactcgtgtatgtgtagaatttaagcgtgcctatagcttatccacagatttgtgtgtgtacttttaaaaaaaaacccttcaattttaaaaagaatagatcgacagaaaaacaagcccacgcgtgcacatacaactttccagacgaaacaggaactatcggatccagctataaaactcacaagacgtaaccttttgatttttagaccagcggggacttgtccacttaaaaatgagatcctctgtctgcatccatggagcctgccacattgtgtaggcacaactctcccaaagcatgttgctgctgggttccatcaaatgta

SEQ ID NO: 427976 - DNA, 549 bp, Oryza sativa
  unsure (1)..(549): unsure at all n locations
gcggcagtgcatacagtaaaaacgacagcaacgcaaaaactccgggctccctcttccaagatcccaaaaccacaaaccgatcaaaacccacacaaaaaaccgatcaaacggagatcaaaaaacgaaaccaaaaaagagaaaaattcccaccgaaaaaggagaaaaaaaaaaccgccgtcatcatggcgcgcttcttccgcgactccacctcctcgtcccgctctagcagtgacctcgccgtcgacgccgacgcctccgcctccgccgccaccaccgccgactcgtcgcgcacgccgccgctcccctccccgtttcccgacctcggggtgcccctctccgccgcggaactccgcgccaccgtctacgaggtcctcgtcgccgtcttccgcgccaccggcgccaagcccctcacctacatcacgcagtccgtagcctccgtcgtctccgccgacgnacccgncccctcattgtcgtcctccatccaccgctcgctggcgtcgacggcggcggcgagcagcagcaaggtgaagaaggcgctcgggctgagga

SEQ ID NO: 427977 - DNA, 289 bp, Oryza sativa
acacacagaaacacagatgggaccgagtctggaaagacaccaagagtacagcgagaatttattttcgatccgacgacgcacgagtgcacgacgacacgttgagctcctcagattgggcatgccatgccaatttccctagttacgtatgggaactggggcagcgggggggcacacccgcgctaggggtcgtgttgatcaagttgcggcggggggagcggcttcccccccttgaagggggagaccagccccagggcttgtttctgttgggcaatcggggccaatgtgcccg

SEQ ID NO: 427978 - DNA, 120 bp, Oryza sativa
gccgccctttttttttttttttatttttaatagaaaggagactatgctatggagatttgcagcgatgcccatggaacataaataccccaggacagatatatcaatggtacacatgatgca

SEQ ID NO: 427979 - DNA, 425 bp, Oryza sativa
gggggaaaaaacccccaacccccaaaaaaagggggaaaattgggtaagggaaaacccaaagaaaaaaacgggaagagggctctattaaaaaaaggaccaaacggggggaaaaaaaaacctctttttacccagaaaaaacccgggccccaccctttggggggaaaccacacccgggcacccggggaagcacccctggcccgggaacaaaaaccggggggaaaacggaacccttgcaggagccaatttccctcagggggggaaaaggcaaaaaaaaaccggggcctccccccaaaaaatctgcaacggcaattgacgggaaaggttcccaacggaagcacccccggggggaaaagccaaaggaaggcccatagcctctccccacaggggcccaaaaaaaaaaaaaaaaccctgaaccggggggcccc

SEQ ID NO: 427980 - DNA, 89 bp, Oryza sativa
attaaatatcttgtgggggagcacaacaaccaccaaaccacaaaaaaaaaaaacaaaaaaaaaaaacaaacgactacaagcggtcgcca

SEQ ID NO: 427981 - DNA, 435 bp, Oryza sativa
  unsure (1)..(435): unsure at all n locations
acacacataaacacagttgcgatcgagtctcgaaagacaccaagagtacagggagaattcacttccgatccgacgacgcacgagtgcacgacgacacgttgagctcctcagctcggccatgccatgccaatctccctagctacgtatggcaactggggcagcgggggggcacacgcgcgctaggcgtcgtgttgatcaggttgcggcggtgggagcggctgcccccggatgaaggaggagacgagcaccagcgctcgctccgggtggtcgatcggggccatgtgcccggacccgggcaccgtggggaacaccagcccgtcgtacgcgatcacgtacccggnaacgtccttgccgtccgccgaccacgggcgccagtccgccgccacccgaggtggagcctctccattgactggctcggcgccgtcaccggcacca

SEQ ID NO: 427982 - DNA, 68 bp, Oryza sativa
caaattaattaaaaaaaaaaaaaaaaaaaaaaaaaaggagaggaataaaaaaaaaaaaaaggggagag

SEQ ID NO: 427983 - DNA, 256 bp, Oryza sativa
aggacggcctgtcctttttttttttttttttttttttgttaatttaaaactaatacatttgtggtcactttcacgtatacgtatacgcatacacgtcttgtttggaacacacgtacgtacgtacgtactattagaatactagaatttatatagtacaagatgcgaagaaaaaaacgcagcctgctgatggatggatggatggacggttttgtatcagtggaagcatggctcggcgttggacatcccgacggcggcg

SEQ ID NO: 427984 - DNA, 292 bp, Oryza sativa
tttgctttttttgaatggcattggccccacctaaacacaccctggaccgctgaaatgagctgcatagtccatctacaccaaggaccatgtatggagccagaggtggtctaaccttacaggatcctgacatagctcaattcaagtgatgcattcctctctggattgctcctgaagtacagacacagccatacatattgggatatatacctcaaagcttacatacctaggtacttgacactcactagacctggatttgaaagacaaaacagttcttaactgaacccaggactga

SEQ ID NO: 427985 - DNA, 364 bp, Oryza sativa
ctggaattggcacaccatttacatttgatgggccacttggaatgatctgcataatccaaccagcctgaataaaccgcattaaactttagatgctcttagccccccacgcgcctttaaaagctcatttcgagtgaacccttcctctccggggggtttctgaagcccatgcaaggaaaaacattttgggatatataccgcaaagctgttcagccgacttacctagaccctagataggggtgtgtctcacacacatatgggcccgtcactggccccttttgctgagggttaaaccatggtctttccctttcacaggcccaatgactttccggggaaatcaaaatccttgtgtttaaaaccccccctt

SEQ ID NO: 427986 - DNA, 192 bp, Oryza sativa
gttaaccttggggccaaacccaaaaacacggaccaaaacaccaaaagcgaaccaaacaacccaaaaaagagacccaacaaaagccgggcaaaaaaaaaggacaaaaacgaaccaaaaagcaaaaaaaaaacggcaaaaaaattcaaaaaaaaaaaaaaaccgaaaaaaaaaaaaaaaaaacaaggggcccaa

SEQ ID NO: 427987 - DNA, 348 bp, Oryza sativa
aaacagcaatcataaacccattttactttattggccattgggaactacccggatatgaaggatttttggaattaaaccataaaaacccaaggggttattcagcctgggggaaggaaaaaattttggagaatcgacaagcatcacttttgggtgttatcctaaaacccataatgctggtttggagcaccgccatttggtacagcacctgccccttttggaggggtatcaaaaaagggcctcttccttgaggaagaccaggggttttccggggaataaaactccttggttttctaacccccatttggagccatggttttttctctttcttggggagaaggaataaatgtt

SEQ ID NO: 427988 - DNA, 368 bp, Oryza sativa
  unsure (1)..(368): unsure at all n locations
aagaaaccctagacctccgtctccggcgaccctcccgggacctcctcgccgcggctccccccgcctgacctccgcgcgccccccgtcgactcccccccgcgaatccggatcccgcgcgcgcgaggaaggagggggggaggaggagcggtagatggnaaagaaaccgccggcatcatggcgcgcttacgtcatggattcgcttgccagcgacgatatagtagagaccttgccgacgacgacgacgcctcaggtcacggcgaccccagcgatcgactagaagtgcaccgccggcggtcccctccccgttatagcggtcaacaggcgtccggttccgacgaggaactccgtgcaaccgcctacgaggtcct

SEQ ID NO: 427989 - DNA, 490 bp, Oryza sativa
ggatcgtatagagtaggagggcctgccctttttttttttattttatttgaccaaacagctgcaaagcttaactctttttggagcaacagattacacaggtgctggaaccacaaacattactaggactcctactaaggtcccaaaattccaatggagaggaagtgaatgcccttgatattaggttacaacaaaaccaccatgaaaggaaggaataaccactggactatacagtaagatcgcaggcagtggcgagctaatcacataaggggttggaacaaaccacaaatccttacgatgctttgttccagaatcagccgcccctcatttatacacagcatacagacagatttcagcagacctgggtggctggccgtgtctcatgatttcagccgtctcgccaacaaatctggttctggggaacctgaacacccaactctggccaatacagttctgacttgtcagcccttctctgcccgatgtatcctcaact

SEQ ID NO: 427990 - DNA, 519 bp, Oryza sativa
atcacaaatgacacattataccaaagtgaagtgattcttcagttttccttcaccagatagacaacatcgaatcacatgttcacagcaaacacaaaaggacacaaagctagcacctgcataaggaataaactaatgcggctaggttactactgataggtacttaattcaattaagcatgaccgaaccattagtttggatcgatctccacttgtaaagagcccacataaaaggtttgttttggatttatcttcttcttatgccttggaccagaattagtagcaactaatttctctccaatatttgaaccatattcttcaatatcaggcaacgcaccagcaaatggaaccttaggcttcttggacatatcacatgggggcaacagttctgcggcttctttagtataaaagctagagaaaggataatacaggcctccatgcaggatttggggaatattcttgaattgcattgactgcatattgaccatgaagaaaccaacatgcgtgctcaaaaataccacat

SEQ ID NO: 427991 - DNA, 485 bp, Oryza sativa
gacggagatgtccacctcgccgtcgccggcgccgccggaggcgcttgacaacgacgacctgctgtcggagatcctcctccgcctcccgccgcagccgtcctccctccctcgcgcctccctcgtctgcacccgctggcgccgcctcctctcctccgccgccttcctccgccgcttccgcgcccgccaccggcggccaccactcctcggcctcttcaaggaagattcagtataccccatcttcatccccacgctggactcgccggaccgcatcccgcccgcgcgcttctcatggcgagtccccggcggcagcggcgaggactaccaccagctgttcggatgccgccatggccgcgtccttcactacagccggaggcggcgcctactcatggtgtgggatcccctcaccggcgaccgccgcgccgtggatatcccggcgctgttccatcgctgggacatggacgggtaccatgggtcggagcgctgcg

SEQ ID NO: 427992 - DNA, 310 bp, Oryza sativa
aatgattattagaaaatggaaaacaaaaaaactagaaacagggtccagaaagaatcagatggaaaccttgcaaacaattaaggcattctagggggcccgtccgcatgccagaggaaaataaaccaagctagaaaccaacgagctgtatttggaccctcgaaggacattcgatgtgaatggaaaaaaagcaaaccagcaattggcggaccttggggccgccccggggggggtggaggggacaggggcgccggaccccctgtcggccaggggcggaagccgcctgctgctggggaaggaccctgaagcaggg

SEQ ID NO: 427993 - DNA, 166 bp, Oryza sativa
aaaacaaaacgatccttaatgtaaaaaaccaaaaagggggtctttacaggtcagatctacccccctctgttcgtcctaataaagcatgccgttggaacaaaccacaaatccttacgtttttttttccctgtccccccccgccgacatttatacaatgcatacagac

SEQ ID NO: 427994 - DNA, 380 bp, Oryza sativa
atgtcacattctaccaaagtgattagctttcttaggagcacttgaccacacaggcgctgatacaacacacgttcacagcacacatcacaaggacacaaaagttagcacctgcattaaggaataaacctcatgcctgctaggttactactgataggcacttaaattgaattaagcatgaccggaccattcggttggatcgccctgcacttgttaagagaccacataaagaggtttgcattggactcaatatctttttatgccttggaccagaattagaagcaactaattttttttcaatatttgaaccatattctttaatatcaggcaacccaccagcgaatggaaccttaggcttcttggacataatacatgggggcaac

SEQ ID NO: 427995 - DNA, 406 bp, Oryza sativa
ggtgttatagaccacaagagaaacaggaaaaccggacaaacggccccaggcaaaaaaaccatggagacaaggcggacaacacaaaccacaaaaaacaaaacaacaaaaaccacccaaagacggaaaaaaaagagccaaaacccccaccccaacacgaatgtccagaaaaccccccccaccccgagaaccccggaaacggccaaagagaccaacaccccccaccaggaccccacaaccaaagaggaacagaacgcacgcaaaacctgaccaagagatcccccaaaaaaatcaacaagcgcgtgcccatcctggcaacggtgagaacgtcacccactacccagaccaggcggaaaaagcctgaaagccccaccaataagaacaggccccacatcaagcggaaaaaccc

SEQ ID NO: 427996 - DNA, 359 bp, Oryza sativa
gggtggcaattttttttttttttttttttttttttattgaaaggcaggggccaacaaacccaactggcaataaaaaatccacacgggtaacacaacaatggacaagcccccacccaaaaaaagcaaaattaaacaccaaccaaaccaaaggggccccccccccgagaaggcataaaccaaaaaatttccaaccagaaacggcaaaacggatagggggggggggaaaacaaaccccccaaatgttctgcccgaggaccctgactttaccccccaggggacggggggactggccagccccccaaaacccccatagggggccaagaaacacctaggacccgccctggcacaaggcaaaaagc

SEQ ID NO: 427997 - DNA, 376 bp, Oryza sativa
  unsure (1)..(376): unsure at all n locations
aattcttttttgtttggtatgaanncagagatactgattgcttggtgagggtgctatatatatggcagaaacctcatggtcagaaacaacagtttaaaacgggtacatctgcctttagctaagctcacaaaacatcaaaaatttggcctatatgccgatgatagacagaagcattgtttacttacattgtgttaggcgcaaccctccctctgtctacttcactaattaccttatcaataagaaccttaaagatggactttacaatggtccaaacaattccattgtcgttcactgtaggaggctttttcactttttcatgccttgcattgcatccttttgctagccagccatcttcctttttagagcaccttatcat

SEQ ID NO: 427998 - DNA, 234 bp, Oryza sativa
aaacaccctaagggtaccctacctatatttcaaaacaacgcttgccacccccaaaacccccccccccaacacaaacatacccgagccccccaaaaagttaacgcccaccagggggatggtcccacccacgccccaaccaaggggggaagcaaaaaatttctattccccccccaaggccccccacacccttcaaacgacacaaaaaaaaaaaccgcccccccccacccaaaaccc

SEQ ID NO: 427999 - DNA, 121 bp, Oryza sativa
ataacactgtattgttattcatttatgggcacatagagacaaaaaaggcatgcctaattttgtcatggtcagggctgacaaaagaaaatggcttggaccggcttattttaagaccatacag

SEQ ID NO: 428000 - DNA, 468 bp, Oryza sativa
cctaatcttaactccttttgttatccacaaattccacagtacacatcaatcaaactagcataacagtgacatgtacatgactgagaaaaaaaatcagagaatacatgcatcttttcaaaaggttgaattgaatccatggtgaacaagtccacacgaccacaaagaacagtattctcggagaaagccggtcctggtgtcctgataatcccaaacacagcacacaggagatgaacccaaaacaaatggatgtgaggggtacaggaatcatgtccacagaagggaatagatcagccactgcaattacgaacaatttcaactaaatcgaacgaattgaataaataataagcttacagaacagggagcagcgcgaggatgtcaggctatgaacaaacgaatctaatggaactgtgggctcggcgggtaggcctggtagaaggtgctgctgctttcacttgcaaagatcgagct

SEQ ID NO: 428001 - DNA, 435 bp, Oryza sativa
gtcctttttttttttttttttgttttgaagacgatagaagttaattcattttgggacaaagtttgaattacaaaagttcatttattttgggatggcgggagcacacatttgcacctggcgtaaaatgacataaacagggtgcaaaaaatggggagatattcatcagatggaacttggaaagacatattatcattgacagggaggaacaaaatccaggacagcttctcccacgagctcctcccagactccaccctcaatttgctcggggatatcaaccaactgcgctctcatcgtactgacccagcatgttccttcaaccttgtgcttgacaactctctctatcatgaccccaggattatctctactgctcaccacgaacatgcgagccccagtaattcaagctttcaggatgctacagacttttatccccaatgc

SEQ ID NO: 428002 - DNA, 542 bp, Oryza sativa
acggcccgccctttttttttttttgtttggcaagatctcagtgttactgtttgcttgctcatgtagatatatatatgccagttaactcatggattgtatagccagtttaaaacggttacatataccattagctaagcttcctaagaagcagaaatttggcctatatgctgatgaaagacagctgcctccttagcttccattgcgtcaggtgcaccttccctttgtctactccactaattatctcatcaataagatccttaaagatggatttttcaatggccaaaacaattccttgccgttcactgtcggagctcttccactctttcatgccttgcattgcatcctctgctagcctgctatcttcctcttcagagcaccttatcattgaggaccgagactggatcatgtcaatctctgcacataagtccttgaaaagttgccacccacttaacttctttgactgaaagaactgcactgatgaactcacagtgaggttggcatccatttgctgggcgaggagttcatttgcaagatcaaatatg

SEQ ID NO: 428003 - DNA, 380 bp, Oryza sativa
gggggccaaataagggccaaaaggtgttccctccccctttggggggggcccggccccctggccccccccagggaaaaccccccctgttaaatcccccaaaaaattgggccgggcgccctcaacaaaaaggggggggccccccccccggccccaaatttagggggccccaaccccccctggaacaaaaacccccccaaaaatttaaactcgccccccctaactaaaaaggtgcccccaggggggtgggcccccccccccaaaaaaacccccccccccaaaaaggaccctcgggtggggacacccctccaggcccctatccaccttgactccgcaccccttggggcccccctcctgaaagcgggcacactcctgggggcccc

SEQ ID NO: 428004 - DNA, 278 bp, Oryza sativa
caaatacaagcttattacctgcttgggggagctggcattgcatatttacagtctccttaggtgctaatgattagtgcttacggggcaaagcttattaagggggcataacgtttgttagatgaggtcggcatctatgctgcactaaaatgaatgggctactttattgctaacaaaaggacgatctcactatatcttaggcgatacacatggcatttatcaaacatctattgtcatttggagctgagtgtgccttgtttaagagaaagatctcaacagtc

SEQ ID NO: 428005 - DNA, 343 bp, Oryza sativa
cgggggggaaaaaccgccccacaaaattttccttctttgagggaaaaaacctttccccccaactatttggggaaaaaagaaccccccccctgtttctccgggggggtgttaacccccccttctttttaaaaaaagggggaaacccccccccccaggaatattgttttggccaattttttccccctttttttgcacaaaaaaaaaaaggcaggggccccccccaaaaaaatacattttgcccacccccccttttcccacccaggggaacaaaaccctaaacaaaaagggggtttccctttgggaggggcccttttttcccaaatcttcacaaaaaatccccccc

SEQ ID NO: 428006 - DNA, 475 bp, Oryza sativa
ttttttttttttttttttttttttttttttttttttttttttttttttttttttttttttttttttttttttttttttttttttttttttttttttttttttttttattttttttttttttttaaaaaaaaaaaaagaaacacgttttttaaaaaaaccacctgggggggaaaaaaaaaaaaaaaggataaaaaaaaaccctttttttttttggggggagaaaaaatattgaaagaccataaaaagccccccctctaaaaaggaaaaaaaccttggtttaaatttccaaaaaaaaaaaaaaccccttgttttttcggtggggggccaaaaaaaaaaaaagggggggaaccccttctctttttttaaaaaaaaaaaatgggttaattatgccaaaaaggcacaatttttaaaaaaaacccccatatatatttattatttctccctaaaaaaaaaaaaattcctctaaagaggggct

SEQ ID NO: 428007 - DNA, 444 bp, Oryza sativa
agttccaagagcaggtggattacatcagactgaacttacacccaggtgcaattcagcacatgtaaccactggctaaattgtggggtgagggtcctacatatgagccctgcgcccagaattaatttttgacactgagatcagactaccaattaacacctatattaatttgtgcccactgcccattattccctacctcaccccgggaggacaagaagttacaggccggaattcgcagtgtgtatgcacaaaagaactcagaccctatgctggtcttgacaaggcaagagccttgtcccattgtccatggaccttctatgatatgactgccatctttattagcaccttcccgtccttgacaaccctgtcggccagctttgccgtgccgaggcgtcccataggcgcttgagctagcgttttgcccttggcgccgccaccgtggacgac

SEQ ID NO: 428008 - DNA, 304 bp, Oryza sativa
attctaaacagaaaatacccctggacataggtggggttcattgaacaagcatggcacaaacacccctatggggatatatgcacatgaatggaatcccacggtcgaccagaactcaagaataactaatgcgggttgaactgcagagcggagtgcataaaacaccacccaactaaagcttcttggtctataacgacatacgagaatactatttatgaacacaagcttcatctctcaacaccagccaaaagttgacaagattaactggatgaaccccgaactgaatccgcggggatgatcaaccagc

SEQ ID NO: 428009 - DNA, 139 bp, Oryza sativa
caagggttgttttaaacgaagcataaatgcaccattacacgaagaaagacaggcttataaccctgaaacaagaaccactatgaaacaatgctgcaaaacggttcccgtaaaccaaaaatgacgagacccacacaaatcc

SEQ ID NO: 428010 - DNA, 251 bp, Oryza sativa
acggcccgtccttttttttttttttttttctaacccagccattggacaacattagttgggtaggatatactaatacagaagagattgtgcaagaacctctgaacgagaaagaggtaaccggcaggagttccgagcccaccagtttggcctgcccggcaacgaatgcagaacgcccacccggttcaggggtcctgggcgtctgaagcatgacacatgattggcacacacacgaacgaacgcatgcattaatg

SEQ ID NO: 428011 - DNA, 219 bp, Oryza sativa
ccaagccattgtacaacatttgtttggcagcatatacttatacagaagaaattgtccaagaaaatctgttcgagaaaaaagaaaccggaaagagttaaaagcacaaattgttagccctgccctccagcgcatgcagcacgcccaccctgatcaggtgtcctgcacgttttagccatcacacatatttggtacacacacgaacgtacgcatgcatgaatg

SEQ ID NO: 428012 - DNA, 93 bp, Oryza sativa
ccttattgacatgataacataagggaaaaaggttcattttaacaggacaaatttaaacacgaccaaacaagtgagtttttacaacaaagggcc

SEQ ID NO: 428013 - DNA, 223 bp, Oryza sativa
ctcaaccaagccattgtacaacaatcgttttgcaacatatacttatacagaagaaattctccaagaaaatctgttcgagaaaaaagaaaccggaaagagttaaaagcacaaatgttagccctgccccccagcgcatgcagcacgcccaccctgatcaggtgtcctgcacgtctcagccatcacacatatttggtacacacacgaacgtacgcatgcatgaatg

SEQ ID NO: 428014 - DNA, 81 bp, Oryza sativa
actggtaggttatatttatgtcatttgaaatggggaaagaatatgacgaggagaacccccaaggcgagggaatcctagaac

SEQ ID NO: 428015 - DNA, 310 bp, Oryza sativa
ttgcatttttttttacttgcttgatgtattcgaaagcgtcctgggttctttgtttgtaaatgaaatcttagcactcataatcaaagtttttacaataaggggtagagtatcacaagatggtggattgtagcatcaaacatggtatgtgctgctatccttcacaaatactagaatgctatgagataggccagtattcttatgggcattttctgtaagaaccagctggaaaggactgcatactttactgcggctgctgttccttaactggcagcgatagatttaagcagtaactgttaacccaccacaggaa

SEQ ID NO: 428016 - DNA, 440 bp, Oryza sativa
attcaattaaataatcatagtataacttagattaaataagtgcttattaattgatttagtgagctataaactcaaatcgttttccactgcaacatacgggctctagactagtaatgaaaaataatataaccaagtgttcgaatgaaaatagtataactacgtgtttcgaatgaaaagtgcatatcccttgctcaccacttaggaacctcacacatcgacaaggtcatctccctgcgaaaattccctatgatggctcgcctttttctccttctccgctctctgccaggaagagtgcttgtgtcatcgggaggttgcgctcaatccgccatcctcattgccaaccccaccccgccctgccgtcggagtcgcaccggtagcattgctaaggagcacggcgaggcgggaatggccctcttgatcggacgctgctgctactcaac

SEQ ID NO: 428017 - DNA, 440 bp, Oryza sativa
ttttatttggttatactacgattagttgcttgcgtcaatggggatcacttttaacaatttaacagggctgaacacgtggcagaagcaacccaagggtccgctacactacaccagatagcaacaacgaacataagcaacttgactgatcatcaaagaggaatggacatggtagcttgtatctctcactaccaaagaaaccttcattttggtggctcgatgctttacgagctgcagctgtgatgcttttcatggtgaaccatcttcaagcagaccatgatcttgagctattccatggttaaacccatactggcccgttattactttcttacggtcccgaaacggagcttcagatccctgcgctggtggaccgtctttttgacactgacgtcccgttttaaccaccccacgcgcttggtgcccgaacgcattgctttcctgcc

SEQ ID NO: 428018 - DNA, 266 bp, Oryza sativa
gcactgcacaccgtacgcttagatcgctctacagtagagcggcctgcaaacgagagcggcgacttcgtttagcacaccggagaaaccttaggttccgtctcgaggcggtggttgtgtcgtggcgcgtctgggcgtaggagatggagatgacgtggagtcaaacaacctcataacaatactccaccattttttcttattgctcattaaaaccgaacctacatgctctgtttatttctcactaccaaatcatcttctcatgatgctgt

SEQ ID NO: 428019 - DNA, 105 bp, Oryza sativa
cactactaaaatctctcttctttttacaaaaacaacacttattcaaggttggggggcgctctaggacaaatcccgtatccaaaatatgttaattccacatcaaga

SEQ ID NO: 428020 - DNA, 315 bp, Oryza sativa
agggcggcctgtccttttttttttttttttttttttttttttttttttttttttttcaacgggtttattttcaacatattttacatggaagcaatttagctttttcatcggtgtttggaagataaaaatacattttaaccacctaaataacaccattgggttttgtttccaatagaaacagcccccaccccataagagtttgctagaaaaaaaaacgccaacagtttctttccctgattcaggaaaaacctttccccttaaaaggggggctagttaggaacccttgcggtctctacgggggacccccgggtccca

SEQ ID NO: 428021 - DNA, 80 bp, Oryza sativa
gcaaaggacataattattagacaagaggggggattttaaactcgggaaagctcacaccggcaagcatgataacagtacca

SEQ ID NO: 428022 - DNA, 399 bp, Oryza sativa
gacacgggaaacacattaaggtttgataaataaaaagatctccacctggagtgggacaccacatattctctgaggactggctgggactctgggcttatttattgtccaacattgcagatatgatagtgcacagtacaaacaaactggaagcactcatgacgcgaactggaaatacttatgacaaaccaaatactgaaaagaccatctggcaaagtaggcgacgatcgggaggagattcagtgcatcacctcttacttagattcagaatccgtgctttggagccactccacgaacgggttggaattacctaaccacctgggacttcttgccaccagcaacagattgattattcccctgggttattacttgttcatccaggaacggcccatcatacagggc

SEQ ID NO: 428023 - DNA, 66 bp, Oryza sativa
ggtgtggctttaacaagaaacagcttgcattctaatatacctttggaaaaaatcatacccagaggg

SEQ ID NO: 428024 - DNA, 210 bp, Oryza sativa
ctgtataacggacgagtgcagattactagggcgggctgaaatgggacaacatggtaccaatataacgttcccgggctcagtacacacgaagcccaataccgtatgggcaagaagagcttatataaaggtttgccaacatagccaacatgcttacccttggttctgcccaaacatgagggttattgaaacccccgcggtgggccatgcatt

SEQ ID NO: 428025 - DNA, 55 bp, Oryza sativa
ttttttttttcttcttttttttttttttttttatttttttttcttgttatttttt

SEQ ID NO: 428026 - DNA, 268 bp, Oryza sativa
aggggggagaacacgacacaaccaaataaatggaccccttcaaaaaacggggggggaagcgcccaaccgcacccaaggatgggcgcccccaccccaaaaaacaaaaaacccccccccgccaagcacacccgggagaaccccaaaaaaaaaaaaaaccccacaagaaaggaaccccaaataacgggccagggggggcacacgccccaaaaggacagaaggggataacccgggaaatggggccccggacaaaaaaaacgaaccgggggga

SEQ ID NO: 428027 - DNA, 78 bp, Oryza sativa
ctcttataaagccaccatatagatcatttagggggtctagttccaaacggaggcgcatgttaatagaaactggcaagt

SEQ ID NO: 428028 - DNA, 343 bp, Oryza sativa
  unsure (1)..(343): unsure at all n locations
tttttttttttttttttanctttccgggaaatctggcaaaagctttttctcagtcttggcatcctctctgaagagagattacacagggcattcattcagtttgtcaatgacccccaaaaaaaaaagggtaaaatgcagagactaaactttacaatggggcatcagctgactacatctgttgtacattttgggggttgttcttctggcacatgaacagttcccattttacaacacatcacatgccaaaaagaaaaacacgaaagaaacacaaaaaaacgaaatatgatggaagggaccacaagtgttggccaattcctcaggtccctgcaaacgctgtgcaacg

SEQ ID NO: 428029 - DNA, 451 bp, Oryza sativa
  unsure (1)..(451): unsure at all n locations
tccccgcgcgcctcccgccgtcgccctgtgtagccgtgcaacacaccgccgcgcgggcctgcgatgcctcccccggcaccgcctccttcgacacggtgctggagacgctgatcggcggtgaccacttctcggaggaggaggcgctggcgacgctccggctgctgctggaggaggagatcgaggcgcgcatcgccgccttgctcgtgctcctcagggccaagggcgagacctacgaagagatcgtggagtcggctaaggcgatgataggctgctgcgtccgggtcgacgggctcgatgacgctcggctacattgtcggcaccggcggggactgagcggacaccgttgacatcttcaccggcttcactgatcctcgccggcgcgnagggtgccaaagtcgccaagcaagggagcagagctagctcgttcgcctgcggcagcgccgatgagctg

SEQ ID NO: 428030 - DNA, 215 bp, Oryza sativa
ggggttttattggtggtttacttgggttttgtttatggtgatgaggactgaatgatggtattgtaagacttttcggagacagaaagatggtactgaagaaaggtgtaggagttttgataggcaaaatgggcgggcaaagaacagatggtgcagggacgaaggaaggagctaagggcgggcgaaggcaaatgtgagaagggacgcatggggaagag

SEQ ID NO: 428031 - DNA, 353 bp, Oryza sativa
gacacaaacaacaactgggaccatgagaatttcttactaacagtaaaggatcccagtttaaatggatcagggtcccaacaagaaagtttcaaagatgccggcaagaacatcaaagttcctggagcgcatcttattagcgggggttcactatctggggttccccagagaggaacctttccacttctaactttccaagaatattcactgccatggcgagaggcagatattatagggcttccatcagggctgaatgatgttttcagcgttgaaatgcataccattggcttcacgcgggatgttgctgaagtgctggcatgaaatgaatttggcccatgaacacccccagtgtttgg

SEQ ID NO: 428032 - DNA, 311 bp, Oryza sativa
  unsure (1)..(311): unsure at all n locations
aaaggagcctccaccgcgnccttttggttgggggagacagacccagcttcagagagtgtaaaatttggtttatctttggggcaaaaacaagcgggctctccgttacagggccagttcgatgctagaactaccgcctttattttgctggcgaagatatgcttcaaaatccttgctgagaaatttatagcttcctttctcttaaaaaatattgctcctgtatttttatgcccacgcatccaagctttgcagaaacacatattttagggggtcgtcctcatccttttttttttaaaatttttatataatatttt

SEQ ID NO: 428033 - DNA, 298 bp, Oryza sativa
ggggaaaaaacaaccctccccccttttttatttttttaaccgaaccggggaggggtttttttttttttttttggaaaaaggcggcatacgccatttattgaccaaacaacctttttacaaaacatgccccggaggtaatcccctttttttatccgggccccagagcccctacaaaggacttcgtgtcccacctttacaatgggcccccacattggccaaaccggcccccatggggggaccccggaatacttgaccgggacctgagggggaccccaagttccccctgtgagcgctatta

SEQ ID NO: 428034 - DNA, 219 bp, Oryza sativa
ttttgtccaatttggcggctcattctctagttgggcatgccgatctttctatgtgtactgtgtaccgttatataatactggattacatccggggcatactttgtgaagatgttgcttgatcaatgaatggcatatgacgcctttctccaaaaaaaaaaaaaaaaaaccctcaccagttcagttaaaagaataatagaaggtgtagtgttgttgattccc

SEQ ID NO: 428035 - DNA, 364 bp, Oryza sativa
aaaaaaaaaaaaacttttaaaaagtttgggggggagataaaaaaaaagaggggaaaaaaagtgaaaaaaaactggggtgttaaaaaaaaaaattatcccggaaaaaaaagaccaaaaaaaaaaatgggctttcaaagaattaaaaacttaaaagggggggagaataaaaaaggccctttttttaaaaaacagatgggggaaaaaaactaccatttttaaaaaagggaaaaaaaatctgtattgaaaaaaaacatttttaaaaaataaaaggggaaaaaaatgggggggtgtcctttgcgcccttttaaaaaaaaacgggggtttacccaacaaaaacgggccggaacctaaaggcccccgaggt

SEQ ID NO: 428036 - DNA, 496 bp, Oryza sativa
tttgactgcacgcgcacgcgtgcgtgggctcggtagagcggcacgccctcgccctttttttttttttttgttttttttttttttttttttttttttttttggttagcccgtaacaacatcttttggtattgaaacccaaactaagaggttggtgggtacaattttaaacaatgaggggacatctggcggttccttttgaacaaacattaaaacaccgtaaacccatggggccattacgcctatcctaatcgaaatggtttaggacattcccaaaagaattttcggccaaccggtaggagtttaacacatattcggggtttgggagaatagttgctaggcaggccgcttaattttggcaaaaaggttgcccccccggccctggagcccgtttgggtaaccccccacattagaaacccggcggttttaacaactgtagtgcaagtaggaggccctcaagccgacggtgtccctaacaaacggccactgtttatttttg

SEQ ID NO: 428037 - DNA, 451 bp, Oryza sativa
ctctcttcctcctcctcctctccccattctattcctcccctcacttccgtgagcggccgggcggaggcggaggcggcctcgcgccgcggcggccagctgagtggcggcggcggggcccttgcgctgtggggcggaggcggcctcgcgccgcggcagccgggcggcagcggatccggaggggaggcggacggccgccgccggatctgaagggggaggcggccgggcggcgacctcgtgcagagggccgcacccggcacggaggccggtgcggcggcaggccgtggcggccggcgctaccgcggatcggctgttgcttagttttctttgccattccttacatgtgcgattcgatctgtgttgattgatacgatctgtgttgaatgtgtgatttgatctgagttgctgtgaatgatttggggatggactatggcgtgaatgatttgggatgact

SEQ ID NO: 428038 - DNA, 282 bp, Oryza sativa
atccgggatcggtttttttttgcctaggggaagaacacatgcatatcactcgcagaccataggagattctaagccccaaccaaaagtaactcctatcctttctttgactcactcttatccaccgagcatcaaactaacagaacgaaaacccacaaatatacagtctttcaccccacgtctcagcagaccacgcactctggttctcacccccaaaatcatatcaagtaagcaattcttaaagcggggctgcctgcttttcctcaatcaattgcttgcgctcgc

SEQ ID NO: 428039 - DNA, 117 bp, Oryza sativa
ttatttttttttactatcaccgaacaaccgcttacacacggatggcaagaattctaggagtggaccaacacacccttctgtacgcatacagtaacttacacgctgctacgctttttt

SEQ ID NO: 428040 - DNA, 516 bp, Oryza sativa
gtcgtgccccaaccgcctctccccacgctagccactgtctccaccgccggctgccaactccagccgagtcgcgccgcctctccagtcgtccccgatctgcgccgtcgcctccctcggctttgcagtgaagagctctaccccggccacccgttcttttgccctgaaccccgccggaagtcgtcatcactgtgaaggccgaaccgtcgccatgttttgatctccggcgaagctttgccgtcgactccatggtcgccgaaccccgctgtctcctccgttggcatcgcagcgacaacagcaagcatggcagccgcccccgtgaagccacaagccatcggagcgtcatcgtcaccgtgaagccgatctaatccatcttcagccgtgccgctcatcgccgtccatcgccgccttcaattcgctgtcgccacccacgggatcgcaggagggaggtgaagactgtccgccccttagttgctgcctcccctcgtcaaaacgccggcgtcatcgtggacagagcca

SEQ ID NO: 428041 - DNA, 497 bp, Oryza sativa
atactcgggagaagagatctaacagtcaactcgtaaaatactccctacgtttcatattttaaattatttgactttttttagttaaacttgttaaagcctatgtttataaaaaatatattagtattttaacataaaataaacatattataaaaatatgtttgagagtagaaacagccggcgaagcgtgacgatggacgctcgacggcggcggctgtccccggtggtggtcgtagcggcttttcttttcttccccctgttcttcgggagccagccggcggcggcgtacggcgaggcttcaggcgccggcggcatgacggcactgcagaagcacgcggcgttcttcgacaaggacaatgacggcttcgtctccccgaccgagacatacgacgggttacgcgccctcggacttggagctggcttctccatcttaaggctgcgttgatcaatggcgtactttcactcaagaccagacctcgcggatatctggacacagaggc

SEQ ID NO: 428042 - DNA, 227 bp, Oryza sativa
cacaccccaaccacaggaaagctaggttgtgtaacatgaatcattaacttttacagaccacttaatgtctctttaacactgggaacatgccctgtaggaggcatagatttcacgagaacacccacaagcttctcagaacatgcatatgttagaacacatacctgttccctatgttatataaccgaaggggcagtccatctataatgacacacacactttgccttaag

SEQ ID NO: 428043 - DNA, 510 bp, Oryza sativa
cgtagcttggtcctatgagcggacgggccgccctttttttttttaatttgactttaaatgcccagcctgccttgttaatggagacgaggctagggtaaacatagcacaaacaccagctacgtagatatatgcatataattgaagaccactgaaggacatcaactaatatatgagtagttagggttgaggagcagagcacattgacggaaacccctgtgacttaaacatctagacctatagggctacacaagaattttatctatcaacaaaagctttgtagcataccaccaatgttgtgttgacaagattcactggctgaaacccaatatgaatccgtaaagaagaccaccaggctcgaagcatgtgcatttattaagggcagggtgcggcattgttagctgcaggcagatcttaccacatttatgtggacaaagaatgtgtacagtataccgacaaagcatagagattctaggttgcatcgttgtcacaacaccatcaaaaaaagccctt

SEQ ID NO: 428044 - DNA, 266 bp, Oryza sativa
aaaaaaaaaaccccccccctttttttttttcccccccccgggattaaaaacaaaaaaacttccccccaaatttaaaaaaggccggcccctgccccgacccaaaacggtttttgggggaaaaaaaaaaaaagggggggcacccccgggttttaaacccaaaaacacgccctggggccttaaaaaaaaaaaaaagggggggggccccaaaaaaaaaaggttaaaaccgttggaacaaaaaaccggggaatccgggccccctttggggg

SEQ ID NO: 428045 - DNA, 439 bp, Oryza sativa
ggaagaatgctgcttcgattcaagctttgtaagggtgatctcatcacacgtaacaacgctgaaggtatccttcatccccccgctactctatatcagtaaactcacacgattcggttgcgccactgaattagatatgcagaggggttcttgccacagttaactcaaaatggcgaacattaggtcaaaaagaaggctatgaacaccattataagctttcaactctttacttctctaatgaggactgggttggtaagatgtatgctgcttctccttgggggggaaccaagctgaattgtatcagttggcagctctcaggaatagaggatcaaacaggaagaaggggctgcctctcatcagtaccgagcctgtgtttagcctcagtagcaatagaatcagacacgttgacgactacagattcctttgatctgtgctcatgagc

SEQ ID NO: 428046 - DNA, 225 bp, Oryza sativa
  unsure (1)..(225): unsure at all n locations
tgatttttgtctgtagtgaatatnattcaaacaagggggggaaggatacaatccaaggggggttgaagatacaagcacatatatgggcaggattctggtaattaaacaatacaaaaagtgaattccttgcgtttcagacgctaaacctgtgccgctgtttaacaactaagtcaccgaaattggactgggcaagctcaccatcgattgaggaaaaagggtgaggag

SEQ ID NO: 428047 - DNA, 426 bp, Oryza sativa
tgttccttatgatgattactactatgaaggtgcatcgcttgtagccaaccagagctttcgagaaattgaacggaactcagatacttcaacgaagcgtggttccatatctttccgcactatgatcagggaagaccaacttcagcaggatggtgttgatgaaattggattctcctctcgtagtggtgctcatattggatcaccctcaccttcaggttcatccccaagtgctgcaatgcccatgctccctctaaggaagtacctagatactaagaagtattcacctgttccttttgcccttctactatgttctcccttttcttcttcctctttcttcctcttactaccttaatgataaccagttttgtggcaatcaaaggtttttgtaaagtttccaagtagcttgactcatcattagtttagtactca

SEQ ID NO: 428048 - DNA, 323 bp, Oryza sativa
tgtttttttttttttggcacctagcgacacaagggaactagccggatatatcccaagtactgcatgactacgtatgtttcacaaatgcgtcgaaacactggaaactgagactggccgattctctgaaaaggagattatgctcacaacgggtgaccaaatgaagtagatgctgaaattgaacgcctaaagagaagataaggcagactgttggtaaaaccatacgagggtgggtggcctgggagaacctggctagaggtaatccacgacacccaatagcctaatcttgaaccggggcggcatgcctttaacaaggcttttaagcc

SEQ ID NO: 428049 - DNA, 238 bp, Oryza sativa
  unsure (1)..(238): unsure at all n locations
gtgacgcggtacccgcaggtgtgcgagcggagcctcatgccgcaggcccccgcggtggggcgcagcccgcgtctcctggcgcaggccgcgctcaccgtcggggccgaccgcgcgcgctcctgctcgggctacctcgggggcggnggttcctccagctcgtccaagcgctccggcggcggcggcaggggcgttgcggtgggggactgcgcggacacgctgcgggacgcggaggagcggc

SEQ ID NO: 428050 - DNA, 327 bp, Oryza sativa
acaacaaaggaacataagtaccactaaaatctttagaaaatgtttttttacatcggctggggggctcccaatggggggaaagattattaacccaagtttcaaatttggacgggaagaggaaaacacctgtctcagactaaaaaattatttgcatttaacatataaaaaagctggctaccacaccagactaagttattactaggcattaaaacaaaaaccttttgtttggtgaaatattaaaagggtggtaacaaggttcgagcaaggcacccgcaaccaattaacataaaaaagaacagggtcagactggactggtgtatttaaaac

SEQ ID NO: 428051 - DNA, 353 bp, Oryza sativa
gttttcttggtcttcacagccagaaagtacaagcgtgaagcggtgctggtcagtcttttgctgctacaaagggttccaagcaaacgatgatccaattgggctgaagttgtagaacggcgcagactgagttaatgtgaacgagagaacgaaacagatgaatgtatggtgtgggatctttaccagaaatcttgctccgcctcaggtcgctcgggtgaacggcaacatgggtggatttacctgtttgaggatatacaaagatgcctttcttgcctgtacatataaaatctctgtaatttctttggacattcttgcctttgcgtgggataggttaagcgttgcagaagggatagttt

SEQ ID NO: 428052 - DNA, 295 bp, Oryza sativa
aaaccaagcaggcagcctgtttgggcccttgggcaaatgcctttctttttttcaaggggaagggctttaaattggcccccccatgaacccacacatggtccataatcgtacgagctaaacatggataacccggggaggcccttacaaaaaaaaaatctacttgaaaaaaaacgggggggccagcccctaaagggggaaggaggcccaaagggcccccgaaaagccccccaaaaaaaaacccccggggaaattggcccaacccccaggggttttcaaattggcagccttctttttg

SEQ ID NO: 428053 - DNA, 461 bp, Oryza sativa
gtcgccctttttttttgattataattttacagcgagctaaatattttaagaaggttaccgccaaaatgccaatttcgatatagccacttatagggcctaggctactaggagaacagataaattttacgctatgcccgagcgaagaaactaggctgcatttctttggaacaaaaatcgctgaataagttacatggaaacacgaaagatcactttaatgcttcataaagttagaggatgatgcaagtattttcctaaaccaaaaaaagaccttgattcgccctccagaaccaactaaagttaatttagtgaaagaacaaactggtgtccacctgggttgaaagaaaccgaacaccaactaaacaacagtcttttgtactttgcaccagatacccaatctgtgtgagccaggatcagatctggtggtgcttctatgtctggctatcttggtcgagcggatcgaa

SEQ ID NO: 428054 - DNA, 257 bp, Oryza sativa
ttttaaaacattgaccgggtctcacactctctaatgccttcatacactggtttccgtgtgaatcattctaattgcctaatgacacctggcattacacttcctcaaacgtctcccaatgccaatagtcgagggaatggacctttcacttctctcacattccttgttcttgtacatagtttctctgggaggctagcgcatattgacccaacctctcacatttattattccatatcgtaccttattaagacacacctctt

SEQ ID NO: 428055 - DNA, 98 bp, Oryza sativa
cattttataatttttatctgaccgcgagcaaaacagtctatttagggttgcctaagggtgtaatattcaaaggtccatttccattggcttaaccacca

SEQ ID NO: 428056 - DNA, 76 bp, Oryza sativa
ccgcaccataaccccttagacgaaccagtccttttatattagaaaaaaaaatctcccctcgaagcgaagcgtttaa

SEQ ID NO: 428057 - DNA, 110 bp, Oryza sativa
  unsure (1)..(110): unsure at all n locations
ccnccccncctcnccccccaagggagcattatttccactaaaaccttaagaaaaccgggcccttacaattgggggggggcccccaagggcaccaaaaaatcttaacccaa

SEQ ID NO: 428058 - DNA, 334 bp, Oryza sativa
gaaggatcggccattcttgatcaatcagctagcagtacacaacatcacatgacagattagcagtaataaatgtaatggcgactgacaagcagtatgatgcaaagagattaccacacgaacacacagaattagcaaggcaatctgaatgggcttataattataaatcaagaaaatatgatatccggtggttcttcgaatctttgagggattacaaaactgcaatcaaaacataaaattgcttgtgtttgtccgcgagtgattacgaggaggaggcgaagcgatcacctaagcgcggttgcggtgggcgtaggggaggcggacggcgccgtactgc

SEQ ID NO: 428059 - DNA, 92 bp, Oryza sativa
acagagttgggtttaatttaacaaaaacccaacccgacacaaaaacaaaaaataaatcatatcttcctcaaaaacaattcgaaaacacctcg

SEQ ID NO: 428060 - DNA, 139 bp, Oryza sativa
ttgttacgcgtgggcgcgagcgcccgcctattttatttaacggaatttggtaggcaaggttgcgtctattttgtggctaccgacccttcttgacaacaaatttttggaagaatgatgaattaacttttaacttggaagg

SEQ ID NO: 428061 - DNA, 270 bp, Oryza sativa
cctgatagagctggacggcctcgtcctttttttttttttttttttttgacacagacacaatttaaaccggtatatatggcatgcctatttccctttgatttgttgatacaagggaatccctcaacctgaacggtaataatttttccattgccggatgatcattgcactgatattacagtgtgctacaactgtaccagcaaagaaaatgaaagggtatgtgactgcctctggagctgacttgcaattaggagtgggcaagcaaatgaatct

SEQ ID NO: 428062 - DNA, 404 bp, Oryza sativa
  unsure (1)..(404): unsure at all n locations
gtccttacccccacacccaaaatccgtgtgcgccgccccgcacggccgcgccccccgtcctcgcccccgtcgccgcctatatcaccgacgaccctgctttgctttcctnctnctncttcttcttatccccnggttgttcttttccggtgagaagttcaatttggggggttctttcggccctttttctttttccccttaccgtagggctgccggggacggtatatcgaatcgagtgctggagcagctcttcatgcaggaattcggaactggtggtctgttttgctggaccgagacgattgctttgcttcatgattcttgccgatgctgaccgtgttgcattgattggaccggngcatgggaatctcttgatctgaatgagtgccttcattagagtgaacatggac

SEQ ID NO: 428063 - DNA, 78 bp, Oryza sativa
attcttttttttgagaccaaacacaaattcacattttgtgcagggggtgattcaatatttttgacccgtggatccaaa

SEQ ID NO: 428064 - DNA, 95 bp, Oryza sativa
ctaaagccaccatccacggctcatagggaatggcttgttaaataataaagtatcgacggtgaccgtacaccggtcgtcggtcgccgtgaccaaga

SEQ ID NO: 428065 - DNA, 129 bp, Oryza sativa
tttatacgaagcaagcaggcagcgcctgctagaggggcggaatatttaaaaaagggagcgctgtaactacccagggaccgactgccagaagaagtgccaggccaactgcggcgacgcctcccagagatg

SEQ ID NO: 428066 - DNA, 453 bp, Oryza sativa
gccaagaaaaaagatttttgttcattctgcattgagcctggctgtggtccgtataacagaaaaatgatacataaactttctgaaggaaattcttggccataagttatacagatacaaagttttaactgtctggtcaataaacaggttaaaacaaaaattttgcaagatgtagtaatgcattggagcagcctagtttcctatcatttcttcagaagcttcctcagcacttcctcagcatgatgctccatctttggtaaagcccagtcatgctggattatatccaggttgtctttctctgcggccaaaccctggaaacagccagttcaaaaatgtgacatgattctgtgttaatctagttcgttcaaagaaccattataacatgcatgcatacagaaagttagtgaaatcaatagtggaaaaggacaaccaaaggacttgtaaacatcaagcaga

SEQ ID NO: 428067 - DNA, 304 bp, Oryza sativa
tttctctctaccccgatctcctttcgccgtcggcgtcggccgggtcgccgccgccctccgccgcgcagtccgcagatagtaggtgggggggttagccttagcacgagaggcctttgcctgagactgaaaggaaggaagaactattacttgacactgtgatgcgggactgggtactggtacggttgtgcgcgtgaacggtgcttatgggcacattgcgttacttcttggcagggttgttgtgctccgcggctacacggtcctcgccacaatccaagatagctatggccgagcgagaacactacac

SEQ ID NO: 428068 - DNA, 480 bp, Oryza sativa
agaagaaattttattgcatatcttaaaattaaattttcttaaaaacccacaactaagtaaattacagagaatagactatcgcagacagttctattttcaaactgcagatgcaagagttcacagaaaattcaagacatgacccagaaatactcgagagcattagttggatccggcgtactggatatctaaatctaaacaagcctatgatcaaaacagaaaatctaaacaagcctaaataagtctgttctgaccactgcatttcaagcacatgtcttgactctgaaatctgaattcttccaccgaacagagcctcacctgtgtaattcgttggatctcatcagatcacacataatattctaatagagctacacatgtttactggttattgaccatgtacggtgcgtccttgaacacgtgagtggtagggtcaaaaagaatcaactactacggagaaaatcaggcagcaaaaatgggcgaaaa

SEQ ID NO: 428069 - DNA, 290 bp, Oryza sativa
atggttatctgagaagcaccaggttgtactgctcaaggaaatcgcgcataagctctgcaaggaggcaacaccattgcaagtaattccatttaaggtgcggtcgccaccacaaccagtggttatggcacacaggaaggtggtgaagaggcagaaatttttttttaaaattttttttgtccccgcggttttatgggattgcctttcttgtttactggccgaggaaatcatatcgcgttcagtacccaattcgtttgggtgggagcaaatgtggcctgatgctgctactgaac

SEQ ID NO: 428070 - DNA, 382 bp, Oryza sativa
gatcctatacgcatgcggacggcctgtctttttttttttggcatacaatgtatttttgcgtatatagacttgcagttgcaaaccgaattacatgcgtggtgtcgcatagacgtacaaattccacaggctgaggctttcctttctgcatccaaccaagccctgcggtaatacatctggtcgacacgacaaaaccatgttcaactcaaaatatgtcagatttcactccggttacacaaatggaacacttacaggttacaacaagtctcccagcgaacaggttgaacttgattctaatacactatgtaagctacaatggcacacatacagtggtacaagcaattgcccgtgctttgcggttgcgagataccaacaattgccagtg

SEQ ID NO: 428071 - DNA, 427 bp, Oryza sativa
  unsure (1)..(427): unsure at all n locations
ctcgacacaccaaccaaaaatcgaatcgcgttcgagccatcgagccgacaaggcgacaacagccacaacgcctcactccccccaccccacgcgctccgacgagctccgatccgccgnccacctcgccgcccgccggcgatgagcaccgtctcctcctacagaagngacggaggacgggggggggatggggccttgtctgacgcggggggcggaggaaggtggnaaaccttgcatctcaaacatgccgagggtacgcaacctccgtcgcttcgtaggcacggacgcccggcttggatacaaggccttgatggaactggaaacaaaaaggatactgcttgagattttcaaggagcgccaacggcagagatggaagctggtgccatccaagtttttataagaagaaacctgaagatggatccattagcaa

SEQ ID NO: 428072 - DNA, 431 bp, Oryza sativa
acagcgctgcgtataataaaataccaccaggtggcacctcgaaaacatacaagaaccaaaatggttcaggtgggcatatcaaaattttgtttgttcggatgcccgggaggggcaaaggattgtgcacacgaaaaacctttgcaacactggtattcaaattggaaggttagggcagggatatacccatactgattttacaacctcacaaacatgtaacaagagctataaattatgcaacccatcttaataataacagctatgcctaaatgattgatgattttcaagccgggccggaaaaaatgtatgctcaagcaatgtcattgctttcagaagctctcaagagacattcatcctgttcaaaattgacttaagctgaaaatgttgggctgccagctggtggaatagaaacaacctttcctacaggcaccgtt

SEQ ID NO: 428073 - DNA, 196 bp, Oryza sativa
ggcagtgttgcatatccactctgttgttgaagagtgtgagattgttgatcttatagaggaaattgatatgaagaaaaagaaagaagctgatccaaagaagaaaaaaccaaagcggaagcctctttttgtgaagaatggtgcggttgtagtttgttggattcaggtgaattatttgattttgtttgagaacgttttt

SEQ ID NO: 428074 - DNA, 434 bp, Oryza sativa
cgttctgggcaacggaaaagggcacaatttattttggtcacacaactaacgggtaaagaacgaaaggaggcccaacaaataacaatggggggaatatgtccggtacatccacaattagatgaacatttccaggcccagaagcaaaaggaacacttttttttatggggcattaccgtaaacagttaacgggcaaggggaaccaatcaatcacgcagatcgaatcactatggggggaaaagaaaaactaggggctccaggaagttactttttgagtttagggcgcctttggggggggcgctccccccggcggcggcgggtgtgggaaacaataagcgggggcctgggggcgccctaggacctccttggcctgcctccgggcggggaacattttctgggtttcgacgacaacgaggcacttgacctgggggagcatg

SEQ ID NO: 428075 - DNA, 475 bp, Oryza sativa
  unsure (1)..(475): unsure at all n locations
angtgnttagggttccggccgccgtagaagcaagggggagagggggaggggggtccctttntccccctccctgcaagaggcagctcggtgttgctgcgaatttaatctatttctttcccccttcctcaggatgaggttttgatgccctgattctccccttttctctgtctatttcagcacctcatcgatttttccttgctcttctgatgccctctgttgtatagctccccaatcactccattgtatccctaattccatgcttgttgctcactcctttttaacaaaataatgaccagctactagaccattacataattatgctctaatcatttactctgatacttgctgcccccaaacacaaatctgtgatccaagcacaagttcttgggagtacaacacggttaacatcacatgaaactccttgtgcacttttttgtgcatgtttcctttgccccatctcaagagatcgttcttg

SEQ ID NO: 428076 - DNA, 309 bp, Oryza sativa
gtgtatatagacattttttttgtaaacctaattacatgcgtggtgtcaggtagacagacaaattccacaggctgaagcttaacttttcgcattcaaccaagccctgcggaaaaacatttggtccacgcgacagaaccctgaccaaatcaaaatctgggagatttcaccccacctacacaaaaggaacccctaaaagtaaaaacaaagtttccaacccaaaacaaggaaaccgattctaggccttcaaggaaattccaggggcccacatacagtcaatccatcaattgtgcgcgccctaacgggggaaaa

SEQ ID NO: 428077 - DNA, 345 bp, Oryza sativa
ggcattgatttacagcgcggggatatagaaaagaccaggaggagggaattacatgccaggcgagaaccaaactggcaaatgtcaccagatgaagattttgtttgtgcagacgaccaagaggtgcaaaggtacatgcggacgaaacgacttagccacgttgaacttaaaataggtaggataggactggggtttcacaaaagggacacttccaggttacaaaaagtgtacaagagaacaggatgaacttgcctataatacaacttgcaagcttccctggatgacagacgatggttcaagcaattggccaaaaattgatgctgaaagaaagccatagttgccagaggc

SEQ ID NO: 428078 - DNA, 415 bp, Oryza sativa
tcgtaaaaaaaaaaccacagaaaattaattaatagaaaattaattaatggtctgcgggaacctcggccgatctcttttcagacctaattctctccaggtggatcttttccaccggccccctcccccgtgcactcctttctcgccccttctcccctttccctcctcctccccgtcctccttcctcttcccgccccctctctctcctcctccctccccccccccttccctcctcccctcttccccccccccccccccccctctcccctaccctcctcccccttttccctcccctttctcccccttcccgtttttcttcccctcccctcttacctcctccccccccccctctttctctcccttttgcttttcttccggtgctccacccctctctcttttttccttctctcccctcctt

SEQ ID NO: 428079 - DNA, 319 bp, Oryza sativa
gtggaatgagaaaagtagacgagttgatttagaaaaaacagatacacagacaagcagaagggaaggctcggccataaaaaattgggggacaaagtactacccaaccagacaacaaaaagcataaaccagcacacaagcaagatggaccacctgtttgtgagggggctagctcccaacaaactaacgggaagggggaacagctccatcccgaggtgaagctccaagtgggggaaaaaaaaaaattgcaggatcaaagaaaggacgtcttggggggagggcgacctatggggacaggcccccccaaaaagcgaagggaatc

SEQ ID NO: 428080 - DNA, 387 bp, Oryza sativa
gtaaagcgaggggagcaaaaggagagagagagagagtcttttcaattttcttttgtttttcttttctccctgcaagaggcagctcggcgttgctgcgaattccatccatgtcgctcgccgtcctcaggatgaggttttgatgcccgaatccggccttttctctgtctatttcagcacctcatcgattttttttggctcttgtgatgccctctgtcgtagagctccccaatcagggcttcctcacttgtgccatgtttgttgctcactcctttcttgattattagttggtagctcaccagtttttgcaggggttttggcagatcatgtagtctgcctgctcaatccctgggtcagttaatctagaaacctcattgaataaacaagttc

SEQ ID NO: 428081 - DNA, 391 bp, Oryza sativa
gttaccccacattttttatgacaggttaattgggctttataaataagtttgtgcggttttcagacgagggatgaaaataggttttggaatgcatgtgcgaaaaccccttgcaacatgcgatgagacactgaaaaattatctttcacgcgagctaaacacacccacaattcacagggagagatagggaatgaaatgagatcacagcatcttcctgactaaaaagctggagaagacataacaaaaaacataaaggaatttgctccctttatgtaataaggcaagatcggcctgttatgttcaaccgatacacagcgtgtggcaatgaatacatcaatatgggcatgtgaatttacaaatgtaaaatttaagtttctcaaaaatggagatgatg

SEQ ID NO: 428082 - DNA, 182 bp, Oryza sativa
aggctgccgaactgtaaagctcacgggttgggcgaatctccactcctcactcgccccccactgaaatcgccaaaaacccaactgaaaaacccccccaccggaatcctcacgcacacacctcgccgcggaagctgtggcgtccgcgtaggagcagctgtttcttttttggatccaatccaatc

SEQ ID NO: 428083 - DNA, 437 bp, Oryza sativa
gaccgcccgcccttttttttttttttttttttttttttttttttttttttttttttttgggtggggtcctttttttatttcgcgcccttttttttttttcttttttttttttttttttttcttccaaaggggggaaatggggtagcaaactcttcccccccaaaaaacctttaaccccccaatttttaaaaaacccccttttttcccccccctggggggcaagccgggcaaaccccctcccccaaaaaaccccggacccctttaaacccaaccggacccaaaaaaaaaaaacccgggttttttttggcaaaaaaaccccaaaaggggccggttttttttattaaaaaacccccccccccccccaaaaggggggtggggcaaagcccatccgcaggggtccccggcctaataaaggggaagggggccccccccccccc

SEQ ID NO: 428084 - DNA, 557 bp, Oryza sativa
  unsure (1)..(557): unsure at all n locations
tctgatcaacaagctgacgcaaaccncccaccccgcggcgttttataaaaaacccccccccccttaccaaacccccccccccaaaaacaaccacccaccaccccccacaaacccaacctcccaaaaaatccccaaccttcccccccccccccaccccccacctccctaacaccccctcccccccccaccccccccccaccccccacaccactcccccccaccacaccccccccccccacccaccgacttccacccaacccattgcaaaacacaatccaccctcccccctttccccccacgcctccaccccccccaccccaaccacccccccctcacccctcacatcctcccccacccccaannaaacccaccaccctacccaatccatcccaccacatcacacctaacacaccccaccccccccccccccccccgtcccccccccccaaacaaatcaaaccctgctccccctccccaccacccacccccccccaaccaccccacctaatcccccaccctaccccacaaaaaaacccctacccccccccatcatccca

SEQ ID NO: 428085 - DNA, 345 bp, Oryza sativa
caaaaagggcaaccattaagggcctttggattttattttatttttttttaaaaagggcatgatagaaatgcttcccagccaattgctttaactggtggggcaccaaatacaaagatttcaggattggaatacgttttaacatgttaaaacactttttatttagaaaagcagactggcccaagcagggtttaacgcaaagccacccaacggggccggggaaaaatacttttttttttaaaaataagccccagtgtcctaggttccaaaaaaaaaaaaatttcccgcggaaagaaacctcttaaaaacattggggcctttggggatgggagccccgagcaacccccg

SEQ ID NO: 428086 - DNA, 500 bp, Oryza sativa
tcactaatgaaggctaaccctctggggtcccggcccgaatttcccgtttcgccccacccttccaatatgaaaacaacttaaacccaccgcccctgtgcattacttagaggaagaggaggagctagacggcatcctgcatacagctaaagcagccacggggacctccacccaccgcgcgtccttgacgacggagttgaacaagccaccgcccatcgccgtcagacatcgcaatctccaattgctttccccagctacaccaagctccatcaagtgtttggaggccaaccaagacaagagcaagtgccaatagcagtttgacgactataacaattcgcaaaatgagagagaggaccgtcttggttgaacacacccaagggtgcatcatttactcccatgggtaaagaacttccaccgaaggagaagccaaatcatagcttttaaaccaccatctaaatgccctccatgattatatatgctcatccttatgcgtgtaatccatt

SEQ ID NO: 428087 - DNA, 378 bp, Oryza sativa
gcccgtccttttttttttagattattatctatagcgtattataaaattaaatttggggaggaaccgacaaataactaaaggacagctaagtaactatcgcagacagtactattaacgacatgcaaaggacagagtacacgctagagtcaagacatgaaccaaaaatcataccgagctttaaacggacccggcgcactggatgtctaaatttacacgggccgtagcacaaaacagaaaaattaaacaagcactgatagggtgagctgtgaccagtgaatttcaagcacatggcttgactctgaaaaggggaaatcttccaccgaacagagcctcacctgtgtaattcgttggaactcatcagatcacacataatattct

SEQ ID NO: 428088 - DNA, 238 bp, Oryza sativa
gtcgccgatcgatcaatcgccgccgccgtctcctcgtgtaaccctagcttagtggattagtttaagtgtttgccggagattatggggtcggtggcggcggaggaggtggtggtttttattttcatccttcttattatttttctctcttttcaacctcttctgaatattttttctttttttttcctaaaattttccattttttaccccctttctccattcgtgtgtaaattttttattt

SEQ ID NO: 428089 - DNA, 89 bp, Oryza sativa
  unsure (1)..(89): unsure at all n locations
tcttcttgcttttccccanggaaacaccatttattcgggggatggggttactgaccaaacagggaatcataagcctcacaaccttacat

SEQ ID NO: 428090 - DNA, 216 bp, Oryza sativa
  unsure (1)..(216): unsure at all n locations
tgtattactcctcaacacacataacacatcctccgccttcttttaattcctatcccccgtttccacacaccctcttcntatcacccatcaatccctcccaccttcttcactcaataccccctctcctacatccacactcaaactccactatcccaacccctccctaaaagaattagaaccccccttactatcaacaccacccacatctccttcctt

SEQ ID NO: 428091 - DNA, 106 bp, Oryza sativa
  unsure (1)..(106): unsure at all n locations
cttacccctgccctctcatcttctcctcctccgccattatatagcatccctcccgcctttcccacctcctcaanaccttcttcnntagctctctcctccccttctc

SEQ ID NO: 428092 - DNA, 274 bp, Oryza sativa
atcgccctatgctcctctgcacagcaaccacggctatgcttacatgaggaggacgcggttcttgagaggtcacagatcttctgatcctgctgttttttggtggtctctgtgctgtaagttgggtttgtggcaagaattctttgctgcgcgaggcaatggcgttcacctcgggctcggcggcggcggtggaggagagggggaatagtgagcggaagaggaagcgtgatgcaactcatgaacttatatactgcctgtgagtagacttctagtgaac

SEQ ID NO: 428093 - DNA, 63 bp, Oryza sativa
gtccgcgaaaccctagccctcgcgctcgcccagcgccttttttaaccccccctaccctacccc

SEQ ID NO: 428094 - DNA, 399 bp, Oryza sativa
  unsure (1)..(399): unsure at all n locations
gtaatactttgtgaaaaacaaaaatacaacggggatattttgaattgctcttcgggggttgtaaccaantcttgtggcaatgaggggaggcattccaaggaaggaagccgaataggttgtacaagagtgcaaggaaatatacgagaactctcttgtagacgggaaccctcaaaagtctggttttgggtttggcaaattgaagtgcctaacagcacggaaaggcatatggagcaagcttggacagtaaatgatgctgcgactttcgagtagagtgaattcacgccctaagagaattgtttcatgttcatgtgacaattcttttgttcatttgttaagcttatggtattggcaccatgcccttgtgcaattttttgcccgggaagagcttaaggtgtatat

SEQ ID NO: 428095 - DNA, 426 bp, Oryza sativa
ttgggcgaacctaatacccgcgaaccctcacgccctatttaacctaaccgcggcggttgtcacgatggtcgcgaagaccaacgccgatgtggaggcatctatactacgacgcaatgacgacgacctcatggacgaggacgccgacgaccccacgccggagcccgccccgcgcctacgatccaccatagcgggcggcggcggtggcggttacgacgggcaacgcaagaccaagggccgcgggatccgcgacgacgccgcgccccgtgactcccgcttagccggggccgggcgcgccttcgactttgactccctcggctccgacggtggccctggccccgtccgatccattgaaagatggattgggctaatcactggggttcatgaaaaagcctaagaagaagatctttacaatatttttccggactt

SEQ ID NO: 428096 - DNA, 91 bp, Oryza sativa
gttagactagggtaaaaaaaaaaagagaagaggaaattacacctttttttttttttttgtccctctttacatgatctaagaaatgagggac

SEQ ID NO: 428097 - DNA, 283 bp, Oryza sativa
atcgaaacggcggcacttcttgctccatcagcgcgaatttcaacgtgattcacgcctttgaccccccctaccaccgcaactaacctcgcgcagctcccgatcccgacgcccgcgaagactcgcatctcccaccagctcgcggagtacgaccccctccttctcgaccgtttcctcgacatccatcaagacccccaccgcgacgacccccgccagccccaccccccatgctccgagatccctgctcgccattaaggcaagcatgactcccaaacccttcttcaac

SEQ ID NO: 428098 - DNA, 374 bp, Oryza sativa
  unsure (1)..(374): unsure at all n locations
gtcagtttccattattcttttatacttttttattgaaaaaaaaggaattttcttacttctgtcaataaatataatactatggacaagcacttttgtttgattgtattaaaagaaatactaacaaatgttaatgagatataaagagaatcctcctatccagtttactccttttgttggtgctatttgattgtgacttaaacggaccgatgatgtaaattcatttgttatacacttactctactctgcacaataggtctctgattaaatgnccgctgagggagggtttgttctggttgatgaattttcaagcaaatctgttaatgatctttacaaggtttctatgtgtttttatgtgttttctgtgagatctttac

SEQ ID NO: 428099 - DNA, 433 bp, Oryza sativa
gtgttatcttcccctctcgttagggttcgccggcgtttttgactctcgggggcgctcttcccttccacttcccaaaattctcgagtcaaacctcgtggcgttcggccatggcgacggcggcggtgctcggatcccacgacgccctcgacaaccggatgcatctgggggccttcgccgtgtccccggcgtcgaagccgaggcggaggcggcacagcaaggcggcgtcgccgccccccaaggtggcggcggtgagctcgccgccggtggttaagtctgcggcgagggtggcgtcgcctcctcccaaggctgctgcggccgcggcggtgcctcaagggcgtcgctcgccggtggcgaggaagcaagggtcgccgacgaaggagttgccgaagcagaggctcgtgatgggggagatcccgatcctaaagcgcgggga

SEQ ID NO: 428100 - DNA, 472 bp, Oryza sativa
  unsure (1)..(472): unsure at all n locations
gttgcnncgaaggagaanannacgagngnccagggatggtgacagtgatggtggcatgtgatcccccagatcttcagtgacccagagaggaggggacggcgcgtggtgagctacaaggcatactcagtggagggcaagatcaaggcctcccgtccgtaggggactccgctgcatcaaggccaactgctccgaactgatcaatttctggtgcagacaggtgcttgcggtcaggttaaagaagttggcaaaaatgcttctgaagaaaggttaattgttgtttcatctcaggagattccagatgatccagtgtctccaacaattgaggcgcttattttgctccatagtaaagcaagtacacttgctgagaaccaccagttgacaacacggcttgttgtaccatcaaacaaagttggttgtattcttggggaagggtgaaaggtaattactggaatgagaagacggactggggctg

SEQ ID NO: 428101 - DNA, 268 bp, Oryza sativa
atattcttttattcaacttgcatgtacgtgagggatcctatgaggttgattgcgcagtattcgtgcatacgagcggccctgaagatgaacaggatggccgtggcggtgctggtgctcgacgacgtggaggtggcgggcggtgctggcgctagcgcccacgttggagttggtgctggggctggggccgacgccggcgtgggcgttcacgaggggggtggagctgactccatgctcggagatggatgaacagcacaaattccagtgggaa

SEQ ID NO: 428102 - DNA, 326 bp, Oryza sativa
ttttcttcattaattgcatgctcgcacggggtcctattaggttgcttacgcatcttctgcatacatcaactcaaaatggggtgcacttggatatggacgtttttgtgccacaccaataacggcacggcggcgctgcggcggatgcacgacgccgacccggccctgtacctctccccctccgccgacctcgccgccgtcgaccgtgaggcctacaagcacctctacgcctcgctcgtccccttctcccccgcgcagccgcccccgctctgcaacctactggcaggccccgccttcgacggacagcagattttgtcccagattgagct

SEQ ID NO: 428103 - DNA, 427 bp, Oryza sativa
ttatggccgccgcctcctcctctgccgccgtcggattcatctccccgtcccctcgttccgccccatggcaccattccatcaaacacctggtgggcgcggcctccatgttcctcgccgccgtggtggtggcgggcggcgctggcgctctcgcttcggcttcggcttggggttgtcgctggcgccgaccgcggcggctgcgccacctgctgccctacgagaccggccggattctgtggtgcgccacgggctccctgatcgtcgccctctcctcggccgtgctgatcctcggcgacgccggctccgcctccgcgttcgtcgtcgtcacgccgcggaagctgcaggccgacgagctcgccaccgtgcgcctcttcaggagaacacgccctccgtcgtctacattaccaacctcgccgtgaggcaggatgcc

SEQ ID NO: 428104 - DNA, 520 bp, Oryza sativa
  unsure (1)..(520): unsure at all n locations
ttattcttttattcaattgcatgtccgtgagggatcctatgaggttgcttccgcatcttctggatacatcaactcaaaatggggtccactttgagatggctctttttgtgccaaaccaatcacaatacaacaagcttggtaccaattcatcagctcctgcagagcctgagcaaattgatttgtcatggcaattgtcgcttcaaagagtgtggcagaaattacttcatggtgataaaggtatgaacaacacaaattccagtgagaacagtctggtttttgaatcacttccactggcaatggagtggctgaggacaaatgcccgacaaaaccgatcaacttcttttcaggtcctggttactggctccctgcatctcgttggtgatgtgttgagattggtcaagaaatgatacttcttcttggaacgatatacacttanaagttcaaattgacgctgagccaatttcgcggtttacgtttgagatcccctgacggaacccggcggttacaggatacaacaatt

SEQ ID NO: 428105 - DNA, 526 bp, Oryza sativa
cttctcctcttcatcttcctctcctccttcctgtttctttcgagtagaattctcgaagaaggagaaataaatcgaaaggcagcagctgatggttgcatgctgtgcgtcgctctcatgctcaaaaggtcaacagagttgagtccctcagctaaggcaggcaagcacgagagtcacagatacatatcccctttaatctcctctcccaccaatcctttgatccattcatcccaacttcttccatagtacaaatctcttgctcccctccctctcatctcctatctgtatctatttctatctctctatctcgtatctccttgaagaagaacagagagaggattgggaggagtagtaggtagtttgtttaatctttgaggagccggagaggagagcaagtgtcctggttcgtgattcgatttcaggtgttctgaacgctttttgtggcttttgtgccgtgctggcctctcgttttgagcctttggcgattcgattcccgcgaaaaggaggcgcctttttgtgagttaggtgt

SEQ ID NO: 428106 - DNA, 459 bp, Oryza sativa
  unsure (1)..(459): unsure at all n locations
ttgtcggnnctatgcccaaactcaacaaangggatattttgaaatgttcaaacggttcttcagtgggtatcatgcccgaactaacttccttgaaaacaggaagtagcctggaatctgacatggtgtacaattggatcgatcgcctcacgcttctggattactcgtatatttggtataatacactgatgggcatgtcaaccattcctgtattacataacctaaatgagctaggtttgctttgctgccctggcataactgaagctcccaccctggcatcactttcgaaattatggatatacagatgtccagacttaagtgtgattggttcactcccctcacttaccaccttgtatctcaaagatccacttcttaaaggtgaggtattgtacagcctattgaatgacattgaccaccccaggctcaactgcatatcaattctttgtgaaaccatgatgaact

SEQ ID NO: 428107 - DNA, 227 bp, Oryza sativa
  unsure (1)..(227): unsure at all n locations
ngtttggccgacgactcctaaactcaacaaaccggctttttagagttgtacaagcgctttattacaacgctaacaattcatcaactaacttccgtgcgccgactccaggtcgacgacgccggggccctattcaatccgataaattgtcctcccttcgccttcggattagggttttaggataatacactgatgggcatctcaaccattactgtattacataacctaaa

SEQ ID NO: 428108 - DNA, 407 bp, Oryza sativa
cttagctccgcctcccacctcccttttcttgcgagggttttaaaaagcgacgggggtgatcacttatatggccctcaagacgctgcaagttccatctagctttgcaaggccgatcaaccgcagcttcatcggttcttcttcttcttcgtcgtcgtcgtctcagttgtatctgcggacaaagcctgcatcggcacggctcgccgcaagtgtcgccggagagaggcgcctcgaatgcaggggcggcagcagcctgcacggctgcgtggacgagggcgccgcggcggcgtctaggaggcggcaggagcaggcgggggagatccccatcggtctgttcccgtcggtgggcttcccaggcgcgacggtgcagctccaggcgttcgaagttcggaaccggatcatggtgcaca

SEQ ID NO: 428109 - DNA, 458 bp, Oryza sativa
gttgtttctctgggccaaagctcacagggctgggtggagtcgcggttgaggcagctgtcggccagggtggaggcggacacgtccggggtgctgctctgccaccttcacccgcaagcgtacgccaccgagcaccacaaggagccgcggcggcagcgggagcgggaagccgtctccgctgcagccgtctcgacgccaaggatctctgggcggcacgccggcgctgcacggatggtcttgaggagagcagctagctcgctcagatggccttgaggtggtcggcagcggcggcggcggcgatgtcctggccgtcggcgtctcagcgagggcgacgatgttggggaagtccatggccacggcgtcctccgtggtgaatcagtcctcgttgcggaggagctccttgctgccggcggcgaccatcctcggcgtaggcgtggcagtgcacggagcatgcggcggcg

SEQ ID NO: 428110 - DNA, 285 bp, Oryza sativa
  unsure (1)..(285): unsure at all n locations
cacgcgtccggctggcatgatgggcggcgtctcngccgcccggctncctggactacattggcgggtttttaacnacatggcntactaccggaagctcggggagagctccaacatgtcgatcgatagcctcaatagcctgcagaccagcacgcatggcggtggctccgtggcaatgtctgtggataacagcagcgtcgggtctagtgattcccacaccaggatgctcaaccacccgggcctcagggggcattgtccagccaattacttcggtggggcacagcattt

SEQ ID NO: 428111 - DNA, 419 bp, Oryza sativa
  unsure (1)..(419): unsure at all n locations
tctagctccgcactcccacctcccttttcttttcgagggttttaacgacgtcggcggctacgaaaactattcctatggagttctggggtcttgaggatggtgaaggactgactgggagatccgaggtacctgatcaacgctatgcattaccgttcagagctggtcttgttgaacgctgataaatctctgacaatgctttgattgaactttctggggcaagctgcgaagccaaggcctttccctgtgcctgacggattgctgaaaacacaggaagagcttgctgaagaacaagaggccctaatggcnnatttcttctataccaggctactgagaagaatggggagattttctgattggtatacgccttnncccagatcatgaaacccactgaatcaagtccccaagcattcatatacccg

SEQ ID NO: 428112 - DNA, 415 bp, Oryza sativa
  unsure (1)..(415): unsure at all n locations
gtagagggcaatggagtggctgctaagctcagggtggttttgattgcctaatcgtggtnatcactgttncaaaatactcctttacaaatgtgcctttcctggatgatgttgccaataacagtgaaaaatggtgggtacatacatcataactctgtagatggctcttcacaaacagaacttttggctgtatggtcatggtctatattattctattaaggatatagtcaagattacgattatacatatggttagtaatcattggaactaaaggttttaatatgaaatgctttggttagtaaacatggtactaatggatgcttctattggagaatacttcaaataccaaacagtacgcgtataaacttctgccatttattggagaaaaatcttctacagaagatgctgctcatttctg

SEQ ID NO: 428113 - DNA, 362 bp, Oryza sativa
gtcgaggctgtgcggtggttgccgacgacgacgaggaggtggaggatatcgcgcgccggcgatggggtactggtgggaccgcgtcgtgcttccggtgaggagggcgtggctcggcgtcgtcgtccgattcggggttcggcagacagggctgtggaggctgaggtaggaggtgagcacgtgcgagtacgaggacgtgcgcgtgatgtgggagatgctgagccgtaccagcacggggggggctggggcggggcaggccggcaccgccagcgaggaggcacaagacggttccggcagttccgggccgtggaccgagagcatttgcctatgagcggacttatagaacgtctctcttgagggcttgc

SEQ ID NO: 428114 - DNA, 443 bp, Oryza sativa
tgggtttttttattttttggtgttttttttttttttttttttttttttttttttttttttttttttttttttttacaaggggaaaacaaattcaattaaaattatgccaaaaaaaaatttccaaggggcccgcccaaaacattggtaaaggggggaaccccctttggtttttggaaaactaaatttggccccaggacacaacaaacctaaccctaaacactttaggagggacaaaaccaaaccagactggacattttgaaacaagaactcctttcctttttaaccccccaaaggggagctggttcccccttcccggaaaaaatttttaagggatttagacggggccttagcccccccaaagggggtctttttgaaccggcaaaggggcaaaggctcccaattttttactatttaaaaactggaacccggtaggggggggcttg

SEQ ID NO: 428115 - DNA, 335 bp, Oryza sativa
cacccctatccccgccgccgccactcggtgcgcggtcatagacgacggcggcggcgtcgccactgcagccgccagccatgctccacctccagaaacaccttctcctcctctacctccctccccgcgccaccgcctccaccctcctctccctccgccaccatggcctcttctcccttacccgcttctccgccgccgccgccgccgataaatccgccggccacttcgccgtcgaggagtacctcgtggccacctgccacctcacccccgaccaggctaccaaggcctccaagtccatctcccacctcaagtccccgttcaggcccgacgccgtcgtc

SEQ ID NO: 428116 - DNA, 429 bp, Oryza sativa
tgtgtttttttaattttttgtttttttttttttttttttttttttttttttttttttttttttgggaagggaattcccccctcaatttaataagaaaggaatccaaactgccaatgggtatttgttttttggacaacaagaacaaacgcttccgccatttttttatatacaaaagaaaaaatgccctaccccacaaacaagacttagggggtactaaatatcccggggcaaaacgattacaagaaccccggaaaaatgggctggtttggtttaccctttgccaaaggaatagcttaaaaaaaaagggggggcaaatgaaaaaaacaagctttatgaacattcaagaccccccactaaaaagaaaggtcccggaattcttgaaaaaacccggccaaaaacctggggcttttttttttattggtaacacct

SEQ ID NO: 428117 - DNA, 245 bp, Oryza sativa
ccttatcttatgagcaagaagctcatctcctcctccggtctggtggcatttcatggccaccagcgcgcgaccagactcctcaagacctccttcgctggcgcgcgcctccccgccgccgcccgcaaccccaccgtctccgtcgcgccagacaccggcgggtccatctgcaactccatctcgcggacaatggccaatcccccctactacctcaacgccatcaggttcagcctcatccaggagcccca

SEQ ID NO: 428118 - DNA, 114 bp, Oryza sativa
agctttttctagaggagccaaagccattggctttatcgtagaggtttcatggatttcaacatccgaaagagggtagttgagagtaaaactgatggtgttgctttcaagccacct

SEQ ID NO: 428119 - DNA, 379 bp, Oryza sativa
ttttggttctaaggcgggcagggggtttgccttttatactgatagagtaggagaaaatggactatttacaggactgaccaacaagtttatttcctttgaaactcataatgaacagggattgagttgggcgcttgcctgagaattcatgctagtatgaacacagcttcccaatcagccagtacacagtaatcacagtggtggcgccagctcatgcatactttgtcaattgtcacatgctgttgcatatcttgtcaatagccaaataccacctgtttttccagcatttgtagctacttccctcttcaaagtctgaagtgagccacttttgctgcttcttcataagcttcatgtctgcttgacaggttgatgcagtagttta

SEQ ID NO: 428120 - DNA, 234 bp, Oryza sativa
ttggcccttaacaccccgttgtttttaatttttttttttttttttttttttttttttactcttcctaattatcagaagaatttttatttcattaattccccccctggattaaacaggctaattttataaataattcaccacaccttatttcattgatcagggtcaaaacctgcacaaaaaaacacactaccggttcaaatttcaccttttttccaatactcgaccatccatccc

SEQ ID NO: 428121 - DNA, 435 bp, Oryza sativa
ttgttttttttaatttttgtgttttttttttttttttttttttttttttttttttaccctcattatccttaaaaaaacactgatcagctttgtttaaaaaaaaaagggtcggcatatccccgggttagataaaagcagggaccaacccactggttcaatttatttaagccctattgcaactgatatttggggagggtagtaaacgctgcctttacaatttatgaaaggatgcttcttcgctggtgcatacatcagggtaaaaattaccgctttttatttggggggaaaactttgaactagtcctggtctcaaaacaaagaaagggactttgggttttggagggttggttttcacaaacaacgatgcaaagttttcctcgacatgggaagatgttgagatttggccctaaagaaaagtcattccaactgggccggg

SEQ ID NO: 428122 - DNA, 126 bp, Oryza sativa
tcagtcttcctctcgccgccgccgactcctacggcgaggataggaggaggtggccatgcctaggcgaagggtcccggggctcaaatcccagctactgcggaggcatctcctcatgcggcagacccc

SEQ ID NO: 428123 - DNA, 145 bp, Oryza sativa
gcgcggtttgtgttgccccgtccgcctcttcctcttgccggaccggactccatgaggggcaggcgaccttgcacgaggtagcgagactatccacttgcatcggcggcaccttctataggggaggggagatgacttcaagtatgct

SEQ ID NO: 428124 - DNA, 118 bp, Oryza sativa
ccctaagttatgttgcacgtcagtcaatgaagtcatggtggatttaattacagatgccaggaaacttgaagatggtgacattgtaaatgacgacgcaacctgtttttccaaataagtc

SEQ ID NO: 428125 - DNA, 311 bp, Oryza sativa
ttttggccctttaaccccctggtttcaaactctttcacatccttaacaaactcaccaatttcactaccaatttacacatcacaaactatcacgttttatcccatgtgaaccacaaaaataaatgtgagaaggcattccaaaatatcattcatgtccaggcatataaatgatacacaagatgctcctactctggaataacaaggtcaatctgaaccttaatcaagcctaaaaaaaatgttaagaaccccatattttctcctaggatcctcaaacatggcccatagaacctagttaattcttgcccttctgat

SEQ ID NO: 428126 - DNA, 245 bp, Oryza sativa
ggcttgctttagccgccggcggccggcacggaggggcgggggtggtaagcgccggccggcgcggaggcaggtgatggaggcgctggcggccggcagcggcggctgcctcgcgcggagggcccggcggcggctgccccacgcggagggcccggcggcggcggctgcccgtccggagggcaggcggcggaagcgcggagggccgcttcgctgcgggtggcagctgagtcatggaagggccgtcccgc

SEQ ID NO: 428127 - DNA, 363 bp, Oryza sativa
tttgggcccttgaaccccctgtgtttttaattttttttttttttttcattttttttgaattctgttaaaatataccccaatatggaaaccaagcaatacaaacgggcaaatctccggaatttttttccccatcttataccaaccaacccaggcttatgataaacggagtctaagcaaggcacctaacactctctcacttgattttaataaaagctcttaaagaaaggccccctggcccaaaactaaattttggatgacaacttccacaggaacaattgaaaacaaccgccccaaaaaaaaaaaaattaatctcgacgaacagtctcaggggtgaccaaaaacaagcgtagaacacctgcagaa

SEQ ID NO: 428128 - DNA, 437 bp, Oryza sativa
tttgtgtttttttattttctggttttttttttttttttttgtttttatgattttttttgtttttttttttctgtttttgtttacaggaaacaaaaggacagctgggggtaccttggacaaagaaacaaatgtgtttatgcctggcgaaaccgacttttttgggtaacaggggttgcaaaagggcctcaaaacaaaaggggtttatcacggggacaaaatttgttttgggggggggggcacctggggggaaaaagggggaattggaaaaatgggggtggcccatgggccacaggggatctcggataactggttggggggggcaaaaggccggggggaaggggggaccggtttaacccaggggaggccccccggggaaaacgggagtccggtttaaaaaacttaaatttctgtttaagccaccaagggggggggccaaa

SEQ ID NO: 428129 - DNA, 420 bp, Oryza sativa
ttttgtttttttaattttttggggtagaacttacataggataggatcgatctactagcttagctaggattcattagtaggatacacaagtacagaacatgctcacagatgctgctgctagctagctagagagtacaaagttcagtaggactagagagagtataatagatggagatagatgtacagtaaaggagacaggcaggcaggcaggcatcagtgcttctggaagatgaccatgcataaaaaggcgacgcaacggaagaggacaccgttggcggcgaggaccagaatgcaaaggaacctggcgttgatgtcgcagccgctcttgaggagggagccgcatcgcgttatgagccacacgcccgagtacctttgcgcattcgcgaacacgaacccttccagcgcccacttggtgtagcac

SEQ ID NO: 428130 - DNA, 145 bp, Oryza sativa
ctttatcgtatcgtatagtcgactgtacaaacggaaggcgacgcttatcagtactacgctagctaagacaggatgagcagcgagaatggagagaacggacacggcgccgtcgacgaggtggtggagcccgatcagcagacgccgc

SEQ ID NO: 428131 - DNA, 376 bp, Oryza sativa
tttcttacaagctccagatacggcagcggctgggtcggcaatgatacggtgcctgggagctcctcctgcccctcgtcttcctgctcggtctccatcgccccgcagggcatggatcggaggagcacgatgcggttgtcattagcactgcattggggtttagctagcacaagcatctggatgggaggatgaagcacaagctactgaagtgcctgactgttgcacctccaccgacttcttccaccgcggagccgggccaccgaggcgctgccgacgggtatcaaatccagcaacataacggtcaaagaagaaaggacagaggtggccagcaacggcggcgacaacgtccacaaaggcaatggagggagtggaagaggag

SEQ ID NO: 428132 - DNA, 274 bp, Oryza sativa
tgtaattatcagaggacgcagacagcttgacttggacagtctccaaatttccccaagctgcagctgcgcatcgcaacctccgctctctcctaaaccccctctctccaatggccggctacccgccaaatcccggctccggctacccctacggcggcgccggcggctacggcgccccgccaccgccgtacgggtccttccccgccccctccgccccgccgtacggtgcgaagcctcccaaggaaggtaagacctgcttctcttgcgccccttacta

SEQ ID NO: 428133 - DNA, 236 bp, Oryza sativa
catatatttgttggtgactgagagtgcaaaagcacgggggggaaaatatcagatcattgcttgcaagtgccaaggaatcagttaatcatagcactgggtctgggtcagaatctagttcagtacagttggaagcaccaggagctgaagctgaggatattactggtgtaaagaagatgaagatgatcacacgatcaatcatggaggatgatcaagactgcctgatggatactgttggt

SEQ ID NO: 428134 - DNA, 349 bp, Oryza sativa
cttatcttcatttttgggaaaccacaaggcttacacaggggttctgccaattgggagaaacatttgcccctaaaaaggggggggttcacgaattgggggggccccaataaacatggttgggtttcaactaaaaaaagggggtacgaccactttttcatgaaccaagagaggttaagaaaagcttggccctgggggccattttttttgggcctcccccctttgggggggttaaaaatgggacctgcttctctttgggtgccccacgttaaaaaggggggcacccttttgtcttttttttgggggggggccccccctaaagattggagtgcccccggggggggtgggaaaa

SEQ ID NO: 428135 - DNA, 388 bp, Oryza sativa
ttgttttgcatgttgcagctgaggtcaggtctcctggcatacatggaagtcggttgccacattaatacatcatgtacatgtcatgcgctactgatagctttggagtcacaggactccagattacgtcaagaatgctagtcaaccggtcgatagatgggttgcgagatgtggcataactgaacccaggttcgggcagccaatgtatactagtgaaagagatgtttaccaccgttgtgagaatcatcaagggccttggaacaactacgtgggatgactttaagtgcgtgagtctaaactatacagtactctagtctccacaaacttatagcacactcagtgggcaaggtatcccatacaaggatgccttcagacactgctgatcttgtct

SEQ ID NO: 428136 - DNA, 376 bp, Oryza sativa
atttggattttcaaacacgggggttttacattcttttttctgtatttttagttttttggttttgaatttggatattttttcttttaaatttatgcaaatgatttttaaccatcatccgccgaaactgaaccacctaaagaaaaacaaagcttaatgttacaccaatggatgaatctcaggcatcaaaagagggccgatattctggcacaaatggcggaggaaccgacctaaattcaaacttggggctgaaggaccctgacggagacaacgatattgatactgaagaacaagagggggaaaaccacacacacacagaaaataggctgaagaggaaatttgtagctcctgaccttgcgatgagaacgttaccggctgc

SEQ ID NO: 428137 - DNA, 301 bp, Oryza sativa
ggttatctttaacagacactccgtgccttaaaaatgcggggttctaatgctctagggcgcccttaaacacttgaatgtgttaatctcctcatcagatcttttcataacctaacatctgctaggaggaacctccgactctttgacgatcataagggggtgactggcacaattgatgatcatgctggagcctactatgagaatctaatgcacacttctttaaccaactcgtcactatttatgggcatccctgcaatagatcactcaagcgatatccatgacaaaacgcttcctaccttactat

SEQ ID NO: 428138 - DNA, 215 bp, Oryza sativa
tccttcaccaacaatcgcgacgacgaaaagaagaagagaaatatgaatctcgtctcacccccaatggcgcagatcatcgacgggaaggcggtcgccgccgacatccgccgcgagggctatagttctttcttacctagtctgatgatgggctttctcatctctgtttgagcggatggatcgcatggtggtcgtacggtcccaacttcttctacatc

SEQ ID NO: 428139 - DNA, 464 bp, Oryza sativa
tttgtttttttttttttttggtttttttttttttttttttttttttttttttttttttttttttttttttttttggaaaccaaaggggaaccacaggggttttgccaaatggaaaaaacaattgcccaaaaaaagggggggaaccaaaaaatggggggccaccacaaaaaaaggttgggtttcaaccaacaaaagggggcagacgacgtctccatgacccaagagagggtaagaccaccaaggccagggggcccaaaatttggggccccccccattagggggggttaaaaccgggaccggatttcctggggggcccccagccaaaaaagggggcgacccactgccttggtcattggggggggccccccccccaagatttgaaggcccccgggggggggggggaaaagagctttaaaaatagcctgggaaaaaaacccaacgcccccgtttcaaactttaggggg

SEQ ID NO: 428140 - DNA, 443 bp, Oryza sativa
gcgtggggtttttaaaattatttttgggggtcttttaatttttttttttttgtctttaaatgtttattcttcgcttttttcttcagcggggaccccgccaaaaagggcacgagaaacaaaaccgggttagggggggcctgaaaaaaaaacaaaaactcccccctttcaaaggggaaaacaccccaaaaaaattgtccctaaaagagcgcaaacaaaaaattttaaaaaacccgggccccaagggaaacggggtgaaatcccctaaaaatacaaaaaagacaaaaaaagggtgccacaaaaggccccaaggggggatgtaaaaaacccacgggaaaaaagaaggccccggggtccttttatttcagggggggggggcccaaaattcccctcaacacaatatggggggggggggggttaagaacataatcctaccaaaacaaaaa

SEQ ID NO: 428141 - DNA, 378 bp, Oryza sativa
atattttggaaattgaactcctgtgtttttaaatttttttttttttttttttttttttttttttttttttttactttttttcgggggggatacaaaaacaaacacaaaaccccaacgggcaaaaacaaaggggggggaacccgaaaaaaaccgaacacgaccaaagccggagcacaaacaaaaaaaaccgggagccacggatggactcacacggaaagccaagcccaagccaaagagactaaactgggccctgggccataagccggaacaggccgaccccacaaccaaaggaaccccaattgccagagaacccaggcgacaagcttgaaaaacaaaaacgcaggagccctcccgcccgggcccaaaactgcccgaacc

SEQ ID NO: 428142 - DNA, 355 bp, Oryza sativa
tttctttggtggtgtctatgttggaggcgatcgaggcggctaaggttggaggcatgatccctgaaaatcagcgacaaggatgcctttcatgcttcaggcagtacaggggtccgtgacggatggagcacgctggagttgtatctgcagattgactgctacatctcgtgtaattcgattacatttgttttaaggtacgtaagcaaactggttatggagctagcatgcttaagacctttggtttgtgtagccctatgatgtaaattccctgttcatcccttctgtttatcaatgaagaaccagctcggttcgttcatccatgcttgaatgtccctgatgttaatattctaccagtatc

SEQ ID NO: 428143 - DNA, 351 bp, Oryza sativa
ttttggtttttttttttttttgggtttaatatttttttatttttttttttttttaatgtattttttttttttattttttttttttttttttttttttttttaattattatttttatcttttttaatttaaaaattttacaggccgccccaagaaaaaaaaaaaactgcattcaaaaaaaaaaaaaaaaaaagggatcccaaaaaaaaattctgtaaccatggaaaaaaaatacaggaaaaaaaaaaggattaaaaaaccccacctgggggggagggtcacgaacaagtacaaaaatggggttggaaaaaacttttaataaaaaaccaccacaaggggaaaagacttggctg

SEQ ID NO: 428144 - DNA, 426 bp, Oryza sativa
aaggtaggaaaaggagagagagcaaagaagacttggggaggagagggaacttgagagacagagagaaagagagagggctgctaggcaagctgtggaaagggctacaaaggaagcacgggaaagagcagctgcagaagcacgtgcaaaagcagagagggaggcacgccagcgtgcagagcgggctgctgttcaaagagctcaaaaggaagcacgtgagagggctgctgtagacgctagggaacgagctgagagggcagctgctgaagcgaaggagagggctgctgctgaagccaaggagaaggttgcaactcaagccagggatagggctgcagcagaaagagctgcagtggagagagctcaacaagaagcaaggaggagagctgaaagagcagcagtagagagggctgcttttgaggctcgggaacg

SEQ ID NO: 428145 - DNA, 214 bp, Oryza sativa
gcgacttatcttacaccacggctattccccctccctacgcccgccttctacccgtccggcgccgcgatgcgaattatccgccccattccgcgtctttcccgacgctctaacgccgccacctctcctgtcccgatgcaccggctgatctcttctccctctttcatggcatctgcagcggctagctggtggtcaccattgcttgctcgtggaggac

SEQ ID NO: 428146 - DNA, 467 bp, Oryza sativa
tttttgttttatattatatatggggtgctaattaattaatcataattaaactatagtacataatatcaatcactcacacttacaaaaacaggttattggcttaattacatgtaattaacagccatcatcatcatcatcatgatcacaagcaccccaaaggttaaacaaaaaagttacaaaaggtaaaaaaaaaaagaaaagtaaaaaaaggagggtaaaaaagagaggagaaaattaaaagttatttggacctctagctaaggtgaaagaaaggcttccatggctcaatgcaccttcttggagaagaaccccttgatgccgaagagcccgccgccgccgccgccgccgccggcggaggcgcgggcgactccggcgtcggcgcggcggcagctcacctggtggcggtacccgatgcaggagttgacgctcaggttgatgccgcgtatcccgccgccgccggtggcgga

SEQ ID NO: 428147 - DNA, 435 bp, Oryza sativa
ttttggtttttttaattttttggttttttttacatcattacaacccacaactgcatttagttagactggtatatgtacatacaggacccttaagtccactggcaaagtaccatacattcagatccaaaacttatttcacaaagctgaacagaatacgatgggaattattggggcaatagcatgtacaggtgatgctaccataagaacatcaccatgggggaggggacctacttaaattgatcatcctcaaagcggataagtataatgacaagcttgattaacaagtactcaagggtcgttggagctgctgcaagatcagaccagagcttctactggggcgatttggggctgcttgagttgaggtaacccattttttgagacagcaaggtcatatcatctatagcgggggtcctgggatcctcattgagcccaccc

SEQ ID NO: 428148 - DNA, 482 bp, Oryza sativa
tttgtttttttttttttttaggaagaatatgtattaacatcatgcaagaattaaggcatggtgtttctgaaacatttatgcttctcttttttcagatacaatttccctctgtaccatcctagaagtgaactctggatctgcattattttgctccacaagtcaaccccattctccactctccaaatactacttcactatactccatcacaactgtaacttgaaacacacttcagtaacctccatacgttatggagactctctatgctgcatatttacagcacaattatgcattgcaacttgcagaagtcttctacatcagacgtacggaaggaggaaagaacagtatcagaaacatgcatgtcgacaggttttacatgagctgcatatgttggctattgcaactaggaaagaaatggttcagtagtcagtactacttaagcttaaccatgcctcatgtggtcagttggtcttgctcagcatag

SEQ ID NO: 428149 - DNA, 135 bp, Oryza sativa
taatgaagttcttgtttcttagagaactttgggttttctttagataacagtaaagaaagggctcctttcgcaatcttcatgtaaggggagggttcagtaccacgttccgatctttctttcttctccacttctact

SEQ ID NO: 428150 - DNA, 352 bp, Oryza sativa
tgctactcggcaacggcggtggcctcccttcaccaacctcccatgcgcggcgctcccttcctcgacggcagcgggcacagcgacgacgacggcgggcacggtgacgacgacggcggatctggacggcgggcgcgcagcggtcacggtgacggcggcggcggcgacggatctggatggcagcggcgccctttgctctcctctccaccgagcgtcgtcgccaacactagatccgcctgcagcttctccgctcctacacccaccaccgccgtattttccctcatctggccatccactccgctgatgtcgagcgcgcggtgttataagatcgttgcctagcttgtgaagaggggat

SEQ ID NO: 428151 - DNA, 499 bp, Oryza sativa
tttatacacagtgatacaatggcctgcatcaacacatgccagatctgctccgtcctcaagggagcaaagatcaatggtaccaagatcggaggagggaggggatcactatccttcctttgtccttcttttatctcttatcgacctctatttatcttcttttatttccttattctttctcttgcttttttttttacttttgttctcttcctttcttttttttctttttactactcctttcctcctatcctccacatttttattcttattcttttttttcttcttttttatcttttctttactttattttctttcttattactttctcatttttctttccttactttttttatttctcttgcatttcttattttctttatcttcctttctatctttctcttctatatcttttctttatttctccttttcctttttcttcctatactcctctttctcctgttcttcctcttcttctttttctcttcctttttctcatcctttt

SEQ ID NO: 428152 - DNA, 422 bp, Oryza sativa
ttgtttttttatttttctggtttttttttttttttttttttttttttttttttttttttttgggaaaacttggggattaaaccaagtttcccaagggggccacattacccaaaaaaactttgggcactttttttaaaatagctcctttaaaggtttaaatttggattactttgccccccggggatattattttcacaggaaactggtttaccagaggagactgtccttaggggacaaaaacttaccctgtttttggggttttcaaatgggggtcttggaaaacctgaaagggaccaacacccttgcaagagtttgaacaattcccaaaggcggattgggggccaccctttcccctgtttcaaacccgggtgggctgggaccccacctcatgggcctttttttggtggccggagggcactttt

SEQ ID NO: 428153 - DNA, 438 bp, Oryza sativa
ttggttttttgatcttcttggacacaaaaaattaatcgtgttattattcattcgtctttcatttgatgaacaattaaatcctacagtacatattcaattcaatcagcaattaataatcataataatcataatttaagtaaaagaagaagaaattccggcggatgatcgatcgatgagaatgcaaattaatgaggagtagaagaaataaaattaggcccaggcaggcaggcgatagatggaagtaaggaagaaatggaggaagattaggcggtggcgtgggtgaagccgatggctatgtgggccatcctgccgtactccctgttcagggcggtgaaggggatgttgccctcgtccgccttccatgcgtcctcgcagcttttggcggggcccaacgccgctgacagctgctccatggccgtcccgagatgcggccttgag

SEQ ID NO: 428154 - DNA, 87 bp, Oryza sativa
tttgtatgggtaatcaatgaggacctccaccgaagcagaagatagtcccgtagtctgcacggcctctccatgttatggacacttata

SEQ ID NO: 428155 - DNA, 364 bp, Oryza sativa
atttctttcccacccacagtggcacgaactaggagggcgggcttctttgatctctccggccactactactcatccatcaaatcaacgtcgctccccttctcctcttgcggcgcggctcctttccaagattctccgatccccaaacccccaatcgccagagcaaagaagggggaacatcgccaggaaaaagatcggtggcgagagaaggcggaaagcgaaggacagcgaggggagcaaaaggagagagagagagagtcttttccattttctttcgtttttcttttctccctgcaagaggcagctcggcgctgctgcgaattccatccatgccgttcgccgtcctcaggatgaggggtttgatgcc

SEQ ID NO: 428156 - DNA, 250 bp, Oryza sativa
gccttgttaggccagaccggccacctgcattgcagggtggcgctctttaaatctgtgtggggctctctctctcggcaccacggacactcgtacagctgccgcctgccggagggttggtggcgtgtcccaggttccagaaaaaccctacagcgttgtgtggccgctcgaggagctgagctgtgtgagccctgcaaggtttgcatccacacgcttgggggggttccctcacctgctcgtccgagggaattca

SEQ ID NO: 428157 - DNA, 470 bp, Oryza sativa
ttttggttttttaattttttgtgtttttttgcatcagaaacttgcagttcaacaacagtggtctaagctgaaccattagtggcacacatcaagtggcatacatgatcaggagccaaattgtctggcaaacaacacaggtaggtaatagtttgcaaaatacaggcatgagcctgattgtctggcaatcaacacaacacaaaaagctagatacatgggctacttgccctgcaagaccacatattgcataaacatagcagcaaacatttcacagcttgtcagactcccatggcaacagaagaagtgctccaactgtcttctttttgggtctggcatttgagggttcttgagcagaaacacaaactgaagctttccctgaagtaacctttactgatgcacttgtggagcttatgtgtgacaaattctaggatgggttggcagctatgaactttcaatacttttgagcaatcctt

SEQ ID NO: 428158 - DNA, 219 bp, Oryza sativa
ctctatttataaccctagatcgagatttggggtgacggtggttgcgagcttggtgcggcggatgggttggtcgaggcggccgagtgctcttccgggggcgagctggcgggctcagtggagcccgtggagggcgcagtggctggccccgtggagggcggtgctgtggctggccccttggaggccagtgcggtggctagctctgcggagccctataagctt

SEQ ID NO: 428159 - DNA, 348 bp, Oryza sativa
tttgtttttttttttttttttgttttttttttttttttttttttaattcttttttttttttttttgggaaaacacatcaaggttataaacccggaaccattttcgggaaaaaacccctttcctaatacagggaagagagccttccttaaaaagggggggttaagtgaactcctaaggccacctttctgaaaggacctagcctaaaggcaaaaaagggggaacggcgacaggggtttgcggggaacccaaaaagaattgcaccccggggccaaaaaagatagggccacgccgtttgacaaaccggaaacccccaaaggctgcctccacggaaacgggccaaaaccgggg

SEQ ID NO: 428160 - DNA, 81 bp, Oryza sativa
tgttctgctacagtaaaattcccctttctcgaccgctgttcctactcgattccggcggccttgtcgccggcgacgggagga

SEQ ID NO: 428161 - DNA, 329 bp, Oryza sativa
ttatttatttgatggccaggtcatccactccatggggtactccatgatgggcaccaagaattctaaggaaatgatcaagggcaagcgtgtcacgatcgttggctatctcaaatcagcacttgacattgctgcagaatgtgcagaagtaaatggtactgagattccatgtacaatggtggtccgaacaaagcattggatcataccagactattttgcatggggcgtccacatctcaaagctgtatttgaatcggttttctgagcttcttattcacaagcctggtgaaggcttactccttagcatcttgggcaccctcttgactccattcg

SEQ ID NO: 428162 - DNA, 474 bp, Oryza sativa
ttttgttttttttttttttttggtttttttttttttttttttttttttttttttttttttttttttttttttttttcgaaaacccaaaggcaaccaagacaatggccctttttgaaaggaaaaaacgggcccctcccaattagggcccaaatggggccgggggaagcccagtttttataaaaaagggggaaggggtccccagataaggggaaaaagaggggggggtcccaaaaccccccaacagggtggccgggggtttaaaaaggctggcatcctttttattggggggttcccagggggaacacctaagggcaatcaaagggggggcaattaaagggctaactggaaggggtggccaagcgaagcagtggtggaattttaacaggggaacagggcttttttgacccttcccttgggggcaggagggggcctgacggttccaccccctggagaaagggggctgggcgaggaaaa

SEQ ID NO: 428163 - DNA, 86 bp, Oryza sativa
ttaatgtggtcttctaggaagcataccaccatgggggctgtatgttaacaatgtggagaggttcacaaccacactaggaactgttt

SEQ ID NO: 428164 - DNA, 63 bp, Oryza sativa
ccatacttatttaaagagaggacaccacatcacaaacggggggaattgttaacaagaaagaac

SEQ ID NO: 428165 - DNA, 394 bp, Oryza sativa
tttgtttttttattttttttgttttttttttttttttttttccacgaaatttaactttttgatgatagctaagaaccattaacaaaatttgaaagacatttaaaggaggggcacagggtggtgtaaacctcatttttggggccaaaattagagaacacggcccatggccctccccgggggcgcctaatcaggacccccaaaccaaacactggggtctggccattttgaacttataaaagttaaactttcctgggaaaacccgcttggctaaaccaccttgcctatggaaaaacccttatatttggaacaccttctttgccatgggtggccaaaacggggtcccgggaggagaacccccctgtgaccttgggggaacttttcgggcccgaagttc

SEQ ID NO: 428166 - DNA, 127 bp, Oryza sativa
tctgatctatccagattgcagcctcggcgcagtgaggtgagagtggatgatgcttcagattatggaaactctcagattgacctacaccaagctcgtgaacacattgagctttcactacttccccagg

SEQ ID NO: 428167 - DNA, 387 bp, Oryza sativa
tcctctattgagcgcgccgctttttttttttgtgtttttttaatttttggggttttttttttttttttttttttaaaataaaatcagatttggaaaaacctgagcggggtgcaaaaaatgcaatttacattccaggaccccttttaatgtttctttgtttgataaaaacaaccgggtaaccaatgtaccaaccagtgcccataccaacccattgacaacttcgggagccgacacgcatacactattctttagaaaaccccctagccgcccccggggggccctcggtaaaaacctgaacgggcccgaccaacgtgccaagttcccccaccggcaggggccttagggcttaccccaaactggggaattggggccttccccacaaaaatt

SEQ ID NO: 428168 - DNA, 262 bp, Oryza sativa
atggtgatcatactagctgatagtacatgcatgtgggggggggatgttatagctagaagcgcgtgggtatacattctgcatgcattggtaagaggtgtgaactaagctagcattacatgatttacaagtgggaataaatgtagagagaatatattctatacccactgagtttgttcaagttcatgactacaaaatagcactattataaatgaggttaattgcattttactaatttacaaataataatttgggggggcctttt

SEQ ID NO: 428169 - DNA, 491 bp, Oryza sativa
tttttgtaagggtcaataaacgggtgcacatgctccattaaccatagcaacaagcacacacaagatctttcctgagcttcctgtcacagctcatacaagatcttcaacgaaaagattacagtacatgaaaaaaagtcaaggattcattcgtccatatgtctatttcttctataggcatatgtttcctcagattcattagaaaaaaccttacacctaccacagtaatcagctacacgtaggaaaaattcacaacacccccaagacgaaggtcaggaaaccccccccccctccccccccttgataacacagattacagaaagctgcagtcagccagtcactcctactaataaccagcgctgagctacctttccatccctttctatacatcatcgaacaccgatattagggaggcgcttacaaacaccacccaaagagcaaagggggtttaaacaaaaacacaaacccatatttaactttgaaagggatagttt

SEQ ID NO: 428170 - DNA, 336 bp, Oryza sativa
gagttagtagatcgaaatggagtccactccgaggcctccgaaagcttacgccggctcgatcctcgccgggtgacaactgacaaggaggagggactgaaagtgaggaaactcctccgggattgtgctgctcgttttccggcaagccaagaccagatgatcctcacaccttaccaccagaaaactatcacttacaaagttacatatgggtttgtgtttttgtttaaaccccctttgctcttttggtggtgtttgatagcgccttccttaatatcggtgatcgatgatgtttagagaccgtaggaaaggatgaccattcgcttgttatcattaggagct

SEQ ID NO: 428171 - DNA, 165 bp, Oryza sativa
tcgattttttttttagcaagaggagattcaccaaaccactatggggtgactaataaggttgtaggccccgaagagcaacttatatgaacaggacctgtgatagatatagaacgccaataatggactcctactacggttgttatatagaacgaaacatgagcttgg

SEQ ID NO: 428172 - DNA, 379 bp, Oryza sativa
ctttgttttttcaaccctttgggtttttatttttttttttttttttttttttttttttttttttttttttttcaaaaagcccatatgacaaaaaataaaaaagggggggcatacattcaacaaaaaaactccggaaaacttccaggggttttcagggaacagcagttcaacttgcaaacccaacatgaatccggttcctttaaagaaattttcagccggaagtaaaatttaagagagataagccccctcccccccccttaaagagtttttaaaggctgttcgggaccaaaaaaacttttactttgccccccaagaaaacggggggccggttggactaaaacttggcccggcccacccccgagttcccaggggggggggg

SEQ ID NO: 428173 - DNA, 175 bp, Oryza sativa
  unsure (1)..(175): unsure at all n locations
gctttatttcgaatgctcctgactcctcctcgggtgctgttcctctcagagcccttgagctgcagtagcatcattcaagctggaccctnccagatcaaatcaaacccgctgggttggcctttcgtgttgagggattctatatctatagggaagtccatggcatcagttacttatc

SEQ ID NO: 428174 - DNA, 449 bp, Oryza sativa
tttgtttttttttttttttgttttttttttttttttttttttttttttttttttttttttttttttttttttgggggaaggaaaaaaaaaaattttatttgggaagggacaaattacagaattggaaacaataaaaaaatttttttgaaactatttctgaaactggaccacaaataaattttggttatttagggccccaaaaggaaaaaaaaatgcttaaaaaagggccaaaaaccgcaggggggccctcgggttggaggcgaactgggggaaaaaaagggtttggggcgggcattgggctaggggacaagctttaccaaaaacggggaaagggacgggataaacccttggggggggaaaaaaggctcctttttgggcctcgggtgaagggccccggttttggggggcgggtccggggggtacccaatggagggccccagggggggggg

SEQ ID NO: 428175 - DNA, 60 bp, Oryza sativa
tttttcccctcgctcctgtcaccagatccggagctggtcatcataagagtgggggtggct

SEQ ID NO: 428176 - DNA, 297 bp, Oryza sativa
tttgttttttttattttttgggttttttttttttttttttttttttttttttttttttttttatttttttttaattaataaaaaaataaaaaaaaagaaaaaaaaaaaaaaaaaaaaaaaaaaagaaaaaaaaaaagggagaaagagaaaaaaggggaaaaacattcaaaaaaaaatcattcctttaaaaagaaaaggaaaaaaaaaaggcggggaaaaaaagaactatcctaaataaaaaaaatggactggtaatgaactaaaaagaaggacagaaaaaaaaaagatccctatttg

SEQ ID NO: 428177 - DNA, 125 bp, Oryza sativa
ttttggatttttcaccccggtgtttcaaaactttctttttattttttttttttttctatcaatatcacccagaagtgcatcgacacaggacctaaaaacaaaccagaggacctactgccccctgg

SEQ ID NO: 428178 - DNA, 101 bp, Oryza sativa
tttctttctaaacccccacctccgcgagctcccagtgggttttcttaggaagaagcggggggcaacaccagatggtgaagggacccacctggcaacgcgtg

SEQ ID NO: 428179 - DNA, 66 bp, Oryza sativa
gaaaaagaaagaaactaaatacagggggacgtttacaaagagcttgcagagacagaaaagacgaga

SEQ ID NO: 428180 - DNA, 475 bp, Oryza sativa
ttttgttttccggcaaaacaatggtggcctgacatagatttgaatcatacaaaggggagagctacatcatttacatttggcagagtcaccatcagaagattcgccagattggctaattcttggagaagttaagagcaaagaagagatttgccttcaattctactacatcagtgccacgagacaatcatccatacaaaatgttcctgaaccactagaagaagaatggcagctggtagctaagacagtctacaatcttacaaggtcctgcctagctagttcccggagcaattcgcttacgcattaatcccatttcaccctggaaattcaagaatcaagatccatgtcgcaatcaaactaacagtcgcaacgagaagttagagatgttgtgattcactgctccttccaaatccttccggtgacacgcagtttgagctccttcttgtcgccaccggagaagaacaaggccatgttccgc

SEQ ID NO: 428181 - DNA, 489 bp, Oryza sativa
gttaatcgatatcaagggcattactcttcttgttttcaagttcatgctgaaattactccacggagcagacagcagagaaatcgatcccagatgacaagcaagattatcgcacaataacgtcttgtttggtaacacaatgaaatcatgatgtaaaaaaaaaggaaaccaataaattagaggaaaacggagacccacagattatcacatttcttgcattctgattattaatcacctcattactcttctttaaccacctcgcttctgctcttcttgcccttggcggcggcgtaggcggcgccgtggaagtcgaggaagagcgcgagcagcgacgcgttgaagacggcgttgaacgcccacccggccatcccctcgcacccgccggcggggaagtgccgccacagcatcaccgccgacgccgcgaagctgaagaggaactgcgcgatctgcagctccgtgacggcgcgcttccaccgcggcggccaccggagg

SEQ ID NO: 428182 - DNA, 53 bp, Oryza sativa
ccaccactcattgcgctccacaggccggcgaggtcggggaggcttttttacaa

SEQ ID NO: 428183 - DNA, 470 bp, Oryza sativa
tttgtttttttttttttttgtgttttttttttttttttttttttttttaggaaactaaaactagattcttaaattgggacacgcaaatgcaccaacaaggtattccgatacatgttattcaagcaataagggaagcattaaaatttttccaagaaaaaaacttctagggaaactgaacacatagagatagatcaaattggggatagcaaggtgtagcacccacccaataaatatgggagcagagaaaaaagggcaatggcccccggggaggcggggcaaaccccaaggggggggtcggagtcgggggccggcttaaccggtcttctgggcgaaggcgttttcgtcggactcctcgacgttgtcggggttgtcgtccttgggcttgggggcgtacttcttcttgacgtcgccgggtggcttgcctatgaacaccagggtactggtgggcttggggatctcgttcagcttgg

SEQ ID NO: 428184 - DNA, 194 bp, Oryza sativa
ctcctctcttccgatctgcatctgcttctcctttccacacttgtgcttcgtgttcgtcgtggtctcttgtttcttcttcttcttctagatttgattttctttttttttcttcccttttcgcggcggctaggggccgaggggggaggcactctctctccttttcccccataacttcactacttcaccctcaccct

SEQ ID NO: 428185 - DNA, 464 bp, Oryza sativa
tttgttttagtcaaattttggacataattaaaccacatgaaagaaaaaaaagggtacacgccctcaaggcctttaaatccactgctgattacatgtacactcaattgtcagctgcacaaaaagtttataactcaagtacactagtacaaccttttcctctgtcccttttaattagtttagcttggccctttttattgacgttatttatctatgatatgagtagagggaggcaaccagttaatcttgtatacttacattacttttttttttcttggataattcacccagacggcgatccatggattgagagacagactgcaggaaggcagcttcatcaccaacatcgtcttcaacctcacggatgatctcctcgatgacagactccttggtgagcgtctccctgcacaagatgctccccatgtcgaacgcggcgaggcccgagtcgacgcccttcttgagcagca

SEQ ID NO: 428186 - DNA, 436 bp, Oryza sativa
tttgtttttttttttttttttgttttttttttttttttttttttttttttttttttttttttaaaggggattccacattacataacccacatgtccccccattaaaggaaaacaaaagttaaaccatcacccctaaagtttggcccaaaaaataatttttttttcatggaacccataacaaaaaaaaagggttgggggggaacaaaccccccccccgggggaaaccggggggaaaaggaattttcacatccccatcggagggggggttcgaaataccgggatgccccatggtttgggctccggaacggaaacacccatcccttggagctccggggggagcccaacctggcccccgagccgcgcgagtttgttaagctcccggttccggaccccccgggggaggccctacccctcctcccaagaaggaggggggagc

SEQ ID NO: 428187 - DNA, 190 bp, Oryza sativa
ttccttagatctcccacctcgaaccctagccatggcgatcgcggtgcgcgccctgcgccgcatccccctccacctcgccccctccctctcgcgggccttctgcgcgctctcgccggccgcccccgccccggccgctgcctccgccaaggtcgccgaccgcatcgtgcgcctccttgccatcgacccggac

SEQ ID NO: 428188 - DNA, 453 bp, Oryza sativa
ttttgtttttttaattttttggggctgtaaaaacacatttaataaaatacaagacacaatgttcagcaacagtaattgcaaccatcaccgaagcagtcgactaagcgtagagttgaacagagaggaagaaaaaaaaggaaaaacgtcaacaacaacaacaacaacaacattgatgatgtttcctaacaatggtcagagcagatgaacaattcaattcctaccacaaccctgcctccggcggcgccggcaccggagcccctctcctcctagctcttggagaaatggtgcttcttcccgccgccgccgccatcgccgcccttgcctccgccgccgccgcccctattgccggcgtgcgccgtcgtgttcttgagtatctggcggagcgtgttgttctcgttctggagggtggagacgcgctgctcgagctcggcattgcggagctcgaggtccttg

SEQ ID NO: 428189 - DNA, 125 bp, Oryza sativa
cccgttctcgcctcaaactctatgtgagggaaggggggcagtttatttaccagctgagaaaccaagaagcagcagcagcagccatgcgtacgtgcttcctactgctcctcgttatgttttggcgg

SEQ ID NO: 428190 - DNA, 88 bp, Oryza sativa
gttactaccccttccaacctattcctcctatatctgggacggggattggtgatcatgtccccaatcacccatcgtccaatccttcatt

SEQ ID NO: 428191 - DNA, 191 bp, Oryza sativa
  unsure (1)..(191): unsure at all n locations
cattatgantcggagccagggcggcggccgtgtccggcagcattgcaagtactactgcggggggggaaccagcgcctgcggtctcgtcaaccaggagatggccgtggcggcgccggcgacttccgacgacgactgagtggtgctcctcatggagcttcttgatggcgaggaggagatgggggacgactact

SEQ ID NO: 428192 - DNA, 452 bp, Oryza sativa
ttggtttttttttttttttggtttttttttttttttttttttttggcgtcgtcacatttttttataataatggaacaagggcatacttacaagattactggggtttggttatataaaacctccaccgagcaacaggttttgattcatcatcgggggggttttccaggattctagggttatttaattggtgacgaaccaatttagggtcttccaaataaaacaaaaaaaagccgggcccattggggggaggggagaaaatgctaactcacgatagcaaacattacatggtttgaccagttccctgaaattttacattaaactttttagggtactagacatatacaggcttgaccaaaaaatagcagaaacccatagggccctcacattggtcatttttgcacacatagggataaagcaagcaatgccaaaagatactggggggaacgggggga

SEQ ID NO: 428193 - DNA, 295 bp, Oryza sativa
tttatgcgtccttcaagaggtacttacactggggggggagctcattacatcgctcgactataaggctaatcaaacgcatagggttgcgaaatgaggagcggtcgtatgatcgatcatatcggttctcagttgctgtcttataatctgttccattagctgttccatgggtgatccctagataggatctcacttaagagggagactaatggggactcattcctagacttattactcgcaatcttatgcttattcgtgaagatgtacgttatgtttgggtatattgattggataatgt

SEQ ID NO: 428194 - DNA, 355 bp, Oryza sativa
cttgggtcccttacccggagaggggctaacactgtgatatatatccacggatttccataatttactctatgcacatcaacctatttccctaatttctacaacaattcatcgatttattcatatttattgctcccacaaggggctgtacacttgctcatcaatggagccatctccatagtacaaatgctcgtcgtcgtacacgcaccaactcgccgccgccggcaacgccaactccggcggccagccgtacccgaacgccccgccgccgtagccgtcgaggtcgtcggaaaacatgtcctccagccgactgatcccagctgctgctgcgccgacgtcgacgctcgccggcccggcc

SEQ ID NO: 428195 - DNA, 443 bp, Oryza sativa
tttgggtttttttaattttttggttttttttttttttttttttttttttttttttttttttttttttttttttttttttggccaacaccgggaacttatttaggaaccttttcccaaaaacaaaaaatgttttggggccgggggtagggaaaaaatggaacaaaaaaaatccccttttttttaggggggaacccactttggtttcggaccacccaaaaagatgggggccccctgcctgttttaaaaaaccatgcaaagaaaagtttttttggtttaaaaagaaaacgggttagaacttttggacacttggggggttctatggggggggatttggccttgaacaacggggggcccttctttgggttggaccaaggggcctttaggggggggtccctggggaacctcctgaagttgcccaagggggcccacaacaacatcccggg

SEQ ID NO: 428196 - DNA, 214 bp, Oryza sativa
ttacttatcaaacggaccattccacttcactccatgtcagacctcaacatattttcccaaaagagggcttcttttacaagtttacaacctcaacttttcaggtgccaagttctacccccccctcactttacattttggattagacagggtttccccctccccacgaaatcctttttttcgcatccttcagggccttataaaacactatttcccc

SEQ ID NO: 428197 - DNA, 223 bp, Oryza sativa
tttgttttctgattttttgtgttccaaaaaaaataaacttgattgttaaacctcttacatatggcccattgcaagcagatgttcactgcacataaaacgagagccattcccgtgggcttaccttaacaaattctaaaactaggtctgtcaaccgcaaacttgcaaaccaccctttggacgaggttcactaaatattgggacacaccttggtaaccgtggaacc

SEQ ID NO: 428198 - DNA, 290 bp, Oryza sativa
ttgtttctgatccctgtgttaaaaaccccatcccccaaactatcgagcccttaatactctaacatacaaaatctaaattccaataacacaaaaccctgtggcaacatcctctaataaaacgaaaaatctaacaactgtgtatatagacagagacatgtcaccttttttttttccccagcaccatcatggaaactggaacgggctctacatcaaagaaaaggccgacgaaactctgcatatggtgggttacagagaatcccttgaaactttaagaacgcatcttcctacag

SEQ ID NO: 428199 - DNA, 416 bp, Oryza sativa
ggttcttgacccttgtgttttcaaccctccttttttttttaaccaaaccacagcatcgtgaattttttgacttattaaacggggcatttcagtttactacatgtaagaccttcacattttttcccaaaagggggctacttttacaaggttacaatttcaacttcttaggtgccaagattcacacaacctcaactttacagcttggattaaacagggtttccccctccccaggaaggcctttttatagcattcttcagggcattatagaacacctttccacaggtgaacaaactaacaaagcaacaccctgttggggatctttcgcgcattgattgggagcatttttgggcccctgtgctaagggtaagctcttcacatatttgcctaactgcaataatagatttatcgcccttgcc

SEQ ID NO: 428200 - DNA, 424 bp, Oryza sativa
ttgttttttgattttttgtttttttttttttttttttttttttttttttttttttttttttttttttttttttttttttttttttttctttcttttgctccgggtcgggtggcggttttaaggccacccaaaaaaaccccggggcccccaccggggaggaagaccctagacgcaggcccagaaaaacaacaggagggggggggcgggggccagcaaaaacaaggacgccgcccccaagcccggccccaccccgggagtgggcccggggagggggccggcccgcgggggggggggcgggcggcggcccgaagactccgccggggggccccggcccggctacccccgtagaatgggcggcgggggggggggccgcccctctgggggggggggggggacaggcccggtctccgcccccggcaacccc

SEQ ID NO: 428201 - DNA, 269 bp, Oryza sativa
ggaacacctttttaaggttttttttagcccccccgcaaaaaccggaaccaaacaaaaaggttttcgaggcccgggggcccctaatgggctagtttccccaacagggcccggggaccagagaaatttttaaaccaagtcttagaaacccccgggcggggtgcccagggctaatttgggttccccggcaaaatccggctgaaaaaggaaacccccggggctttaatttagggcatccggtgggccaccccctgggggggcaactttcccct

SEQ ID NO: 428202 - DNA, 425 bp, Oryza sativa
ttttgtttttttattttttggggtttttttttttttcttttttttttcgaaaaggtgattcagacgctctgggcaaatagcacgtgccaggatgttaaacaaatcccagcttttggcaaaaccaaaattcaatgggcgccggattcaaaactgctctaggcctaatattacatgaggcctttggttttgccggagattttgaatccacgggcccgggctaaccgtaacggaacaatagaccgatggttgaaggggtcctctcgcaacaaccgaaggtcggctcccgagagatcaattccgggcgggttaccacgggccccctattgaaaaaagtaaacggttgaacttgcccttaggaacgaaggtgtttcgttgccgctggactcctgaccacccgggggcttttccccgaggaagctgattaa

SEQ ID NO: 428203 - DNA, 108 bp, Oryza sativa
cccttctagcttttgatatcaatgaaatattgcaattggtctggggcacatcaaaacagctcaagtggatttctttccccctcccatttttgctccaccccagggtcc

SEQ ID NO: 428204 - DNA, 260 bp, Oryza sativa
ttgtttttttattttttttgtttttttttttttttttttttttttttttttttttttttttttttctttctttttttttgggaacttttttcatttttaccaaaggaaaaaaagagggccacccaaaatccccaacaccccacaacatcagcccaagcgtcccccaagcccgaaacaaaaacaaggggggggggggggcaccccttcgccaacaccagcacgcgccccgccgggggctccaaacccacagggagaaaaac

SEQ ID NO: 428205 - DNA, 308 bp, Oryza sativa
ttgtttctggagattaaacgttctcaaacgaaattatgcgtttccaaaagaagcccaaaataggctaggttagttactgctacatttttttgctgcagaagactagtaaaatctatctaaatccgtgatgccatggtgcaacaggctggggagcttctgcattatgcggaccaagaactccatgaagcagacggtgcgcagcgcggcgtgctgccccattcgcctgtccagctccttcgcgggcttcagggcggcgagcacataggccgccaggtcacggcgctgctgctcgtgctggctgagctcgc

SEQ ID NO: 428206 - DNA, 320 bp, Oryza sativa
ttttgtttttttattttttgtgtttttttttttgtcttttttttgggatgatactggtttgggcacattctgctagggccaaaggtggttatggtaaacggcaagtggggagaactgcgaacagaaagtcatggaagggaaacataaggaaagggccccagccagggatttcccggaaaaggcctttgcatctacaatcacaggcttcaacagtagggatctttcccaccaagcattttcttcggccgaatatatccaggacattttctatacctgaaatgctcacttaatgaaccaagtgatggaacttccgcttgaag

SEQ ID NO: 428207 - DNA, 502 bp, Oryza sativa
ttttgttttttaattctttttgttttaaatttttcctttttttttttttttttttttttttttttttttttttttttttttttttttttttttttttttttttttttctaaaaaaaaaaaaaaaaccaattttttttaaaaaaacccctttttttaaaaaataaccccccccccaaaaaaaaacatttggcccctttttttttggctttttttttttgaggggttttaaaaactaaacctcccccccaaaggggggggggggtttggaccccccctcccccccccaaaaaaaaattttagggcggggttctttttaaaaaagccctttttaaccccaaggggccccccccttttttttttcccaaccccccttatttagtgtggggggcccaaaaaacctcccccattttttcccccccccccctccacacatttttttgccccccctttttaaaaaacctctttttttttgagattctttgaatttttttttcccccccca

SEQ ID NO: 428208 - DNA, 318 bp, Oryza sativa
ttgtttttttatttttgttgtttttaatttttttttttttttttttttttttttttttttttttttttttttttttttttttttgggggaaggaaaaaaattaacaggtttttttagggggggccccccttttccattatcatagggattggaccagaacccggccaattcaaaaaaaacattggggggccccccctggggaggaaaattggaaaggaaaaaagttttcctttttcccccgggcccccgggtttatggccaaaggattggtccccccccggcccccggtccggccttggggggaaaacggggggcatt

SEQ ID NO: 428209 - DNA, 414 bp, Oryza sativa
ttgttttttgattttttttgtttttttttttttttttttttttttttttttttttttttttttttttttttttttttttttttttttttttttttccatagaaaaaagggtaaaggggggcccttttgggcccccctttttgtcccgggtttccaaaggaccccccccccccaaaaaaaaaatttttgggggctttgcatggcccctttttgttggggggggggtttttccaggcccttacccccccggggggttttaccctttggaggctaaattttttttttggggggaaaaaaaaccccctgtttggggggaaacaggggggggttaaaatttaggaaccccccccggggaattcccccacggccccccttggggggggggccccaaaaaaacccccggcccttttttttt

SEQ ID NO: 428210 - DNA, 398 bp, Oryza sativa
ttgttttttaattctttttgttttaaaaactttttttttttcccaagggaagacaagacatgataaacttttaaagaaatttacaactgcacttaacactgatgatgtggtgaaaggtaaatctttacagtacaacccctttacaaaggaagtagagttgaaaggaacagggaagactgcaaatccatctccatgtagtcgtttttttaagatggaactacaaccagccttttttacaccaaaggaaaaacagagcctaaaatctagctgactgaagtaacaagacctataccccttttggcaacatcacaagtcgcaacggaagcttttaactggccagcttatggatcaactgaagagctcagatggtttccctcaggaccaggttgtttcctaaa

SEQ ID NO: 428211 - DNA, 481 bp, Oryza sativa
ttgtttttttttttttttgtgttttttttttttttttttttttttttttttttttttttttttttttttttttttttctttggttcaaagggcctaacatccaaacaaaatttagctgccccgggcccttgggtaatacccccccaagaactttgaaacccaaacaagggctttgtcccccttttagggcacccccccaaatggggggggataccttaacccttgaagccttggggggtcccccttcctttgggcttttaaaacttccttccctttgggccccccaaagggttggggttcttggggggccccccaggggcaggaccaaaggggttcactgttccccgggggttcttaggacccctaaggaaaaccgtgttctggcccaaagggggccggagccccaccttaccaaaggtaagggcctcccccccagttttcacattgggggcccttcggggtttggggaaccggggggggg

SEQ ID NO: 428212 - DNA, 347 bp, Oryza sativa
ttttgttttttgatttttttgtttttttatttttttttttttttttttttttttttttttttttttttttttttttttaggccaaggggtttgcccttaaaatttgggcgttttcgaattatttttaccccccttttaaaaacccggaccctggtgggcttatgttttaccccaaaattggggggttgggccccacattgggcccaccgggggaaggaaaccccgacaggaggggtattagcaaaggggggatggcccaagaacacttgtgggaatggttaaagggggaaacctaatctttttccagagaaacccggggaacctaattcccggggtttggggaaaga

SEQ ID NO: 428213 - DNA, 527 bp, Oryza sativa
ttttgttgaaacaggacacagggatacagataaaagtaaaataaaatatagaatagaacaaatatagattccacgaaagaatgtacagatccatatcgtagttataatacttttgccaaatttgtcaatttgtaacttatcatatagatactatccagatacagattaacatgataacatctcggcacactagataaatattggaagttatagttttcactttttggtcatcctaactgcaaatttgaagagctagcataaggtaaactttacccgtacataaatatgatggccctgtatggtcgagaaggttgagtatggatttcagaagtcagaactactccaatctatctcatttcatccatttccgggacagagtctatgaccaaatatacctaattgacagacataatagactgatatatactcatcttaatgctgattgctcgcaggtcaagccgcaaaatttctaatatgcagctgatgattactggactagttatgcctgcatgccactgtaatccttt

SEQ ID NO: 428214 - DNA, 504 bp, Oryza sativa
tttggtttttatatacgaatggggtactgataccacctcacttctcaatttcagtccaatcacgacattcacagatcggcgaagatcaaacgcacacagttacaccaatcgaaattaaaccatgtttcactttcttagcacctcatttttcctgtttcctaaactcatctgtacattcacctctaaacaaacctgtatacaaacacaacatcaatcatctggtaagagaaggcgaaattcgcgggcctgacaggagagctttttcacttgttacactaggacagctttgttaatctttgtactggttccatgccgtttctccagacagccagagattagtttagtcattacacttttgccttggttgatggaagaaaataagctattatctcaggtttttgggatggtacgcgaagaaactccatgcaattgtttcatgaacccaaggaagctgagttttcatcaggatgtctgatccaatcttggagaacacatgtaggggaa

SEQ ID NO: 428215 - DNA, 258 bp, Oryza sativa
ttgttttttttaatggtttgtgttttttttttttttatcctatatatttttaatcattcttttttttttcacataaaaaacccttatttggggggattccacaccaaaactaccagcaagcgatgctgaccaccgcttttcttcccaagggagggtttctgcatgctgttttccttggaattccggcacacatatgttgcccattgtaccactcgctcataaattctttccacagacaacacgagatcagcctgattg

SEQ ID NO: 428216 - DNA, 358 bp, Oryza sativa
ttgtttttagcatgagaatggaaggcaaaccatgccagtaattggaattggaaagttgtatgaggaacatccatcatacatccatacaggtaaaggtaaagcaaccactgtatataagtatatattccttcaactaacaacccaacccaagccatcccaaaagcacaccgcggcagttccagttcaccccttgtggatcaaaagagctagagcaacagcacaaggcaaacggcctaaattactaaatagatagaatatacgaatacgaccccaaaatggctccagtctccgtcttcttcccctctacagccaggcaaccagccattcatccatcttcattcaggcttcagcgcgggta

SEQ ID NO: 428217 - DNA, 284 bp, Oryza sativa
ttgttttttgattttttttgttttttaatctttttttttttaaaatttttttttttttttttttttttttttttttttttttttttttctctcttttaatctaaccacttcttcaaaaaatttctacccacaaaacaccaaccacaaacaccaaaaaaaaaaaagaacgggaaaaaaccacaccaccccccgtaattccacaaaccaaagacccaacaaaaggccaaactcgcaaaacaaaccaaaaaaatggagccccaaaatcccaccccccccaaggcccc

SEQ ID NO: 428218 - DNA, 524 bp, Oryza sativa
  unsure (1)..(524): unsure at all n locations
ttgttttatcattcgaatcaggctttctccaattgacaagggctacgacactggcattgacaagaaatcttcaagtggtttgcacaagacaaacatacaggaactgggattctgtggggtgctgcaatgaagcagctgctttgccttttattactactactaaatactaatatttggaaccaggtttgatgaattattctactgtacctagtgagtttgaactatgaccagtacgctgtcaaagcagcagcatttgccgtttctcctttcagtttcttatcaagaggagctgaatagtaacggcaactggaagcttaatgcaggttactgaagaagcaaatgccctttgtcaaatttacagatcaatgtagacgcgcaatccatcacgggctaactgcacatntatnccctcccttctggaccactcttccaacgtttcattgtccttgtgatggcccttttatgagtcatnccatgagcaatgccttttgggcaatcctcttacagcatcagtgctgatccac

SEQ ID NO: 428219 - DNA, 413 bp, Oryza sativa
  unsure (1)..(413): unsure at all n locations
ttgttttttttttttttttgttttttttttttcatatttttttctttttttattttcttttttttctttttttgtttctgcaacctataagattatgcatcaatctaagaactgtgctataaactgaccacgttatataaaaactaaataaattgaaaattgcatctttcatgtacatataaataattttgcatagcttaacaattcagatatactgcagatttctcttgcttcgcggaagaacacggagatatcagtgtaatatctggagtccagatgcccaccaattcctgacaaagcataaatgtaaagataaatctatttgtttggattaattaaattcaagatgtggcaaaatcgacttaagagttaatntnacaaatcattaacactggtaatatgcaatttgagat

SEQ ID NO: 428220 - DNA, 419 bp, Oryza sativa
ttgttttatgaagcgaatggggctttatccaattgacaaggtctacgacactggcgttgacaagaaatcttcaagtggtttgcacaagacaaacatacaggaactgggattctgaggggtgctgcaatgaagcagctgctacggcttttattactactactaaatactaatatttggaaccaggattgaagaattattctactgcacctagagagtttgaactatgaccagttcgctgccaaagcaggagaacccgccgttactcctttgagttccatatcaagcggttgctaataatcacggcacctggcgattaaccgattggcccggtccaatgaaatgccaagggtgccaaaacccccttaagggtgaatacaccaagcccttaaaacttgctggacatcaatctgagatttgag

SEQ ID NO: 428221 - DNA, 390 bp, Oryza sativa
  unsure (1)..(390): unsure at all n locations
ttgtttttttttttttttttgttttttttttttttttttttttttttttttttttttttttttttttttttttttttttttggttttaaaaaaagagagctggcccaatcttggggtggaaatcgtccttgccccccctcccatggtgtttatttatccaacgggggataaggcccacctaaaaattggtgggggaaacgggggttttaatttttttattggtgnnncaccttttggtgaatgggggggtcactccgggccacaatttgaggtgatttttggaaacgaaaaatgaataaccccggccccccaagggctggggtaattttttgatctcaagggggggctttaaggaggaaccggggggggttccgccccccccccgccccc

SEQ ID NO: 428222 - DNA, 383 bp, Oryza sativa
ttgtttttttttttttttgggggccaaagggggccaggtaattatttttattaaatctgggggtggattccattttattaggcaagacaaattttggccccaagggttccaggtccaacccctccaaaagggatgggttcattagaagccattgggggccctttttttgggattgtgacccccacttgttcccaattaattattattgcccagacaagggttgggacctggacctggaagcaacatggttattgtttggccttccaaaaggtaaccaaattcctccaaaccaaaagcttttagtggttcctccattgcctttgaaaaatggccattggaggggcttgcccctaaaaggacctttgggctgtttgcaagtcttg

SEQ ID NO: 428223 - DNA, 384 bp, Oryza sativa
ttttgttttttgaatcttttggggtataactctttttttttttttttttagggaaaaaacacccagtttatccccttttggggaggagaaataaagaaccgacttcatggaattaccctacaaggtacttacattttaccgggtaatttttacttttttatccaagcaacaatgagcttaaattgccctcttggttgggaccccaattaacccaacccaggtttgcccttcttggttggtcgatgctttggaggtttgagctcctaccagaagcacacgggccaccacccggggggccccggggccgggggggccccccccgagagggggccctagaggcccaagggggccccccggcggtgggttttccggcggggggagacc

SEQ ID NO: 428224 - DNA, 507 bp, Oryza sativa
  unsure (1)..(507): unsure at all n locations
ttttgtttgtgacaactgaacgaaatttatatctgaatagtatatttgcaagttngaggtatataaacaatgtattcatcccctcgccgaaaccaatgaacactttctacttctgtaacaccgactacagaaaagtatgccatgacgaacacaaaattaataactaatcaattatttctagaatgtgatacaaatgattcggtatatttgtatgatgttatgctcttactattgaatgtctaacttgcctatggaaaatttctaccaggtgccactacttaagaagattcagaagactgtcttgggagatattatctcaaaatcaaccgcgaacaagatcttgagggagcacccagaaattatctcaaaactgtagcagctctgcatgcgtctctctgcttggtagctgcttgtcttggtgttggtggactattcatcatcagagatctctgcacttnctgccacccactttcaaacacccccagatttttgtctttgagcagttgt

SEQ ID NO: 428225 - DNA, 413 bp, Oryza sativa
ttgttttttgaatttttttttttttttttttttctttttttttttcttttaaatttttttttttttttttccccttcacccacaaaaaacaaacaaaaaaacaaaaaaaaaaaaaaccccacgccaaacgaacaaccagcccccgaagaaaggcagaaaaaacggacaaaccaggggaaggaatccccgaaggaggggaggcatcaaggcccgggcgagatcggcccaaccacaccccggggggggccccgaaggaaccccccgggaccccaacgccagctgccccatgccgggcaaagaagggggcccgcggggggggggccccgggggccccccacgggagctccgggcgggggccaggacacccccccggaaacgggaggcccccggcggaggcccgagcgacccccccc

SEQ ID NO: 428226 - DNA, 431 bp, Oryza sativa
ttgttttttgattttttttgttttttaccttttttttttttttttttttttttttttttttttttttttttttttttttttttttttttttttttttttttgggggggaaaaaaaaagccccccatttttttatctttccccttccaccggatgattggcccccgctaaaccccgggggtcccttttttttttccccccccaaaaaaaacttcccccccaacccaaaatgcccccccccagggttaatgacccccctaccccccccccccccccctaaaaaaatcctccctaatccccccccaaaaccccgccttttttttcaccggtccccccccctaacaaggtattaatcccccttatccccccccagggccacctacccctactcctttacccaatccccccccttttggtccccaccccccccccc

SEQ ID NO: 428227 - DNA, 321 bp, Oryza sativa
ttgtttttttttttttttttgttttttttttttttttttttttttttttttttttttttttttttttttttttttttgggcccaaaaaaagttttttttggaacggggaaacattaattcccccccttttggaaaggtcagggaagcatccctttttaggttttttcccctccctaagccctaaaaaatagagggaactgggtggaacccttgcccaattggatggttttttcaaagatttttggccccctggggggatgaaagggggctttcccctttttggggggccctgggaggggcgggaaaaccctcccagggggg

SEQ ID NO: 428228 - DNA, 519 bp, Oryza sativa
ttttgttgttttaaggattcagctgccaacacagtttgtttcacatataagaaagtagtgcataaaaaagggacctagaatacaaatgtggaccaaaactgcacaaaaacagtaacgaaaaggtgatcattacaatcttaaaatctggaaacaattgtgaacgatatctgaaagatggcaagttccacattataagctgaatcaaaaacatcaccggcatcccacatccatatttacattctttgaatcgaacacatcatcagatgaatccctcggcattctctggcttctttggagttttggtactgttcacatcagtagtggccgtgcagacaggaatcgttgcagggcttcctgggatatgggttttcgacaattcgctgtacgggttcctgtgcttttcacttttcgcggccatcgtgaaacttccaggtatatcggccttaggtaaatcagcctcctgatgcttatgctccttcccggttatttgggcattttcttgcgcatgggctgttggga

SEQ ID NO: 428229 - DNA, 452 bp, Oryza sativa
tttgtttgttgagaatgttagcgggcattgcagacacttttcttcatgtgctactcattaagttatcccgaatacaccgggagcttaatcgccatagcatcccaaagagcaagaaccttggcccattacgagtccggtcagtcctgatacacccagattgattgttgcttgaagagaaccacaagcacggatcttacatccggtttgccttactactgccctggcgaagccccagaatgctgagcacagggcataacagcacacttatgtggtccagatgctttgatttggcctggcctggtcacgtgtggcagactactgcttcaggtccaagcctggtggctactgactgcacactggtgcccgatgggcgctgaccttctcccagatatgccgttccgaaccctttggatcttgctagtaggatgtccaaagaaggtacagcctcagtt

SEQ ID NO: 428230 - DNA, 416 bp, Oryza sativa
tttggttttttgatttttttgtttttcaaaccttttttttttttttttttttttttttttttttttttttttttatttaattcttttttttcaacccaaacaaaaaaaacaaccaccacacacccccaaaacaaaacacccaaccaaaaaaaaaaaaacccaaacacacccccaaaaaaaaaacccccccacaccacacccaccaacaaacaccccccccaaccaaccacccccaacaaaacccacccccccccccccccccccccccccacccccagccccccccccccccccccacccgaccacaaaaaaaaccccacaccccccccgcaccgccctcccccacccacccaccccccccccccccccccaccccaaacccccaaacacccaccaaccacccccccccccccccc

SEQ ID NO: 428231 - DNA, 304 bp, Oryza sativa
gaaattattctttttttttttttttttttttttttttttttttttcctcctcagtttttttttcctttaacggtcaaaaggacaacaccccctttttcaaacattccccccgcgcccccgacaccccccccccacccccaggcggagaccccaaccccgaccccccccgggaaccccggcatcccagcccaaaaccggccaaccttcagagttgttcccacagggtgcccccactaccccccgggtaaatcatggtcctacctcccccccccaacataaaatacttccccacccatcacccccc

SEQ ID NO: 428232 - DNA, 411 bp, Oryza sativa
tttggttttttttttttttttgtttttttttttttttttttttttttttttttttttttttttttttttttttttttttttttttttttttttcccaaatccattccctttaacttttgggtataccccaagccatgccaggggaaaaaaaatctcctttccgcttgaggccccgacctttctttgaaaccagggggggggattgcccatttttgttttttccaaaagggccccaaaaaagggttggccccaaaggggctttaaaattaacccctccccttttacccgcccttgaaaagggttccctcccaggggggtttaaggccccttttttctaaattttccccccaggtttttcctttgttgtggggggggcttgacaaaaaaatccccataaaatgggggggcttt

SEQ ID NO: 428233 - DNA, 145 bp, Oryza sativa
tttttatacaaaaccaggaggattaaacgttctcctcatctctttgttagaagtgaaaaaaagaatattatgatccaggaaaactttgtcacatgccttcatgtaaaacaccaggaagctgctgccgtcataagcgccccactct

SEQ ID NO: 428234 - DNA, 236 bp, Oryza sativa
aaaaaaaacccccctttatttttttttttttttttttttttttttttttctctttttcaaaaaaaaaaaacccttctatttatttccccaaaaaacactcatcttccccccccctccccattttccctcccctaaaaaacccctaaaaacttaatcacataatcccaacaatataccctttcccctcctcattttttccaaaaacttccacttcccctttctcactcccccccccc

SEQ ID NO: 428235 - DNA, 276 bp, Oryza sativa
  unsure (1)..(276): unsure at all n locations
agagagagaccccncacatggaaaggtacagcataggtagcaccgtatcaccatcacaacacacaactttagataagctgacatttcatccagacttttcgtttcatatgtgtgcagcgaacttgtcaagtacagcggcaaatcaagagcgtcttcctctcattttcacgggaagggcgcgtggcgcttcatctcggtggcggtgaccgtcgatggcgaacccccttgccgtgtaggcccccagtagtcggcgttcgggttgatccactccggttt

SEQ ID NO: 428236 - DNA, 165 bp, Oryza sativa
  unsure (1)..(165): unsure at all n locations
cccccttttttttttttttttttttttttttttttttttttttttttttttttttttttttttcttttttttttatatatccacacactctttttctttaaactttttctataaaaataaaaaatacccaccccaaatacactcttcccttaacatnataacaac

SEQ ID NO: 428237 - DNA, 175 bp, Oryza sativa
ccccccactttttctctattaggacaaaccctttttttttttcccaaacctacctcttccctcagtaaaggtcaaaacccccatacactgctaatctgcgaactattattgctcataatggaaaaaaacaatttctacattctagacagaagggaaggaatgggggttgttggtc

SEQ ID NO: 428238 - DNA, 136 bp, Oryza sativa
ggacacagcactgcattcttaattacgtacacaccacaagactggagaggaaggactacataatcgtacagacgaccatagaatgttctcaaaacatactgtgatacttaggcactaatcaaaaactaaggatgca

SEQ ID NO: 428239 - DNA, 78 bp, Oryza sativa
ggatcaaaaggatgatgctaaatattacatcaatctttcaactcacatacagcatcatacatgaatatccatcctaca

SEQ ID NO: 428240 - DNA, 148 bp, Oryza sativa
gatgcacgcaggcgtacagcaaggctagccatcatttagtttgccgccccaccaaaaattaatggggaaaccaagggacagtataagaaagaggaaactcccgcagaatcaaaagaacagactccatagggacgttcaaaaaaagaaa

SEQ ID NO: 428241 - DNA, 168 bp, Oryza sativa
tgcacgccagcgcttcagtcatggctagccatccttttttgccgccctccttttttttttttaaagctttacaatctcacatccacggtttgctatctgaatggctagttgcccatttttttgtacttatgaatatattggaggtgctcataaacaagccaaccctag

SEQ ID NO: 428242 - DNA, 85 bp, Oryza sativa
cagtaaaaattactagaagattcccaaaccaacaaagagaaaaagagaaaaccataaagacaaacacaacaagaaacgaacaaaa

SEQ ID NO: 428243 - DNA, 106 bp, Oryza sativa
gacagtcccgggaatatagattatatgatggtataatatcgaagggagtgcacaatcaacttaacaaggttatacaagcacagttacggtagaatcaaatcccaca

SEQ ID NO: 428244 - DNA, 91 bp, Oryza sativa
ttttatagctttacaattttacattcacggagaaaaaccacgaaacacctttatacaattttttgaagcccataaagtataggtggacagt

SEQ ID NO: 428245 - DNA, 102 bp, Oryza sativa
attatgtcgctactccatgttcagaaaaattgttttgataacaatattcacaacaagtcaacaacactttttttggattctttaaccattctaaaaggagca

SEQ ID NO: 428246 - DNA, 159 bp, Oryza sativa
ttagtttggcggcctttctttttttttttttttttttttttttttttttttttttttttttttttttttttttttttttttttttttttttttttttttttttttttttttttttttttttttttttttttttttttttttaaataaaaaaaacaaaaa

SEQ ID NO: 428247 - DNA, 172 bp, Oryza sativa
tagtttggcggcctttctttttttttttttttttttttgaggcagggagcaacttttacatgacggggagttcttttctctgttttttaccttgtggaaagtaaaaaaagggtctatgggggaaaagttaaaaattggaattgcaaacttaaccaaacagaccaaacgggtg

SEQ ID NO: 428248 - DNA, 169 bp, Oryza sativa
gttgaggcaatgagatccataaggcattatatcatgaataccattacgactttaggagggcaataattaaccatacacttgacacatccattgtttcgaaacaatcaatgaccataagcaaagcgaccagcatggctgaaaagtcaaagaagcgcacgaacaacatgta

SEQ ID NO: 428249 - DNA, 279 bp, Oryza sativa
  unsure (1)..(279): unsure at all n locations
ccgcccttctttttttttttttggagcacaaatttacatgttacacccacaccctacacccatgcataataatacatcctatatacgtacgtacatacatacccctctcgatcacacgcaccatcgatcgtacaaagttgcgtacatacatacgtacacacatatacggcataacgcacgttacattacatacattaattaaaaacttcgtaatttaatttaaaataccgtagntttgatggccattcttcttaatgggaaccttgagggcttggtgag

SEQ ID NO: 428250 - DNA, 126 bp, Oryza sativa
aacaatacattcattcagactgttcctaattatgatgaggctaaatttaccacttacatagctaattacatgtgacgaaacacttggagcactcatcttcaaattcaaccctgttcagatctgaac

SEQ ID NO: 428251 - DNA, 210 bp, Oryza sativa
tttttgggaactgaaagctcacaacacagcattgttcaactttccgataatgtcaggtaagcggaagggggaagaattataaaagaattagaaaaccaagtgtacaatggtcagcgagaagatggacgactatgaggctgaggcctgcctctctcaacattcaatttgcccgggcaaggcagtaatatccattcctgaaagtaaccaaaa

SEQ ID NO: 428252 - DNA, 90 bp, Oryza sativa
  unsure (1)..(90): unsure at all n locations
acgcacgtaagctggacccttatggccccttntttttttttttaattaatttttattttttttttttttttttcttttatttttttgttc

SEQ ID NO: 428253 - DNA, 149 bp, Oryza sativa
  unsure (1)..(149): unsure at all n locations
agctatcacgccccatgcacgcgctgacgtacagctaggatgcctctatagtttggccgaccctttcttttnnttttttttttgttttttttttttatattttttttttttttatatttttatatttttatattatttttttttttttt

SEQ ID NO: 428254 - DNA, 123 bp, Oryza sativa
  unsure (1)..(123): unsure at all n locations
agctatcacgccgcatgcacgcgctgacgtacagcttggtatgcctctcttagttgtagccgccctatttntatttttttttgttttgtttttttttttattttttctttattttatttcttt

SEQ ID NO: 428255 - DNA, 187 bp, Oryza sativa
ctgaagaaacgaaatggattgatgcatgcatagtagttgcagtacacatttgagcgctatagctggccagagaattaatggtggttgtacgttcgtgcttccctattaagctcgcttttctcggctccgttcgtcggtctcatcctttcctcttggaagttttgaggttacctttgaattggccagg

SEQ ID NO: 428256 - DNA, 251 bp, Oryza sativa
atccatgaaccaaaattataaatactgttagtcttggtaacactcaacatttcaacagatcagcaggcaattctaacactgacagtgctattcgccgatcaacatgagccaggctaattttcttggcagcaacattttcttaccgcggttctctaggaaaacccacatggaggagaaaaaaccagggcagccccaactttcaaggatttttgggtccattctttccaaaggggagcatggttctggtccct

SEQ ID NO: 428257 - DNA, 99 bp, Oryza sativa
ttttttttttttttttttttttttttttttttttttttttttttttttttttttttttttttttttttttttttttttttatttttttttttttttttt

SEQ ID NO: 428258 - DNA, 210 bp, Oryza sativa
  unsure (1)..(210): unsure at all n locations
actacaccaattaagccaacactttattacagtacacacaccattattatcaccaggcatgcatgtatacattacatagtccgatgtcatattcacatgttagctccatagttaatttaactagtcaggtaaaaaaaagtaaaaactcaagaaaacatgggaaaagaactcaagaatccggnagtcgataccttcaccacaaaaacaagc

SEQ ID NO: 428259 - DNA, 138 bp, Oryza sativa
ataggtatgcctcttttagtcggccgccctcctttttttttttccattatcaggttaaagcccggcgcaaaagaacgacaagactgaacctgctatgcgccgcgacctctcgctcaccattccactcgctcaacgagg

SEQ ID NO: 428260 - DNA, 184 bp, Oryza sativa
  unsure (1)..(184): unsure at all n locations
caagaaacaaaagcatccagacaggaacaaagccccaggggccaacgggtacagatttgcccaccggaagtctaactgtaaaacacagtgcacaagtctaaccatcctgattggaaaaccgccaaaattgccattatcccagttatccaagccctaaagtattannaaaataacccattagttg

SEQ ID NO: 428261 - DNA, 165 bp, Oryza sativa
ggaaaggtgaacacatctttgttgaatccaaaatgtcagtgaattttggcaggtgtaaaaatgggctggataaccaaaatgtaatgggattctgtacagtcaaactgaagaaaagcatcacttgcctcactggaattttgccggcccccttggtcttctagaagg

SEQ ID NO: 428262 - DNA, 59 bp, Oryza sativa
  unsure (1)..(59): unsure at all n locations
ttagttgtgccgcaccattttttantatttttttttttagtttgcaagagctgcaacaa

SEQ ID NO: 428263 - DNA, 68 bp, Oryza sativa
gccggaaaattattagcaacgggggtttaagggaaaagggtaatgttcacatagggggcatttagcgc

SEQ ID NO: 428264 - DNA, 347 bp, Oryza sativa
gttgttgacgaacccttctttgagggttgccgcttgttccgtttctttgatttctctttcttctgtttcttccactggctgtctgggtcgacgaaatcgtcatcgctgtcatcttcaacaggcatagagccatcatcctcatctgattccatattcttgtccctcaatcttcgttcttcctcgtcttgaactcaaagatcaaatccttcaacaattattcctccctccgttagccgaacattcgtcgtgatttatggggcttcgctttcttgcctctttctccttttggagtttttggttttttcttctttttcaggtcaacaagtttctttacctgaaatgcaatg

SEQ ID NO: 428265 - DNA, 130 bp, Oryza sativa
aatgctatataaactttattttctaatatagaaagataggagatataaatgccacatacaaaagccaaacagcacaaacctattaatttctgttcccttttttcctccatgaaatggcccaatttcctag

SEQ ID NO: 428266 - DNA, 170 bp, Oryza sativa
  unsure (1)..(170): unsure at all n locations
gttatcgtaaatgtattccattgaagttcataggtgttaaatgtcgggctacaatatctgtagctctgaaatgataattgtcactaattaacatnggctaagttacataaagattgcgaaggcttactgcttccacgtaaaagatagccaccttgccctatttaaattac

SEQ ID NO: 428267 - DNA, 161 bp, Oryza sativa
aaacacgcaggagcacgcaacgtaagctaggaccatttagtgggcgcctccttatttatgtttgttagggaaaaaaaattttcataaattaaaaaaaaatagtggggagagcaaaatacaaaagaaaaaaccgattaaaaaaaaaaaaccaggaacaaaaa

SEQ ID NO: 428268 - DNA, 100 bp, Oryza sativa
catgcctcttttagtcggccggcccgttctcttttttttttttttgtttttattacctggaaacacggttgatacctgtttgctgcatgcaataatattg

SEQ ID NO: 428269 - DNA, 179 bp, Oryza sativa
gagcacaagaaagcaccagtttggtcgatctgatatccgtttataccttccctacctaagtaaaaggggtaacagacagaggaaaaaaaaagagaggaagagtgtacatggattagttacacgcaacattttactggtattttgacccaaggcgggcctccgctggggcacgttccttg

SEQ ID NO: 428270 - DNA, 330 bp, Oryza sativa
cacgggaaacataatttgccactaaatcacataaataagtagtatttcagcaacaaaatctagctaacccctttttgttgtcactgggcaggacattaaatcatttgacatctcaggcaaattaccatgtgagttctatgcaatctgggttctgagaaatcttcctagttctggagcttgcattgtttcccagctcatatcagtgtttcccacacgtgtcagattacttccaaaattttgttcccagttttgcttacttctgctcctatctgaaggttagtcttcaaagtccttgtaaaatcagaaagctgaaaattggctttcagatgg

SEQ ID NO: 428271 - DNA, 266 bp, Oryza sativa
gatatcttacagagatctgagctagtaaataaaatcatagcaatccaatcccccttttgtaagagtatggccatcacacaagttgtacatttgcagactcagcttctgagagaaagaacctgtgtctgtaatatctggttatcttccaataacccggtcatattcaagcaggagctcctcagattgcttctgtagggccattgacatgtggcttcgggcctccaattctctgcctttccatggctcctcccggatttctgatttta

SEQ ID NO: 428272 - DNA, 208 bp, Oryza sativa
acgcacgatgcacgcacacgtacgtcataggatgcctctttttttgagccgctctccttttttttttttttggactccaacagactacaaacatacagtaaatcaatgcttgaggttacacatgagacaaaatcgaagggaaagcggggccttaagactgcgggtcgccttgcaaacaaagtgaattctccttggccgtttttacaag

SEQ ID NO: 428273 - DNA, 113 bp, Oryza sativa
tatttttttttgtgttttttttattttttatgttttttttttttatttttattttttatttttatattttttttttattttaatttttttattttatttatattattttattt

SEQ ID NO: 428274 - DNA, 126 bp, Oryza sativa
  unsure (1)..(126): unsure at all n locations
ggcgacactattgaagagctatcacgtacgcatgcaccgcgttacggtaaggctatggatctcttttagagcgggccgtccctttttttnntttttttttatttattttatttattttgtttcttt

SEQ ID NO: 428275 - DNA, 109 bp, Oryza sativa
gaaagcataagcacatactgattcccaaatcatcaggtacggcataaatgacaagtgatgacaaagcattacaagttgaaatctgtttacatggcaaagaagggaacaa

SEQ ID NO: 428276 - DNA, 176 bp, Oryza sativa
  unsure (1)..(176): unsure at all n locations
atactactccagtacttaagtatactaaaagcattgtctcaaatttcaatgctgggtgagcagagcaccaaatgtattccggcaaagctcacttccagttagttagcaaattcaaatcaaattcacttacagggtanngaggggaatccccaagttttttgaccccagcttttgac

SEQ ID NO: 428277 - DNA, 135 bp, Oryza sativa
ctctccctatcttattctactcatgaaattatgtaaccggccatttatatcaaatgaaatggctataaggtagagctggcatctaccttatcatgacaaaaaagcgcagaccccaaagtcttggcacacagaagg

SEQ ID NO: 428278 - DNA, 365 bp, Oryza sativa
  unsure (1)..(365): unsure at all n locations
agctgtaagcagcaaatatgatattaatccaccagcgaatagtacttccaacttccacgtacaattattgaagtttaaatatggtacgcttgcaaatggatgctgcaagcaagatatanttaggccctaccacaccacangtagaaatngcttaagccagctaggtggaaatcattttctagaggttaattttgtaaatggccctgttgccaacgccgctttccgttcgtttgcctcgcgcccgatgtacgttcggncctaaccaccttttgtcaccctgcaccagccgtttgcaagagggccgacaaccaaggcccgggcaagtttgggagccattcttctttaatcgtttttcttccattcgc

SEQ ID NO: 428279 - DNA, 201 bp, Oryza sativa
aatagaaggcagaactgtgttgttcatgctaaacacatcactgtcgggtcagctggatcaacagcaacccttgcttacacaacggtagacaggaaggatgcaagcccaagtagaaaacaggtctacccggactgtgttttgccagtaacagattaaacagagttcaggctggggcgcacaacaaaccacctggattccaca

SEQ ID NO: 428280 - DNA, 189 bp, Oryza sativa
gaaaattaaaagcctagagcctggggggcacaggttcttggcactatttagcaaagatttgaactataatctatacagacctttcaaaaagtatctggtcaagggaaatgccaaaatcaaatgcaagccagtatatacattgacaagccaaactttatgagggacataaaacctttttattcccttact

SEQ ID NO: 428281 - DNA, 128 bp, Oryza sativa
aataaaaagaaagatgccactagctaaagctgataataatgctctccacagataataataaattttatacaaaagggaattaaaattaaatagagatttgcgggaaggaacaaacacaaacaagcccc

SEQ ID NO: 428282 - DNA, 101 bp, Oryza sativa
caagacttgcgcatccttcttattagcggccgtcgacgcgtgtgcgactttccggcctgtcgtactggcagacataccgtaggctatctgactacaacaca

SEQ ID NO: 428283 - DNA, 433 bp, Oryza sativa
gttctgtaacattcaaggtcacccttgatcactaatgcgtgtatataagcatgtcgattaacggaaaaatggaaaacatgatcagaaaccttcatattgggagatcatttgagcaatttttactaggaggctgtttgcagtttcatccttcgcatgtggagctaccagttcctggtaacggtgcagggatccagtgaaatcagtgaacaatccatcgacccccatgctgtttatccagaaatcatactcagcataagggtcctgatggaagttgaggtgcaggaattgattctcgttcctgtatgtggacgggtgtacctgaagattatgagcatgtgcttttgcaacaagatcagtcggtgccatcgtatagtttttggctgctggaacaaccgtatttttccatggaccaaggccaacaacattgttactt

SEQ ID NO: 428284 - DNA, 339 bp, Oryza sativa
tatattatcgcgacggccgccctttataccctggggggctaaggaacaacgctgcgctatatcatgactatctccatagcttccaatcatactaaacaaactttccccagagggatccatgatagctacacgagcttaaacgtcagaaaacacaatggaagaacagactaaccactactatcatacatcccatcacgaggggtcaagaaacacggcttaggtgtcgcacccgtaaaaatcaacaccttaccaagagctgggccaaaagaaccagtcactggagatcctgctgctccatgctctggcccaaagaaacaccctagccaaccatagcttgca

SEQ ID NO: 428285 - DNA, 396 bp, Oryza sativa
aagcaactatttttttgcttcacaaggggggcaatttacatatcaacaattcagtgttcccattcatctagaaatgcgactaaatgcaacatttgagcttcattcagataacaatacaaggacctatgatcagtataagaagctagaatgctagagcaatcccaacaaatggggcaaatgaatcccaattgcacaactactaaccttttcagaggccaaccaatgtctgaaacttttgacttcactaactgtgatccaagttttcatcacccaagtatcacaaaatgtccttgatgaagtcaagattgagcgtgtcgcggacaatcagaaacatgccaaccatgagtaccaccagtatacctgaccacatgatcctttgttcgattcacgggggat

SEQ ID NO: 428286 - DNA, 454 bp, Oryza sativa
cttcggtggaggcgcaccaccaaagtccccacgcgcctcaaactccccaacaagagaatgccagattatccactcctccgccttcctcccctccccctcccccttccaccatgattcggattaccacccacctctctcccaccctcaagcctcctcctcctctatccctccacccccacctccctctccttcgccgccaccggcaccccttctccaggcccatctccgtctccgccgtcgacccgtccgacctccttgccagcgtcgagtccgtcgcctccgccgtctccgtcctcgccgccatcgtgctcgtccacgagtcgggccacttccttgccgccaccttccgcggcatccacgtctcccagttctaccgcggcttctgccccgccctcgcgcgctttcgacttggccccgtcgaagtacgcgctccgcgccatcccgctcgggggct

SEQ ID NO: 428287 - DNA, 260 bp, Oryza sativa
aatggaagttgaccaaatatactttttcccatatatcttatataaataacatatattcaaaaccatgctttgcatatagctccacaggaattattttggaggtacaacatgtatggccttaatttttgccacttagcccatttacacaaaaaattaacccaccagaaaaattaaattatattagaaaaattaaattaaatggtttcgcctcgaaacattggaagttgaatcttcttttttaagaccaataatttatttta

SEQ ID NO: 428288 - DNA, 508 bp, Oryza sativa
ttcctctatgtctctctctatgtgtcacacgagcgcgacacacactcttactgactgtgggtgctgcattagacactcgcagagagccacagctgcctgcaaagaagatctttctgggtgaattgcctagagcacgtactactacacatagacctactaatagagccctagagaagaggagaggaggaagaaccagacggcgtacatgctcaacggggaggagcactactagagctcgcagctggtgttgatgttctacgatgatggggcaatcgccgagctaatagaaggaggggctcaagataggggacatggacgccggaggaggaccagaagctgctggcctacatcaagcatagcggtcacaagctgcaggcgctcgctaccctacaagggcgtgccgaagaagcgcagctaagatgctgacggctcctgtggacaaaccaccctccgacggacatcaagaaggcaacgttatacttgcggatgagcagttcttgatacagct

SEQ ID NO: 428289 - DNA, 147 bp, Oryza sativa
gggggttaaaagatgattggctaagttaaaattaacattaattgaaatgattaaaaaacacagatggcagtaaagcacggcacaggaccagaagtggcaacattacaagggtagataatataacatggagtttgacacaagattggg

SEQ ID NO: 428290 - DNA, 145 bp, Oryza sativa
tatatataaagggagacaattcagaacacacggggccaaataaaatcgacagggggatcgctcactcaccaacattcgacctcgcatgtcgccagtgcaggtcagcgcagatgctacagcggctctgagctgatctgcccaagga

SEQ ID NO: 428291 - DNA, 109 bp, Oryza sativa
gggggttataaaaaaattgtgggtgttatgctttacaaggtgggcaaagatcaaataaaaccatacggatcaatacacggcacatgaccataagttccaataatttatt

SEQ ID NO: 428292 - DNA, 174 bp, Oryza sativa
tcggttatatatcattcgacacccatggcaaggcgggcttgtagatctgccgcgtgtgagacgctcatccactcactatacttgcattaatcaccatactacactgactgctacagcggacataaccatcctctcaacaacactacagacatgcatataaactacaatttacac

SEQ ID NO: 428293 - DNA, 56 bp, Oryza sativa
gaaaaaaaggggtttaaaggggaaaattgccaaaattaaaaaaattggtgggctga

SEQ ID NO: 428294 - DNA, 184 bp, Oryza sativa
ggtaaatagcattcagactttgattcctttctgcacttctccaatttcacgggaaaccagacctttgcacaagctcatgctgaagcacacttaattggaaaaatcgtttttcctaagcgtgccaaaaaatagtttttctcagaaccgggtgaaaagggcccacatgttaaacacaaagacctta

SEQ ID NO: 428295 - DNA, 464 bp, Oryza sativa
tagtagttgttggtctgtacgaggatgtgaaggggcgtgttgaatacttcctagaccagcctggcgatgacggcgacagggacgtccaacaacttgttggcgacaaggaggggaggtggacttggcgctgcaacgaatttacatatcttactcctagatacattcggcggaagtggttatgaatgaaggctaacacatggttcagggcgcttaataaattaacgcaggctggccgttaggatgtctggaaaaatcatctatattagtaagcactatgtttacatgagggcattggccgggtttgagtaaactatttttgagtcgcttaggaaatcgaattgcttattatcgtgattgactatgagcttgcgcactggcattgttatccctgaaatgggagaagtgccataaggggtaaatgttcggatgctatttacccagcctgctaagtatgtattggcctt

SEQ ID NO: 428296 - DNA, 143 bp, Oryza sativa
aaaaaaaaaattaaaaaatttaaaaaaaaaaaaagttttaaagagaattttaaaaaatagtgattgtggcgtttaaaaaccccagtacaattaaaaaaagtcaaaaatatgtaaggcacccattagggttacttttaaattaa

SEQ ID NO: 428297 - DNA, 85 bp, Oryza sativa
attattaaaaaatatataaaaaaaaatgaattaaaaattgaagaaaaagaagtaacaaaataataagctcaaaaaacaatcggga

SEQ ID NO: 428298 - DNA, 301 bp, Oryza sativa
gtctcacaagataccctatgcttgatcgagcccatcaaatagtgacggaggtggtggaatatgctcgacaaattacaggcaacgttttagaaatactatctcaacaactcaaatgactttacaaataagaagaatatcctaacaccatataacactgacatgggcgaaataagagtattgccaccaaataaaccagatcctgacccgtacgactaatattagactaaagcgtttagaacagctcttgcaatagaccttatactctgtggacgaccaaaacactgacaaaaacttcatcaag

SEQ ID NO: 428299 - DNA, 199 bp, Oryza sativa
aataataaaataaaattaaaaaattaaaaataaaaaaacaaataaaaatatgtaaaaaaacaaaaagttccaaatataaaagggcaaaaattatagagggagtaaaaagatgaatagaaaacaaaagcaaaaaaaagtaaaacataagaactaatataaagtacacaagaacatacaaacaggaaaataaatgaggaaa

SEQ ID NO: 428300 - DNA, 79 bp, Oryza sativa
tgtcttatccaatttgccaacaacgcctacgggggaattttgtccatccgagagggattaaatcctccatacaacataa

SEQ ID NO: 428301 - DNA, 373 bp, Oryza sativa
ttggttccttcctctgttcctccatgtgagcgggtggcatataggcgatgcgcgggaggtgacccactccctacaccgtcggtagccggttcggcgccctcgggtggcgcctctgccgaccaagaggaagccgaaaccatagcgagtgggaatgcgcggaacacctcctccaccgtcagacgaatccactttcccattcactgcctacttactacactgaccccgccgtcgcttctaataccaggcgcgtcggctcaaccggggttctgcagatctaccacagtggcgagcaacggtcggttcgacgaccttgggctccacctccttcaccgctttgtggcttcaccgtctccatcctgcatggatttggcaa

SEQ ID NO: 428302 - DNA, 107 bp, Oryza sativa
gggttaacttttttttgtgtgcttgttttctattttattttattacgattgatagcaacaagcatttcaatcaccatatccaaagcgaactcatttcatggaaaaca

SEQ ID NO: 428303 - DNA, 117 bp, Oryza sativa
ttttttttttttttttttttttttttttttttttttttttttttttttttttttttttttttttttttttttttttttttattttatttattatttttatatatttttaattttttt

SEQ ID NO: 428304 - DNA, 515 bp, Oryza sativa
gagcatttcccatctctcccactccttccgccatggccgactaccaccgcccctaccggagcgacctcgacctccgcccaccgccgccgccgccgtcctccgcctccttcccgcactccaacggctactacctcccctcctcctcctcctcctcccccaccgccaacggctacttctcctccaagggcaccggcggctttgcggccaacggcgaccggcggatcgagatctacaccacggcgccgcccccgccgctgccccctccgccgcgcctcgcgctcccgccgccgcccgggaggcgggacggctacctgggaggtggcggagcggggggtggcggtggaggaggcggaagcggtggcatgtggtgcttcagcgacccggagatgaagcggcggcggcgggtggcgagctacaaggcgtactcggtggagggcaagatgaaggcgtcgctgcggagggggctccgctggttcagggcaagtgctccgagatcttccacggatggtaaaaac

SEQ ID NO: 428305 - DNA, 343 bp, Oryza sativa
aaaacgggccccccgcacccgggggggaatccccccgggggggggggaaccaccgggggcccccacctatatggggtgggccccccataaaccccggacaaaaaaaaccggggccagggggggcaaaaaccagggggaaaaccggggaaaagggcccaccccaaaatctaccggctttttccaaaaccagtcggggtggaccagccccaggaaaaaaatctttaaagttctttggcccccggcgcctttatcctaaaaagcgggcgcccgggaacccggggccccaggggccagggagaattccccccagaggggggggcaatggatgagatggttgaagggg

SEQ ID NO: 428306 - DNA, 454 bp, Oryza sativa
tttctcattatgaagcttgctcttagtgattatggatgcattttacttgttgccattctttccgttgttgatgacacaaagcttgttaccaagatcgtaattcaagagctcgccaaacatttgaagcaacttatttttgacaagaatggaagacgtccattgctgcaactacttcaccctaattgttcacgctatctgcctccagctgatctggcttgtctgaactatcgtgtgccttctcttatttcaaaggatgaagcttccgagagtgctgcagaagatatcccagagaataaggtggatgttgcaactaataaggagcaagatggttcagaaagcatgcagagtgcgtctgacagcaaaaaggacccatttcaacggcgacatgaattgttgatcaaaagtgaacttgccgaggtgctcatccagactctcattgagaatgtcggggagt

SEQ ID NO: 428307 - DNA, 122 bp, Oryza sativa
aggaactaactacaaaaaatgcggggaccaggaaccaccgaacgcagcaaaacccggaaacataccagaaggggcagcaatacaggggcagatattacagggggagccgaaaccggatacga

SEQ ID NO: 428308 - DNA, 101 bp, Oryza sativa
ccagagtgacacctaagataaaacgggcagcatatatatgtacatatggttatttcctccttaagatatagtaacaaccatcgactgatttccatgtaaac

SEQ ID NO: 428309 - DNA, 185 bp, Oryza sativa
attataaaaaaaaaaataaaaaaaaaaaaattaaaaaaaaaataaaaaaattaaaaaaaataaaaagtgtaaaaaataaaagggaaaataatatagagggtgtaaaaaaaagataagaaaagaaaaacaaaaaaaagtaaaacagtagcacaatagaaacgacagaagatcaaaccaactggaaa

SEQ ID NO: 428310 - DNA, 205 bp, Oryza sativa
tcggtaatatccagagcgtcgttgaagataggagaggcatatgtagtacgatggcgagtgggacaaacctcaagtagatataataatagtctgccctaccgtgccccatgagctcagatagactaaacgattcgaagaagaagacacagcttattacattgatgtggacgaaagcagagcgttgttcccatcagatagtgttgct

SEQ ID NO: 428311 - DNA, 260 bp, Oryza sativa
ataattaaataataaaataaaaataaaaaaaaaaaaattaaaaaataaataaaaaaaattaaaaaaataaaaagtggaaaaaataaaagggaaaataatatagatggtttaaaaacaagataagaaaacaaaaaccattaaaagtataacattagtaataaaaaaaggacagaagattaaacaaactggaaaataacagaggaatacttaataggaagaaaataaaaattaacctcaacatctttaaggctatacaaaat

SEQ ID NO: 428312 - DNA, 311 bp, Oryza sativa
tcgtttatatcaaaaacgctattttctattcggggggaattttaaacatctagatgtgtatcaatcctcaacaatatatcaaaaccttcttagactgactactactataactaagacatactaaacaatcttaagaaaatcccactcaatactaaacttctctggactaaagtagagctaggtcaccatgtgaaacatattatacagtatgaacatactataaactagtgctatgagaagcgtgcttacactgatctaacaaacttatttatgaacactaaggtttcaatatactagtcaacaaaatcttt

SEQ ID NO: 428313 - DNA, 211 bp, Oryza sativa
aataaaaaaaaaaaaataaaaaaaaaagaataaaaaaaaaaaaaaaaaaaattaaaaaaataaaaagcggaaaaaaaaaaagggaaaaaaatatagttggtgtaaaaagagtattagaaaaaaaaagccaataaaaggaaaacatcaaaagagaagaaaggacatgaagatctaaacaaaacaggaaaataaatgcaggaaaaacaaaaag

SEQ ID NO: 428314 - DNA, 79 bp, Oryza sativa
tttgtattctcctaattgacaacattggcaagggggcccttataactaactgggggttacgacctccacaacaagatac

SEQ ID NO: 428315 - DNA, 108 bp, Oryza sativa
ttttttttttttttttttttatattttatttttaaataaaaaaataaaattaaaaaaataaaatttaaaaaaaaaaaaaaaataattaaaaaaaaaaaaagttccagt

SEQ ID NO: 428316 - DNA, 253 bp, Oryza sativa
atatcctaggcgccagccagggttaaggggtactcttgacgtgtggccagctgtgccaacctcaataggccacgataactgacttggtctaagatgagctaaatttgatcagaaatttactaatgaacaaatcgttaaaagcttgtttgattacgatttataatactagtacgaacccagtaagcgtgaaatatggatcctttagatcttattagtatatagcgcaatttaaagtgtgttaagaatgatctat

SEQ ID NO: 428317 - DNA, 119 bp, Oryza sativa
cttatcacaagtgctcctattacgtgggctgggaaagaaacggccaactgatgaatgtttaagcgccactttggcaaagaatgtaagagcctgagcgggaaggaagcaacgcacacgag

SEQ ID NO: 428318 - DNA, 405 bp, Oryza sativa
cccttcaagccatatagaacgcaatgggttagtttgattttctgtctccacctgctccttacacccagcaatccagtgccgctaaccatctccttttattcttcctcaacctcctgatctccaagagcatgcagatgcaaactgatatttctcctccaaggttccaacccttttctccctcccctcgtctcctgactactactattaaccacttgatattgttacacacacattaattctgtcatggtcgacttcaaatttcttgaacacatgagaacccataatccattaagatgcaggcacaggacaaattttgaacatgtataccataatgaccactgtgcagctcatgctaccaccatctacagagaaggcatctattaaatggttacgatctacagcgaa

SEQ ID NO: 428319 - DNA, 411 bp, Oryza sativa
tttttttttttttttttttttttttttttttttttttttttttttttttttttttttttttttttttttttttttttttttttttttttttttttattttttttttattttttttttaaaaggaaaaagggggtataaaaaaaaaaattaaattaaaaaaaaaaaaaaaaagggaaaaaaaggccctttataaaaaaatggccaaaaaaaaataataaaaaacaaaaaaaagaaaaggggcggaaaaaatttgtaaaaatttgggaacaaggggcgaaatattggaaaaaaaaagggtgaaaaacacaaaaattaaatgggtatttggtggaaaaaaaaaaaatttgggaaagaaaaaaaaatttttataaaaaaaaatttgtttgaaaaaagaaaaccaaggtttgggac

SEQ ID NO: 428320 - DNA, 198 bp, Oryza sativa
aataataaaatataattaaaaaaataagaattaaaaattgaataaaaaaaataaaaaatagcataagtgcaaaaaataaaaggggaaatattatagatgatgtacaaaaaagatacgaaaagaaaaataaaataaagtaaagcattaacagtgaacaaaggtcacaagattaaacaaactggaaaataaagcaagaaa

SEQ ID NO: 428321 - DNA, 149 bp, Oryza sativa
ttcttatctaaattgtcagcttctataccacgggggggatgttcatggaagagtgggtctttcctctagaagatatcagaacagcctgcgactgagttccagattagatcagatgaactaaacaaggtgcacatgaacctacagcatat

SEQ ID NO: 428322 - DNA, 189 bp, Oryza sativa
aataaaaaaaaaaaaataaaaaaaaaaaaattaaaaaataaataaaaaaattaaaaaaaataaaaagcgcaaaaaataaaagggaaaataatatagagggtgtaaaaaaattataagaaaacaaaagccaaattaaggaaaacattagaaataaagaaaggcctgaagatcaaacaaacaggaaaaata

SEQ ID NO: 428323 - DNA, 145 bp, Oryza sativa
gttttatcaagatagtcatcttgtatacctcgggggggctgttcatggaagtatggggctgtcctcaacaggctatcagatcagtctgcggctgactgccctaacaactcagacagacttaacaagctgcagaagaacctacagc

SEQ ID NO: 428324 - DNA, 211 bp, Oryza sativa
aataataaaataaaaataaaaaaaaaagaataaaaaaaaaaataaaaaaaatgaaaaaaaaaaaaagtggaaaaaacaaaagggaaaataatatagatggtgtaaaaagatgagaagaaaacaaaaatcaaaaaaaggaaaacaacattacatgtagaaaggacagtaagaataaacaaaacaggaaaactaaagcaggaaaacccaataa

SEQ ID NO: 428325 - DNA, 239 bp, Oryza sativa
tcgtttagatcaaaaaggtcagtgaataaatgggggaaatcatgatgatggaagagtgattagaaaatccacaggctataagatcaatctgctacagactcttcgaaaagatgaggcaaactatgctatctgccgaagcacatacaacgtattcaactacaatggagtaaactagagactggtcacaacgagatagatatggtagagcgtaaaccgactagtcgagggtgcacctaaaa

SEQ ID NO: 428326 - DNA, 142 bp, Oryza sativa
attaataaaaaaaaattaaaaaaaaaagaataaaaaaaagaataaaaaaaattaaaaaaagaaaaagcggaaaaaataaaagggaaaaaaatatagttggtgcaaaaacaggaaaagaaaagaaatgccaaaaataggaaaa

SEQ ID NO: 428327 - DNA, 137 bp, Oryza sativa
tcgtttatatcctaagcgtcattttgtgctggggggtcatgtagaccatgggagggtggcgccaacctctacaagccacaagaacatgtctgcggctgagagtccctcaaagctgagacgtactttcctatctgcat

SEQ ID NO: 428328 - DNA, 184 bp, Oryza sativa
aataataaaaaaaaattaaaaaaaaaagaataaacaaaaaaacaaaaaaaatgaaaaaaataaaaagtgcaaaaaacaaaagggaaaaaaagatagatggtgtaaaaacataataagaaaaaaaatgccaaaaaaaggaaaacagcagaacagtagaaacgacagaagaataaacaaacaggaa

SEQ ID NO: 428329 - DNA, 230 bp, Oryza sativa
tcgtttatatcttaagagtcattttgggtaacgggggaatgcagcataggggagaggttgaaggtcctctacaagctacaatatcagcctgcacttgattgagctgataactactacgatctttacaaggtgtctatgaccttatagcatatgtaaaaactgtgtacttatagtagagtctggttagtactacctcgagatgctaggtggtgatcccaattttcaaaagg

SEQ ID NO: 428330 - DNA, 169 bp, Oryza sativa
aataaaaaaaaaaaaataaaaaaaaaagaataaaaaaaaaaaaaaaaaaattaaaaaaaataataagtgcaaaaaaaaaaaagaaaaaaagtaaagttggtttaaaaagagaataagaaaacaaaatgccaataaaaggataacatcataaaatgaagaaagcgacaga

SEQ ID NO: 428331 - DNA, 96 bp, Oryza sativa
tgtttatgtgcagagcgtcagttgggactccgggggaatgttgacgatggacgagcggttccgaccactagtggctataggatatgtctggggctg

SEQ ID NO: 428332 - DNA, 257 bp, Oryza sativa
aagtaaatagatcatatattccattatatatatatatataataggagacaggatacatacattagaacttaaaatcaccggaagcgaccatcacaagctcaacacaagcagaagccgcatcagccaggagcaaacgacatgatcacccacgcttttggatggagaacaagaagaccgagaagaagatgacgaaggctgaacaccttgaccgagctaaacactggcgatcgatcaccagtcacctacttggtgaacag

SEQ ID NO: 428333 - DNA, 290 bp, Oryza sativa
tttttatcaagttcgttattggggactgattggcattgttgagtttgatcaaggggttcgaccatcgactaactattataaaagtcattgaccttgatacaaaagagagagcaatgatgtcggtagctgatgaatgatgctgatgatgtttgggtactacgtaggaaggtgaagtccggcgataattagttcaaagggatgtaacctgattgctattttatatatatatattatagaatatatgacatatctccttaagcctatagaggaagaatggaaaggggatagac

SEQ ID NO: 428334 - DNA, 95 bp, Oryza sativa
aattaattggttttttatttttttttatatttatttatattattatttattttttattaaaaaaaaaaaagtgtaaaggaaaattaaaagaaaaa

SEQ ID NO: 428335 - DNA, 76 bp, Oryza sativa
tttttttttttttttttttttttttttttttttttttttttttttttttttttttaaataattttattaatttaat

SEQ ID NO: 428336 - DNA, 130 bp, Oryza sativa
aattaaataataaaataaaattaaaaaaaaaaaaattaacaaacgcatcaaaaaactaaaaaatatcagaagtgcaaaaaataaaagggaaaatatgatagatggtgtacacaaaagaaaagaaaagaaa

SEQ ID NO: 428337 - DNA, 122 bp, Oryza sativa
ttcttttcaaatgcgtcagttttgctatctcgggaaggatgtctatgtacgagtggggatttcctcaagaagatacaaaaacattctgcgatcgagtgcccttatagttcacacaaactatg

SEQ ID NO: 428338 - DNA, 118 bp, Oryza sativa
tttttttttttgggttttttaaattttcccggttaccaaaataaaaaaaataaaaaaaaatgtattcacaaatgaaaaaagagaatgaaaaaaatgctaaacgcaagaagcaacaagg

SEQ ID NO: 428339 - DNA, 88 bp, Oryza sativa
ccacgggtcagcttgtcctactcgggggggctgtttattgtactacgggggtgataccaagaggataccataactggctggcaaggtg

SEQ ID NO: 428340 - DNA, 199 bp, Oryza sativa
attaataaaaaaaaaataaaaaaaaaagaattaaaaaaaaaataaaaaaatttaaaaaaataaaaagcggaaaaaataatagggaaaaaaatatagttggtgtacaaacaagataagaaaacaaaagccataaaaagtaaaacattagaaaaatagaaaggacataagattaaacaaacaggaaaataaacgaagaaaa

SEQ ID NO: 428341 - DNA, 249 bp, Oryza sativa
tcgtttatattcagagagtaagatatgcatagggagtccacctttcaattggagcacaggaacaagaacgggatgcaatcataagagactaccctgtctggccagaacattacatatgaagtagactagttggacattattgtacaccttaattcaaagatctggaataaggaagagattggcctctaccagatagatatgctatatgatgatcagaattttcaggatggccgcatgaaatttgattac

SEQ ID NO: 428342 - DNA, 187 bp, Oryza sativa
aagattgtattttttaataataaaagaaaaataaaaaaaaatgaattaacaaacgaagaaaaagaaggaaaaaaaggagaagcgcaagaaataaaagggaaaataggatggagcgtgtacacaccggcgtagaatacaaatgccaaaaaaaggaaaacagccgtagtgtagaaaggccagaagatta

SEQ ID NO: 428343 - DNA, 298 bp, Oryza sativa
tcgtttagatactgtgagacatctattactgggggttcatgttgaccatggaggtgtggataaaacctctacacgctacagaatccgtctgcggcagactgcccgaccatatcacacagacttgactatgtgaagaagaacccacagcagattattttgatgtggactatggcagagcatggtgacaataaggtaaagatggttaaagatacaacctactatacgcaagtgccgcgagatcacgtgattggcaatagaccttgcatattactgtaggacctatagtgtttcaataact

SEQ ID NO: 428344 - DNA, 163 bp, Oryza sativa
aataaaaaaataaaaataaaaaaaaaagaattaacaaaagaacaaagagaaggaaaaaaaggagaagcgcaagaaacaaaagggaaaaaagtatagatggtgcacaaacagtagtagaatagaaaagccaatatgaggataacattattagatgtagaaagga

SEQ ID NO: 428345 - DNA, 209 bp, Oryza sativa
tcgtttatatccaaagcgtcatcttggactcgggggacttctagtccatcgacgtgtcaaaccgaactctacaggctatcggcacagtttttggcagactgcccggaaaactcagacaaactaaacaagctgaagaagaacttaatgcagattcaactaatatggattatactagagtgtcgtcactataagatcgtgctgctagatga

SEQ ID NO: 428346 - DNA, 138 bp, Oryza sativa
tttttttggttttttttttttaattgtatattttaataataaaataaaaatataaaaaaatgaattcacaatagaacaaagagatggaaacaaatgtgaagcgcaagaaacaaccaggaaaacagcatagtaggtggt

SEQ ID NO: 428347 - DNA, 57 bp, Oryza sativa
tgtttatatccaacgcgtcatctgcaacactgggggccttcttactacagaatcgcg

SEQ ID NO: 428348 - DNA, 415 bp, Oryza sativa
atgaaaaatttatcctgctactactaaaggtaaacaccaacttaattagttacaaaatatccatgcacgtttccaattaattacaccaaattcgacatgcacactcaagcataggcaggccccgcctatttgcagaacagtaaaaaaaaaaaaacgatagaggcaggatcagtaaacggactcatcgaagtggaaacttgaattggtctctacaccaactaagagtgcaaaataattaactgccgcctcgtgtcgagtaacgcgcgagcgggggatttagagaggatttatttaactcctattatagaggggaattatactctcaatcccctcttcaatttgtttctgggattaaccgaacaaggcctcatagggagaggccgccggactcgaaggctttgtcgagcgtggaggt

SEQ ID NO: 428349 - DNA, 156 bp, Oryza sativa
ataataattcacggggcttactgattatgttaacacaatacattgttatgcactaagtttaaaggcacatcggacataaatcaaactgaaattcatccaaggagaagcagggctcacacagtggggaccgatccgagataataacggtaccaatac

SEQ ID NO: 428350 - DNA, 330 bp, Oryza sativa
gttgcgtccgctgagatagcagcgaaaggagatgagacgaagcctagccacacgtcatgcacacaccagtgacagaggtctagctcagcttatcgcagtccatctaggacgcaatatggtaggcagattgaagaaactgccctagacgcggaactcctgactgaagggacacgggggctggtatactcgtggacgtgaacaggccctgaaagctgacctaacggacgatcttatcaggaaggttgcgaaaggtcaggccctggtgcaggcgcttacgtaccaacggattattacacccgagaaccggcagggcttgcgacaccggaacat

SEQ ID NO: 428351 - DNA, 419 bp, Oryza sativa
gcaaaatctgctctcattcatgatatcttagcacaggtacagactccaggattgcaggaatccagacgagaagatgagaagaaccagcgacaagtttctcaacgaccccaaaaaaaattagcagtaatatgggaacatgtatatatattcctgtgtgcgcgtgcaagtggcactgtggcaggttcttctcatgagtgctcctggtcctttacaacagcttccgcgacctgctccggggacgcttcttcttcttccttggctgcctcctccgtctccgggtcttccttcgcgggctccgcgacggcgacctcggattcgacggtgttctcggcggcggcggaggcggccttcagcaggttgtcgtagctgccggactttttgaacagctgccagaagtggttctggcagtagaggatccc

SEQ ID NO: 428352 - DNA, 297 bp, Oryza sativa
aaaaaaaacgaaactaggaaaaaaaaaagggaaattttaaaaaaccccatgggaaattataaaagctgaagaaaaaaagggaaaccaaaaaaactggataaagacttaagaaagattttggccgggaattttttaaaaaaaaaggggaaaaaaaaagccaaggtaggattccgggggtttttttcccacccaaaaaaccagggaactgaaaatgcccccaagaaggaaatttggggggggggaactcattgggaaacaccatggggggcaccaaaatcttttcctcgccggtggggg

SEQ ID NO: 428353 - DNA, 305 bp, Oryza sativa
gggggaaaaaaaaaaaggggaaattacctttaaataaaaatgtttacaccaaaaggggaaaaaaaaggggaccttgaaaaaagggggaaaaattttgaggttaaaggccccttttaattaaaaccaaatgtggaaaaaagggggggggttaaaaaaaaacgggattttagggtttttgagggctgaaaaaaacctgggcttggggtgtaaaaaaaaattaggggggggggcccaaaggggggcccgcggagagcccttaaaagccgaaaaaaggttttttaaaacgggagaactcctttttggaa

SEQ ID NO: 428354 - DNA, 189 bp, Oryza sativa
aataataaaaaaaaaatataaaaaaaagaattaaaaaataaataaaaaaaataaaaaaaaaaaaaagcggaaaaaagaatagggaaaataatatagttggtttacacacaagataagaatagaaaagccaaaaaaagtaaaacattagcagtgtagaaaggacataagattaaacaaaaaggaaaataa

SEQ ID NO: 428355 - DNA, 173 bp, Oryza sativa
gttttatccaaagggtcagcttctcttccacgtagaggatgatcatttaagaatgggggtatcctccagacaccaccggctgtgtttgcgacagacggttcgaaaagatcggacgaactaacctagctgaagaagcaccaacagcagacgtccattacagtggaggatgccag

SEQ ID NO: 428356 - DNA, 211 bp, Oryza sativa
aataaaaaaataaaaataaaaaaaaaagaattaaaaaataaagaaaaaaaataaaaaaaataaaaagtggaaaaaaaaaaagggaaaataatatagttggtgtaaaaacatgataagaaaagaaatgccaatataaggaaaacattagtaatgtagaaaggacagaagattaaaccaacaggaaaataacgcaggaatacctaataggaga

SEQ ID NO: 428357 - DNA, 154 bp, Oryza sativa
tttttatccaaagtgtcatcttggataccacgggcaggatgattatcgaagagtggggataacctcaagaggctaccagaactgtctttggctgaattcccgcagaactcacgcagcctatactatctgctgatgaacccacagcatattctac

SEQ ID NO: 428358 - DNA, 188 bp, Oryza sativa
aataaaaaaataaaaataaaaaaaaaagaattaaaaaataaataaaaaaaattaaaaaaataaaaaacggaaaaaaaaaaagggaaaaaagtatagttggtgtaaacacaggatcagaaaacaaaagccaatattaggaaaacatcagaaatgtagaaaggactcaagattaaacaaactggaaaata

SEQ ID NO: 428359 - DNA, 209 bp, Oryza sativa
tcggtcatattatgagagtcattttgtgtacggggggtatgttgtacatggaagagcggtgatatcctcgatagagtactagttctgtctttgactggggtttagtaaggtgcggaggatctaggctatgtgctgaggaacaaagggcatattctattgctgtggattatggtagagtatggtcactatgagttagtgatgctagagga

SEQ ID NO: 428360 - DNA, 184 bp, Oryza sativa
aataaaaaaagaaaaatacaaaaaaaggaattcacaaacgaaccaagagacggaaaaaaaggagaagcgccagaaacaatagggaacaaaggatggttggtgtacacaccggagaagaacagaaaagccaataagaggaaaacagtagtagagtagaaaggccagaagattataccaacaggaa

SEQ ID NO: 428361 - DNA, 168 bp, Oryza sativa
tcgtttatatgtaaagagatatctgctccttgggaggaataataacgacggaagtacggttataaccactaacatgatacaagaagaggcttaggctaacttccataaaaacttatacatattatactagctgatgatagacctacagcattttaaatagacctgtat

SEQ ID NO: 428362 - DNA, 355 bp, Oryza sativa
aataaaaaaagaaaaataaaaaaaaaggaattaacaaaagaagaaagagacggaaaaaaaggagaagcggaagaaacaatagggaaaaaaggatagtgggtgtacacacaggcgaagaaaagaaaagccaatataaggaaaacatcagcagagtagaaagggcagaagattagacaaacaggaaaataacgcaggaaaagccgaaaggagaaggataagaaggaagccttttcaatggtaagggtagggctaagtaggaaacaatagggaaggggccagaaagtgggcaatatagagggggggcacaaacgccgggggctagtaaaacggagtaaggacaaaccggggaatgggc

SEQ ID NO: 428363 - DNA, 202 bp, Oryza sativa
tcgtttatatccaaagcgtcatcttcgattccgcgggaatgatgaccatcgaagtgcggttccgacctccagaggctaccggaacagcttttgactgagtgccctaataaatcagacatactaaaaaagctgcacaagaatctacagcatataaaactaaagtgtaggaaactagagtatggtcactatgagatcgtgatgc

SEQ ID NO: 428364 - DNA, 81 bp, Oryza sativa
aataaaaaaataaaaataaaaaaaaaagaataaacaaaagaacaaaaagaaggaaaaaaaggaaaagcggaaaaaacaaaa

SEQ ID NO: 428365 - DNA, 207 bp, Oryza sativa
tttatatcataagggtcatctggtgcatcacgggaatgttgaggatggacgtgcggttacatcctccagaaaccataagatgagcttttgtcagctggtgctatcaactcagataaactaaactagttgctgattcacctacagcatattcaataaccgtggagtaatctagagctatgtcactattagctcgaaatgctataagat

SEQ ID NO: 428366 - DNA, 64 bp, Oryza sativa
aaaatatgtttttaaaatttttttttttaaaaaaaaaaatggggaagcgtaaataacaatgaga

SEQ ID NO: 428367 - DNA, 129 bp, Oryza sativa
attatatatttatttataattttttaaaacaaaaaacaaaaaagtgaaaacaaattaaaaaaggaaaatacgggaaaaaaaaaaggagaggatccaaaaaatacgataggaaaaaaacaggaaatcata

SEQ ID NO: 428368 - DNA, 293 bp, Oryza sativa
tgttcgacccaatagtgtcataagaaacaaaacttcatggaataaatggttgacacatgaggcaatgaggtggaaaaaaaaaaaaaaaaaaaaaaaaaatcaccaaaaacattatataaaataaagaaaatgaaaaaaatctataaacagataaaaaagtagttaggctttcatagtcttccaaacttcctctccgttacttccaaagaaaaaattcatctttagatcttacatcttctaattaaatggccgcctttttacaacgtgctgactgacaaaaccatttctatacc

SEQ ID NO: 428369 - DNA, 422 bp, Oryza sativa
acccatgagatgatgagaatgatcagggcatcaggcagagggtaagtattaatacatcatttgggaatgtataatatttatgtgttaaccctaaccaatcataaaatcttggctaatacaggctattaaatgttgattctgtcaagctgcaaacaatttacaacaaaactgcagtggtaatttccacatactccagagacccagatacacactaggacattagtaacctggactcaccaatgagcaccagagttgattgatatctgtttagctttcctccagtctccgcaacacagagtcagcaaagatgcgctgcttctcttcagtgtgtttgggactagggcggttgtgtttcagatacccgtcccacggaaccttcttaagaccagctctagcagctatcatgtctcttactctttcag

SEQ ID NO: 428370 - DNA, 431 bp, Oryza sativa
ctggtaaattttcccatttcttttgtccgtaacaacagatcatgtaatctttgctggagtaaaaatctaaaaaaagaatggctacggaagctgcattgttttctgttgctaaagggactgacaactgataactacaatgacagaccaaagtttcgaatgatctatcttgaagagtataggcaagataccaaacctcttgttcaagaactgcatttgaacagtaacgttttcatgactagaacaacttcctagctctgctgtcagttctccagtctgaatcttgcatggggagatgttcatcagggtatggtacactgccttgcctgcgaagttagaacctttcgcattatgtactgattcttgctcagcatcaggaacaagatgttgtcaaaaccaagagacaccagacgacgatttcgggctatacatgg

SEQ ID NO: 428371 - DNA, 190 bp, Oryza sativa
attaaaaaaaaataaatataaaaaaatgtattcacaaataaacaaagagatggaataaaatgctaagcgcaagaaacaacctggacaaaagaatagttggtctacacaccgtacatgaaaagaaaagccaatttgagggtaacattctaattctagaaaggtctgaaaattagacaaactggaaactacc

SEQ ID NO: 428372 - DNA, 169 bp, Oryza sativa
gcaaagggtcatccggtgtacctgggtggggttgtctatctaagtatggtggcgaccaccagaggcaacaagatcgggctttaactgaggtccataatagatggcagaatgtgtgatatgtgctgaggaactaagagaacattctacggcaggggatgaagctagagta

SEQ ID NO: 428373 - DNA, 206 bp, Oryza sativa
ggttaataaaaaaaaaaaaataaaaaaaaaagaattaacaaacgcacaaaaagaaggaacaaaaggagaagcgcaaaaaacaatagggaacaaagtataggtggtgcacacacatgataagaaaacaaatgccaaaagaaggaaaacagcccaagtgtagagaggccagaagatcagaccaaacaggaaaaatacacgcaggaaaa

SEQ ID NO: 428374 - DNA, 237 bp, Oryza sativa
gttttatcaaaagggtcatcttgtatacctgggaaatgttgtttatggaagtgtggtggcgtcctccagaggctatcggaactgtcttcgactgagggtcagtataaatcagacagactaaaatatctgaagaggcacctacagcgtattctactacagtggatgaagctagagtaaggtcactatgagatcgtgatgctagaagatgcacacacttttcgagagtgctgcgagaat

SEQ ID NO: 428375 - DNA, 147 bp, Oryza sativa
aataataaaaaataaatataaaaaaatgaattaacaaatgaagaaagagaaggaaaaaaatgaaaagcgccaaaaacaatagggaacacaagtattgttggtgtaacacagagtagtagaaaacgaaaagccaaaattaggataaca

SEQ ID NO: 428376 - DNA, 75 bp, Oryza sativa
gttatatgaaaagagacatcttgtattccgggggaatattgaacatggaagtgtggttaaatcctccataggata

SEQ ID NO: 428377 - DNA, 196 bp, Oryza sativa
aataaaaaaataaaaataaaaaaaaatgaattaacaaatgaacaaaaagaaggaaaaaaaggagaagcggaaaaaacaaaagggaaaaaagtatggtgggtgtaaacacatgattagaaaacaaatgccaatatgaggataacatcagaagtgtagaaagggctgaagattaaaccaactggaaactaacggagga

SEQ ID NO: 428378 - DNA, 166 bp, Oryza sativa
tgttatatcaaaagtgtcagcttgtacaccggggtaattatgtacatctaagagttattataaccactagacaacataataactgtatatgtcagacttgcttattaaatcagacaaactatgctagctgaagataacttaacagcatattctactactgtggatg

SEQ ID NO: 428379 - DNA, 172 bp, Oryza sativa
aatataaaaatttaaatataaaaaaatgaattaaaaaatgaataaaaagattgaaaaaaatgataagcggaaaaaacaaaagggaaaatagtataggtgttgtaaacagaggatcagaaaagaaatgccaatataaggataacagtataagagtagaaagggctggagatga

SEQ ID NO: 428380 - DNA, 216 bp, Oryza sativa
tcgttcttattaaaattgtcatcttatgaaccaggggcatattatacattaaagcgcgtttcttacctccataaactacaatatcagtcttcgactaaagtcctcaagaacttaaacaaactaaattatattatgatttaattattctggatcagattactgtgtatgaagcgtagagttaaaaaacatcctggatgggatgctacaatataaaca

SEQ ID NO: 428381 - DNA, 186 bp, Oryza sativa
actaaaaaaagaaaaatataacaaaaggtattaacaaatgtacaaaaagaatggataaaaggagaagcgcaagaaacaataggaaaaaaaacagagatcctgtaaacacattggcagaacagaaatgccaatgatagaataccaccattattagaagaaacgccagaacattagacaaactaagaa

SEQ ID NO: 428382 - DNA, 137 bp, Oryza sativa
tttttgatgcaaatggacatcttctgctacaggggcatcatgaatatcgaaaagcggttctaacctcaagaagacacatgatgtgccttgggcagtcagtcctcctagataacacaaactaaaaaagctgaagaata

SEQ ID NO: 428383 - DNA, 140 bp, Oryza sativa
gctcaaaaaatatattttagacaatacgatatgacaaaattacatagtgggggtaaaaatgactgcccgctaggagcaacatgaaacacaccaatgtacgtcaaaaccgcacagttggatagaaatgaacgggtaaggat

SEQ ID NO: 428384 - DNA, 412 bp, Oryza sativa
gctagttgcgggttatatacaaatatacagtgttgcgactaattgttcaaaaccaaatatagaggcttgtgatattacactgcctagacaaacttgtaacctgaatcatggtcccttactaatgcatattaagcctggtccaaagggattggagggggtcgaggataaatgattccacacctcaatatgggacaatgaaacccctgcaaatctaacagaagatctatatcatcaccattgtcttcatcataaaatagagtcggcattgaaaaattttgatagatgcgcaaccctgccatgaacaaaagctttgaaatctgactgtaccaggccttaagatttatcttaactaagactgcacgaagcataacgaaacacatcaatagcagctttaacatcataaactttaatg

SEQ ID NO: 428385 - DNA, 358 bp, Oryza sativa
tcttttcgttccgatcggcgagctaaaagcatgccgacccgctctagatgacctggcgatcacgatgaccgggcagtaccaatttatatctacttttccctatcgtccataagcttgaagagtagtgacctgctcaccacccatgacgatcagtgcataaaggacctgctcctgaacgcattcaagtgggctgcgaccaacatggactaattgagctgcccatatggcaagtcttgtgctgaagctgacgacaaccgttttgctggaatttcaccatacaatgttcaatttcagaaactgctagtacatataggatcttaccaaagatagcgcagccatagagacatagctttttaaa

SEQ ID NO: 428386 - DNA, 85 bp, Oryza sativa
cataaggcctaggcgaggaatgccgttcgtcgtcgctggctttaccaatatacaaaccaaccctaccaagcataattagccaagg

SEQ ID NO: 428387 - DNA, 234 bp, Oryza sativa
attttttttattttttttttttttttttttttttttttttttttttttttttttttttttttttttttttttttttattaaattaaaaaaataaaaaaaaaaaaaaaaaaaaaagaaaaagtaaaacaaaaatgaaaaaaaaaaaaaaaaacataaaaaggaaaaaagtaaaaaaaaaaaaaaaaaaaaaaatcttaaaaaaaagagtaaaaaaaaataaagaacaaggggagt

SEQ ID NO: 428388 - DNA, 479 bp, Oryza sativa
gttgaaaccctcagctgcgcgctgcagccacgctgctataaccctaggttcctaaatcctccgatccggggaccccacgcactcggattccggtactcgtcatctgccctatctccttcgctgctgcctgctgatagtgccgccgtggtcttgccttggaccacgcactactccctcgtccatgtccgtcgcagtgttgcgaccaagcctgctccagctggggggctcgtctgctcctgaccctgcaagggaatgatctacattgagggcgggctgttaaaagcgccgccagaacactgcttttcatgagagccgtgtccgctggccctgacaggaggcgttcgagcgccctgtccaggggcgagcttgacgacgatgagaacactctagcgctcaccactgcgcccgcggtgctcaacaactactaggcctagtatgtgctttatgagtaggcacagtctacatatagtgagaagaat

SEQ ID NO: 428389 - DNA, 188 bp, Oryza sativa
aaaaaaaaaaaaaaaataaaaaaaaaagaattaaaaaaagaacaaaaagaaggaaaaaaatgagaagcgcaaaaaacaaaagggaaaaaaataatgtgggtgtacacagagtagaagaaaagaaatgccaataaaaggaaaacatcattagtgtagggagggcagaaaatgagacaaacaggaaaata

SEQ ID NO: 428390 - DNA, 142 bp, Oryza sativa
atatccaaatagacagctatcacaacgggggaattttttagatcaagcagtcgttccaaccactacaaaccacaagcactgccttccgcacacggtcatcattaaatgccgaaatcaaaaacaactgaacagctacctaaag

SEQ ID NO: 428391 - DNA, 171 bp, Oryza sativa
ttttttttttttttttttttttttttttttttttttttttttttttttttttttttttttttttttttttttttttttttttttttttttttttttttttttttaaaaaaaaaaaccggttttaggggggttaaaatccaaggggtaaaaaaaaaattaaaaggggggaac

SEQ ID NO: 428392 - DNA, 431 bp, Oryza sativa
gcaaatgttggattttaatctgaagatgacaacattggtctaggagttgccaaacataaggatggcactgcagcaatgcagagacaccatcgtcagtacatcttgggtatgaaaattgacgattattgcgggtatctaacatggcttgtaagcatgctagacttggtaagggctccatggtgtatgatccgaggatattaacactgcacagatgatgatatgagagcaggtttagtccttgtagacaagaggcttgttgacccaacggatgcggcagccgcaggcctgcagcatctggagcagctcaggagacagcacagacttcagcccactcagcatcttcagttttttcagcctcccgcaagccgctcttagtgccatctcgaacccttttatagagacccatgagaggtgtaccattttaacatcct

SEQ ID NO: 428393 - DNA, 311 bp, Oryza sativa
tcgttgtgatgagtcaggtacttgaacgtgagggggacaaatttgactctaaggagtgctgcaaaaatgaaccgaactccatccaatccataggccgatcaacacgccgaatgagtggatgaataaattactatggttcttgctcccataatatgcgtgctcctcgaactggaatcgctagagatatcatgctggagttgacccagacattaaacactattgcctgagaagttgagagcatctctcgactctttggacctgacgtgtcattgccaaacggttggacatacaaatttggtaggaagttgcct

SEQ ID NO: 428394 - DNA, 163 bp, Oryza sativa
gaaccacggaacaacaatattatagtaaaatacaatacagtgaataagtgtgagacgcaacacaccaaattgtgacatggaaaagtggagcttgttggcactacagataggtctcatgaggggactcccaaacattactaaaaggcggacaagttagaagcgg

SEQ ID NO: 428395 - DNA, 433 bp, Oryza sativa
aacttgaatagtaactactctttgtttggattcaagccaaatctatgcccaatctctgcttaaagcagcacccactatacaaccacaaatgcagaatgaggcaaatagtctaaaccacagtgccctctactgatcgtatatcaactgcaggaaaaatctagaaataacatgttttttgtgtttgatgtcattcgatacacaggtctctcacggtctcaccagatatttcaatcgataataatggcctgaacccaccacctccttctatggcctgcacccaccagcttctatgtccaaaatttcccgatcaaatccagggcgatgggggcgatcttgctaaggatattatacactttatgagccttgtcgcataccgtcaccaccacagtagctttcttatcttctttgaaggcaagaaaaccgacgaagatgc

SEQ ID NO: 428396 - DNA, 390 bp, Oryza sativa
cgtacgtgtacacacaccctgcctggttccccgtccacctccgcctccgcgaccgtcatggcgctcgccggcgtccttcccggcgcgctcagatcggcggcggctgtggacggagcggtagaactcctcgccgccgagcgccctactacacccctgcgcccacacctagacgtcgccggctgtgccgggaggacggcgaccaccgggctccagcgccgcatgagagccgggccttcaacccggtccctacagcttgaagccgccgccgtcgtctatggcgtcggtgcccgaaaggggaggaccgagaccacccggttacagcgccggattagaggccggccttcacccggggttcttccacttgacgagcctggaccggtccggggagga

SEQ ID NO: 428397 - DNA, 455 bp, Oryza sativa
gtccgcctcgccagccgcgccgcctcccgtccgtgacgacggcttcgatgccggggcggagctggtgctgaggccctcgcacgtgaggagggtggtgccggacaggatactgtcggtgcgggtcctgccgctggtggaccggaccgtggtggcggcggggaacaagctggggaacgttgggttctgggacgtggacggcggcgccgtggcgggtgcagatggggtgttcgagtatttgcctcacaggggccctgtgggggcaatcgtctcacacccagctacgccgcagaagatttacagctgttgctatgagggtgaaatttgtcttatggaccttgagaaagagaactttaatatgatctatctgactgactatcctattttctcactttgtcaagcgccaaatagccccagctctctatatcttgctgaaggaaatgatctgaaactttttg

SEQ ID NO: 428398 - DNA, 217 bp, Oryza sativa
gggggcttggcaaaaaaaaaaatcaactttcattgaaaattttggaaattggaccccaacaacttaaattgaaaaaaaacatttttgaattccacttagtttaaaaaaaaaatcccccgccggattgttttaaaaaccaccaaattaattaaaaggaaaatggggataagtgattttggccccaagggactgattaaacctaaccaaagggagggga

SEQ ID NO: 428399 - DNA, 584 bp, Oryza sativa
ctattttgagcagctacgacgtatgctgcccgccgacggcagggagcctccagtgcggccgccctcctttttttttttttttgttttttagcacaaaccaaccaccacaaacatgattataatcgccaaactgaatacaacgtgctgcacaatgagcgaatttgaggtatgaaaggctagttcgagtagaaaaatatcgaaaagatacacccccaaaaacaggctaaatagaaaatggccgtatgctaaatagccagctgtctccaccatggagaacgaatttatccggatgacatatgaagcatatcaggagtaacaccatccaaatcatgtctcaagaacgtactaattgcaagatagaccactcgtttgacgacaccgaacactttctgagataaattaaattgactgcgcgtgcaacacccaactggcacaaggcactgcccaatgagaaaaaacagcccatacgcggaagttacgtccatgggagataaattttttcacacgtataaacacacggggtttccttatcttcacgctggaggggcaaacatttatgcatgatattctgcttagggtctgac

SEQ ID NO: 428400 - DNA, 319 bp, Oryza sativa
ttttgggggattataaaaaattgggggttttttttttttttttttttttttttttttttttttcatttttttttttttggaaggaacaaaacacaaccccaaacaaaaaacccccccagcgcccacattaaaaagggaaacaacatattttcccccaaaagccacgcaaccgaaaactaaactttagtgagcaactgacaaaatggaatgctggttagacaacacaaactggatcaaccaacgaaaaaatttaccccgcttataaaaagaggttttctgggggcagaataaatccccccaaaaaggaacgcccccaaaa

SEQ ID NO: 428401 - DNA, 252 bp, Oryza sativa
gctgttcggtggcacggccgcgacgaagggaggcggacgtcggggggcgcgacgatggcgactgcgacgggatggcgacgggggccgcggcgaagggaggcggtcgtcgtggggcgcgacgatggcgactgcgacggggggcgccgccgcctagtcccagctactctccctccctatgtatctctctctgtgagggtttctgtctctctctgtccattcggccgatctcacagggcggctggggagggggtg

SEQ ID NO: 428402 - DNA, 299 bp, Oryza sativa
ggggaaactaaacatttgactgttattagcttttgcaccaattagttataccagttaactgaactttttttttaaactgccaaaaacaaatgtaggatggtacaaacatgcatgaaccatcggattcacacaaagcaattttcaaaaccttggactacatatatacgggtgggccaaaacgcagttgtttggcttttattaaatttttttcaaaatacacatcacataaaatatacattcctttctatactggccaaaaatgaactaacctgcatcaaaaaagaggcttaaacacgaaa

SEQ ID NO: 428403 - DNA, 370 bp, Oryza sativa
ttttagatcgccctcgacccccctcgcccgccggcttcgccgatccccatacgtcgagcaccgccgccgccgccgacgccggcgttccgccacatccccgcctcgctgcccgattatatcattattacaccttgctgcggcttttattgattcgtgaatcgtgatggcgtgccggggcttcttcgaatgcctactgaagctgctcaactttgtcctcacggtcgccggcctcgccatggtcggatatgggatttacctgctcgtcgagtggatgaggatttccggccgcggcggcggggcaccaccttcaaccgcgccccctgctgagttagcttatgacttggccacccatgctcacggatggggtcct

SEQ ID NO: 428404 - DNA, 380 bp, Oryza sativa
ttttgggggttttttttttttttgggtttttttttttttttttttttttttttttttttttttttttttttttttttggggggaacaacacacagccgcattcttaaaacctttccggggcccgggtttaaaagggggccaactttttttgcgccatatggcacgcaaccgataactccacttcagtgttcagctgacatttttgttttctggttagacaacacaaactagatgaaccaacgcttcattttactcggcttatgttatgatgttgtctggaggcagaataaataacacagcactcgcgcacaattttataagccatgcgagcatgttgcttcagagtctgatggggggaaagaaaaaaaggaagaaacaat

SEQ ID NO: 428405 - DNA, 447 bp, Oryza sativa
ttttctcctcttttttttttttttccccttgcccaccaccaccaccgcctctctcgccggcgaagaggaagggggaagcgcggctgcggcggcggcggcggcgcgcggcggaggtagggcttgaggtcctgaggtctctcctccgtctcgatctgcctcctaacccgaagcgagagggattttgcgcggtgagggtgggggtccgtacagcccggccgccgcatcccggggtggcgctgaggcttgcatcagcttgcctctatctgaatcttctggccgtgaaaagaagctagaattatttttctttgtcaagaccaaaaagtatttattcaaaccaaacactatgaccacacaggcttgtaagaagagaagagcacgttatataagcagtgaatcagaaaactctggtacagactctgaggttgagggaagcaaacttttcaaaaa

SEQ ID NO: 428406 - DNA, 425 bp, Oryza sativa
cagatgtggcaaggggatcatatatatgaaaatcgaaatcaagttccaacttttgtttgtttgtctataccttctttagttacataggcatgcttatatacatatcatttctacgaggatatactcaacctgctcaaggaaacatatggctcaggtaaaagaattcattgactggattactgaataccaaaagccattctcttctatttttgtatcggagatttttcaggagttcatatatacagtacaaaagtctataagttttggaccgtggttccgttaactcggatgtatggaacatgagcaacatatggccaatcggcaccatctttagatacccgagtactcaaacacgaagtacagttgtttatattgaactcttggagagtcaggggcagagcattgtctggtatggactgcaagcc

SEQ ID NO: 428407 - DNA, 535 bp, Oryza sativa
cttgtttaatctcttacaggtaaatcttgaaagctaccacttcttgtctaccattccaccattgggccatctgcctttgctaaagctcctcaccctaagaaagcttccctcagtgaagcatgccaacggcacatcattcggtggtttcccatctcttgaggagttcgagcttcattcaatggagaaatgggaggagtggacagaaccagatgcagcagctcatgcttatgggttgtcgcttttccttggacacctcaggaagctccatcttgcatactgtccatcactgagacgtttcccgcatcttccatgctttatctgcattgaaagagctgaagatctccaagcctggaagctggatcctggcattaccagcatgttctcaagtcttgtcatccctaataaccttggcagtcgagtactgcaaccacaacgttgtaatgtccgcgcaacagttcaagtccctaaaaaatattgagcttatcaaaagtgaagggctacgtttggctgatggattccaatactttagcaaact

SEQ ID NO: 428408 - DNA, 247 bp, Oryza sativa
ttttttttttttttttttttttttttttttttttttttttttttttttttttttttttttttttttatattaaaaaatgaaaaaaactaaaaaaaaaaaaaaagaaaaaaaaaaaaaaaaaaaaaaaaaaaaaaaaaaaaaaaaaaaaaaaaaaaaaaaaaaaaaaaaaaaaaaaaaaaaaaaagaaaggaatacagaaaaacaaaaaaaaaaaaaaaaaaaaggggaaaaggaaaactaacaagag

SEQ ID NO: 428409 - DNA, 56 bp, Oryza sativa
aagagatgcccacccccatgggggatggggccccctccccgctttgccccctaatc

SEQ ID NO: 428410 - DNA, 235 bp, Oryza sativa
tttttcgcccgcctcgtcttaaaacgccttctggaaaattccgccaatccgagagggatttttcctcgcaaccaaccaaaccaaccaaacccccaaccaagcgagcaagccgccttcgccgggggggcccccaccctgacggcaaccctagccctccgatcaccggcgctgagactgatcccgccgccgtaggaggaggaggaggaggtggtggtggtggtggtgatggaggggg

SEQ ID NO: 428411 - DNA, 145 bp, Oryza sativa
tttttttttttttttttttttttttttttttttttttttttttttttttttttttttttttttttttttatttttttttatgattaagaaaaagaaagaaaaaaaagaaaaaaaaagaaaaaaaagagcggaaaaaataacaagg

SEQ ID NO: 428412 - DNA, 413 bp, Oryza sativa
tactagttctagatcggcacgcggccgcccttttggagtattatagaattcatctgaatctatggatgctattgatgaacttgcgtattgttagatgcgtattgagtatattgatgcgactcctaccatggcaagctgctatattagactatggataccagactgatgggccaggtattgattatgtaggattcgcaatatacacacaatactaacatgctgtatgtacagtcataaggcacatgaaacttattagtttttcgtctctaacatgatgatacttatgatgaatctggataaatacttctctacgcacatttggtggacttgatgcggacatgtctgtcttgtatgctatttacagtgtctgcagccaatggagactcactagataagccctctaggcaccacac

SEQ ID NO: 428413 - DNA, 70 bp, Oryza sativa
tttggggggagattaaaaacattaagataataactaatactattccatttacaactagttaatgactgga

SEQ ID NO: 428414 - DNA, 96 bp, Oryza sativa
gttgggtaaattatggaataggataaaaaagaaacaaaaaaaaaacggagaaaaaattaaaaaatataaatataaaaaaaattaaataacagaaaa

SEQ ID NO: 428415 - DNA, 342 bp, Oryza sativa
gttatagttatggctatgtgagggattcactggatttgtgttcaacccttaagacatgtcaggcatgttaggcttaagacattacgatttttaatttctattttttggtacaagaatctccatgtgaatttaggtgtatgcctgtttgtcagcatctatgatattttatttaagttgtaaaatctgctcgtgtaagttttgtccatattcagccaatacagtaagtgaaccacccagattgccttaaaaaaaaaaaaaaaaaaaaaaaatattaaacaaatttaaaaatttaaatatgttaataaaaaataaatggccggtccttttagggggccctatctt

SEQ ID NO: 428416 - DNA, 234 bp, Oryza sativa
ttttcaatccaaaaggcttacaagagaagcaaccatccggaagaagatggccatggcgacgtcctccgcatccaccgtctccttctccgcccgcccgtccgccgcgagcgcggtccggccgtgcgccgccgcggggagggcgagggcgcgggcggcggcgggggagagcggcaagtggtgggcgccgctgctggggtggtcggggaaggccgactacatcgaggccccggcgcc

SEQ ID NO: 428417 - DNA, 433 bp, Oryza sativa
accttaatttatatttttttttttattttttttttttattttttttttaaattattttttttttaatatttaattaaaaaaaaaaaaaaaaaaaaaaaaaaaaaaaaaaaaaaaaaaaaaaaaaaaaaaaaaaaaaaaaaaaaaaaaaaaaaaaaaaaaaaaaaaaaaaaaaaaaaaaaaaaaaaaaaaaaaaaaaaaaaaaaaaaaaaaaaaaaaaaaaaaaaaaaaaaaaaaaaaaaaaaaaaaaaaaaaaaaaaaaaaaaaaaaaaaaaaaaaaaaaaaaaaaaaaaaaaaaaaaaaaaaaaaaaaaaaaaaaaaaaatataaaaaaaaaaaaaaaaaaaaaaaaaaaaaaaacttttaaaaaaaaaaaaataaaaaaaaaaaaaaaaaaaaaaaaaaaaaaaataaaaaaaaaaaaactaaaaaataaa

SEQ ID NO: 428418 - DNA, 102 bp, Oryza sativa
aaattgggtttaaaaattcaaagggtaaaaggaccgaaaggaaaaatttaaaagggtggtataaaaatgggaaaaaaaaaataaaagggggtttttaccctt

SEQ ID NO: 428419 - DNA, 225 bp, Oryza sativa
tatcgcttcactgcccacttggatcctcgtggctgctgctgctgtagcggaagacgacgagccgcccaagaatccagcacccacccatccactgctgctgctgctcctgctgctgcaccccccgcattgtttcgaatttctcaaatcggccctcgggctgcggcggcgcggtcaccggcggcgaggtgagttcgtcggtgaagaggaagggggggggggggggct

SEQ ID NO: 428420 - DNA, 98 bp, Oryza sativa
tttgggggataaagaatgataccgctgacctttagttaagcacaagagagaaagccccataatcagataagacaagtcaaatttacacatagaagaaa

SEQ ID NO: 428421 - DNA, 264 bp, Oryza sativa
ggctagggtaatattgcatcattatcatttcccttttttttatgggagaactcactttgctttcgatacatccaaaaagattggggcaccatgcatgttttacaaatccatgcaaagaaatgctattttggttcgaaaagaaaacgggctagaacttttgaacacttggaggtttttataggggggtatctggccttgaacaacggggggccttcctttggcttggaccaagggtacttaatggggggatcccttgggaacttt

SEQ ID NO: 428422 - DNA, 448 bp, Oryza sativa
ggggcaaaacacgataattttattagaacttggaattttggattttacatcaatatttagtttacatgttgctctattagacatttcagtgcctttttcctgctaccgttacacagctctacaggaccggatagcttgaggcggcctccctcccttgaagagaataatctccatgtctccaagcaactcgattcatgaagttccttcagcaggtttgggttgcaccacagttgacaatctcagtctcaagggcctcctctgggtcatggacgttggtgcaggagggcgaactagtggggcagcaagctcaagtggctcaagctcttcctcagctttacgcttcagatgattgttatcaggtgaacctgtggttcctgctttgcccccattacttccaactttatgctccaaagataatccttgatctactgcagttaaatctttctga

SEQ ID NO: 428423 - DNA, 335 bp, Oryza sativa
ggccaaaaaaaatttttaaaattgtttgggtttaaaaaaaaggggaaattcatttttaaaaaaaaatgtttaaatggggcttaacaaaatttaaaaaggtttttttttaaggaccaaatggtgggaaaaaaaaatgggaaaaaaaagaggtttttttttcaaaaattttaaaaagaaaaattttgaaaaaattttttaaaaaaaggttttttgaaaaaaaatttttaaaaaccgggaaaaaaaactttttttttccggggtaaacttaaaggttttttggggggaaaaaaattttgctttaaaaaaaaaggaaaaaaaaccccctaagggggggg

SEQ ID NO: 428424 - DNA, 385 bp, Oryza sativa
aaaaggccaaatggaattgaaatttggttagaaatatatttgggttattacagaggttgggggaaatttttcctataaccaaagggggtcgatcaaaaaaaattacaggaaaagaacaattaatttggcgacgacgatgacgacaacaacaacaaggggaaaatgaaccggaaaaacgaaaaaaaaaaaggggatttttttacgggaaaaaatctcctttaattttattaggaacacataataaggggaataaaaaacgccggggaattaattaccatacggggccgaaaaaaagggcaagggttcgggcaccgccgtcgggggggggacaaacgggggcaaaaaaggggggccccccgcctacccgttgggccggaagccgggt

SEQ ID NO: 428425 - DNA, 437 bp, Oryza sativa
aacaattgcctccttttttattatcccatccagatgtaacattttttttctgatgggttagtacatcaaaagaaaaacatctttacctaataggctagtactgtagaatatacttcacgctactgattcagaaaagaaagcttgcactaagtcttaagcactacgctgatgctactgggattcaaaaaagaaagcttgtattctgaagtacatagttgctgctggtctctactaccagtagcaactatgtactggtctccactaccagtacatagtccttacaaagtaaccagaaaaataaacatcacattattacagcggtccaaaggccacgagaaaatataactggggagcttcaggaccatgggtacctgggcaaaaaagagaagcacccttgcataatcagatacccagtgctgtcctctgggaagaaatgt

SEQ ID NO: 428426 - DNA, 345 bp, Oryza sativa
gggccagtaaaggaaacattatcatcatatcaaggggaaggccataagtcatacaatacacacacacataaaaaagggctgggctgttgatacaatggggcctacgcattaatttatttttagacaagggcaatttaaaaaaacagatggatgccgggccgcctacttttacttggatctggctaaatcggaaaggggaacatttagaactggaaggctttcttcttggacttcccgtccttttccgggttccttttccttttggttggattttccggcaccatgtcgttgaaaatttccttttggttccggagcttatcctcctccgggggttccttggacttg

SEQ ID NO: 428427 - DNA, 281 bp, Oryza sativa
ggggggaaaattccctgtttttattggggaaaaaaaaggaaatctatgtaaaaaaaatggttttttaaaaggaaaactggcaaaaatttttataaaagggccctaaacctgatgcttaagggggaaaaatttaagggttaaaatttttataaaagggaaaaggggaggggaaaagggattggtactggattttttatgggggtgcatttaaaagggatgttttgggattgatttaaaggactgggttaaaattgaaaaatgggccaaggaggggttttttt

SEQ ID NO: 428428 - DNA, 335 bp, Oryza sativa
ggggcttaaaaaaaaggtaatggggtaaaaaaaaaacgggaaaaggaaaaactggaagttaaagggggccctagctagtttttggaaggattaccccaaaaaaaatgccaaaccccaggggtaaaaaatttttaaatgggaaaaaaaggaaaaggggggctggatccccaacccagggtatttagggaaaaaagttgaaaacggggggatccaaacaatggggttggaaaaaagctttttgggggccttcctggggctcccgggtttccagggccaagggagaccttcaagggggaaccccggaaaaaaaaacccaataaaaccccctttggggg

SEQ ID NO: 428429 - DNA, 270 bp, Oryza sativa
agattatgttttattttatttatgtttttttttttcatacatatgggtttttatagagggaagaataatttaatagagggaaatcaagggggtataacaaaggaaaaaggttaaaaaaccaacaaaacaaacttaaggggaaaaaataaagggaaaaaggaaaaaaaggaaagggaaacggaaaagggccagaccagaaaaacataggtgcaaaaggggaaaaaaaaaagggaaaattggggaacctggaaaaagaaaagcatgatgggt

SEQ ID NO: 428430 - DNA, 316 bp, Oryza sativa
gggaaaaaaaacgggtggtaatatttttagaatttaattttaaaaaggaccagtttgggaaaaggcatttaacaaacctgatttttcatagaatagggggcctaaaaaaagattttttgcccatttttcctttaaatgctggccaggaaaagcaaatgttttaaaggtcttctgggtttaattgttgggcttttttttagggatgctcaaaaccaaaggaacttggaaaaaaatgggtgtttttgcctttttgcgaaaaccaatttcccaaccatgatggatttttttattcggatataaaaaattaaggtttaat

SEQ ID NO: 428431 - DNA, 344 bp, Oryza sativa
  unsure (1)..(344): unsure at all n locations
gttcctaaaccctatccggtgccggccgccctctccctctccctctccggcgccaccaccgagcgccgccacctctgccacccctcgcgccgccgcgtccacccccgacgctgccccctccttcctctccgatcctcctcctccgccgtcggtccactctccgcccttcgccgcctccgttgccggccaccaccggccgcgttcacgccacgcctngtntcgcctcgctgcccccacccccgtccccaccccgtaggtagttgcatgtaaagaggagggattcggttctccctcgtggagagcttctcactcggggcagcgaaagaggccacattgacaggagc

SEQ ID NO: 428432 - DNA, 422 bp, Oryza sativa
tttttttttttttttttttttttttttttttttttttttttttttttttttttttttttttttttttttagaaaaaactggcgttcggtggaaaaaaaaaaagggtcgggaaaaaggggactagtacaagaaagaccgtttagggcaaagagaaattatttttgggatttttacaaacaggggtttaggaaaccaggatacatactggcaaaaaagccctaattggaattttggatggatttccataactgaaaaaggagccaggtgaaaatgggttaaaaaggccacccgggtttatgacccatccattttcacgaccacaggggcaaacccataattttaataaattagattcaccggattggtggcaagatcccatccaaatgggggttccaaaagggattttaggtttggaggccatg

SEQ ID NO: 428433 - DNA, 444 bp, Oryza sativa
gggaaatagctcgaatcattttaaagatgaatggcaagcgtttgatatccagattttttttcaaatatggctatctgatagttatacaacatacaaatgaggatagccagagagttcatagacataaaaatggattttgcaatcatgtgtatcccttctactttcattctacgccaaaaagaagcacatgatgctacactgacaacccagatcatacaacatattggaatttctcaagtctgatccgtttggagttggattctctagtctttactggcagctgtcccagtttcgcgagtctatttcttcgccttctttgttctcttcgtagtttgggttttccttgtaaccttcttagtggcctttcctgcaaccttcgccttcttctgtcccttccccgccggtttctcagcttttcttttggtttttgccttaggttgatct

SEQ ID NO: 428434 - DNA, 510 bp, Oryza sativa
gttcattgagctagggttagggagaggcgctgccagccacacagccgcacgaccacacgcgcctcagcgccggcgcgccgcctccccggctcccgtctcccctcgcgcctcctgactcagtctccgcctcggcaccgcctcctcgcctcccctccctagctctgctcccccagtcctgttggttgtcgcccagcgccggcgaccgtagccatcggccggctgcctgggcgcttgggaccggcccggcgaccgcctccctggaaagggaagacagggaggagtcgaggcgacaccgccattctgccggcgccgggcgccctcggctcctccccattcgccacctctccctcctcttgacgaccgtcgaccgagaccgagaccgacgagctccctagctccctctctagcactcctgctgcaaagcaaagtgcaaagtaggactacccaaagaaaaattcttggctacgccactggttgccaccttccctcgctacctgtgcctcgctcggt

SEQ ID NO: 428435 - DNA, 466 bp, Oryza sativa
cttattactgtatatacaggggaatagttgaaggtggttcccatgtccttcctggattgcaaagcaataaccaaagtaatgatgtcaatttcgtagataaacaggaagacagtactgaaacacggattgattttgaaatgactaacaatcagaatggaaattgtagcaccagtgatacttcccatcatgattcctggtccaggagattacgtagggttagaagtagtgcatcggggcaacgaaggcggaagagatggagaggacgggtagatgatctggattatggttgtgagaccccattggatgcaaataaacatgctattttatgttctgctcttgacatggatgaagatgatatgatagttaaaccagacttgatggcagatactggtttgcctgattctagatgtaatcaaagatcagaaatatgaagttattttagagatgagggatcttacacgcaaag

SEQ ID NO: 428436 - DNA, 440 bp, Oryza sativa
atcacctagtgtattagtataatactgctagagaaacaaaacatgagtgctcatcgcagaatgttaatcacaaaacgcatttccaagagcgtaaataacttatctataagactactccgttactgccaatcaattcaatggccatacacagtaagaaaatacaaaagggggttactacattacaagaagctcattagctacaggaacgaaagcttcctaaagaatccactgctgctttgctgttcctctcgcagcagcacaaaagctctgttgtgaagactagcaatcgccgtatataacaactcaagctgagttggttctgaccattagctcttctcattcaactagagacttagctacaactgggctgcaaggatctcattccatgtatctggtagtccaggaaggcaccagtgcaagcaatcttgaactccctgcgt

SEQ ID NO: 428437 - DNA, 412 bp, Oryza sativa
gatatctttcgttgtctcctgcagctactcgccttcttgcgccgccgccaagacgagtcgcggctgaacagggggagggccgggcggcgatctccatcagagcggaggggaggcgatcctggcggctcaactattggatagcaacattgaggattgcggatgttaagaattttgatatcactagcacgattgcccctctcgccgactgttgaccaaggagaacgtccaccacgccggggtccaggcttctagaatgggagccactattatgtgcctaacactacacgtccagggctatactggatttgaagagaagaaaaaggggtgttcaagaacataggaaagggatgggacttggaagcataaatggactgagggcaagcaccttaaacgtgacattcttgcttttttc

SEQ ID NO: 428438 - DNA, 344 bp, Oryza sativa
ggggggttgaattccccatatatattaaaaaccttaaaaattaaaaaggcatactaaattttggttttcaagcctttttttaaaattttttttaaaaaaggggaaaaaaccccaccatttttgggatttggggatcgattttaaaaatatgcatgggggggtacacaaataacggggggacgcatgcatgagctaggggaaattttatgggggaaaaataattaatatggatggaggacaagggggttaattatagctggggcttgggggaaatgggaagggccccggtaacaaacgggttgactttgttttggggggccttgagcccgaggttgggttcaagt

SEQ ID NO: 428439 - DNA, 393 bp, Oryza sativa
tatgctgtcattgcctttagacggccaaggcctgaatggttatcacaacagccatttgtcattcagcacacaatgacaccggaaatagcggtgcatggctttccggctgacaacttcacacgatcagggagcagagggataaatcttagtcgattgtcgcttggtgttgagcttaatgaaccatcaacatcaaactggacatccggaaccagtgttaaattcgagcatatccggcctgttaataacgagggacgctccatagccagggaccatgatggctttcctctaacatgcagtggtaacctccatgataacatgattatcttgaagcaagagtctggttatgcagatgttaatgataatagctttaaaagttaacctccaatggaacaa

SEQ ID NO: 428440 - DNA, 372 bp, Oryza sativa
ggacgattgaaaaaaagtaaaaatccagcattataaaattacagatacatgaacgggaaaactggcaaatttaaaaacagaaggatcgggtatataggagcacttttattccacttggttaaccccaaaaacaaacgaattttttggggggaaaagaaaaggcaattacatcaaaggataaaatagactaaatataaactttccattttcaagggatacggggagaaacaaattttcaaataagggggcaatcaaaaacacatgcttggggttggagcagcagccccaccagaggcccgtcccgccataattttaattggggggggatcccatgccttgcccttgggggaactgcaatttcaagttttgttg

SEQ ID NO: 428441 - DNA, 170 bp, Oryza sativa
aaatggaaaatttttattttaaatttgaaaaaagaaaaaagggaaaaaggaaaaaggaaagaaaaaaatagtaaaggcaaaaagagttggagaatgggatgatgatgatgatgaagaatttaacaaataaaagttcgaaactctaaaagagaaaaggaaaacgacgaaaa

SEQ ID NO: 428442 - DNA, 395 bp, Oryza sativa
cgatcaattggctttagtttcgggcccattgacaatttgcagatcgacagagagtacgtacgtacacagagcctggctttccattgggtaacccgtaaagggcgccactactcattcgatattgccacactgactgactgactttagcatctgctactactactactccatggacacacagcacactacctgacctgtcaccacggcgccgagcacaagagagaacacacaatgatgatcacacacactggatcgatctcactgctactagtagtagtagtagtacgcgtgcaatgcgaggcgggcatgggaatttttttacatgatggagcaggcgttgacgtcgtcgtcgttgaagaggttgctgacggggtcggcgccgcggtggggctccg

SEQ ID NO: 428443 - DNA, 223 bp, Oryza sativa
tttttttttttttttttttttttttttttttttttttttttttttttttttttttttattttttttataataattaggttcaataataaataatttatatttaaaaaagggaaaattataaaaagtttaatttcaaaaaattttatatgctgaacaatttttttgtcaataagggattaatggtaatttatttaaattgtggtgataaattaaaaggggtttt

SEQ ID NO: 428444 - DNA, 440 bp, Oryza sativa
agagggacgaatattggggccacagtcgtacagaaactattttaaatttgaggtttacacaatgctaattctaagtatcgaaatatatacttatagggttaaccaaaaacgacggccaacatcacgaagggctctgcttcatcacaactactaagaacgtatacatgagcacatgacaccaggatctgagtgcaccaacaattttcaggagttccagattatccttacaaaaaaatcaacctattgctgctgaaagcctagaactatcaaaagccttgagagatgcatgcaactgacggggcactgaaaggatgttggccgtggcttgatgcttactctctggtggctcaactatccaaaatttatgcaaaactatttgaacgccactaggccattcaggagaagctataacttcttccaacagtcgttaaaactgtgcc

SEQ ID NO: 428445 - DNA, 358 bp, Oryza sativa
catatgagagctccttactggcttccatggagagggcataagggggagaaccggcacctgcgcccgagaagaaagatctcaggcacaatctgatcgttgacgatcaagtgtctgcgcagcctacatcagagggtgcctcggacgaggctgcagtagcttgctacacgagctggcgtccacttacaaggataggcctcgctgtactttcgatgtctcagcgttttctgaaggatcatgagaaagaggatacttggaggcttgtaggaaactacgcctttcagcggatgaagaaggctgattgacaaggtgagaggggaattactgatactgagtcaaagcttgaaaggctagaaatctt

SEQ ID NO: 428446 - DNA, 338 bp, Oryza sativa
tttttttttttttttttatttttttttttttttttttttttttttttttttgttacatattttttatgattttttaaaaaaccacacgcaatacacaggaaaaatgggcttaaagggttaaaaccaaaaggttaaaagccaatttaggagggaccgataaggaagaagctaagaaacttggtccagcctaatattgcaattaccggaagaaaggttcactgccaaaaattttttgggactttagaatttaagttggtcacagcaaatattaacgtactaacatacttttatagggaaactagaagggcccgaaagacaaatgcgggttttggggtgtc

SEQ ID NO: 428447 - DNA, 416 bp, Oryza sativa
aaagaaattggcacatctatttattggaaaattattgatgtatatattttataaaataataaaaggtgaggaaagcttcctgcccagtttttttggtcctcagttcggctccttcagtccatcgtttgatctcttctacccatctgctcaatcaattactggctgtcctccctcactccacccgcactaaacctgatgttaattcatcaacaactaacatatttccctggaagtacgtgtactcgcacgcagttaacgatgatcccttgttagagagagatcgtgccgatgccgatgcagatgcaggcaccggagcttcaattcacgaggagttctgaattccggcctcttcatcgcccgctttgccctgcttgtcactagctccggcgacctgcgccgactcctgtgcctccttg

SEQ ID NO: 428448 - DNA, 387 bp, Oryza sativa
agggggctcttatttggacgcttttttttttaaatgggtcatgggttttccacacacatttccctttacattcccccggtaaccttgacccgccaaaaaaacaagggcaaaaattaatcttccggccgccttcatattttaactccacccttttttcagtgagacttactttcttaacccccagggcccgtttcaacactggttttacccccggcccccctttttaggggccccggggaaatgggccccttcttcccgtttcccacaattggaaagggggggcccaaaagaaaagggaaaatggatttgggtaggaaattgccaattatactttacacaattttcgaaccccaaatggggatttcaaagggaaaaaacccccgggga

SEQ ID NO: 428449 - DNA, 440 bp, Oryza sativa
agtcatgcgatacgatcccgcaggatttgcaaaataacaggagcagcatcacaaattaacaaaaaaaaaagcttaatctcccaaaatgctctcataatacacgagtttggcagtagctttagctccttcctcgagcaagcaaggtagctggttcactagtggatcaatatttcaaaacaaaagaagatgttaagcaagttgggcaggagcttgttcagggacaagacttactgcaaagactgacacttcttggtgcaaatgctttcaggcagcgtaaggtaatttcactggctccaagtttcagtttacagactaatccattgcaacttttcagtttgctcttcattgttttcagtgtcccaaccgttaaacgcagctattttttttttgctaaaatgaaggttttcaatcagctatatctctttggctaaacgagagct

SEQ ID NO: 428450 - DNA, 163 bp, Oryza sativa
cacagattattttttactcagaaagactgaaacattcagaatttacataattcatttcttagttccatattatatatacacataattacatagacagtatcagatcatcttggaatgcatatctggagaaccaacaataaacatgcttacattaacaaccatt

SEQ ID NO: 428451 - DNA, 387 bp, Oryza sativa
aaacgcttcataaaagaagaacgtgacaaatatacaagagagagacgcaagaaggaaactcaaggaaaactaaaaaacaggcgtatagcaaaaactttgaccatcgagatcaaccttaactgtgactacacactatgtacatatccctcgaggtactagcaacatagcaaaagctgcagtacacctcaggacaaggagaaataagagctgcttgatcggattggatacggattaatatacttagttcttgccttacataccatccttatcatcctccgctttttcttgcaatgccattatttccgaacaggagcagcaagaagcagggcacccccttgaacaccaggcacaaaatggacaaggcgaaagaagggtccacggaggaac

SEQ ID NO: 428452 - DNA, 260 bp, Oryza sativa
  unsure (1)..(260): unsure at all n locations
ggggggaaacttttattttttattaattggccgccaaaatatttttgggaaacagcaagagttttataaacggggggggacttttattccccgggttgccccccaaactttggtttttttttaaagacccccctgggccccctttttttcccgggggggttttttttttttccccttttgttgttcactttttcgncccccacaaaggggttttttgaaaacccccttcccagggaggaggggtttttcttttacccccc

SEQ ID NO: 428453 - DNA, 75 bp, Oryza sativa
cactgaagttttaaccaccctgtgtcagtttgatcagacttggagtgaaattttttctcaggatttttttaacat

SEQ ID NO: 428454 - DNA, 97 bp, Oryza sativa
gggaaaaacctgttcttttttttttatttttttaggggccccaacaccaacttgatacttttactccctgcacttaacctctttttccccaatccca

SEQ ID NO: 428455 - DNA, 466 bp, Oryza sativa
aacagaaataaatagttatatttgaattgcaatgtcatatatttattatcacaaattcaaataagtgcattctccaatagaaaagcaaatcacaccaaaagaatatctatgtactggtatttctggcacagaccgtgccttcttataacacgaacatataatatccttctgattgtaatcggtctgatgaaaatgctcaatctgcatccatttgcaaggacccctatgcactgaaggcttatcttcatttggttcacttctgagttctgaattctaatgcttcgtgacttccttcttgatcttgagtgtacaggtcaaaaaatgcatcactgacaaatcgatatataaacggaaccaatcgatacaagattacagcatcttttttcctctgtatttgatggtcttttcagaatttagactcagaacactcataagaatgaaccctaagttgatgcggatggtgcag

SEQ ID NO: 428456 - DNA, 76 bp, Oryza sativa
cactacacaggcccctttgatgttttgccattatagtatttgcaccctacgtgtgggtccttacacttatagattg

SEQ ID NO: 428457 - DNA, 97 bp, Oryza sativa
ggggggtcaaaaaattcccctttattctttagcaattctagggaccagaccctttggggcccaaaacctaaaggcttaaaaaaggattaccctaaag

SEQ ID NO: 428458 - DNA, 402 bp, Oryza sativa
cacctaaaacccttattttttttcaggggcccaaaatttttttaccactcccttgtattaaaaagctggaccaggggggccaaattttccagcatttcggttcaggtccccgtaggtgattgcaaaattgcagccaagttaaagcgaaccaggaaaatcgggaaaaaaattattccccttttttctttctttatggacgggctggaatcacacggggtaagactgctggatggcctaaaggccggggcctttgagcttaacacccgtttttacatgccctttgagcgtttggggctcccttagcctggcattttccgccctccttttcgccttttcagccatctgattgacctcattgtacccagccttttccgaaaccatttgggcttcaggcggttgcag

SEQ ID NO: 428459 - DNA, 238 bp, Oryza sativa
gggggttgatttgagttgaaaaacatatgaacatccaagacaaagtataccctgcaaaactatgaataaacgaattacaattgtgtatgataccgatacgagggcacaaactgctgcaaaatggtgctcaattaaaaaagaaaaacttattccttcctatttgttttacaacagttcacattctcatcccaattgacacctagaaagaaaataatggcagaaagagcacattattcac

SEQ ID NO: 428460 - DNA, 433 bp, Oryza sativa
ggtgcaagaaaatattcagaatttagattacatcatagaagttcagtaacttcagacatattacaaacataaatttcagacaaagagataaataaatcacattcaagtagaaccaaagcacgaggaatcagtccagagaccgattcagtagacatgcaagatataatccatccaaattttaagcagttcttgatcaattaaatgcgaatttccggcacatggcgcagcttcgtttcccagttctccctcttccactccagcttgaaatcgtctgactgcccccacacaacgagcttcctgagcgacccaacgagctccaagcctgtcggaaccgctgtcatagccgtcagagacaccaagtacagtgcctccaagctctcaaccgctgacggctcgatgacaacagtgtgcacctgcttcatgtcaccaagga

SEQ ID NO: 428461 - DNA, 340 bp, Oryza sativa
attggtcttcttattctttgctcaggggagcggacgagactactgagcccaccgcggacggcgcggcggcagagcgcggcgacagcgcggacagccgagaggaccacgagctcaaccacagctaaaggggagcagcatgacacaccgcggggcactcacgccgacgagtgggagcaccacactccccgcaccattggctgtgtgatcaccgcaacaccgacggcgctgccgttcaccaactcagaattcacttgcacggcgacctgcacaagcctcctacgaagacgacaacaccgggtcctgggcgttcgcttacgcacgactgagacacacgccgacg

SEQ ID NO: 428462 - DNA, 382 bp, Oryza sativa
gaaaacattcttaccataaaaaaaaaattttttagcttgttattttacaacacttttgtgaaggataacaaaagggggaaaaaagttttggcccaattttgtttcaagggtttcagagcaagaacatgaacccataacatgggaccaaaggtttacccattgtttggaatggggaagaatttaacaaagctttttaattccttaaacaacatttgcatggtccaaaattgggaagacgtgttgcccatgaatatggtgggaattcctgaagacgatttgtcaatagactaggtggtcccaccaggttcagggtttggaacattccaaccagggaggttttcgatggcctttttccttctcgcaagaagggacttgggatggt

SEQ ID NO: 428463 - DNA, 161 bp, Oryza sativa
ctgaaaattacacattcagcatgatttcagataaacataccactaagggacctaccatattgatcaatttatctaacaagaacctgaattccatcatggacaattcacagtattgagtaacctttaaaacaagaatggctatttccttaattgaaacttcc

SEQ ID NO: 428464 - DNA, 379 bp, Oryza sativa
  unsure (1)..(379): unsure at all n locations
aaacaaaggtcccccaaatttttttttttccaaaccctcttttttaacccccttttttcaaaattgggttcccattttggcccccaaaaattttttggggggccccctttttccctttttttcccccggggtttttcccccaaaaatccccccaaaaaattattggttggtttgccccccggtggggggatctttcccaaaaaaaattttttaaggggtaaatatttttggggcccttaatggaaaggtcccccgggtttttaaaaaacccttttacccccttttgggttcaagggccccccaaaaagttttggggaataacccttnaaaaacccgtgttcccccctttttttaaagggacccccccaaaaaggggccc

SEQ ID NO: 428465 - DNA, 181 bp, Oryza sativa
ttttttttttttttttttttttttttttttttttttttttttttttttttttttttttttttttttttttttttttttttttttttttttttttttttttttttttttttttttttttttttttttttttttttttttttattttttttttgttttttttttttatattttttttttattt

SEQ ID NO: 428466 - DNA, 172 bp, Oryza sativa
ccttcccctttttggttcgcttttccaactccactcgaatcgtatccaatgaactccgccttaatccaatccaaaccattgggcgattcttcatcttaaccaatcacgaacactgaacctcataaaaaaggacttatacacctaccatccacccttccttccttattttagg

SEQ ID NO: 428467 - DNA, 399 bp, Oryza sativa
gctaacgtgggagtaatattattatgtccatctgcacaagggttcttttaaccctcaacagagcatacttgtagaatcaccactaagatatatttacaaataataacaataatatttggcttttcttaacccttaggagaacgagagggcacacagattctgtacaaccccgatacaagggaggaaaaacagattccgctgcttgggctgctactgtggttgatccgatgatggtttttaggaaattgtagcactccagcctgcaggcattttttctccgtttacagggttcgaactggcatcggtagaagctttcatccatgccatcaactgccacggtattctttctcatggccaaatgcaacaataatattgctccccctcgtggagtctgaactg

SEQ ID NO: 428468 - DNA, 369 bp, Oryza sativa
gaacttatgtcaccaaaaaatactttcagaaccatgatctttacaacgctaagccagccacctgtatttttttttaccagcaaacaaatgctacgttaagggtcaaccttgtacatctcgtaccaaaacgaatattttctccagaagagacaatgataacggatactcgtttcaaaaggaagcaccataaataaattgatgcggggaagttttcctcaggtttggatgccaaagcggctcaaggtagggcgtcagcactttcacaagtggggaggcagggtaagtatgcctttgaaactttagccaatggttgtggcccccttttaggcccggatgcggtcctcttcaaaatccattattcctccaggt

SEQ ID NO: 428469 - DNA, 426 bp, Oryza sativa
  unsure (1)..(426): unsure at all n locations
cagggaataaaacagcaaagggaaggttccgaatgaaatgaatgtgctttacagtatacaattttttgttaaatacaacaatactgaaacaggattacaaagacttcacgggggcccatttgtttcacagggacaataaaattcccaaacattagaggtctagtttaatgggcccaattacataaagaactaatcaaattttttcccaaagaaccaaatgattgggctggttgcatttgggggaccccatttttataaaggcttggggacaaaattaaatagcaatcttaaacagaaccgccctgtttaaagccctgaggggaaagnttttaaacagccccctgaagcactgaggaatcgaacccccaaagggaaacaaatcctggctgcccaggtagtaatcaccaacaacagattccaggaaac

SEQ ID NO: 428470 - DNA, 453 bp, Oryza sativa
ggataaaagtcgtaatttcaatactaattaatagccaaggttattctaagtaactacggtttcttaattttacagacagaacgcaattttctttcagacatctttgattctaatactacagtgctaaatgtcaatgtgcaatatgccccctcataaatcaatagcacaaaccttatcccaactagtacacgagcatcattttgaaccattcagcagcacaagcattgcccgactattttgtttgtcatctctttaaatccaaatccacaagcaccaaatttcagattacaatgcttttatctttctctacaatttctcaaaatcaaccatagatcaatgggtatcatcatttgataagctcccattatgcatgctgcatgcgatgctcaaaattgttgcgcccttttacaggttgcgtttagaaataccactattatgagttggagggagctc

SEQ ID NO: 428471 - DNA, 430 bp, Oryza sativa
tttttttggctcaagaggtttgtattgcatggtatattgggtcaagctatccatagtgttgtacattctgtgatcaatataatgaactcctgaagtgtgaaagaatggattgtagcccatggaagcaaagaacatgactttacaaaaggggaggaaacaatgaaggcaaaaaaaaaaaaaaactgtggggggttaatactgcatcaaaccaaggggggggggggggttcaccttgagcgtctaaagcgagccgccaggaagcaatgcttgaatcagacagaaagaggagtcccccaaaggctttggccaaatctgagttggccaacccccccatggctgccggaccttctctggatgcaaaaccctgaacattcaaacacttttgccgggaatattcaggggaaagaactttgtgcgcccgtgagatttt

SEQ ID NO: 428472 - DNA, 92 bp, Oryza sativa
atatccctggtgcatactccacactacctttctacctcctaagaactcgtcatcagcctttttcattccacatttgttactggttttccatt

SEQ ID NO: 428473 - DNA, 460 bp, Oryza sativa
gactcttcaaaccgatcattgaataaataagggcaaaatcccacatttgtctcactctagaagtacactttctgccaatagctataacaaggttaaaaatcccatttggagaaaaataaaattttataaaatcgactgcagtatgtagcgagacaaaaaggagatgtttctctctagttccgcttttttcacgattttggcatttcccatgcacttgacatgtgaaaaaagattatgctacctgcttccctttccttagtctatctagttctgactcggcctcttgcagtgctgattttagtagtgatactctctgttccacctcctccactgtacctcttttcagagcagccttgtatggtgtaaggaaatgccgtgaaaagttctgcagagcctggacgccgcatacctcttctggaagcaagggcaacttggttatgttgaagtcatcatataacat

SEQ ID NO: 428474 - DNA, 417 bp, Oryza sativa
  unsure (1)..(417): unsure at all n locations
aaaaattgctgtcagcagattttttcaaaggggtcccctcatacattttcttcaaaaaagaacaaatgcccaaaaacccaaacattaaattttcaaacaacttttttcccaacaatcaaatccttagatcacaatttaaactgaccgccatgttctaacaggaggttttggggggacttagccattcccagattttttactcaaaatcacttttttcaccatcattatggattggcccttcattttcactggcattttggctcacagtttcgtcagcatcattttaaaagccatttttttaaacttccaattccctttccctttggatctgatcaactagggaagcctgtccccaaatcccatnttaataattgctaggctgctcgttgattgaagctttttcaagatctggaacct

SEQ ID NO: 428475 - DNA, 324 bp, Oryza sativa
acaaaaaaaaagaaaacatgactcgcaaaagtcccattacaataaacgatcctagggagggggaacatttccaatttttttttggggcctaccattaaccaaaaacttagcaggaaaaaagggggaccatggatgccatgtttaaaacaggagcccccggaaaaaagcataccaagagttcaaaaggggcataaaattcaaccctgaaacaaatccaaaaacattttgaaaggacaccaaaaatcccaaaaagaggagtttacatgaaaagggcttgtgaaaaccgaaaaaaaactgccttgtaaaaaagcgattaaaaaacca

SEQ ID NO: 428476 - DNA, 113 bp, Oryza sativa
attcatattcctggttcctattttacattacctaaagtaataccaaatacttttatgcattacttgtaaatcttgataggttaattgtccctcgttccgttagaaagatttta

SEQ ID NO: 428477 - DNA, 83 bp, Oryza sativa
aaatcaaattcacttccattcatacccattacccttttacctttcctgttaatctgtttcacttaattagccaatataacatt

SEQ ID NO: 428478 - DNA, 246 bp, Oryza sativa
caacaatattttgggtttcattttaaaaaacattccccgcccccatgaccaaggggcccgtttaaaaacggccctttttgggaacctcctgaatttcaaggggcccttttgcgcgggtggggttttccccaattcccccatttgtgccgcctttaaaactccccatttggcaccccaaaacccaagaatttccacacccaggtattgccatttttgggccccccctaattttggcatttctttttt

SEQ ID NO: 428479 - DNA, 378 bp, Oryza sativa
ccaatgaaaaaccccaaatgttacatttcttccttttttttttcctttttgggaaatattgcactaaggctgacccaaaatttagcaccttaatacaatgggagaaatttcctagcacgataaattcgaacctgaaaactacccaaatttggccctatttatactagttggctttatttgggtccagagatggtaagaaatatttaaacgagcacacgtgcccctaacgttcaaattatccgttaaacggtctgtacaccttgaaagcgtcaatgacgtaagaaagggagcccgaaagggcggcaaaggaaaccacggggcagcacgcgctgaacgttttgggcgaaacccaccttgggctgccacgtggcacgccgg

SEQ ID NO: 428480 - DNA, 455 bp, Oryza sativa
agtattaattatacatgtatgttgaattaatctctgattaagataaacacacatgctgatgtaaccttgctactcaagacctctgtttgtgctttgcatgacaagtatctgaagtccgaactgaatggcatgaatgatggaccaaatgtacctcaaatgtgtaaatttttatcgtccctctctttaaaaccacccaaagaattgatcatcatcacattggaacggtgtacaagttagatcgtcctcgacgaaaacctatctacgacgggcggtcatcgacacagagaccatagttcatttgatctgaatgtctgaatatttcttggacatccacattggatgtgcgaatattgagccttcaagacaggagctccctgacgcatatctgcaaagtggtattggcgaacaaccgggtcaccttctttgtcggatggaaggagtcccacatgaagtac

SEQ ID NO: 428481 - DNA, 281 bp, Oryza sativa
aatgaaaggaactttttgatccattactctcatttttgattatatattggcacaaatcccagccgcttgctcaacacacgatacatcgatcaatatttggccaacccatgccaaacaagggtttttacaaattcaaatttcacctcttatcaatagctaagaaaggaaatcaagcatttgcttcaaaggttaactactacaaacagttcatgggaagaaatcaagtaaatttatgaaacacacgcgaattatggatcatcgagatatggctagctagcgaa

SEQ ID NO: 428482 - DNA, 275 bp, Oryza sativa
atagtaagtagctacgacgacgcatgcaggccgccgtcggctgggagcctccagagcttgtctgccctccttttttttttttttttggtcagcccatgatattatattcatttatattagattcaaataacaagtgtgctaagcccatataggcccaacaatcaaacacaataacaacccatatagcacaacccgacaaacatccaatacaacacaaatcttacaaccgaacggggtgtcaggcgggtgagcaaaaccataacagacaccaccat

SEQ ID NO: 428483 - DNA, 72 bp, Oryza sativa
caacatacagccatttcgctctatacacatggttggcacgtctcattgccacgtttgcaccttctttttgca

SEQ ID NO: 428484 - DNA, 291 bp, Oryza sativa
acgcaccatgagctcacctatttacctgaacaagcacatctcagcacacacattgacatggcacatatttccatcatgttgcaacatactttaaaccattatcctcaccattcagaaaacatagactaaacattgccctatagagttcacctgatagctggtcgtattactgttgcatgacttgggaggcatgcccgtacgaaacatagcctgacatcgaccagggtctttatctgtggcgcataccacattggaacatggagttgctagctgatcagaccacactgttcc

SEQ ID NO: 428485 - DNA, 74 bp, Oryza sativa
aacttacatgatgatggggatttaaatttatttaaacttggacggagaagtgggttttttttttgggttttcat

SEQ ID NO: 428486 - DNA, 325 bp, Oryza sativa
cccccccaaaaaaaatggggccccaaaaaaaatttttttttgggggtctaaaaaccccccggtctttttggggggggaatttttaataggggcgcccttaacccaccgggggttcgccccaagggcatcttttcaacggggggccccccttgggtccaaatattaaaccccttgggaaaccattttttcccccaaaaattttaaaaaaaaccccccaaccccttttttgggggggaatttttgagaaacctaatttggggggcccccgttgaaaaaagggtttttgggggaaaacacaggtgggtccccccccggggaaattttt

SEQ ID NO: 428487 - DNA, 422 bp, Oryza sativa
gtctctccttcgccactccccagcggcggcgcgccttctccctctcccagcgacggcagcgcgccatccactcccttcctcccagatccgactggatgaggggagggcagcggcgaggaggcggcgctccccaccccttactatctccccaatactggatcaggctgaacgaggggagcgccggaggggccagccaccgcatgccacagacgaggtgatgctcccttcctagctggcaaaaacgtcaggaggagggagcgcacgtctactgggcggcccttaacgcactacctccaacagctggagggagggtgacgcatcatacaccctagcgacggccgcgagggcttctcactcatcagagtcctccacgagctaatgggggccaacagaaaccaaatatgatcagaacatagccgcag

SEQ ID NO: 428488 - DNA, 92 bp, Oryza sativa
aaaataaattcatttattattctataaacataatcttattacaaattatatttatacattcatagaattggaaacgaaatgcatgccggaac

SEQ ID NO: 428489 - DNA, 178 bp, Oryza sativa
ccaacgcacgcggttagcaccttttatgggattgtctaatgccatggctgccttctttcgggttgcttaacaaatggggaagcacgagatgctttctccgcaagcataccgttaccgtagcatctggcatgcagatgcagaagctgcgccgttactgaaagatgtaccagaagcagtg

SEQ ID NO: 428490 - DNA, 139 bp, Oryza sativa
atattacattcatttaatttttttttttttacttgtcttaacatcataaaatcttatttagtgactgaagctaaatcagaaggcctgtacatataaccaggtttttgcccaaagccttggtgatcataatgaaactcaa

SEQ ID NO: 428491 - DNA, 198 bp, Oryza sativa
gttatttccagcgcactaagcttgcacctggtatgggacattcacacacctgggcgagcactatctcacctgcctgccatggtatatacttgcatgctgattgagatgatgcacacagttggctgcgcctacggcgcctgagccgagaatacaaccggggctggaaagatgcactaggactcgattaacatatctacc

SEQ ID NO: 428492 - DNA, 80 bp, Oryza sativa
cccctgtcgtttgtttgttatccagaatacaacctgatggagccccattagatgatcgcaccatgccttcaaaagggccc

SEQ ID NO: 428493 - DNA, 127 bp, Oryza sativa
tgactttttcaacgcacgcatcttgcacctcatattggcttttaatttgccatgggggcttctaaatcacctacctgccaatcgataaacacgaatactcattctgatcaagaacacagttattgta

SEQ ID NO: 428494 - DNA, 159 bp, Oryza sativa
aataattatttttttatcattcttattactgattggaaccatcatatttaacaatccattcaaggaatcgaaaaaaaaacgaatgtcggaacattgtccattttgttttctttaccggcgctaaattagtccccggatacctcagctcacgatcattac

SEQ ID NO: 428495 - DNA, 134 bp, Oryza sativa
gttaaatcgaacgctcggagtcaggacctagggttcgcttgtaacaggcaatgtggggtaacaaatgagctgcctattattgtaaacactagcatacgcattgtcaccaagaacacagttgttgcagcatacga

SEQ ID NO: 428496 - DNA, 457 bp, Oryza sativa
atcaacatcgatgtctccctttcgcccttggagcagagcaatccaacagcaaacagggcgatgagacccaaagcaaaagaaatgaaaacgctaacaatttcagctgaatcttcacagcaactatctaaatgttgcaaaactgcaatatgatatacatttctgggttctgaagctatgcttggtgagcaacatctattccagcctcggtaatgagctgttctgtcaacgaaaagagcccggcaatttccttttcagcatcaagaatcatatccatttccttgtttggtttggtcttggaaacaattctagtactgtttacacttggcgatgcaaccagattgatgccagaatcagttttgccacttctcaggaatcccttagccatatctgcaagtttcttcaatgtagtagtagcagcaagtgccttcaccttcgcagcttcagttttgaagatttt

SEQ ID NO: 428497 - DNA, 373 bp, Oryza sativa
ggataaggaaccaggggtttattatatatgaacaatttaaagatagaacccctatttggctatctacaaggaagggttctttcccattttttaagagggattttatacttaacaagaacggaagacaaccccctttaatgaagaaatttttttttaccaagggaaacagaaagaattgatccgccagggggacaaaattttgcaaaacgatgcgtttgttttgcagtttttttggctaaacaatgcttcccgccattaagtttccaatgaagacgaaaaacgcaaagaccaaaggcccaaacagggctttgaaacccccatcggaggaagaccttttttttttaagaagatccagttcttggcgaagcttctg

SEQ ID NO: 428498 - DNA, 114 bp, Oryza sativa
tttttggggttgatgaaatttttttttgttatttttttaaatttattatttagaaagcctttgaacataatcgtacacagagttccttcgggacattctaagaactagaaagta

SEQ ID NO: 428499 - DNA, 237 bp, Oryza sativa
aggttgttcatacgcatgttcctatatacaaaggggggtaaccaacgcagaagggctggaaacataataccatctttgcaggaggcataggctcgcactttgaaacattagacacgagatacagcctgtggttgacagagaaacattactggctggactgctatataatacatttaccgctaatagaataggcgcacaattggaagcaccggcctacttgaggcttctacgtaagcc

SEQ ID NO: 428500 - DNA, 289 bp, Oryza sativa
tcgttaccctcctctcctcccctcctcgtcgcggggctagggttacgccccctgctcctcctactcctcctcctactagtgtgggggcatggccgggagcgaggcggtggctgcccacgaggcggagatggacccggacttctcgggcgggggcggggggggccccagctacgagtacgccttcaactcggtcaacatctttcgaccgggtgcatacggatccaggtccttcgcgggggacgacaacgacgaccacgaccacgcgcccgggttcagccgggaccgctgg

SEQ ID NO: 428501 - DNA, 193 bp, Oryza sativa
aacatatattcattaaatatgctatatatataacaaaataatacataataaatattcaaacaccgaagggcaaacgacaagtttgcctgaacactatacaaactatcgtatttaacgaatgtgaacaaatactcttttacaaagaaccgcggccatttccaaagcctttctgaccaaaatgtaagtcaaacat

SEQ ID NO: 428502 - DNA, 201 bp, Oryza sativa
gagtatttgagtgcgcccggtctgaaccctaggaggaccggctaaactccaggaattagatcgtttcgcatgcatgccgacgtataaagaggagtgcgcctacaaacgaaggaaaccgatacggaacattatgactttaggtacagagatccgcatcgatctgaaagaggtaacgacggatgagaaaatgctcgagcaccg

SEQ ID NO: 428503 - DNA, 79 bp, Oryza sativa
attctaaatatttaataaaattataaataataataattctataatataatcatatacaaattgaatgtctgaacattat

SEQ ID NO: 428504 - DNA, 131 bp, Oryza sativa
gagtactccagctaacgctctcagaaccattgagaggaccttaaatgtccatgaaggcgttattttctcttgctttcaaacctagaaatgtgaatgctgattgacaccatgtaaaccgtattggtcacatg

SEQ ID NO: 428505 - DNA, 123 bp, Oryza sativa
aattattctatatatttaataaaattataaattattattatactataatataatcgaatataaattgtttgcctgaacattataaaatctttcttattgcacgattgtgaacaaatgctattt

SEQ ID NO: 428506 - DNA, 114 bp, Oryza sativa
gtctatatcagcgcacgcgctctgcaccttggcggggaatgtaaaaggccatggatgcttccatgtcggatgcttcccaacctacaaaggaaaatgcgcattcacaccaagtaa

SEQ ID NO: 428507 - DNA, 96 bp, Oryza sativa
aatattaattctttatttattattaatatttaaaaaaatcataaatttttatttttcaatcatataatcaattatcaaaagtctgtctgaacactg

SEQ ID NO: 428508 - DNA, 132 bp, Oryza sativa
ccagcgcacgcggttggcacctttgatgggattgtcaaaggccatggaggcttcggtttcggatgcgtgccaaccggtaaagaagaatgcggattcacaccaagaaaacagttaccggagcatatggctaca

SEQ ID NO: 428509 - DNA, 85 bp, Oryza sativa
gctatatatttaatgacatcatccctttttttaagccattcctttcattgtttatatattgtttgtcggaacactagaaaatctt

SEQ ID NO: 428510 - DNA, 119 bp, Oryza sativa
caacgcacgcggtcggcaccacatatgggaatgtcaaaggccatggaggcttcgatatcgggttcgtaccaacctataaacaagaatgcgcattctcaccaagcacacagttatcgtag

SEQ ID NO: 428511 - DNA, 102 bp, Oryza sativa
aatcattataaataaataaaaaaaatatcattttaaataaacaattcaataaatctaataaaacacactttttggaaaattagaaaatcattagacgttaaa

SEQ ID NO: 428512 - DNA, 157 bp, Oryza sativa
ttttaacaccaacgcacgcattctggacctagtattcgcttttcaaacgccaggggagcttccaaatcacttacctaccattctacacactagaatgctcattctcaccaagaacacagttgttgcagcacattattacatgatccacgaatcaccc

SEQ ID NO: 428513 - DNA, 185 bp, Oryza sativa
attcattataaataaattataaaactatcaatttaaataaacatttcaagacaacgaatatatcacgttttttgaaaaattataaataaatactacgttaaaggatataaataaatcccttaagacaacaaatttagatcattaccagaggtatgaacaccataatataagccaaacattccaca

SEQ ID NO: 428514 - DNA, 160 bp, Oryza sativa
gtcttaaccaccactcgggttctggacctgggcggcacttttaaatctccaggagagcttagaaaccatgtacggaccttgcgacacaggtgcgtgcgcatcatcaacaagaacacaggtgggtctacacactacagcggattcacgaacacccttctgt

SEQ ID NO: 428515 - DNA, 288 bp, Oryza sativa
gtattcatgataaattaattttataaccatcattttaaatacacacgtcaaggcaatgactatatctcgttttttgaaaaagtatatgttaagaatacgttatagaatataagtaaatgcccaaggacaacaaatttatatcattaccagagggatcaacaccataatttaagccaaatattttacctcccgaaatctttagatcatagctctttgccaaacttgctgctttgcatttcatggcagttagcccataaacgaaataaaggcagtatggaatcgtgtaca

SEQ ID NO: 428516 - DNA, 128 bp, Oryza sativa
ttcctccacaccactcgcgatccggactttgggttaacttttacatctgaaggattgattacaaaccctatacggacattgcgacccaccactctactcaacatcaacaagaacacagggtcgtctac

SEQ ID NO: 428517 - DNA, 258 bp, Oryza sativa
aaaattaattttaaaaccattattttaattacacatgtaaaggcagtaactataagcattttcttgcaaaagtacatatttagtaaacgttctagcttaaaaataagtcctttaagacaacaaatttataccattacgagaggggtgcacaccatgatatgagccaaatattccacggtgcgaactctaaagataataggtacttgccggactgtccgctttgaagttcagggcaggtggcccaagaacgaaatcaag

SEQ ID NO: 428518 - DNA, 155 bp, Oryza sativa
gttttaatgaccattcgggttttggaccttggggtagcttttaaatttggtggagtgattacaaatcttgtaaggacattgtgaaacacgattctatgtatcagaaaggatattataggggggtctatacactacatctgtataacgagcacggt

SEQ ID NO: 428519 - DNA, 198 bp, Oryza sativa
cactggtacctatcaacgaagggcggcaagttactccgaaggacgggaaacatcatattacctttccagcaggcatttgtactgagattgacacgttcaggagctgatccagaccgatgggttaattagacacagaactgattacactgtcaaatgatacgtgttcctatcttagacttgggagcagatggtactaac

SEQ ID NO: 428520 - DNA, 238 bp, Oryza sativa
gtgttctctagctagcccgcttggctcccttgatgtaatagtaaaagtacttgtatgaattctagttttgtgctttcttacatctatctggataggtgctttccaatgaccggtacggttatcagagctgcttcctttcgttactatatctgacatcgtccttcgaaacaatggcacacctgccagatgctgactctacagcgagatatgcgaattggtttgagggatatgagaaacc

SEQ ID NO: 428521 - DNA, 132 bp, Oryza sativa
aacatatatccaaaaaatattctatatatataacaaaatcataaataaaaaacatacaataatataaggccatacgaaacgtatgcctgaacactacacaatctatcatagtaaacgaatgtaaaccatttc

SEQ ID NO: 428522 - DNA, 168 bp, Oryza sativa
gttttatccaccaaacgctctcagaaccatagatgcaaatgtcacatgccatgtatgcttccttttctcctgcttaccaacctacaaacaagaatgcgcattctcatcaagtacacagtttccgtagcctattgcctctgatcctatgatacacatggatctacaaaa

SEQ ID NO: 428523 - DNA, 290 bp, Oryza sativa
  unsure (1)..(290): unsure at all n locations
gcgacactattagaagatgctatgcaccgtcgcatgccaccgccgtaccgtaagccnnttggatccctctttagtcggcccgccctttttttttttttttttttttttttttttttttttttttttttttttaacattcatccatcactcattcaatacaattaacaaaattatacataacaataatacaatcacataagtgtaaataaattgcatgcctgaacattatacaatcagtcttagttaacgaatttaaacctatcccccattacaaagcaccgcgtaccatc

SEQ ID NO: 428524 - DNA, 156 bp, Oryza sativa
ccagcgaacgcggccggaaccgtagatgggattgtcaaagtcaatggatgcatcgttttcggatgcttgccaacctataaagacaaatgcgcatttaaaccaagcaaacagttaaagaagcctattattacatgatcctaagatacacacatgatc

SEQ ID NO: 428525 - DNA, 86 bp, Oryza sativa
atataacaacatcatacatattaaatatacaatcatttaattgaaaataaaacgattgcctgaacattataaaatcatttgtcttt

SEQ ID NO: 428526 - DNA, 125 bp, Oryza sativa
acaacgcacgctgtcagcaccttagatgggaatgtcaaaggccatggagggttcgatttcgggtgcgtgccaatctataaagacaaatgcgcattctcaccaagtacacagttatggaagcatat

SEQ ID NO: 428527 - DNA, 149 bp, Oryza sativa
ttattttcagcacgccaacccagcaacacggggaggacagttaattgccatggaggccaccaaaccatataactaacgatcgggaacgaagcatacgcaatcacaccaagatcacagttatgcgaacccactgctacagcccctaagat

SEQ ID NO: 428528 - DNA, 114 bp, Oryza sativa
aataaaaattaaaaaaaaaacaagaaatatacagaactaaaccacctaaaaaaatacacacataaagtaaaagaataaaaaacaatatttgtaattctaaaaagaaattatact

SEQ ID NO: 428529 - DNA, 100 bp, Oryza sativa
ttgtaaacgagcactctaagtcatcactaggtgtagtcatataactttccaggggggattaaaaaccagctaattgaaaatcgataaagacatatacaca

SEQ ID NO: 428530 - DNA, 295 bp, Oryza sativa
aatcagaataaagtataatcatgtaccaaacctccatattaaatagacacctagagccataaaaggtatatcattttttgaaaagctactagtaatttctacttgagcggatacaactaaaaccgcaaagaccacagatgtatatcacaaaccgacaaattaaaaccatatgttcatccggagatattacatccccaattttcgagaccatccatcctttccgaccaggacgcatcgcaggtcatcctcgttaagccctgaacgatataagggcaataaggatccatgaacagct

SEQ ID NO: 428531 - DNA, 240 bp, Oryza sativa
gttctacagaccacgccggttattgactatgtgctcacattcacatctactggtacgattactaaccatgtaggggcaatggttaccaccgctgtactcatgataaagaagaccatatgatcgcctgtacactactgtggtgtgacggaaaggattttgtcatgtattagctgctaatatctagaggaacgatgatgaaatggtggacaaattagactctggcgtacgaagtttacataa

SEQ ID NO: 428532 - DNA, 93 bp, Oryza sativa
aaaagtattcatgaaaaactaattataaaactatcattataaataaacacgtaaaggaaaaaaaaacatcaagttttttgaaaagttaaacgt

SEQ ID NO: 428533 - DNA, 192 bp, Oryza sativa
tttctattgaccactcaggttatcgacttcgtgttcacctttatttcttctcgagtgattttaaatctttttcggacattgcatcccatccctctgctcagcaccaaggagagcacaaggcggcctgtcacctattgcgctgtaacgatcgccgttgtgtctacactagcagcttcgatccaacaactacat

SEQ ID NO: 428534 - DNA, 89 bp, Oryza sativa
aatggattcatgaaaaaccaagtacccaactaccattttaaatacacatgtcaagacagtaactaactaaatgtttttgacaagggaaa

SEQ ID NO: 428535 - DNA, 135 bp, Oryza sativa
gtcttatagaccactccgggtctggaaggtggggccactcttacctctgggggattgctaacgaacccgttagggacatggggaaccacgactcggcacaaccgcaagtagaggatggggtggtctataccaaat

SEQ ID NO: 428536 - DNA, 160 bp, Oryza sativa
ccgagtgaaccgattgcattgctgaggaggacgggctaggaaacattacaatttggcaggaaattcctgcttcctatgaacttcctgcaaatctcctacgtccaaactaaaaagggaggcaagacaccatttttttttcatcttttttttgtaagatccg

SEQ ID NO: 428537 - DNA, 111 bp, Oryza sativa
aacataattcctttttatattttaaatattaaataaaatgataaataaaataaatcctattatataaggacatactaacattatggctgaacattacaaaatctatggtag

SEQ ID NO: 428538 - DNA, 169 bp, Oryza sativa
gttaaatccaccgaacgctgtgagggccttagagtggctggtaaaagtccatgttatgatccatgtggggtgcatgctaacctagaaagaaaaggaggaattcaaatcttgcatacagtatttgatacatctgaccattgatccggagatacagcttattctgcgagat

SEQ ID NO: 428539 - DNA, 103 bp, Oryza sativa
aataaaagcatacataattttaatacattcgtttaatggaatataaattgcatgtttgaacaatagaaaatcaatcttagtgtatgaaggtgaacagatgctc

SEQ ID NO: 428540 - DNA, 131 bp, Oryza sativa
gttatttccagcgcacgcagctagcaccttggatgggaaggtcagagtacatggatgcatacttttcggatgcatgccaacctacaaagaagaatgcgcattcacaccaagcacacagttgtcgcagcctg

SEQ ID NO: 428541 - DNA, 135 bp, Oryza sativa
aatataaatccaaaattcatgattaataaagaactaaagcacaaattatataaagacaatcataaaattgtaaataaattgattttttaaaaattataaaaacttttttatttacacgaatgtaaacaaattctc

SEQ ID NO: 428542 - DNA, 134 bp, Oryza sativa
gttatatacaacgcacgcagccagcaccttatatgggaatgtcaaaggccatgggggcgtcggttccgggtgcgtgccaatcgacaaagacgaatgcggattcacaccaagcacacagttacggaagcatatgg

SEQ ID NO: 428543 - DNA, 67 bp, Oryza sativa
cacatattctaaaaatttaaacgcactatacaaatcataaatccaatctatgacacggaagcaaaac

SEQ ID NO: 428544 - DNA, 76 bp, Oryza sativa
tttatatacatcgaacatgtccagcacctaaggggggaaaatcataaaaaaggtggggttctctccctcttgacta

SEQ ID NO: 428545 - DNA, 52 bp, Oryza sativa
tagaaagctaacataccaagccattatctggggcaattttttaaacttaaag

SEQ ID NO: 428546 - DNA, 197 bp, Oryza sativa
tcgtttttacctaccacgcggggttacgactttgtgttaactcttccacctcggggggcgatttcgacccgggaacgggcattgatacttacacaactgcgtactccaagcccaaaccgagctctacatgcacgattgtttggatggagaggcaccggcttgttctggatccaatagctctaagccaggatgggaca

SEQ ID NO: 428547 - DNA, 182 bp, Oryza sativa
  unsure (1)..(182): unsure at all n locations
aataaaaatttaaaaggaattctgataaagaaagacccaaactataatattaaatacacatgtataaaccctaaataaattaaagttttagaaaatttaaacgcaaaaaaaacgttagactataaaaataaatgccaaaagacaacaaatttntaacattacgagtggtatcaaacccaaaa

SEQ ID NO: 428548 - DNA, 161 bp, Oryza sativa
ttcctaccccccactccgggtccggactgggggggagctcgtcactctggaggattgctaagaaaccctgtagggacatagctacacacctcttggcgcaagagcaaggagaggatagggcgttctaccccctagtacggaaggacgatcgcaggtgtgtc

SEQ ID NO: 428549 - DNA, 157 bp, Oryza sativa
tttctaaacaccattacctgtatagactttgtggcaatccgtacgtcggcaccgttgattagaagagaggaggggacatgggcacccaacactcgagccagcactgaggagtcgcccgagcgagctagagacggtgccgacagtaccgatccccggt

SEQ ID NO: 428550 - DNA, 441 bp, Oryza sativa
ccgtgcggccatggactctaaaaggataacaaaacatacgtacttaactctcctatagttattccagaggccatccgctctagatcaaacataatgcaaagttgcaaacacgccggattactccaaaccccaccccgacatgaacctgcacgcatgctcgcgtgtacatcgcatcgaatccgcctcacgtggcgagtacgttcaagtacagaggatcgagaggccgcctagcctaacgcatgacgtggccttcgttggccttcttgaagagctgcgcctgagccgcggcggcgtggctcgcctcctgagctgagcgcggcgctgaacgcgtccttcacctgctgcgtggtgaaggggaacctgctgttcaccatggagttgagaagcgacgcccctgccctcgcggttgagctcgcccacgcccgtcttctccgcgtagtt

SEQ ID NO: 428551 - DNA, 544 bp, Oryza sativa
tcggtcgccgcggcgcgtagcctcgtcgacgtcatcggcggggcgttcggtggccggaaggactactacacgcccggtcctactggccagcaccactcttctagtcccagtcattcgcacaaggctccgccctgcgcgccgacgccgccacagggaggtggtggaggctacaacccaccctcgccgtccattggaacctctccgacaacgccgggaggaggtggaggctacacgccgacgccgagcgacacgccaccctctccgtccagtgacacctcgccgagcactccgggtggcggctgctcgtcctcacccacgccgtgcgacgcaccgccctcaccgtccagtgacacgtccccgacaacgccggggggaggtggaggctactcgccgacaccgagtgacactccgccctcgccgtccagtgacacctgttcgacaacgccgggtggaggtggaggctacacgccgacgccgagcgacgcgccgtcctagccttctagtgacacctttacgacaacgctcagtggaggtggaggctaca

SEQ ID NO: 428552 - DNA, 105 bp, Oryza sativa
aataaaaatccaaaagacattataaaaaataaaaaaaaccataaataaaaaaaagccaaacaaagaaggacacacaaacggcatgcctgaacaatagaaaaccta

SEQ ID NO: 428553 - DNA, 204 bp, Oryza sativa
gttatatccaacacacgcggcgaggaccatggaggggaaggtcaaactcaaggggttcttacgtgccggatacgtaccaatctaaagacgagaatgcgcattcacaccaagcacaccgctgtggaagcctgcgaccttagagccgggtatacacttgattctataagaggtaataacacctgataagttctatagctagctggg

SEQ ID NO: 428554 - DNA, 160 bp, Oryza sativa
tatgtgggccgcccgtccctttttttttttttggtttttttttttagcttttaaatttttttaaaataaatccagaacatatgatgaataataaaaaacacaacaatgattttaaatacaaacatataggccataacaacaagacggttttagcaatttt

SEQ ID NO: 428555 - DNA, 158 bp, Oryza sativa
tactaatcgaacgaaagcaggaaggggttcgtcggggcggaacatatgccttccgctgtccccatggaaagcactcatacgaaacatgaaacactggggattattgcgaagataaccacatctgatccacattcactgggaccatgtgttacagttaa

SEQ ID NO: 428556 - DNA, 131 bp, Oryza sativa
attcttatctcattctaaacaaataatgtcaccacactttttttatatactatcgtttaagggcatacaaacactatgtctcaacactagccagtctttcttctttcaagaacctaaaccgttcctctatt

SEQ ID NO: 428557 - DNA, 257 bp, Oryza sativa
ccaacgcacgcggcctggaccttatcggggactttcacagtccatggatgcttctgttccgcttgcgtgccaatcgacagacacgaatgcgcatttctcaccatgtgctacagctgccgatacccatggcttttgctcctaagatacaccctcttctgaacaatgcacttacgcacgattaattatatgacaactgggagatcatccggataggttatttatgctcaaagcataatacacttagtatacgttgtact

SEQ ID NO: 428558 - DNA, 83 bp, Oryza sativa
ataacatgcattaaaaataataatacgccaaatcattaaataacatacacagaagcaaaatccacttaattgccttaaaaata

SEQ ID NO: 428559 - DNA, 91 bp, Oryza sativa
gataataccaccgcacgcagtcagcacctattgtgggaatcacaaacgagtaggagggtattttatcagattcatatcgtccttcaaacac

SEQ ID NO: 428560 - DNA, 280 bp, Oryza sativa
aaaattctaaaagtaattatgatgaactaataccaaatctgttattttaattacacacaaaaaggccataaatacatgtaggtttaagaaaagttaaaagtcaataattggtaatagtatataaatagttgcccaaggacaaacaatttagatcattacgggaggcatccaccccaaattttcagacaaaagtggcatatcgcccactctatggatcaaaaattcataacaggcggtctgatatgattttcatggctgctagcccaagaaccaaatcaag

SEQ ID NO: 428561 - DNA, 157 bp, Oryza sativa
tttctaaataccactccgtgtttggactgtgtcgcaactcttacatctagaggattgatatgaaatcctgtagggacattgctacacacacctctgctcaatatcaactagagcccagggagtcctatccccaattgcgcattaacgatcacaggtc

SEQ ID NO: 428562 - DNA, 300 bp, Oryza sativa
attattctaaaagttttcatggtaaattaagtcccaaactgttattttaactacacccgttgaggccataacgacattccggttttagaaaatgtaaatgtcagtaatacgttatagtatataaatacatgcccaacgacaacaaatttatatcattacgcgaggcatccaccccagattttcagccaaaagttgcacaacgcccactttaaggcttaaaattatttggcaggcgttctgatatgatatccacggccgctggcccaagagacacatcaaggccgtaaggcatcgtataca

SEQ ID NO: 428563 - DNA, 146 bp, Oryza sativa
gtcttaacccccactcgcggtccggaccgtgtggcagctcttccctctgcagggttgctatgaaacccggaagggacatggcgacccaccacccggcgcaacagcaccgagagcccagggagatctatacaccaactgtggagtaa

SEQ ID NO: 428564 - DNA, 321 bp, Oryza sativa
ataaatctaaaaggcatcatgattaataagtttcacaactgttattttaattacacccgttgaggccctaacaacatgacggttttagaaaaggtaaacgtctgtaagacgtactactatataaatacatgcccaacgacaaaaaatttctatcattactagtggaggcaaacccagattttcagaataatgttgcaaaacgcccactttaaggattaaaattttcttacaggctttctgatttgatattcatgaccgctgtcccaagaaccaaataaaggtcgtaatgaatcgtttacaccattatggattcgacactaa

SEQ ID NO: 428565 - DNA, 155 bp, Oryza sativa
tgttctaattaccattcggggtctggaccgtgtgggagctattctctctggagggttgatgagaaacccggaagggacatggctacccacctctctgtgcaacagtactgagaggctagggaggtctatgccatagtgcgctttaacgatcgcag

SEQ ID NO: 428566 - DNA, 216 bp, Oryza sativa
acatcactatattttattgatcattatcaaaacgtgctcatgaatacacagtaccggcacagagcttaccttctctccaatactggcacatacaaccacgcggttcaaacaaatgcgtacatctatacggcacacgagcgtacaaatactggaccgaggacacccactcacactctctaccagagacgcccatccctgcatacctaactagtctta

SEQ ID NO: 428567 - DNA, 312 bp, Oryza sativa
gggcaaaaaaaaagttaaaaacacaaaaattaacaaccccgaaaaaaaagaaggggtttattaacacatcgttggcaaaaatgggccaacaggggggccgaaaattataaacgggcaaagaggaaacaacttggtaaatgaacccggcgaaaaaaatctttaaggggttctaaaaagaggctaattataccaaaaaagtccattgcggaagggcccattgtcacaggaaagattttttgtggggggcgcactttgaccccttggccccgggggggccctttttcccacttttttgttggaccccccaagccc

SEQ ID NO: 428568 - DNA, 104 bp, Oryza sativa
aattagagacaccttattttagtcaactacaaatgcatcattcaacttgatgcattgctttgaacactagcttgcctttactattaaatgaccgtaaacagggt

SEQ ID NO: 428569 - DNA, 213 bp, Oryza sativa
ccaacgaacgaggtcaggaccacaacgtggatgttcatcggcatggtctggttaggtttgggttgcatgccattcggcatacatgaaggcacattatcacctagcacacagctacagatatctaaattctggatgccgagtataaaccaaattctaaaaaatgaattaaagccgcagaagatatatcacgaatttcacatatatcgtagaggt

SEQ ID NO: 428570 - DNA, 120 bp, Oryza sativa
catgctgtacaaatgaagacactatattttagtctactacaaacgctgcatgcaatttatatcaattcttggacctctagattgcctttcttactccatgaccgtaaacaggttccctat

SEQ ID NO: 428571 - DNA, 233 bp, Oryza sativa
gtcttatccaacacacgctgtcaggaccgtatccgagaccttaaacttcatgggaagcttaggatgctgatacgtgccaatctacagacacgaatgcgcattctcacctagcgcacagttatagaaaccccatatcgacgatcaagttacacacccagttctagaggatgcattaacgagccataagatctaggtctactgtgaactactcgtatagattacttagacacaaa

SEQ ID NO: 428572 - DNA, 164 bp, Oryza sativa
tataattccaacacacccggccaggactgtatcggggactgtaaaagtacagggatgcttcggatccggatacgtgcaaagcgacagacacgaatgcaccgtctcatatagtgtacagtgactgctatccgctgacagtggggcccagatacacgcagtgctat

SEQ ID NO: 428573 - DNA, 240 bp, Oryza sativa
cttgctatgctttctatgcgagcggcccgttcctttttttttttttttttttttaaaattttttttttttttttttttttactatttttatatgtttcatgtttatataatgagtactctttaccttttatttctcttaatttgtccttcaaaatatctagtttcttgtcatgatacactgcccatattgtttcaagactttaaactgggtcccaatgatccatatacaaaaaagattat

SEQ ID NO: 428574 - DNA, 227 bp, Oryza sativa
ttcataacaaccactccaagtttggactgtgtataagctcttcaccctacacggctgctaagtaaccagaaacggacatatctacagacacgaatgcacattctcatctagaacaccagctgtttatatcccatattgtcgatcaagagacacacgtctatcataattatgtatatataatctagaataagcatgactatcttcaccaatttgtatagctgctatta

SEQ ID NO: 428575 - DNA, 107 bp, Oryza sativa
aatatgttaaaagtacaaagcgtgggtacacgtcactttttgtgcctcacaatctggctagcaagacatcgaagttctagacattttaaacgtctctaattgttact

SEQ ID NO: 428576 - DNA, 164 bp, Oryza sativa
gtcataactaccactccctgtccggaccgtgtcgaagaccttacacctcgagcgttgataaggaacccgaaacggacatggctacagacactaatgcgcaatttcatctaagctcacaggcgacccaacccttattgggcattaacgagcacacgtggtgctat

SEQ ID NO: 428577 - DNA, 197 bp, Oryza sativa
ataaaacttaaagttataatgggtcattcagtaccacacgctttctacaaaagggcacggaaattccacaacgaaagcaggtttcttaccagtggaccaactagaacatgtaagggtaacgtcaacacacatgctgtggcaaaatttaggctttgcctgaatcgaaaggggagaatctgttcttggacccttcctat

SEQ ID NO: 428578 - DNA, 157 bp, Oryza sativa
tttttaactaccactcccagtccggactgtgacgcagtaattatctctagaccgttgattaggaaaccggaacgtacatggctaccgaccccaatgcttaatatcacatagagcccagggagtcctatatccacattgtggctaaactatcacacgt

SEQ ID NO: 428579 - DNA, 80 bp, Oryza sativa
actctgaagtgtcccgcacgaaacataagttcttgcaagttcattcatatttaattcgtccaagaaggaaaactggttct

SEQ ID NO: 428580 - DNA, 495 bp, Oryza sativa
cttgctttctatcgggccgcccttccttttttttttttttctttctcaacgcaaataatctagtaaagaatacagcagcaatatctctatgttgataaaaaaaaaagaagagaggatttgtctcccaaacatcggaaaccaacccatccatatctgcaaacacagtagttacacgtctcatcatacaatggaaaaactggcaaaagaggccaagccatgcatctgccaaaaaaacaacacaagcccaagcagccccactgtggaaggactattttagcaaactgctgaccaaacctgacaaaacgtcccaaaggaaaccaccaaccaggcgcctctctaagcaactgcgctatatcttcgcttagctccttgcttagatccaacgttacaggagcccgacaggggaagagcttcgcatgaaacggcggtcaaagctccaatcggtgctctgacaaggcaaaaggccaaagtcgccgagagatgaccgggggcttt

SEQ ID NO: 428581 - DNA, 433 bp, Oryza sativa
  unsure (1)..(433): unsure at all n locations
cccaattctctgcacgccctcaaacgcgccgcccgcattccgcgatcccccccccttctccccgcagatctgggatcctcctccgccgccgccggatcccccctccgccgcctcccgtgcctcgccgcgccgcgtgatccgatcccggcctgacctctctacccccccgccgccaagttggcgcctcagcgcaggtcgcagcgcctcgccggcggcggcggcggcggcgcaggggccgccgcgcagccgccgggcgcgcagcagcagcagcagactgcgcccgggggcgcggggatgggggactccggggacgccgtcatggcgcggtggctccagtccgcggggctgcagcacctcgccgcctcctccacctgctcctgctccgtctncaccgacggtggtggagtggacccgcgcggcgggggtggtgtct

SEQ ID NO: 428582 - DNA, 510 bp, Oryza sativa
gccttgcgcgtgtacgagccgttcagtaccgacccgcagttttatgtgtatggttatgatgatctggtgctgcagcctagagagaatgcatcagtcaccttcatattcttgccgaagttgctaggcttttcatcggcgcatttggttttgcagacgaatttcggtgggttcattatacaggctaagggcatggctgtcagatcaccttatcagttggagccactagctgggatggatgtcataacaggtggacggctggagaggaacttgtcgatattcaacccttttgatgattctctctatgtcgaggaagtggctgtttggatgtcttcattccagggcacaaaacaatcttctcatatagtttgtcagttaggcccttttgacgagtcgttggagtttacttctttgagtagcaactggtatacagcaagtagtactgaatttggattgccgatgatccatatcaggcctagtgagcaatgggaggtgctttctacacaaagcagc

SEQ ID NO: 428583 - DNA, 286 bp, Oryza sativa
caataaggcatgtaaatctaaaacagacaacttattttaggcaagttcaaagccatcatttcttatctacaatatctgactacgactagttgactgttgttgccaaagaaggttaatattttccttacctacgtgcaatctggtgactgcttcacacggctatggtaaatatttggccaggcgacaataggctgcgtttgttttcactattcagaaccaccgatgccatgtcggaatccattatgcacaggttactcgaagatcatccccgttgcacggagatcca

SEQ ID NO: 428584 - DNA, 193 bp, Oryza sativa
gtcttttccatcacacgatgcttggaccgtatccgggaatttaatattcaagggcaggataagatgcggctacgtgccaagcgacagacacgaatgggcattttaatctagcgtacagggagaggaattccaaatcggcatatgaggttgacaccaagttctagaggatgcattaaacagccaaaagttatag

SEQ ID NO: 428585 - DNA, 70 bp, Oryza sativa
cagaatccatgcagttcaatacacctcacctttattcattcaacaacgcatcgttccgtcaacttaatcc

SEQ ID NO: 428586 - DNA, 154 bp, Oryza sativa
gtcttttcaaccactagctgataggatcttatcggagaatttcacattcttgggatgcttatgatcctgatacgtaccaagatactgacgctaatgggccgcctcatctcgtgcccaggtagtgctatcccacattgacgtatgagaactacac

SEQ ID NO: 428587 - DNA, 119 bp, Oryza sativa
catgaggttccaagggcgacaccgcaattttgattacaaccatcctggcaggcaacataaacaggttcttgaaaggttagaagtcctttattcttgcaagaacataaactgggtctcta

SEQ ID NO: 428588 - DNA, 162 bp, Oryza sativa
gatatatccaacacacgctgtctggactgtgtcggagaatttaatcgtcgagggttgctaaggaaacggaaacgggcagagcgacggacacaaatgcgcaaacaaatggagcgcactgatgctcctgccccaaatggacgctgaagggacatacgatgtgct

SEQ ID NO: 428589 - DNA, 222 bp, Oryza sativa
aattctatcttgaggttaaaatggcaacagtgcatttgtttcaaatacaaaggtttccagcacgacaaaaagggtcttgaaagtggatacagatttaattgtaccatgaaaataaacagattcactgccagactatacctctggcaagactgcgcgcaactaccatgagtcctgactgtgagaggacaaaacacgcaaactgaggaccaaacctttcaaaaa

SEQ ID NO: 428590 - DNA, 237 bp, Oryza sativa
tcgttataacaaacgctcaatgtttggactgttgcggagcccttcaatgtcgagcactggtaaagatactggtacgtgcatagctacagacacggatgggcatgtctcacgaagtgaacagggcgtgctaacagacatcgtcgaataacactcacacgaggatctatagcacttacatatgcaccataacttctatgccaacctacaaatacacgcacagatgcttcacgcacaaat

SEQ ID NO: 428591 - DNA, 196 bp, Oryza sativa
gtcccatcatcttttctaatctttataaaatgaaatcataaactcgtcttcgagattaaaaggaactggctttctgtcactaagtgtttacgcaggacatggtctaaatgtaattacgagtcaataataccatgaagttcaactggttaactgtgatactgcagctcatgggttgacagcgcgttactgattgaag

SEQ ID NO: 428592 - DNA, 277 bp, Oryza sativa
agacaaggggggtcctttttaaagggccaagggaactaaataagggacgcgtccgccggcccaaaacgggacggttgcaaaaaacacacacccaaacagtttaagggcccaaaaacccataaaggcctacacaaggcccataacccaataaagacctacccagagtttggggcaaaacctgatggcttcagtaagcctaattacctaacaatcccccctatttaagaaacggtttggtccccaagccggagcttctggaaaaacaaacttaaattga

SEQ ID NO: 428593 - DNA, 103 bp, Oryza sativa
agagtggatagaaaatttttttatttccattcaaagcaacgtattctccagtttgataagcctaacatagaggtccgttgccacctgttgatacggacacgta

SEQ ID NO: 428594 - DNA, 455 bp, Oryza sativa
gtgctttgtataaccaggttattgccttctatttcaagatgctggaatgttggtacatgtatttgctgtagcagcagtaaaaaaatgctggaatacaagatgccttgttacatgtgcgtgaagtgtgaacaatcatgacaacaagaaaacacttatttcactataaaaaaggtcacagggaaattgagtcactgttcaggtatgtaggaacaaaagggcacgtgctagatttatattgagaaacaccatttcttgtgaacagagttctacatgatcagactctccagtgccaccctgttatttaggtacaagattattttggaacagagaacaaactatatttacttattagtattatgtgcacttgttgcgtatgaatatatctaagccctcaacgcgaggaatacagtttgaggagactggcgacatacacaaacctttattggtactgatgt

SEQ ID NO: 428595 - DNA, 413 bp, Oryza sativa
gaaaaccccaccaaactcttcttcttcttcttcccccattttcctcgcgttcccctcgtgccgcccgcctccgccgtcgcgtccccgccgccgccgcccgccttccccgaggggcgcagccgaggagcgccccaccccccctccccatggccgcctctatcgtacacaccgcggtagtcagcgtgttgaagcaccggacgcccgagtggtggccatgcacccactcggcttctgatgacaattcctgagcctggcgtgcgccaacggtaactaaaactctatccgaccgcgccgatgcctagacacaccgctaagagcgctttcgatgctgtcacacctggccgccggacggagcgccccatggacagaccgcgtgataaccacattcttcaccaaggacagagcgggctcag

SEQ ID NO: 428596 - DNA, 181 bp, Oryza sativa
gctccagctgggccccggcagcagtagctgtcgacccatcctgctccatgcccggcccctcgccgccggcatcgcctcctcttcgcgagggcccgccgccgtggcggcgcggacgcttgggcggctgctgctgctgccgccgccgccgccgatctcgccggaccggccggtgagggggagg

SEQ ID NO: 428597 - DNA, 187 bp, Oryza sativa
gacataattgagttagatagacaattgatattctagatatcaatacagatacaaacattcacaatgtcaataatccgttgcatattagatttgttcatcaaatgggaagcgattgcaacacatttcaacttgatctattcctgtatttaacgtacattgaaattccttccttcattttcccgcccaa

SEQ ID NO: 428598 - DNA, 466 bp, Oryza sativa
ttttacctcgcagcctgggaggccgtgcgctacctgctccgcgccgacgccgacctcctcgtcgccgcgcgcctcgttgtggcggaccgtggtatgaccaacttctccatcgcctctcccacatcggtcctagccttcgagggcgcactcggtttggccgcgcgcttggccggacaccccgatccccaccgcctcctttgcatttgggtctcactgtctactcgtctccccgaggctgtcaatatgatctctcaagtgcagggctatcgtccccatgacactatcacttaccgtcttagagattggcttgtttaaaagccccggccatcgccattgtcgccagtcgttctggacctgatgcaatcttgggaccttgccgttgcttcttatggtggtaacagcattaccaccgacgacatgttttctgataagcatttttgggccctcgaatgatgctttcttaata

SEQ ID NO: 428599 - DNA, 126 bp, Oryza sativa
gaatggacttgtccatattattcgtcactggctggggggcagtcctagtttagtatagtagtttagggtaaggtagtgtagcatccggggcagctgcaacatgtgtcgtgtgcttggcacacgcca

SEQ ID NO: 428600 - DNA, 314 bp, Oryza sativa
atcattgttcgccatggcaagcagcagcaagctctcctcggcgttcgcgctcgccgtcgtcgtcctgctgctcgccggcggggtgatgccggcggcggaggcggcgtcggcgcacctgcacttcttcatgcacgacacgctgacgggggcggcgccgacggcggtgcaggtggtgaacggtccgcggagccacttcggcgacacgatcgcgatcgacgacatgctgtccggggtaaacagccggtagtcggtcgcggtggggttggccaagggggttgataccagctgaattggtagaattcttgtctgggagt

SEQ ID NO: 428601 - DNA, 152 bp, Oryza sativa
gaaacaagtgcgggtttctgttatattatacatttatactccatacaactttggccacaaatttatgctatattatacatttataattacaaactatttaaagttaaattacttgtcttggcacttaaacacatccctttttcaccagaaag

SEQ ID NO: 428602 - DNA, 294 bp, Oryza sativa
atcgtcgcggttctccacgctccactgcggtggactgcgccgtatgtagcgccggggagttccacagtccaccccggcccgcgctcgcgttctgtggagtttctacacgagctctgtcggctacggattttgaggcaggtaggcaggcagtgccgtcgatctttggatgactccgcgaggagcgtcccttggaagtacattacttgcctcacccggtttgatcccgattagttcctttgtcatgatctcttatatccttaatgttcaagttactgatgtgaagaattgctatct

SEQ ID NO: 428603 - DNA, 116 bp, Oryza sativa
tttttttttttttttttttttttttttttttttttttttttttttttttttttttttttttttttttttttttttttttttttttttttttttttttttttttttttttttttttt

SEQ ID NO: 428604 - DNA, 53 bp, Oryza sativa
gggagggaaaaaaaaaatttttaaattttttttaatatttatacaaacttttt

SEQ ID NO: 428605 - DNA, 79 bp, Oryza sativa
tgttcgtcgcggcaccggaggggggctttccccgcgggggttaaggcggcgcccgaggtcgaggcggccaaggagagcg

SEQ ID NO: 428606 - DNA, 87 bp, Oryza sativa
ctaagttccattccacaggtaaatttcatgggttcaaattttaggcacttcaaatgagaaactactagatacacattccataaaatg

SEQ ID NO: 428607 - DNA, 111 bp, Oryza sativa
actgaaagggggggaaaaaggaactcgaagtcgccgccggatttgggatttggagagcgcgcgaggtaaaccaaagttctttttcctatggctcgtactattcaaactgtt

SEQ ID NO: 428608 - DNA, 124 bp, Oryza sativa
gacttgattcggcctctctctctccgcgcgcgcagcagcagcagccgccgatggacctccccctggtggacctcgcgccgtacctcgaccgcgccgtcgccgggggcggcgcggcgggggagga

SEQ ID NO: 428609 - DNA, 149 bp, Oryza sativa
ggggaatccatatttgaatacccaccatttgccagatgatctaatgtttatcaacagcttgcaaaaaaaaaatgctagttcacctgtctatccataccacaacacttattacaggtgttaccccacctatgatttcactacgttacagg

SEQ ID NO: 428610 - DNA, 361 bp, Oryza sativa
tgcttcaccacaatgtcaagttgtgtgctctcatgatctattggtaaacggcaagactcttatttatagtcgcgacccttcttcaagttcaacaccaacttttggggataaaaacattcagttggaagggacagatgataggacccttttggttgacataaaattggaacctgcattggaaggggatttcacagagaaaattacatcttctgtacagagaacagatccaaatcatggcactgagggctctaatctagttgggtctataaactctgtttcttcagcgatctccaaaagaatatcagaagcagtaagatctaacccagagaattttcatgttgaaggcctactgccttcatca

SEQ ID NO: 428611 - DNA, 81 bp, Oryza sativa
acagttcctaaaatgcgtatatttgaattccacaaaggaccaggttggtttcatctttgaggtacacagggctgactatat

SEQ ID NO: 428612 - DNA, 213 bp, Oryza sativa
aatactgggaagaaaaatcaccgtgtacgatccatgctagaccttggcgagtctactgaagcacgaggaggacttgccatggagatgacatatggcggcatgaaacagatgcctagctttcatggcataatcttctgtactataagaaaaccatcacaatgattctgctctagtgtggccaccgacctgtctcaatcgcttctctaatcaaac

SEQ ID NO: 428613 - DNA, 63 bp, Oryza sativa
tgaagacggccatcgacgtggcgaaactcaacaaccaggaggattctgaaggtaggagaggtc

SEQ ID NO: 428614 - DNA, 120 bp, Oryza sativa
gggaacaatcgaatgctatatatcgccccataaatgctcgaagaaaagcgaaaaagtacaagggcgattttacagggctttggtatgttaagcatttttttatacaaaaaggtcagaact

SEQ ID NO: 428615 - DNA, 448 bp, Oryza sativa
  unsure (1)..(448): unsure at all n locations
aaagcaggaaaaggtatgggatcacatatatcatggcaaagtattgggcaacaacccaaattacattccaatggcactctgaggtaaaataacaaactatcaactttagagctgaaactttattccatatggatgatcagactcaaacatttgttctaggttgatcattgcggaaccccctttgagttntctttcgcaatttcctagcaaagttacctttcccttggttcggaagggccttgtttgcagccttcaagccttctagttggcaatcccttgtattcncattcatccagncgtaatggttgccaggatcccgttacggtgctttccgcccctttcactttgcttccccatctcaaacaatccctagcaccaaagggttgtacccctactggnaacaaagtatcatgccatgatgcactagctgagntaattgcctgtcaac

SEQ ID NO: 428616 - DNA, 109 bp, Oryza sativa
ggccaaacaaattgttccattcactcacaattgcccaagcccaaagtagggggtgttcctggttaaaaacaatccccaagatgccattgttttaaagcaaattttgctt

SEQ ID NO: 428617 - DNA, 297 bp, Oryza sativa
  unsure (1)..(297): unsure at all n locations
aataaacaataatctttgtaatattacatccggggaagaaaaaaatgaactcccctgtagctgtatatatgtactgtcctacttgtgctttactttcacaagcctgtattaatcctgcttaattttcctattaacatggatgattcttaaccaatccagttagctatgctacaacttaaacaagatatagnanntgtaaattcctttctgttcgttctgcctgggntngctttagttgcttttgcattctttaggtagacttcttgctgccttgagttcgncttgcacccaggtggg

SEQ ID NO: 428618 - DNA, 87 bp, Oryza sativa
gtgattccaaaacccccccgacactcggcgatggagcatatgcaccatatagtaagccaccttcacatagagagcctcgacaacgac

SEQ ID NO: 428619 - DNA, 56 bp, Oryza sativa
cataatatattgcatttttcattaaattttttatactccaacataaatgtaccatt

SEQ ID NO: 428620 - DNA, 86 bp, Oryza sativa
gtaatataatacagcaacttcaacaaattttaagaggacacttgggaaccatgatcactatatggctttaccattaaggaaacgga

SEQ ID NO: 428621 - DNA, 170 bp, Oryza sativa
agcttccatcattttatttattttgtccaactttatatatattagaaaccatataattcacatgataaagaactacatacaaaaccatacacgggtatttctcaatttgtaccattagaagttctccttgtggaaatcaaattcttgttgttttgtctttgtgggttgaa

SEQ ID NO: 428622 - DNA, 209 bp, Oryza sativa
cataaaactgtgacactgcgattatatcttaattgtacaaagttataacaatacattgatcaaacataataaatacaacaattaaccacttaaaaaaggaggggaaactgcagaaacatattcagtttcctctatccctgtcgccctgctttgtcctacgttacccctatatatttttcaagggataccgtacccctatgtaatggaaa

SEQ ID NO: 428623 - DNA, 90 bp, Oryza sativa
tcgtttcgcttgcttcaccagttcatcatcttcttcttcttcttctttgtctccctcgtttggtttgatctttcttggaagaatcatcca

SEQ ID NO: 428624 - DNA, 148 bp, Oryza sativa
ggattaatgtgcacttattgtaatgcaaggattatcaggagctgcttatggtacaaatgcacattattagtactagcatacatgtatgatcatactagagaaccaatctgcactccagaaggaattctattacatgatctgtactaag

SEQ ID NO: 428625 - DNA, 243 bp, Oryza sativa
caccattgaaattatatgttaattatgcaatcaaaatataataatgcattttaattacaagagatatccggccggtaaaatctagtatataacaaattatacaatggtagagatagcacgtaagcgctatttaatttattaattaaaatttgatatgcacccacttactaacttttgttatctatatatttattccatgaattatttaaaccacatgcatgatattttatagttgcttacaaa

SEQ ID NO: 428626 - DNA, 366 bp, Oryza sativa
ttgagatcgatcaactttccagcgctagaggtcgtctcgatcactcagtgcagcaaactgacgcaactgggcatccggcctcaggggaagttgagggagatcaggggctttgtatgattttcttatctttttgattgtttttgtcttcttttttttttttttggtttttcttttctatatgtgcttgttttttgctatatttttttcttattttactctctcttttctacttttttctttctatttttctttctctctacttttttacttttttttactttctttttttattcatttattttttctcttttttttatcttttctctttcttttttttttttttcctttttttttattttttttttt

SEQ ID NO: 428627 - DNA, 94 bp, Oryza sativa
  unsure (1)..(94): unsure at all n locations
tttnttttttttatttttttttatattttttttatttatttttatatttttttttattatttttatattttatttatattttttatgtattttt

SEQ ID NO: 428628 - DNA, 122 bp, Oryza sativa
aggtcaagagccccacttatgaaggaaattaaacccatgacagttgggaagggggacaaacaagcaaacatactaaattttggggctccaatgcaaggccaacaatttggggcctgtgaaaa

SEQ ID NO: 428629 - DNA, 122 bp, Oryza sativa
atattgggtggaccacacgagtccggtctaatagtgttcacgtaggttgtagagagcacagcaacgttcgtacacagcagcaaagactgagactagttagcttagttgacatggttctaagg

SEQ ID NO: 428630 - DNA, 74 bp, Oryza sativa
acttaaaattttttgctccatctaaacaggtgccataatcactccaactttgttacaggtgtcagaaattttac

SEQ ID NO: 428631 - DNA, 82 bp, Oryza sativa
ttttaattaaccgcgtgtccacacacatttgaatagccacagccaagaagctactcgatggtttctgttgtatatcatttat

SEQ ID NO: 428632 - DNA, 70 bp, Oryza sativa
tcgtaaaaaccaagagtgcgaccaaattaattggaagagcatcatcagcgaatagatttctattttacac

SEQ ID NO: 428633 - DNA, 90 bp, Oryza sativa
ttgtaaaaattaagcatgctatggaattattgggaatagcatatacagggtatagatagaaattttaataagggcaggcaggaaatctat

SEQ ID NO: 428634 - DNA, 104 bp, Oryza sativa
gcccccctagggggaaaaagggtttttccaaaaatttttaaaatttacaaaagggttaaaacatacggggttggcgggtccccctgggaaacaatttgctttta

SEQ ID NO: 428635 - DNA, 91 bp, Oryza sativa
gccaaaaatttttggataaaattgggtacctacattgacactacattaaaaaaaaatttccgaattctacagtcaaaactgtgactggagc

SEQ ID NO: 428636 - DNA, 95 bp, Oryza sativa
agtgaaaaaaaaaacgaggaaaaaaaaaagcaacgaaccaacttttctcccaaggaaacttctccacttttctcctcgcttccgccgcctacttc

SEQ ID NO: 428637 - DNA, 402 bp, Oryza sativa
  unsure (1)..(402): unsure at all n locations
aaaaaataagagccttttctatatcagtgacatgtccctacgttcttacacgaagcaagacagcttatagcataacagcagtactatgtttttcatgaggttaaatttttacctagacctactaaagcacccagttaattcagaaaagtacactacattaaaaatnataagagcctttttcttatatcagttgacattgttcccttacgntnntctttacacgatagcatagacagnctttattaggcattataccagccagaaattattgnntttttcaacgcggttttagcatttgntttacccaaggctttttttngggacanataagcacctatttcttttcagcaattaatccccttttcttggaatgttaggnnagattttaccatcgccccattg

SEQ ID NO: 428638 - DNA, 134 bp, Oryza sativa
tttgggggggataaaattaataatggacttgaaatatgtaaaacgatgaataacaaaacccttttcccaagctacaaaaagaaccagcaataaacaaccaaagaaattataaaaagtctgccttaagtaaattc

SEQ ID NO: 428639 - DNA, 51 bp, Oryza sativa
attaaaacacaactcattacaagtacagaaaataactaaaacttaaacatc

SEQ ID NO: 428640 - DNA, 73 bp, Oryza sativa
gtataacatagcgtgccatggcactacttggtagggcattttcagcgaaaagttggagaggttaacggtgaca

SEQ ID NO: 428641 - DNA, 56 bp, Oryza sativa
attaattcacaatcttttattggtgcagaaattaattaaaatttaatcatcacggg

SEQ ID NO: 428642 - DNA, 88 bp, Oryza sativa
tataaacagagagagcaacgtaagcattggggatagtacttacagcgaaaagcctcaaaacactactgggtcagcaaatataacgttc

SEQ ID NO: 428643 - DNA, 117 bp, Oryza sativa
taaatatttagcatgcctttgaattattggggatagcacttacagcgtattgaaagttatattcactgagacagaaatgatgtcatactacggtagtttcctttcttcttgacgcca

SEQ ID NO: 428644 - DNA, 59 bp, Oryza sativa
tgtccatatgatggtcgcgttggaactccactacattgtataaacattaatttgattga

SEQ ID NO: 428645 - DNA, 142 bp, Oryza sativa
tttttttttttttttttttttttttttttttttttttttttttttttttttttttttttttttttttttttttttttttttttttttttctttttttttttttttttttttttttttctttttcttttttattttttctttt

SEQ ID NO: 428646 - DNA, 178 bp, Oryza sativa
tcttattaatcagcggtgagcagcttgatgctctcaggtatgatccactatccagttttgttgctgatgctcaccagagcaacgttgccccactttcttttttacagtcctctcatgttagagaggttgaagtgatagattactttttctattgcattcctcttgataaattgcaata

SEQ ID NO: 428647 - DNA, 444 bp, Oryza sativa
agatttcaggcttgtactatgtaaccaacacgaccaccttcaagtgggttcagctaccacgccacagttgtgatcatggagaaccagcagttgtcatcacattcgaggaacccctgacatcctgcttcgacggtgctgttgagcattatcatgtcgtcgctgccttccacctcaagggcagcgtctggacatctgagtcatactcctccaggactgggaggtggactattgctaaagatgcccctcctgctgtggaggtgaaggcggagtctggtgttggtacactgggctgcgccttctggcgcacttcccttgggtctatcctctgttatgactccgggagggaccttctttaaggtattctctgcccttgagtggtaaaccaagatcccgcatgggagcttggggaaatggagggagattttactgtgtccctggttcaag

SEQ ID NO: 428648 - DNA, 181 bp, Oryza sativa
gcaacagaactgcagtagagtagcagcatcttctccattctatgctccgctcattaatccttgttcatgtatacagcatgtattatagtagcattcaacaaggatgcactcacagcatctcttacatacaaggctaccagttgcatttctcaatctttgtttaaaaaaaaggcagaaaaag

SEQ ID NO: 428649 - DNA, 574 bp, Oryza sativa
ttagtaaggaaggaagctagggttagctagctgtgcatggaggagcctggccctgaggaagagaaggaggaggaggtggttctcttctactttctcctgtgttttcttcctgtcactcttttcgtcgttttcatcttctttgtctcctccttttttcttttcctctcctcctccctcttccttttctgtctctttttccctttttccattttttttttttctgtcctatttctttcctctttttccttcttgctttcttcctttttcttttttattttttacctttcttttttttcttctgctcttttcttctttttttttctttttttcttttttctcttctttctcttttttttcttttttttctctttctctttttcttttcttttcttcttctttttttttttctattcctttctcctctctttccctttttttttctctttctttccctttcttttttcctctctcacttctttttttccttctttttattttttccttcttctttttctttttcttttctttcttctttttttctcttttttctcctttctctttattctctcttttt

SEQ ID NO: 428650 - DNA, 154 bp, Oryza sativa
gaaacaattaaatgtccccagttctggttaaggttcgtccaggattcaactaagcatcacacttaacaaacattgatgaaacaactttccaaaaaaagggttagcacgagatatccggtgtccatatattaagaaaccccagggccctccaagg

SEQ ID NO: 428651 - DNA, 276 bp, Oryza sativa
ttatgcgctcactctcgcgcgcgcgcacacactcgcatcgtcgcaccgatcgcggcggcgacggcgcagatctcctccgcggcggcgtctccggcttgcgctggttcgtcgtcgtctttctggttcggtgactctcgtgcggatctgatgagcttgttgttgtcgttgattcgtttctttcctttattttttattttatttcttctttttctttttctcttcttccttctcctctcttattatttttcttttttccttttctttttcttttttttt

SEQ ID NO: 428652 - DNA, 134 bp, Oryza sativa
gatccttatctatttatattcatattaaacactgttgatttccactcagattacacacaatacaaatacaccgacaaactgccttaaaaaccaccaaattgattcaaaaggtaaaacgggtatgagggtatctt

SEQ ID NO: 428653 - DNA, 87 bp, Oryza sativa
attaactctcaacttttttttagaactgtagctaatttttatacactcatcacgggggcacgttgaatgcactccagataaaactgg

SEQ ID NO: 428654 - DNA, 94 bp, Oryza sativa
tgttatagagagaaagcgttgagattattggatacagatcgtacagcgaaattttgggtagtttaacattgagatgcacggaagctaccaatgg

SEQ ID NO: 428655 - DNA, 438 bp, Oryza sativa
tcgttgtaaccgactacgtacacatattcgacacaaactctaacaaactccaccttggcgaatatgccatgccaacctaaatttgttccatgcgcgaaccttcgtgtaccaggacttgagttgatcctttttcgccgctcacgccgagctgccccgacgaaccttcaccaggctcaccgtaacaagagactcccgctatccctgcaagttcttcctcttgactccacctgcaacagtgctccaccttctctcatatcaccacagtcgttttgccaagcgaaattggatttcttcgtagctgtcacattatagactcccgaagaccatgttcaacttcatcttctgtcttaaatttgacttgatctaatccatggccagataactgacgtcatcaccaaatagataaattaaacttatcagacataaagtgaatccttt

SEQ ID NO: 428656 - DNA, 395 bp, Oryza sativa
  unsure (1)..(395): unsure at all n locations
gccacatgtaattgaaatttgattagacatatatatggattattacagagtctgatgtacatctttcctatcaccaaaagggatcgatcaacaaacattacatgacaagaacaattaatttgccgacgacgatgacgacaacaacaacaacgtgaacatgaaccgtaaaaacgaaaaaaaaaaggagattatcttaccggaatatatctcctctaatcttattatgaacacataataaaggngaattaaaaacgcccgtgttaattaattaccatacgttcgccgatcacaaggccaaggctccggccaccgccgccgccgcgagcaccaccgcgcgccacgacgcggcgccgcccgccgccgcgttgggccggaagccggggtcctgcgggtag

SEQ ID NO: 428657 - DNA, 120 bp, Oryza sativa
gggtcatccagcattttacgcattttttaccttccagcttgggttcataaattcaacttaacctttcaacaacaatttttcctgtttgaaaggcttttttttggctttaaaaaaacccaa

SEQ ID NO: 428658 - DNA, 125 bp, Oryza sativa
ttttttttttttttttttttttttttttttttttttttttttttttttttttttttttttttttttttttttttttttttttttttttttttttttttttttttttttttttttttttttttttt

SEQ ID NO: 428659 - DNA, 173 bp, Oryza sativa
atcaatccaatttacgcttattaaccgcgaggaaaaaaaatcatccctcaatatgctgaaacgagaggtgatacagctatggattcgcaatgacaaaatttctccaaccccaaatatttcagtattccattctaaattctcatttttccattcttatacaaaatggaggttac

SEQ ID NO: 428660 - DNA, 294 bp, Oryza sativa
aatgtgcagggggtacttcgccgacatcgcagagatacgcaagaacggcggcaagcttgcgacagcgaataagatcatcattccggaaatcgcagccgtgaagttccctgatctttctgtgaagtcccctgatggcaggacagtgaatttgccgcttgtcgcacctccgcgaaacgatgatccccagactggcaatacagtggacacacaaaatgatgattgtaaggctggtgatatggtggttcctgatgcttcattggtgtgcctttcctttcgcgcaagctcccagaaaat

SEQ ID NO: 428661 - DNA, 51 bp, Oryza sativa
gaatatttgagaatgccatgaaataaatgggaatagcactttcagcgaatg

SEQ ID NO: 428662 - DNA, 113 bp, Oryza sativa
ttttttttttttttttttttttttttttttttttttttttttttttttttttttttttttgttttattttttttttttttttattttttattttttttattttccattttttt

SEQ ID NO: 428663 - DNA, 319 bp, Oryza sativa
tgtttctcgccacgcgaccgttccgtccaacctccgccgccgccgccgccgacgacgggcggccaaccgccccaccgtcgagtatggccttatccccgtcaccggtcttgcccccctcggcgccctccacacagagaaaacgaggctcctccacagactccattggcatgtatgcagttcaatgttgtgagtgttacaaatggcgcaaggtttcgacgaaggatgaatttgagacaattcgtgtgaattccactgaggagctatggcactgtagttgaagacctgactgtttgtgtgaagactctgctgacatataata

SEQ ID NO: 428664 - DNA, 437 bp, Oryza sativa
  unsure (1)..(437): unsure at all n locations
aaagataagattatcccagcgtgtcatatgatgcagaaaacagcccaggtttcttttgagtaagaaagggaaacaaacaggctcaatctttctgaaggtccaaaggaggggcacaggaagaaacgggnaaatcaagngctcagtgccctcttagttgtacacccatattacttgnnggcgttgctgctgtaacttttttggttaacccttgtattctacccttatttcacnnncgcgtcccaagaaattcctttcttcttgttccaccgtctttccttgcgtagcccgcggatgggcggtacattgccaggccttccgttgcacacaccttccgtaatgttcgggccccagttggaggttggggccagaagtgcgagtcgagccaggctccaaaaccgggatgttcccggctcgccagtttcatggtgccgagtgtg

SEQ ID NO: 428665 - DNA, 562 bp, Oryza sativa
ttttaaagccgccaactgcttctctcgccgccgccgtcgtcgtcgccgccgtttaccgtcgtctgagaagagggcaggaggaggaggagtgattattatttttattctttttgaatttttatatatttttattattttttttttttttttatttttttattttttttttttttttatttttttatttatttttttatactttttttttttttttttttttttttttttctattttttttttttttttttattttttttttatttatttattttttttttttttattttattattttattttattttatttttttttttttatttattttttttttttattatttattttttttatttatattttttcttttattttatttattttttttatttttttttatttttattttttcttttatttttttatttattaattaatttttttttttattatatttattattatctttttttttaattattttattatttatcatttttttttatatattttatatttttttttttcatttatatttttcttttttttttttttattttt

SEQ ID NO: 428666 - DNA, 101 bp, Oryza sativa
caaaacggccagaggcttccaattggaatatatatcattcacaaatattcgggtttcgacctgtattccataatgtctccaactgttacacactgtttaaa

SEQ ID NO: 428667 - DNA, 118 bp, Oryza sativa
tgctgcaagcaagcgcagcggaggcacacggatactactccacgcataccataccaccacttacctaccgcttcccacatctcttcttcttcttcctttttccttttcttttctctcc

SEQ ID NO: 428668 - DNA, 78 bp, Oryza sativa
gctacacacacaaaccatcgcgcgcgcactctatatcatttttaacgcacgcgctcccatccacaccccgacaagagc

SEQ ID NO: 428669 - DNA, 179 bp, Oryza sativa
  unsure (1)..(179): unsure at all n locations
aagatgaagaacacatttaaatgtacatatatgctcggaaacattaaatgtttcgttctcacatttctgatcctgcatgctttgcattgctactattaattaacttgatctcgatatgatattccatgtcatgtcttttacagtagnaaggacggataaattacgtatgcctttcttaa

SEQ ID NO: 428670 - DNA, 97 bp, Oryza sativa
aacacgatctagcattttttttcaaacaaaatttgcacccatatgcaaatgttttaaataatgggccgcttgctattttatctcacggaaggaaata

SEQ ID NO: 428671 - DNA, 379 bp, Oryza sativa
gtcgcctccttgccccgccgccgcggagtctaatcaccagacccgcgatcaccgcggacctatgcaatctaccgtaccgacatcgccgctccctctctctacccgcgtgacgccaacccccaatgcggcgccggacccacaccgagccggcggccatcgactgttcaccacgccggtgtcctctgcgagcgctgaccacgattcgccgccgccgctcacaactagtagtcgccggctactagcattttcgacgtcgagacaccgatgcccgccgctctaccctcactatcgttcgcgacgccaccgatctttgtatgcccgactccgtgccgtcagatcgtcgacgcctggagtcttcggggaacagtctcaacgaaaa

SEQ ID NO: 428672 - DNA, 59 bp, Oryza sativa
cattccgatagatagcaccaagcagttaaaacaccataactcaatagcgaactcaattc

SEQ ID NO: 428673 - DNA, 142 bp, Oryza sativa
ttgtatggcttctcctccccctctttaccttttcctcctcggttcggatccgaggtacatatagggtttaatggattaatataaattattaatatatattaataatatataaaaaatttataaaaaaatattaataataaat

SEQ ID NO: 428674 - DNA, 282 bp, Oryza sativa
tcgtgaaccatctctcgacctcacctcacgctccctaactaacaatggctcactaccaggaggtggactactgctcggaggaggtgaggtttacttttcctctctcttttttttcctcctttccctccttcttttctctttttttttttcttttctttttccttctcttctctatttcttttttttattcctcttttcttaatccctttttctttcttatctttttctttctttactctttcttcttctattttttactcttttctttctttcttctttttt

SEQ ID NO: 428675 - DNA, 121 bp, Oryza sativa
gtaaagacgagcttgctcaggcggacgcacatttgttactttctatgtgcgctgcgagtgcaatatcgctaattggttataccatgagcacgtgacggtataatagggatcaattggcctg

SEQ ID NO: 428676 - DNA, 358 bp, Oryza sativa
gtaaggaagtgcttgttctggtcgtcgaagatgttggattctctatgctggttgggttggtacgggagcgaattgcttggacaatgagtacctgatggatttatactgaacatgtggattgactgttgaggagatttgtgtgcacaataaacatgtcgtgaaccgctcacttgacttgttgatgaacaggaactgtatccaagtcatctttatccttggctcagctgatcttcaaggcccaaatggccagcacgatttctacacttgtgaagatgagaagtatctgtcacttcattatgcgtctcaggagaagagcaccagtgaagatattgacctttttgaggattataatattatg

SEQ ID NO: 428677 - DNA, 505 bp, Oryza sativa
ttaaagacttatgtgtaatggtcatcaaataagtgagaatctatatctcagatgggatagcacgcgagtttattactttgaaaatgagtacctgatggatttattcttaacatgtttatttacttttgattttaattattttataaattttttttatttttactttattattctatttttactattttttatcttatttatttcatttcttttttttttttcatttttttttatttttttttttttttttttatatttcatattatattttatattttttaattatttttttatatttacttaatttttacttatttttatattactttatctactttttattcatttttttacttatatattttttctcttttttatacttatttttataattcaattcatatatattttatatattttaatattttacattattttatcttttttttatttttactatttatttcatttttcttatttctatatttttctatttttatctttc

SEQ ID NO: 428678 - DNA, 103 bp, Oryza sativa
gtttttgaagaagaactgaggtgtatgtgatagcagggcatcaataagggactggatcttcaagatgttaatgggcgtttatagtctactagctaggttgtat

SEQ ID NO: 428679 - DNA, 146 bp, Oryza sativa
gctggtagcggcctgcagcagccgccgcgccgaaccggggcgatccgcacgcgtccggtattttacgcgaaagcaaaggagaaagaaatggggggtcactaaagagggactcgacctccaacaacgtaactgtggtaaacaattga

SEQ ID NO: 428680 - DNA, 79 bp, Oryza sativa
ttatttcatagcttgcctaggagaaagcaaatctagtttatcaaagacgtacttgggggaaaatgcatctaggagggtt

SEQ ID NO: 428681 - DNA, 67 bp, Oryza sativa
ttattttaaaagctagtagacgagaatgcttatgtagtatataacttattatatccctccattcaac

SEQ ID NO: 428682 - DNA, 256 bp, Oryza sativa
gtggacgaagaagagaggcgcatttcaatcgaagaagacggaggagcgctgctcgtacgcacccgctgcttctcctgctgcaccttctcccacaaatggccagcaaccatgctggtttccccgccctcgatagatttgttgcccgcaagcgcactcgcagttaggaaaaaccacctcctccaccttcttcttcttgttttggttgttcttgttgttgctgttgctgtggttggtgcggggagggttgtgggggggg

SEQ ID NO: 428683 - DNA, 302 bp, Oryza sativa
tcgttatagtctgactcgtcatggacgaccaatatttgtgacttcaacagcgccatcggtattaaatagtctgaatgccggttcacaataattactgatgcatgttatggtaagacctccatttatgtcttgtgccccttttgtgacatcaacagtcaacgtctgcaaatgtatctgctcctgttaagcaccctgtacatttgccacatcctatatcatcccaagttaatgcaatttctcaccccacagaatcgcacttttcactcatgaagctcttataacttttctacaacttcacattt

SEQ ID NO: 428684 - DNA, 221 bp, Oryza sativa
tcgttaaagaatgatttggagaggtcaacaaagaagggtgacgatatattttcgatgggagggtaagcatgctttttactttgataatgatttattgatgtgtttatacttaactatgtgatttgttttttgatctgatttttttttctactttcttttttattctcttattatcatatactaacattttttttttaactttattatattatatatcttat

SEQ ID NO: 428685 - DNA, 171 bp, Oryza sativa
gtgatcgaggaattgaggcgcacatcggaggttggagaccgaccatccatgcttctagcacccgctatcttttattctttctaccttcattcacagatggacgcactccatgctgctctctcctgctctctattagatttcttgacctaatgcacatcttcatttctccat

SEQ ID NO: 428686 - DNA, 81 bp, Oryza sativa
ttttgtggttcatatgccgtggccgatgtagagtgggggcaatattgaaggacccgcggattaaagtcgattagggatggc

SEQ ID NO: 428687 - DNA, 63 bp, Oryza sativa
ttatatgatagcaagccgaggccaatgcaaaatggtgaaatcatagatggcctcgccgttcaa

SEQ ID NO: 428688 - DNA, 109 bp, Oryza sativa
gtatttaatggcaagccgtggagaaagcacattggcgacatttaaaatggactctatgataaatgatgtttatgcctttgactatgttcaaaccatgcagccttctgga

SEQ ID NO: 428689 - DNA, 273 bp, Oryza sativa
ttatttgcgcctctgctcaggagaatgctgttcgtgttcatgaatgcaggaccggtcctcaacaaaactatggggcgctagcactccatcatgttgatgttttttactgaccatttggcatgtggactacttgcaaaacgtggaacatctgaccttggattcaaagaataccttcacgtatctttagcctgagcccttgatgtgctagtagaagcactaaaactagtctttgggctcattgtcagagcctagctccctagttctttgggtatt

SEQ ID NO: 428690 - DNA, 85 bp, Oryza sativa
ttatattcggccaagctgaggcgaatgcaaattggtttcttcaatgtagcactcgaactccactgtcgttacggggtttcccaat

SEQ ID NO: 428691 - DNA, 266 bp, Oryza sativa
atgtaagattttgtcaccacaggcaaaagatgctgcagaaataatatgtcggcggttgcagttgggttctaaacttattaatacaatttagaatatggtatattcttgctcatatatttatatattcatttattgttataatttctttatttagtatccattttaaaaatattatcttatcataattaatattattttattttttattttatcttactttatatatttttttaaatatttttcataatttcttatttttttttttt

SEQ ID NO: 428692 - DNA, 184 bp, Oryza sativa
gtgatcgaaagcttgagcctaatataggaggtcaggaaccgaccgcacagggatcttgaaccggaatcactcatggcggtggaactctgatttgcggcgaggaaggtcaatagtcgcgcccttcaacaggcgacgggtttagtgccggcgagataaatgtttttatgagttacatctttttttt

SEQ ID NO: 428693 - DNA, 81 bp, Oryza sativa
gtcaggcgaagtcgaagtcgcgggaggggggggggcgactttagttagggttgcaatagtttgatgtttgtgttttatatt

SEQ ID NO: 428694 - DNA, 97 bp, Oryza sativa
tttaagtctcacaagctgtgcccaatatacacttgatactacatacaagctctcgacaattaacaaccctaagggtcttgaccatgaatcatccatt

SEQ ID NO: 428695 - DNA, 57 bp, Oryza sativa
ttagattagagattggtgtggtcaatgcacactgttgactatatagaaggtcttgat

SEQ ID NO: 428696 - DNA, 339 bp, Oryza sativa
tttgggtagagattggtgtggtcaatgtataccatggactatatagatggaatccatgatatttgacgtgacgtgtttagacaattatttattactgattttatatggttcttattacttgtggtttgttggttaatttagataaaatgtctttttcattttctaattaatttattattcttaattttttttcattctataatataatttttactattttcattctgtatattaaatatttcttcactttattttctttattattctttatactttcttattattttatttatttttttttttatctattatatattaatttatctatctatttttttt

SEQ ID NO: 428697 - DNA, 213 bp, Oryza sativa
ttattttcatgcttgctgtggcgtatgataagttgggacattaaagacggtctagaagatgaatatcggtatgggggttgacaatgattctgtaactatgttttacggtacatctgacgctgtgttttaagaaaatagtcgtacataatatacgtggcgtacacattattaaagttacatttattagcctgtaaactaattaatttctaataa

SEQ ID NO: 428698 - DNA, 52 bp, Oryza sativa
ggtttggagggtgagttgtggcggaagaagatcgtatacatcatagatgtta

SEQ ID NO: 428699 - DNA, 195 bp, Oryza sativa
gtatattatgctatgctgtggtgaatgcaaatttggtacattattggaggactcgaagtgaaatgtcggtaagggggttgaccatgaatcagctatctctgttttagggatcacctggcctgttgtttgctgcatattcgttacacaccttacaggtctctcagcatacaatcgtcagattcatgaacttgaaaa

SEQ ID NO: 428700 - DNA, 111 bp, Oryza sativa
gtgggttagagtttggtgtaaccatagcccaccggtgacaagctagagggggtacacgacaaatgatgggaacgctcttgtctaatctagaagccagatattctaggcacc

SEQ ID NO: 428701 - DNA, 138 bp, Oryza sativa
ttcccgtaccctcgtcctcgcccgccaccgctcgccgccggcgtctagggtcgcggcgacaagccgcgggcgttcgttctccttcggcccccataccctagccgtatatcccaccaccctcgcccccgacatggccac

SEQ ID NO: 428702 - DNA, 168 bp, Oryza sativa
gtagagtttgatttgctgtggtgtatgtatattgtttagaataaagaaggactagatgtggaatgatgttaaggggattgataatggttaagttattatgttaaaggtataagatgttctgttgtttgagatataatcgttggaaatatttacttgtcgctcatattt

SEQ ID NO: 428703 - DNA, 58 bp, Oryza sativa
tcgttaggatggagaatggtgcgcccaatacatacggtttttttcaaccgatccccct

SEQ ID NO: 428704 - DNA, 88 bp, Oryza sativa
ttatagtagaataagcagaggagcatgcatcaagggatcaattatggcgtactcgacttcaataattcattcggcgtttgtttattat

SEQ ID NO: 428705 - DNA, 120 bp, Oryza sativa
ttatagtgtcgcaagctgaggagaatgcaaatttgttaatatatagtaggactcgaagtcaactaaccttaggtcggttaattatagttttagtattattatattcattaatatttttaa

SEQ ID NO: 428706 - DNA, 260 bp, Oryza sativa
gtatattggagcatgctgaggtgaatgcatattgtgttcaacaaggtagtactcggcattgactgatggaaagggggttaaccatagatgagcgattctgtttaggggattattggacttgtcgtctaagacaaaaacgtgtaatacgttacatttctctaagattataagagtcagatccaataacccgtaatactcatacatacgatgatagagtttttaattgttagttgatgatccaaaatggcatgatgttaaag

SEQ ID NO: 428707 - DNA, 143 bp, Oryza sativa
ctggggtgtagagtggtgggccccacacatacgatcttctacagcccctgccctctatttatatgtctcgcagtgatcgtatacgtcttttttccacccaattttgacgtgaagctggagcacggctcgaggaggctctgtat

SEQ ID NO: 428708 - DNA, 99 bp, Oryza sativa
ttagattagtgtttgccgaggagaatgcagatttatttcaataacgaaggtttccgtgaggaatgatgttaaggggtttaacaattaatctaactatta

SEQ ID NO: 428709 - DNA, 51 bp, Oryza sativa
tcgttagagaaaagcatgctgagaagaaaacaaagttatataattaatcta

SEQ ID NO: 428710 - DNA, 71 bp, Oryza sativa
tcggttggatggggtatgatgtgactaatacatctcatgtcattaatgcaattcctcgatcatgtctttct

SEQ ID NO: 428711 - DNA, 191 bp, Oryza sativa
gtataatgtcgtttgctgaggtgaatgcaaatttgcttcatcaacgtaggactcgacgtcaaatgacggtaaggggattgaccatgaatgagccattgtgtttaggggatcatttgtcttgctgtttactataaaaatgtgaaacattatacatgtctctcagagctccaatatcagatttattaacttgt

SEQ ID NO: 428712 - DNA, 316 bp, Oryza sativa
ctgggctgggcaatggtgggccccacacatcctatctcctacacccgctacgccctgtgtgtctgtctcgcagactggcatccgtgtttttcccacccaatctcgacggcgagctcgagcacggcgcgaggaggcacgggaaggagcactgctacgatgcggtgacgacagtgccagccgcgacaatggcgcccgtagccccaggcgatggtggacaacggcgacgacaacgaagagaccgccatccgtgcgcgcatcctttcccatgcgagcggcggtggtgtccgcagtcgctcggttcttctccttgccgctt

SEQ ID NO: 428713 - DNA, 119 bp, Oryza sativa
ttaaaaaggggcttgttgtggagattgcaaatatctttaaagaaggtgggaccggaaatgaaacgttggtaagggggtcgattatgtaatagctatcatttttaaggtataaattgtca

SEQ ID NO: 428714 - DNA, 86 bp, Oryza sativa
ttagagaatggtaagctgaagtgaaagtaaagttcttctaacaacgaagctctcgatggaaaatgttgaaatgggtattgatattg

SEQ ID NO: 428715 - DNA, 591 bp, Oryza sativa
tcgtttagatatgggaggatgtgaacaaggtataatgtgattagatttggaactctcgagtttgaatgtttttaaggatgttagcaaggtatttgttattaactttaaatgctttttattgtaagatgattattattaatatgttgtattttaatattgtatttattgataaaatggtttatgatattttatcatattgtataaatttttgtttattatttatatattaatatttttaattattttatttttttttttatttaatactttttaatttattatttttatttatattttattattttttatttattttatttttttttatttaaataatttattttatatttaaatttatatttatttttttatatttattttattaatttatttatttatttttattatattataatttattttgttatattctttatatttaattttttttatattatcttttttcactttaatatttattattattatttaattttattttaatatttatattttttatcttttatattaatatatttatatattttttatatatttttattttaatatttctattattatttttttttt

SEQ ID NO: 428716 - DNA, 83 bp, Oryza sativa
gggcgcaggtagaggagtatgaggagtggggttgtctaagcacggcctcgaacacgactattcttaattgggttaacaataat

SEQ ID NO: 428717 - DNA, 63 bp, Oryza sativa
ggagcatgctcaccacatggcatatcgcggatatctagcaaggaatagatcataattaatcct

SEQ ID NO: 428718 - DNA, 96 bp, Oryza sativa
atcaccagcaaaggcgcatgcaaagtggtttatataaagaaggactcgaagtgcaatgatcacattgggtgttgacaataattcatacacttatat

SEQ ID NO: 428719 - DNA, 223 bp, Oryza sativa
gtatattggcgcatgctgtggtgaatgcaaagttgttacattaaagggggactcgacgtcgaatgacggtaagggggttgaccatgaatcaggtatgctgttttagggttcacctgccctgctgtttgcgacaaattcgcgacatactatacaggagtctctgaccacaaacgtcctatttatgatcctgtagtactcatacctcctgtctgagcctactcaa

SEQ ID NO: 428720 - DNA, 67 bp, Oryza sativa
ttttatacaagcatgctgtggataatgcaaagttgttttattaaaggtagacttgacgaggaacaac

SEQ ID NO: 428721 - DNA, 250 bp, Oryza sativa
ttgacgcgcggggccgtattgctttcgttgtgtaggctagatcgccgcatcagcaccggatcaccaccatgtcatcaccaatctccccaagattattcaattcctcacttggattatactactaatctcgcctccccccgcgcgattaatttatcgccatggcgccatcagcgagcgtttacttctgccagatccagcgcagcatctctgctattctccagcctcgcgggaagggagggggaggccctat

SEQ ID NO: 428722 - DNA, 174 bp, Oryza sativa
ttattttagaatgtgctacaatggatacaaatatcttaaatcaaattatgaattaacttctactatctcttattctcttaataattaaactactcaatttaatattttttaattattatattttttattatctcattttaaccacttttcttttttacacttttatatttttat

SEQ ID NO: 428723 - DNA, 64 bp, Oryza sativa
gttttaagtcgcgagctgtggaggaagcatagggggtactctatcgatgcactcgacggcgacc

SEQ ID NO: 428724 - DNA, 102 bp, Oryza sativa
tcgttccggaacgcgttcctcatgctctgcgcctgcgcgcaggagcgcgccgtcgcgtacctgctcaccaacgccgagcgtgtcgtctagtgttatgattta

SEQ ID NO: 428725 - DNA, 133 bp, Oryza sativa
gttctccacacgcggagtggaggagggattaatcgtgagtatattaatcggcggccttgacgatcggcggcgctgttctctagtgttttagttagtgtcaatctaatttccgtttgatttgttttgtttatat

SEQ ID NO: 428726 - DNA, 88 bp, Oryza sativa
ttattttgtcacctgcagaccgagagccaaagtgattatgtcgagccaagaatgaggattgtgtctacgaattttggtatacaataaa

SEQ ID NO: 428727 - DNA, 59 bp, Oryza sativa
gatgtgaactgacagacatgcacagggcttttgtcaagctacgactgaataattactcc

SEQ ID NO: 428728 - DNA, 78 bp, Oryza sativa
gtatattaggacaagctgatgagaaagaaaatgttttagaataaagtaggacccgactttaacttacgttagggtggt

SEQ ID NO: 428729 - DNA, 57 bp, Oryza sativa
gtataaacgaacaacctcaacataatgcagagatctttaatcatgcttgcatctata

SEQ ID NO: 428730 - DNA, 417 bp, Oryza sativa
cagcaaaggaacatttacttcttcctcccgagttcccccaaactccttgcttcttccgatctcccaccgtcgcctgggcgcctggcggactgctccactccataggcggccatcgtcttctcaaccagaaagcttctggctgtacagcttggcgggatacaagacgacggtctgccgtcggcgatccgcagtcgcctgagctgaaggtggaagcttccaacacgtgtagtccgtgcagctctgtaaagaagctcataaaattctattttctatatttctttaaagatttttcttattttaaatatctattttctttacattttattaattaatattatttatttttttttaatactaacaattttttataaaactattttttaatttttccattaatttttttctttaccttttatt

SEQ ID NO: 428731 - DNA, 274 bp, Oryza sativa
tctcagtctcatttcctacagaaagtttaactacattatgagcagcctgagattgttaagagtatccccgatactgaatttctggggtacgactctgtttctgccactgctgttgttaaaggtcttttagttaatggcaactcagtgaatgtagtttcagaaggttctgatgttgaaaatattttagattggacaccatttttagttctatctggtgttcaagttgttagataatattctttttttaatttcacttttttttctatcttctcta

SEQ ID NO: 428732 - DNA, 124 bp, Oryza sativa
gtgcttataaacataaaaaacatctcaaacacaacccaaaatagggccaaaattctagaatattatttttgttttgaaaggaatttaagtttgtgtggtgtgtcatccatggcggacatggtga

SEQ ID NO: 428733 - DNA, 57 bp, Oryza sativa
tctctgacgcgtggggggatttttatttataatttaacttatattaaattaattaaa

SEQ ID NO: 428734 - DNA, 118 bp, Oryza sativa
gaatagaagcactataagctgatgcgcaaggctggtgtagaggtatcctacaacgtatttgagtacacctactttggatttacatttttccatagggaggagtcattatcaaattata

SEQ ID NO: 428735 - DNA, 569 bp, Oryza sativa
gcgtgacgcggcgacgccctatggcgacccaccacgcccgtcgtctacccgacgacgacgtcgtacttttgctagtactactcgattgtttgtttatggaacaataatatttaaagtaataaatataaattataaattatatatttaaattttattaaaaaaaataataatattaatatatataataaaaaaaaatataaaattatcattttaaataaaatataataattaatttatttttatataattaaaataaatatatttaattttattaataattaataaaaaatatatttttaataataaataattaaaaatatattaatataaaataacatataataatatataaataatatttttatatttttaataaaataatttaaaaatacaatattatattaaacataaaattataaaaaaatatattaatttttaatattaataaaaaattaatataattttattaacattaatatattaaaatatatatattaattatattaaaattttatatataaatattaaatatatattattttaaaatactatataaacaattaaatata

SEQ ID NO: 428736 - DNA, 321 bp, Oryza sativa
gggggggaaaaaaactgggtttatagacggaaacgaaacttggttttacaggggggcacaacttcaaaaaaaagccccaaagaggggggaacatatggaaaaaagttttgacccccgaaaaaaagatctagtttccccaaaaggaaaggtaggtaggacctatttaaaggaaggggggggtcccaaaaaggggcccaaattgaaaatggacccttgaaaaaaaaacttggggcaaagggggcccctggcaccaaagaggggaaacttggcaagaaagattgggcccaccccgtttccaaaaaagaacccccaacccggggg

SEQ ID NO: 428737 - DNA, 257 bp, Oryza sativa
tttttttttgggtttttttttttttttttttttttttttttttttttttttttttttttttttttttttttaaacaaaaaaaaaacttggggaaacccaagttgtgaaagaaagtaaattacgcgggaaataacataacccgggtagaaggggacagtttacaaaacttatatatgggccaaaaaaaccactgcctaaagaaaactccctttctatccgaaaattgatatataggggaaactccattaagtttatct

SEQ ID NO: 428738 - DNA, 313 bp, Oryza sativa
  unsure (1)..(313): unsure at all n locations
gaatggggaaactgaaaaaaagttaaaaaaactaaaaaaatttaaaaggtggtacactaaaaaaagggtttggcactcccaaattttntaagaaaatccctttttttgggcaaaaaaagaaaaggggtttaaacaaaaaacatggcagggggaaaaatttttgaaaatttttaggggaaaaaccaatgctcaaagaatttcccaattttttcaaaattacacattttaaagggaataaggggggccttttttggggggggtatttagaaaccttttggggttttttgggccgatttttacttttaaagtccaa

SEQ ID NO: 428739 - DNA, 105 bp, Oryza sativa
ttgatgacaagtacccagtggagaaaagttcaagaacgtcttgtggatgatgaacgctgttcccgactcgaaaagatcgatcgactggagattctccaagagtat

SEQ ID NO: 428740 - DNA, 364 bp, Oryza sativa
gaacccatacaaatatattaataccgtatgtacaaaatatctaaacggcagacagttctgtttgcaaggcaagagtaatttgccgggggcgctatgtgataactcgaccacaggaggaccaatatacagttgaacccacacgcaccttcgcgggaaaaacaaaacgtttttaacaaatatgaaacaaattcttgaggcacaaaagtttaatgaaaaattttagaaaatattataccgggaaaattgaaaggacggctaacaattttcccatttccctagtcaagggaaaactggctactacatatccaactggccagcttccatatgtttatggcaaacccccttgttaaagaattattcaagg

SEQ ID NO: 428741 - DNA, 342 bp, Oryza sativa
tggttggagccaggatactgtctgttaaactagtcgataaaacagatctatgggacacccctgaacctggtaccagaccagatccaccaactgaagatgcagaagatatggtattcaatgttgcgtggttgataggagggacccctttggttaatgttggagagctgctgatggacgtcagccaggatcttgcaatgtttttagaacagtttaagcctgctaaagttaaattacttaatacttccatgatcattgtctatggtccctgtctaatactctattgttctaagaagaccttcttttttcttgtctctatttcttcctgtttttctcttttttttt

SEQ ID NO: 428742 - DNA, 207 bp, Oryza sativa
ttggtacttttggtggatggccctacaaaatagcatatgcacgaactattttgcctgcaatctattatacgcttttatgaagattcttttgagcaagcagggagtcccaagaaagtaaaattgtgtaataaattttgtggcccattttttgtgactgaagtttttgattatcataactggatgagaaaattttggtgccacacatta

SEQ ID NO: 428743 - DNA, 114 bp, Oryza sativa
gggaaaccaccccaaatcatgcaaagggaaagggacaaaaccccttgtatggggcccacccctaaagacaagcaaaataaattcgggaaaaagaagggcccgcgccctaaaaag

SEQ ID NO: 428744 - DNA, 90 bp, Oryza sativa
gagtgatgcatcatagctacactagagcacggtaagcatacacctatacaacctaagcctgaaaggcgagctcttattgatgagaatgct

SEQ ID NO: 428745 - DNA, 182 bp, Oryza sativa
gttaactatcctgtttaagtgtccatttattacgctcacaacacatcctgatactccgaacgccattgctgggctcgggacgcgatgcggacacagatccccactacaccacttgaacacaaggcatcctgatacacgaggtttcaccctaagtaagtcggggaatctaagcgcgattctga

SEQ ID NO: 428746 - DNA, 95 bp, Oryza sativa
gtcaaggtacccattggttatacgtatttgaggtgttcatatgctttaaattacaaacgcggaacggaaagaaatgcagtgaggaggatcctgcc

SEQ ID NO: 428747 - DNA, 125 bp, Oryza sativa
gtagaatacagcgatgaaggtaaaaagatgggggagtatttatgcctaaagagcggtggagggctggccattggtggattgctataacgtggtagatgagcaacagagagataaggatggagcaa

SEQ ID NO: 428748 - DNA, 84 bp, Oryza sativa
tcggtagccatccgtaacggcagactactcctgcgccggcgtccgccgctgacgagatcagctcgccgccgctgtggaagctgg

SEQ ID NO: 428749 - DNA, 167 bp, Oryza sativa
aaatgtaaccaaactttaatttttaacaacaaaaacaattgacggcgaatggttgtggatcgatggccggcgcctgtacgggcggatggagttgtggagatgtacgccgcgctcgttcgaaacgatcgatcgatcctacataatgcactcttgggttgcctacgccg

SEQ ID NO: 428750 - DNA, 299 bp, Oryza sativa
  unsure (1)..(299): unsure at all n locations
tcgtanaatttaatatctcttttcatcatcatgtcgctctcgatctcctacagaagctacaatagccagcaaatcaatcgatcgatcgatacgtgcaatggcggccatgaaggtgaacaagattgccgtggtggcgctgttcctcgtcgccgtggtggtggtttccttttacactcttatatttttctacttccttgccttcttaatttatattttcattatttctaatcattatttctttcttctttttttcatataatttacttattttattttctccttttttactctcatttttt

SEQ ID NO: 428751 - DNA, 379 bp, Oryza sativa
tcctctatagtgcgcgcgcattgctctcctccgtcgatttgcaacgcttgccgatggaatcctccttggcggcggacgtggacatggggctgaccttgcctttgcccttcccggaggccttccgcttccgtgcattgccgacggaagcccccttgggcggaatctcggtgccagcgggcgccggatcagacaccgacgactcgctccgggtgttcccgagctccatctccttcgatgcgccggccgcgccggctttagggaggccgaattgggcccgggccggtaccggcgcagcctccaacgtcggcgtcgtcgagagcgtcgaaaccagagagcctggcggagcgctaggcgaaaccaggggcctggaggaactggt

SEQ ID NO: 428752 - DNA, 348 bp, Oryza sativa
agcacgcacatataagcgtataccctatagatggcgcgccctttttttttttttttgggggtatttaaaatttttagttttttatattttttttttttttttaattattttaataatttataattttttttaaaattattattaaataatataaaagtaatataattatattaaaaaaaaaaaaaaaaatctgtataaataaaaaaaaaaataataacggaaaaaaaaaaaataaatttaaaataaagaaggaaaaatgtataaaaaaaaaaaaaaaaatataaaaaagtgaatttaattagaaatttggttaatttatataaaaaaaaaaaaatatttattttttta

SEQ ID NO: 428753 - DNA, 52 bp, Oryza sativa
aaataattctgtttagcgcacctaatcgtgaaataaacataaaggtcagtca

SEQ ID NO: 428754 - DNA, 314 bp, Oryza sativa
aaggaaaaaaatttaaaaaaattaaaagggcaagggaaaaaaaaatttaaaggggaaaatttaaaaaatttaaaaaaaaaaatttttgggaaaaaaaaaatgagggaaccccaaaaggggttccaaaaaatttttttggaaaggggggatttttttttttgaacccagcgggggtaaaaaaattgaaaaaacctttaagggtttaaaaggggggggctttggggttttttcttcgggggtaaattaaaaaagggggctttttgagagggggccaaaacaaaaaaggggtttaaaaaaagggggggagtttagaa

SEQ ID NO: 428755 - DNA, 289 bp, Oryza sativa
ttttgtgccgccgccaacacacaggggagggcgcgccgatctccatctggctggcgatcgagcagagcaggggatcctgttaaaagcttccatccaggaatggcaatggtattgagaagagtactgaaacatggtgtaatcccaagagatgcagctcaagtagttggcataagaggatttgcatttgcaagcaaggcaaagaagggcggaaagggttgcggacgatgctgttaaaacccctgtgcttagtcaagttcttaagagtacaacagtgttttggggcaatata

SEQ ID NO: 428756 - DNA, 374 bp, Oryza sativa
aaaaactaaaatcagattggcatagcattcttcatttactcgccctatttgcaacttccgactttgaagaaaaacactgaaaatgccggggggttagcctggtacatctgcatccttttcaatcaccgtctgtttagggacaacaaaagagcaggggcccagacccagcagctggcattgatccccccaaaacccccccgggttttacaggacaagcctattttagaaattttacatggcctctctcttatggacccaaaggggtcggtcatctatctccttcttggaccctaccttatgctgctggcagcttcttcttctttttcttcttcttcagaaactggggaccatgagcagcccgatcgccgggacaa

SEQ ID NO: 428757 - DNA, 408 bp, Oryza sativa
gtaggcaatgtaacgacacgtctgaaattcagaggccgccatcatattcagatataagtatccggaaggactttaaggtgtacatacctatatcagatgcagagtaatatcacatgtgcttggaaggaccaatttgttagcaatttagcatgaaccgtgcagctcgaattcatgctggttcacatgagtagccaaattttttttgtacattagtgacttctacctcaattttgaatgtattgtacagcagaaaactctctctccccctccctctctttcaatttctttcatggtttcacatctccatggcgtcctgcgccatattctgcaaatcctcttcggttaagagagtcttgttgccgccgctccccgtcttatcgtaaggctgcgccatcctccgtaggaact

SEQ ID NO: 428758 - DNA, 108 bp, Oryza sativa
aaatatagattttaagttatttattgtttatccgaacacaatctgacaatattcatacaataacaagcgagaacagaatgaaatgcgttgaacagatcctccaaataa

SEQ ID NO: 428759 - DNA, 52 bp, Oryza sativa
gttgtttaaaacaaattcgttataactatcggggaggacgttttcctaaaga

SEQ ID NO: 428760 - DNA, 96 bp, Oryza sativa
gttaatactgctgtcaagggatccactttgtacccgcataagatgtggggacctactcaacacaacaagcgggaacggcaagaaatgcataaacag

SEQ ID NO: 428761 - DNA, 107 bp, Oryza sativa
gttaatattactgtcaaggtatccattctttacacgcataagaggcggtcatatactcaacataacaagcgggaacggcaagaaacgcgtaaacaggtcctccaaag

SEQ ID NO: 428762 - DNA, 76 bp, Oryza sativa
ttcgtagaataaaacgatcaatatctaactatcggagaatacttatcctaatagatctgatgatagccgtcctatt

SEQ ID NO: 428763 - DNA, 85 bp, Oryza sativa
gttaatataattgttaaggtatttattgggaacacgcataagagggaaggacatacggaacacaacaaccgggaaagggaagaaa

SEQ ID NO: 428764 - DNA, 106 bp, Oryza sativa
ttggtagcataaaacgaataaattataattattggagatggtttttgacaacagtgaggtggtgggctatttttttataaatatactattagtttatttagaatgt

SEQ ID NO: 428765 - DNA, 113 bp, Oryza sativa
ttttttttttttttttttttttttttttttttttttttttttttttttatatatattataattttttatatattaaaaattaaaattgaaaaaagaatgatatggataatgag

SEQ ID NO: 428766 - DNA, 442 bp, Oryza sativa
tcgttagtatcagtgaactgctattgccctcccaagggaaatatactagtatgtcaacttccatccctctccctttcttcttctctcatggtgttgtgcatgctaggataggccatcgtccaatccagccatcggttgggcttctttctgctggtgccccggcaaaagtctccttccgacgacaaagcagtgcgcatcgacatgctgcacatgttgtgtcctcagaatcaatcactcctgtaaaggaagtatctagctttgagccctctgtatgggggggatttctttatcaactttcaccccattccccctacataaaatccgctgatttttatcacttcaaatcgctctcttttccttaatttcgcctctcctcgatattttttatttttctttcctacgcttcccaccctcctatacttcctttatcatcttttttcat

SEQ ID NO: 428767 - DNA, 102 bp, Oryza sativa
tctttcatttccgcttccctattccgtcccccttgctccgatcccaaccgagtccccggtgccgtcgtcggctacatactcgacctgcgtcgagggccacgg

SEQ ID NO: 428768 - DNA, 110 bp, Oryza sativa
tttttttttgggtttttttaaatgtttggtttttttttttttttttttttttttttaatatttttatataattttaaaaatttattatttaaataatttttattttattt

SEQ ID NO: 428769 - DNA, 415 bp, Oryza sativa
gcttaccaccagcagcagaggatgaggcgcaagttcaggaagagcctctcctacgcgggggagctgtcgtcggcggggcgcgcgcgaggggagggcggtgcttatcattcctatttttttcttttttactattttctttttttatttttttttttttaaatttattatttttttattttttctttttttttcttatttttttcttttaactatattatttattcttttttttctacataaattttattttttttttattttttataatttaatattcttttttatttttattcataacattcttattacttttttctatctttcattatttttttatatattattctttctattttatcttttatttttttttatctttattatttcttatcttatttttcattctatttttcaa

SEQ ID NO: 428770 - DNA, 326 bp, Oryza sativa
aaaaaccaaaatttttttatttccccagggaaaaaaaaaaacaaaataaaaaaaactacgaaaaagagcccccatttcccaaaagggggtttttttggggcaaaaaaaaaggttttgggggtatgggaccccgggggaaaaaaaaaatttccgggggggggaaaaaaagaggcccaaaccaccaaggtgggcccaaagtggggaaaaaatttggccccgggggggatgggcccccgggggaactttttatggggccggggaaaaaatgacctcttttgtccaaagcaatcaaaaaggcccaaaaattaagggtaaaaaattggggg

SEQ ID NO: 428771 - DNA, 146 bp, Oryza sativa
ttttttttttttgtttttttaattttttttttattgtattttttttttatatttattttatttgggtatatattttaaattatttttgattttagaatgaaaagggaaaacaggcccaacaaaaaaaattagaaatgggggtaagg

SEQ ID NO: 428772 - DNA, 104 bp, Oryza sativa
ttatttgaggaggaaaaaactgaagcttggcatgaggacgaattatcgttggtatgaacgagacctggtatcagcttccaacttaacagtattttgtcatgtaa

SEQ ID NO: 428773 - DNA, 124 bp, Oryza sativa
gggggaattgtaaataaaaatgtcaaggtacccttttggtacacgcaaaagaggcgttcatatttttaaaataactagcgagaaaggaaagaaatgcgttaaacaggtcctccaaaaaacaatt

SEQ ID NO: 428774 - DNA, 88 bp, Oryza sativa
gctgtatctagcgaataacacttaccgcacgggggggatttatatcacaagatcagcagaacaactatctattaataaagaaataaag

SEQ ID NO: 428775 - DNA, 75 bp, Oryza sativa
aatattaatgtcaaggtacccatcccggtacgaaaaaaaaacaaacccttaactttaaggaaacagtgcaaccgg

SEQ ID NO: 428776 - DNA, 111 bp, Oryza sativa
aatattaattttaatttatttattttttaaatttataatatttattgatatatttaaaataataagcgagaaaagaaagaaatgcttaaacaggtcctctaaatacaattt

SEQ ID NO: 428777 - DNA, 118 bp, Oryza sativa
tcagaaaacaacgaacaatctcaaactcagggagaatatttatgcattcagatctgtagacagctttccataactgaatacactatatactcaaataaagtatcaattttatacaata

SEQ ID NO: 428778 - DNA, 223 bp, Oryza sativa
ggttcaattgataattttaatgtcaaagtatacactctttacaagtataaaactcatttatcttttctacaaaacaatcgagaatggaaagaaatggctaaacaggtccttcaaattcaacgagcacgcatgcagtcgtgcatatactaggatctacactaagcaagtgcaagctcttagcgagtcatgatgatacacacagtttgcttattttggtcctcac

SEQ ID NO: 428779 - DNA, 452 bp, Oryza sativa
ttgttcggagcggctatggacggactgtgttctagcgcttttttaaataatctattttcattcaatactaatttataataaattttttatttttatttaaaattaaatttttattaattttataaataattatatttaataattttattaattataataattaatattattttatttattaattttaaatatttaatattttaaaatattatttcattttaaaaatatttattaatatatacatctatataatttaaatatatatttttttctatataatatataattaataaatatatattaatatttaaatataaatatatatatttttattttttttttaaataacattttaataatatatttattttatataatattataaatatatctaataattttactttacttattaattattatatatatatattatatttattatttaatta

SEQ ID NO: 428780 - DNA, 58 bp, Oryza sativa
aaaaataaacccctctccccttttttttttatatttttcttttttttttttcaaacat

SEQ ID NO: 428781 - DNA, 406 bp, Oryza sativa
gaatataaagaagcaaaattcacaagcaattttcagataagtaaaggccatattacgatgcacagatccatggaccatggggcatgtttaatgtaaaagtcagtcctaaaatacatgatctacaataccatattacaatgcaactcactaaatccacagatcacttgaaaatccataaaccacgttggctgaaacaaccaaatccacagaccacgtttcaataaaacaatgtaggctcaaatttgcaggtaaccgatggaaaacaaaaaaaaaacgggatttcaaccgggggtggaggccggcgaggtgctgcaacggcgaaggggagggcagagaccggtgaggcgcataggcgatggaaggaggcatgggagacggtcggcgaggaggagcgattccctccctg

SEQ ID NO: 428782 - DNA, 240 bp, Oryza sativa
atcctttcgctctgcggcttctccccacgccgagcgccgacgcttccctccccttctgttgacgcgtgatcttctactccaccacgagccactttcttcgatccctcccgttgaccgtgcgccgtcttcacctcggtgagaactcagtcacgggcatgcagggagggaatcgctacttcttgccctaccgactttcatgcctccattcatcgcatttttacctttaccggaactcctgtc

SEQ ID NO: 428783 - DNA, 136 bp, Oryza sativa
gaaagacttaacttaaactgaactgagagggcatttgccaaatgaaagattgatagacacctgattcttttatacggatatcttgaacatgctgcaatggaacataaatcatgtcattgactggatctcactttct

SEQ ID NO: 428784 - DNA, 62 bp, Oryza sativa
atatattgaaaattattagcgggtaagggatgaaatggataatgagcacctgccaagagaca

SEQ ID NO: 428785 - DNA, 52 bp, Oryza sativa
gtatttttcaacgaagactttagaactcgtggagagaatgtatgaaaaaaga

SEQ ID NO: 428786 - DNA, 86 bp, Oryza sativa
gttaatattgatgttaaggtacctatcctgtacacgtactagatgtgttgatatacgcaacattacaagcggggacggaaagaaat

SEQ ID NO: 428787 - DNA, 56 bp, Oryza sativa
ttttattaaaacgatgaatttattcttatcggaggggatgtttgcctaatgagctg

SEQ ID NO: 428788 - DNA, 103 bp, Oryza sativa
gaaaataataatgttaaggtatccattttttacacgtataagagggggtgatatacgcaacacaacaagcgggaacgggaagaaatgcttaaacaggtcctcc

SEQ ID NO: 428789 - DNA, 134 bp, Oryza sativa
tcggtagaatacagcgatgaatttataactctgggagaatatttatgcctaaagagcagtagagagctgtcctatgctggaatactatattgttgactatgctgaaaccgtaaaaagagctagacgtcacttgt

SEQ ID NO: 428790 - DNA, 86 bp, Oryza sativa
gaaaataatgatgttaaggtacccatttggtacacgcataagaggggggcatatacgcaacacaacacccggggacgggaagaaat

SEQ ID NO: 428791 - DNA, 72 bp, Oryza sativa
tcggtagaaaacaacgatgtctttcaatctctcggttaatcattaaagcattcagatccatagatagctatc

SEQ ID NO: 428792 - DNA, 171 bp, Oryza sativa
acatgtgccgcaaatactatcttattgagggctgcatagattgaacaaaggtcctaatgtgcactgggtatgggactgggcccaaacttatatggctatcccgattgcatccttatcctatcaggttgtagtatacacctttgacatagcattcccgtgcaaatatccaaa

SEQ ID NO: 428793 - DNA, 63 bp, Oryza sativa
actgcaccgccctcctcttactcgccgtactgtggcacttcttaccgctctttcaacgttacg

SEQ ID NO: 428794 - DNA, 355 bp, Oryza sativa
agaaaaaagggcccgcattaaatcaaaggggggggggaaaactggccccacccccaggggacaaaccagggggccttttggcaaggggcccccaaatttaaacggggagcgggacccaaattaagggatcaagaatgggttcaaaacaaatgggacctccaaaaggcccgaaacttggtcaggggcccaaaacttgcaaaaattggggctgggaaccatccgggggaaccactttaacccttacccaacccgttaagggtcaccatgggggcaccaccataaccttctttggccataaaaccaagctgggtggaggaccttcccccatttgggaagggcggaccccccccttggc

SEQ ID NO: 428795 - DNA, 343 bp, Oryza sativa
ggggaacctttttagggaaatttcaaaattacgggtaggcccaggggaacaaacccttaagcataccgttacaaatggcacttcccacctttttaaaaagggtcatttgaacccacaacttggtggtcccggtcccataagactaaaaagggggccttttttttttttttaaaaattttaaaaaaaaaaacttggcgggttaaaaaaaagcccggaaagccggattgttatttttaaaggacaagcgggggggaatttttaaattacttttgaaaaaaggatctgggactgttttgagcccctggggattaccttaaaagaagggcaagagtcccgcaaaagc

SEQ ID NO: 428796 - DNA, 87 bp, Oryza sativa
ctccttcgcagatccgatccaggaagagctcgccgtcgcctttgacatggcgctctccgtggagaagaccttgtaggtgagggagta

SEQ ID NO: 428797 - DNA, 337 bp, Oryza sativa
cccacggacccaaaaggttcaaatggatgggaggggaaataaaaaaacccccgccccgaataaaatttaaaacccaccccaaaaagggaaccaaaaacaaactccacaaaataaaaccaaaaacttcgcttaatcaaaccaaaccagggggaaattgatttcccaaacaagccaggaacttaaaaaaggataaacaccacccccaccttttgctaatttaaggcttcatcaattcaaaaagattgttcttggaaaaagggaaagggaaccaaaacactattaggaggggtccattaatggaggaaaaacaaccggattgggggggccccccccaggg

SEQ ID NO: 428798 - DNA, 137 bp, Oryza sativa
gtggacagacaaaacaaaacaaccggggcccgaaagaaattgccctaaccagagccaaaacaaaacactaggcccgctatgaaaaaaaacacctaaaaggttagcccacaaacgcagcccagggcgcgtgcctttaa

SEQ ID NO: 428799 - DNA, 97 bp, Oryza sativa
tcgatccaccacagccatgagcagctcacgcccaccggaggcgagagagaaaagaggaaatcatggcggcgatttgctgtggagattcgggtgtgtg

SEQ ID NO: 428800 - DNA, 345 bp, Oryza sativa
ggaaggattggcccatttaatcccccaaatgggaaaaaaaaaaattggaattttttttggggagggaaaattccaaaacgacccaaaaatgggggcaggaaaaacataaaaacaaaccacggggtcctggttgggaaaaaaccacccgtttttgaaattaaaaggggggggggaatccctaaaagggggggggcccggttttaaaaagggaaggcaaaaatacccccccaagggggcaaaaaaatcctttggaccaaaaaaggaacctttccttattttacgggaaaggtgaaacaagcctgggccggccattggaacgtaaacactgaaaagaacccaaatttt

SEQ ID NO: 428801 - DNA, 254 bp, Oryza sativa
aaaaaaaaaacaaaccaaaaaaaaaaaaaaaaaaaataaaaaaatggaatttttaaaaaagggtaaagggggtagaaaaaaaaaacccaaaaaaaaaagttataaaaaggggggggaaaaaaaaaaaatttaggggggttaaaacccaaattttttcccaaccccaaggaagccaaaaaaaaaccctttttataaaaaaaaaaaaacccacgagttgtaaaagaaaaaaaaattccaaaaaaaaggggggggat

SEQ ID NO: 428802 - DNA, 314 bp, Oryza sativa
aaaaaaaaaaaaccggggtgataataattttaaaaaaaaaaaaggggggggaaggttttttaaaaaaaaagaggcgggcccccttttgggaaaaaaaaaaaaaaaatacccccaagggggcaaaaaaaaataaccccgcccttgggggtacaaaaaaaaaggggggccaaaatgggttttttttgggtttttgcccaaaaaaaaaaaacccggggttaaaccggggggggggggattaaaaaagccaaaaaaattggaaaatggaaaaaaaccccttgggggggggttaataaaagggggacccccactttgga

SEQ ID NO: 428803 - DNA, 165 bp, Oryza sativa
tttatcgcgtctcgactccactactgtggttgcatatactactacacttgcagttgcatccagagcccgccccgcgtctctactcgctccgtcgtgccgttattttttatcgacttaggtttacaagttatttatttttttccactctcgtttttgttctttttt

SEQ ID NO: 428804 - DNA, 133 bp, Oryza sativa
gttgtagcgaaaaggaagatacagcaggaaggggatacatttgtttctgcatctcatttctgaacggcaggtgggcatgaaatccaaacgagaggatgatgatgagggtgttgaatgggaagaagagcttcct

SEQ ID NO: 428805 - DNA, 130 bp, Oryza sativa
tactcgcctcctaccgccccaaaccctagccctccgcccgctccccctcccccgcggctgcggcggccaagaagcagcagggcaggagggtcacggccgacgtgctgtggccgtggatgctgaggaaggt

SEQ ID NO: 428806 - DNA, 419 bp, Oryza sativa
ggatagtaaattgacaactctcgcttaccattcacttcacctcaaaaagaaatcttacagagtagtacagaactgaactgaaatgatggtctagtctatacatttcataagcaatggcagttgcatggaagctgcagatgaaaaaaaaaaggtgtatggtagttttctttacatcaaatatacaaaatagactcaggataactaatgcttcattgcatttcccggtactacaattcgggctcaccgtctctgtggagaacagatggagtaggcgccttcattgtcctgtcgcccattgtcggcgaaccccccagagggctaggtccaggtgatctccgtggagctgatggactctccataatgaagatcgatggactagcagtgctgctcctgtatggcgaacctggatttgacctaaa

SEQ ID NO: 428807 - DNA, 342 bp, Oryza sativa
gttctatcagaatggtctccaatggtaatgaagatcttaaagcggatgttgaactagtagagtcgacaacagtggacaatgatactggagccccaggtgccagtactcttcctactcaaggtgttccacgacaagggaagcagcggaatgggtttctgaatttctgtaatcgcttttccagtggtgacaggtttaagaagttgggtccttctcctttattcaagtttctacagcttgcacttgagcgagattgatgttttacgtttcatacacttttgacagtcatgataatcatgatcacttccagtttatcatggaattctaatttgtggctcattttgc

SEQ ID NO: 428808 - DNA, 389 bp, Oryza sativa
agcaaaacaaaaatctcatttttatcaataatctggcacaaggacggccacaaaaggatacagtacactgagtgattctgatcaaatttgggcaaaaattatccttgtaattattatctggacccagcaggcaaaataatacattaacttggctgaaatgaaatacaaggtacagagatctatctttggacatgttttgatgcacagtacatcattccacatggatcactagcaggcctgtatcaccacaacagcattttgggggctgcttcgttctgtcagctgaggatgtatggtgcagtatagaagtacattgacttcaagaaaatacatgggctttgagccttgaatgttcagattatttccttcttttctcgttgaatttttcg

SEQ ID NO: 428809 - DNA, 414 bp, Oryza sativa
gagcacaaaaacatagttaaattgtctaagagacccagttttggaaatagatgacaaacagtttgatgcaagatggtttttcacactgaacaaatatagatgtacctcaactgtaaaaatatgactctagtcccacctttccaatattagagaccagctagcaactgttctaaaggacacactcatcactgaaactgaagctaagttatttgagatggactgaggagatcaatgtgtaacttgatttcttcagacatgaccttaaaaactcaaagaattgttgaacaaatggtgaaggcggaagagttgaagaatttgtctatccatttgaaggaatcaaaagagaaggctgaaaagctgaaagaaaggagaaaacaaagatcatatagtgagcatatttttatttgcacctct

SEQ ID NO: 428810 - DNA, 127 bp, Oryza sativa
actaatcaaacattttttgcgaaagcatttgctggataatctatctaattggtttatttgaaaaacaaaacttccattcattggaaatttctatttaggaaaatgagcttatgttttcctccaacag

SEQ ID NO: 428811 - DNA, 338 bp, Oryza sativa
ggggcccaaaatcgcaaaaaaattttttccccccccggaaattaccccccaattgggggcccggccaaaaaaaaaacatttttccaaaaagattttggcaaaggggggactaattacgggccacaaaaaggctttttaaaggggggaaaacgggccccaaaagtagaaggccgggggacatgaaaaagtttaaaaaaggggggggtttaaagcggtaagtttttttaaaaaacaaaggccccccggtagggggaacgcaagcccaaaaaaagggggggggcctgccccccaaaaaacctcaggaggaggtcaaggccgggtccccttaaggcaagggg

SEQ ID NO: 428812 - DNA, 353 bp, Oryza sativa
aaaatgaccacaccagatcacacagggccggggcagaacctggaaacaaactcccacttccgggacagaatacacctctccttccagactacaacatccaaacacggggaccaaaagaacacctgcaagcatacgggacacgtacggccatacactggacggggtccacacacgcacactttcctgaaaagacgcgcatcggtcgtgaaccatagctagcttaaatgaaggggatggggacagacggcactacggaggaggaggcgcccacttgccggggaccaactgggaggagcaggccaaggcggctccggaggccggggctgctaggcgggccttgaggggcacgaggg

SEQ ID NO: 428813 - DNA, 140 bp, Oryza sativa
attatatattttttttttttttttttttttattatttttcaacataatttaaattatataccatactatacagtaaacatagtataaacattggcatagagagtacagatgaaagcaagcttgaaaaattataagcatta

SEQ ID NO: 428814 - DNA, 151 bp, Oryza sativa
ttcgaggcacacatgtatcttgttgactttgatttggcagaactggatatcaagaaagcactagaaatagatccagacaacagggatgtgaagatgtggttctttatactttcctattattttttttttcctacctctcattttatttttt

SEQ ID NO: 428815 - DNA, 415 bp, Oryza sativa
gtccgaataaattatgatttattgcttggggacgctatagaaaacatgtacgggtaaattaacaaaactttggggattcaagaatgcacagataggtctacatatacacgggacagttttcgtaccgcaaaatggctcgatccaaaaaaaaaaaaaacattttcatgttgaacttctgtatatgcacgcaaaagaatcaattaccagatcaaaagtctgagggtcggtattactcaataacaatgttcctcgccttaatgtcctccttcacaacaagcttcccaccttcgtccctggtgaaaagcttatgcatcagctcatcccaactggttcttcctgcagattttgcttctgaggtggcttcactatgagtatcagagggcggcgtagggctagaaccctcctggatctccac

SEQ ID NO: 428816 - DNA, 55 bp, Oryza sativa
tcactccctcctctctacgacgacgccgccgacgtgcgccatggtggcgctcgcc

SEQ ID NO: 428817 - DNA, 389 bp, Oryza sativa
cttaaaactttcagcacttggagtttctgttggctttgctttcttctccttctcaccatttcttttcctctgtggtaggtattctactggaagtctctctttgccttgaagcctgatgatatctttcgttgtagctgtttctccaggaaaaactttagggagcctatttttaggatttcctggtgtttgaatctttccaggatggttgtcaagatttgagtatgtggaaacaatagtctcacagtcccaaacttcagactcatcactgctttctgaaacaagtacaacttcttcctcttcagcagtttcatttaaatacctttcagcatattcagcacatttttggattacattagcagattcatccacctcctctgctgcgcttgaat

SEQ ID NO: 428818 - DNA, 65 bp, Oryza sativa
tggacgcgtggggccgccaccgacaccgccgtcatgtaaggaggaggaggactttttactaattt

SEQ ID NO: 428819 - DNA, 406 bp, Oryza sativa
ttgtttttctctctccttttgttgcttccatttctcgttcttgcacggggaagaggagagaaagatgtgtgtttttagatttttaaaattttttactatttatttatttattattacttttttttattttatcttttattatattttttattattttattttttttttttttttaattttatttttttattattatttttatttatttattatttctatattatattttttttttaatattcattatattatttattttttctatatatccttttacattaatatttttattttttttttatatattcttttttatttaacttctttttttttatttctattactttattatatatattttttatttattttatttatatattattaaattaatttatattttttt

SEQ ID NO: 428820 - DNA, 82 bp, Oryza sativa
aacaccgcgacacgaagacgaccatggcgatggctcgctcccagcttgccgtcgtgttcctcgccgtcctagtataggtgga

SEQ ID NO: 428821 - DNA, 329 bp, Oryza sativa
ggggggggaaaacaactttttttggttaaaaggaaaccctaaaaaaaccttttaaaaagacccctgaacctggaaaatttaaaaagccctttggggggaaaaatttgaatgcgggggaaagggggcaaaaaaaaaaaatttccccattggggggggaaaccttttaaaattttttttttaaaaaaataaacgggcgggggaaaaaacggaccaaacggaaattttaccgggcgggggccctcgggggggggaacccttttttaaaacggaacaatttttgggggaaaattccaatccccccgggaaaaaaaaaaaaaggggggataatc

SEQ ID NO: 428822 - DNA, 215 bp, Oryza sativa
gggaaaaaaaatttagcccccaaacaggcaacccggggggggggctttataactaaaggaccctaaaaagggggaaacttttaagggcaaagggttttgccagggaaatcgggctaaagggggtcccaaccatattacatttgggggcacccccaccctttgaaggaaaaacggcataaacccccccggagctttgttgtagcagggccggcccc

SEQ ID NO: 428823 - DNA, 178 bp, Oryza sativa
ataattaaaatatttttaaaaaaaaaaattaataaaataaattattataaaataattaataaaaaaaaaaaaaataaaaatttaaaaaaaaataaaaaaaaaaaaaaaaaaaattaacaaaaaaaataaatacaaaaaaaaagatacaaaaaaaaaaaaatttatgaaaaaaaataaa

SEQ ID NO: 428824 - DNA, 249 bp, Oryza sativa
tcgcatacacagcacagcggataaagagagagagagagagagatttggaaaaatcttgctccacctctaaagggggataaggggggaaggatgtctttctatttttttttttttatttctttctctttttttactttgtacttttcttttttttttttttctttttttctcttcttttctttttttcttctcttatttcttttttttttctttcatctttttttttttctttctttcttttcttttttt

SEQ ID NO: 428825 - DNA, 67 bp, Oryza sativa
gtaatctcctactccgatcaatcgatcatctcccatcggtggttgcagcagacccgatctttctgtt

SEQ ID NO: 428826 - DNA, 112 bp, Oryza sativa
ttggtgtcttcatactgctcccatggcggagatggcgtctattgcgattgcagtgatcataaggagctggaggaggaggaagaatttgtttttttcttttttcttttcttcc

SEQ ID NO: 428827 - DNA, 233 bp, Oryza sativa
atagacacgtgtgtttccacctaaaatttatttattcagtaatttgatcaaagtatatgtgacgggctttattcttgcgaccaaaaacgcaaggcgtgcaaccctacacgtgcacatacatctgagagttgtttaaactacaaatctcaacggttggtgacacgaaacgatgtgacagaatggatggcaagactaagagctccgattatatctgtatagactttggccacatg

SEQ ID NO: 428828 - DNA, 66 bp, Oryza sativa
tcggttggcttctcctccccctcccggttcggtgcggattatttaaaatacaaaaatatttaaata

SEQ ID NO: 428829 - DNA, 266 bp, Oryza sativa
taacgagcgatcgaggtgcccgtcgatcatctgtgaagctagctatattagctcggatcgccatggcgaaagctagggtgaacctgaccttctttttcatttttttccattatataatacttatatttatcttttttttattttttcttaatttatttattttatattatatttttttttcttattttatttttttttaatttatttttatattattaaattatatttttttctttattttttatttttttttttatttttttctt

SEQ ID NO: 428830 - DNA, 300 bp, Oryza sativa
ataaacccaccaataagagataacaccataaaaaaaaaccgaaaagcaccctgacaaatgaataaaattacatgtgcatccacccaaaaaaaaagaaattaaaaggggcattataagagaagaaaaaaaaaaaaaaaaagctttaatgtcaaaaaccatattgccgggaaaactgacctcaaggggggtcacgtttttgccgattctgggaaagatttgggccaacccctgtcttgggggggtaacctttttcggggaaaccccctccttgggggggagggactgaacctaggaattggg

SEQ ID NO: 428831 - DNA, 317 bp, Oryza sativa
agaaaagagtcaaagctttttataatctgaagcggagggtgtaaccagcccaagcaattctcccaaagaaaacattcacccaagtaccccgcagcaacgttaacctttagcacagaaccgggttcgtacttgtttacaagacgtcataggtcttaagatcatcaaaatgaactgagccccactaaaaaatgggtagagaaaagggctgcaaaaagaagcgatacaagacaacatacgggggatgcacattgagatttcacttcagagctttttattgggctgaggaggtgacccatttcgcccgggtgcctgccatt

SEQ ID NO: 428832 - DNA, 114 bp, Oryza sativa
ttcttacccaacgccaggttcaagtcgctcatttccacctcctgaagcagaggcagccgttgaagcagcaacgggagcagcagctcgccgcggcagcagcggcggcgtggggaa

SEQ ID NO: 428833 - DNA, 82 bp, Oryza sativa
tttaatagccaatcaagcaaatcattaacacttgcatgattgaccagaaggacaagtcgtgttctatgctgcaaaagcttgg

SEQ ID NO: 428834 - DNA, 95 bp, Oryza sativa
tttctatgttgtgcaggaaagcgctcccacgaggagggaagcttagaagaatcatcgtcttcagtaagagtagcaggcgagaccttgcgcgaaga

SEQ ID NO: 428835 - DNA, 71 bp, Oryza sativa
actgatactacgacttccaagcaaagccaaggtgggcacttattcacccgtagagctagctagccatggct

SEQ ID NO: 428836 - DNA, 84 bp, Oryza sativa
tcggtctgtcgttgaggaggagagcaaccgcaagaggatggatcagtagcagcaacagacaaatgagggacagcaaaaggcgac

SEQ ID NO: 428837 - DNA, 417 bp, Oryza sativa
tctttaacagcacactgagctcaatttgatgaatgaaaaattgagcattgaatcaagaaaagcaaaatcattggagcgagatggagatcaactacgctcacaggtggctttacttgagtcaaagctgggccatggagattactctgcctctagcacaaaagtactgcgtatggtaaatactcttgcagtggacaatgaagcaaagcagactatagaggcattgcaagctgaattgaagaaaacgaaagagaggctacaagcagttgaagaactaaaaggacaagctgatgttggaactgtggttgatgtgaatattgctgaaaagctagcacagcttataaatcaaattgcaaccctagagaaacgtgaagaaagatttaaggcaagatttgcagagaggatcttagtttttccaaa

SEQ ID NO: 428838 - DNA, 150 bp, Oryza sativa
tcggtggtggtcaagtgctccctgctgggctccgtcctcttcaacctcctcctcgtgctcggcacctccctcttctgcggcggcgtcgacaacctcggcgcccgccagccctacgaccgcaaccagcccgacgtcagcaccgcccttctc

SEQ ID NO: 428839 - DNA, 183 bp, Oryza sativa
acatcgtctcacccacctctggagatccgatcatccatgcatggctgctattcccctgcgcctcctcgacaatggagccaatgctgtacctttcatgcgtggtagccgccacccgcgaggacgacaagccgacgccgtgtataggccgccttgatcatcgtactttttatgccaaagcagttc

SEQ ID NO: 428840 - DNA, 140 bp, Oryza sativa
tactaatctagaaaaggagcaaaacatgactaataggcatcatttcacatgacacacaaattaagcaaagatagaggccactcagtttatgacaatggtagcatgagtaacatgcaggcacagggattactaaacatgaa

SEQ ID NO: 428841 - DNA, 123 bp, Oryza sativa
tcgtaccaacctagacaaggaagaaaacctgactggtattctttgttacacgcgccatacagatgatgaacagggaaggggcgcccatttgtcgattttgcgagctgagcaggagtaggtaag

SEQ ID NO: 428842 - DNA, 396 bp, Oryza sativa
tcggtacaagtgagcatgggcgcgaggcagcatttgcagctgtagttcttggagataacgccctcatggaaaaagcatggcaagacacaggaatgttggccgaggctgttttgcattctcaagctcatggtcgtctattattaatgaacttattcatagattgtaactagatacttcagctgtagctgattcatacttccctctgttctttttgtatgttttattctactatttttttcctctcttctatttatcctataattattattctttatgtattattctttttattttctccatatttttctatttattttacttttaaacatcttattttattctttatttcattattcatttcttaattattctttatatctttcattttacaatttt

SEQ ID NO: 428843 - DNA, 73 bp, Oryza sativa
tcggtgtgagagagagagggagggaggcaagacgtgtattcatttggtagggagccacacagtcttcggaaag

SEQ ID NO: 428844 - DNA, 82 bp, Oryza sativa
tggtgagcatggtgagctgcagtgatggtcccctgcgtgactggtgtccccggccaccatctacgcaaccttccaggggcta

SEQ ID NO: 428845 - DNA, 420 bp, Oryza sativa
tcggtaggatgatgcttgaattttgtcagcaaacttcaaatgagaagctgccacaagatatatcagatcaagcacttatggagaatttcatggagagatatgagaaggaatggacccatcctgttaagaatcttttcggtggagagttagcatatgccatgcttatccagcttcagaagcgcacagtggatatcaagcaggcaatgctggaactggatcagattcttaaaggaaatgcgataaacttcgctattcttgcagctttacctgcatttggtgtttcgcttttgctcctcactgtggtgcaagcatggattatgaatgaccaaggcgccgagggaagaggcaggattgcacggcgccaaagaaggctgctgcttcttgatgcagagagaaaacttatggagtttaaaattgcat

SEQ ID NO: 428846 - DNA, 351 bp, Oryza sativa
tttcttcatatccaagaagttgttctctcattttattcagatttcatctgctgccatacatatcaaagatataatgttgtcagcagcacctacaaaaagacaactacttcaggacatgatccgagcttcagtcactcagggtcagacaatagtgcctgggcatatcagcgcaaattcagagcagaatgctcagggtggctttagtcaagaacctgggctcaatgccacagatgcagatgaagagaagaatgaaaaacaagttagtgatgatgattgggatgatgactgggataatttttagcccctcccgcacattgttcctacaatgcgttttatctttctacagtttgt

SEQ ID NO: 428847 - DNA, 76 bp, Oryza sativa
tttatatctggagaaggaatcaaacttggagtgtaggtatgtttattcacgacatacaaattatggatagaaaaag

SEQ ID NO: 428848 - DNA, 78 bp, Oryza sativa
tcgtaacgacctggagaaggtgaagaaccgcgagggtatatatggcgacctacgccgtacatatgccggaaagaaaaa

SEQ ID NO: 428849 - DNA, 287 bp, Oryza sativa
ttgtttggttgaaaacgctatcaatgtccagccaaatattctggatggcattaatattgtccttccccaattcctgggcatttttcacacaatgcaggagaggtgcatgaaatcattacaggcgctcacttcatctggaccgaatgatagtggatatacccaactttagaaagatttctcagaggtgttggatcttgtaatcgattccaatattacttttgtaactctttgtctacgcttatcaacctgctgccttattatctcgttctttttttgtgaatagctaa

SEQ ID NO: 428850 - DNA, 65 bp, Oryza sativa
agtgcaccaagctgagtgagccctagccgacgacggcgtttttgagcgcaatcacttaaaccatg

SEQ ID NO: 428851 - DNA, 59 bp, Oryza sativa
gatcgtcctagagaaggagaagaacctccattgtgggtatctttaaacaagacgcgcat

SEQ ID NO: 428852 - DNA, 84 bp, Oryza sativa
gatcgatctagagaaggtgcagaacttccattgtgggtatttttacacacgccgcaccgatgttgcatatttaaagttctgtca

SEQ ID NO: 428853 - DNA, 63 bp, Oryza sativa
gctaatatagcaaaggagaaaaacctccagtagaggcttctttaaacacgttgcccaattgaa

SEQ ID NO: 428854 - DNA, 66 bp, Oryza sativa
tactgacctagagaaggagatgaaccgccagtttattctttgctggacatgccgcacagatgaagc

SEQ ID NO: 428855 - DNA, 69 bp, Oryza sativa
taacgacatagagaaggagcagaacagcgagtgtattttttgggagagaagtcaatccactgcagataa

SEQ ID NO: 428856 - DNA, 70 bp, Oryza sativa
ttcgtatgatattgagaaggagcagaacatgggggggatttttggggggagacgccgaagaaatgaggga

SEQ ID NO: 428857 - DNA, 91 bp, Oryza sativa
tgaccactcaaaagaacggaaaagtcctgcaggttgtttttgtgggtacactatactgtaatggcggatgaacatgatacatgaaaattaa

SEQ ID NO: 428858 - DNA, 134 bp, Oryza sativa
tgttgacgcgtgggttcaacaatggagacaaccagaggaggtaggtagccgatgacgtttacttcagaattaggccctagagtttggtttctacaggaggacaaagatgatttgagacatattgcttttgtttt

SEQ ID NO: 428859 - DNA, 315 bp, Oryza sativa
ataatacaagatgtatcaatgtttcactgatgcaacaacgaggggactccttgctgataatgggatctccatttggcatattatcacctgtccatttcttcaataggtaattttaattctactcctttagttcatttgggtatcttgttaccaatttataggggcccattagactgtttgttgaaactcagtatgtcaccttaactatagagcaagcatatgtaactagcatgtttgtaacatcaacgggtgtttaattaaggtggaagtgcttgagatttctttatgtttaaccggtgactttatataaattta

SEQ ID NO: 428860 - DNA, 134 bp, Oryza sativa
ttattttctagaaaaggagcaaaacatccagtttatgcatcttttaacacgacatacatattatggatagttaaaggccatcctattcacgacttatgctagcatgatcttctgtaggaaatttaactttataa

SEQ ID NO: 428861 - DNA, 104 bp, Oryza sativa
ttctttcttgaaaaggagctaaacttccattatatttatttttaaacacttcacacaaattatggaaagaaaaaggccactcaatcttcgacctaggtagcaga

SEQ ID NO: 428862 - DNA, 157 bp, Oryza sativa
gtcttttctagagaaggagcaaaacttgcagtataggcatttttaaacacgccacacatttgtaggactgaaaaatgccagccatctttcgactttgggagcagagttctcgtaggcaacggaattttcaatcaagaaaaatatgatgtcgcatttg

SEQ ID NO: 428863 - DNA, 81 bp, Oryza sativa
tacagacctagagaaggagaagatctgcgggggtatttttggtcacccacgccatacaactgaagaaaagccaatagtcag

SEQ ID NO: 428864 - DNA, 114 bp, Oryza sativa
tactgatatagaaaaggagatgaacttcgagtgtatttatgggtaattacgtagaacaaatgatggaaagtaaagggctagctagttaatcatattgctttcattgttaatata

SEQ ID NO: 428865 - DNA, 59 bp, Oryza sativa
taatgatctagagaaggtattgatcttcgtttttattttttgtgaaacactccgcacag

SEQ ID NO: 428866 - DNA, 280 bp, Oryza sativa
acctgaaggatcaaaaaaacttcaaggactgcaagtatgtacttgatgaataatgaaggtcaactaccacaagaacaattaccattcttatatatatatcatattacaattatatcattatttcattatttatatttattatattattaataaatttttttaatttttttaatttattatattttatattataatttatacaattacttttatatatatataaatataaatttaattattaattataaaaatttaaatatttctaataatactaatattt

SEQ ID NO: 428867 - DNA, 170 bp, Oryza sativa
ttatatatctctgtaatcatcatatttttattctcatcaacacagatactcataccacaaaaacacagtttgggatggctcaaaatcaggctggatctcaattgggagaataacctgtcagctgtatttgttccagttgacattagaggttgtgtcctgccttttatgtt

SEQ ID NO: 428868 - DNA, 115 bp, Oryza sativa
ttaatatcggagttggaagcgatcgatggcggttactactattggacgagttgttgcactcggcgcggtggccgtggtggtgtttattttatcttctttatttaatttaaaacta

SEQ ID NO: 428869 - DNA, 54 bp, Oryza sativa
gatgacctagaaaaggagaaaaaccgccagtctaggaatctttacacacgacac

SEQ ID NO: 428870 - DNA, 110 bp, Oryza sativa
ttcgtaagacctagagaaggagaaaaacatcgagtatattttttgtgagtcacgccgcacagatgatggaatggcaaaggccactcagtcttcgatgtgggtagctgagt

SEQ ID NO: 428871 - DNA, 93 bp, Oryza sativa
taataacctagagaaggagaaaaacttggagtatatttttgggtacacaagttaaacagttgcaggaaagacaacggcaagaaagttaattat

SEQ ID NO: 428872 - DNA, 160 bp, Oryza sativa
tcggtctgacatagaaaaggcacagaactgcccgtttatttatgacgacagacgccgcacaattgacggaaagacaaagacaagcaagttgatcaccatggtagcagaggaactacaggcaagggaatagctagatgaaaaaaagttcactgacaccatt

SEQ ID NO: 428873 - DNA, 166 bp, Oryza sativa
tcgtgaaaaagagaggaaaagcagggagacaaattggaaaagaatcatctcaaggtgacccagctactggaagctctggtgttcagaatggaactgtaaatgctctatacaaagttttaccagccaccctagccaaagcagttaagaatgaagctgaagctgtggg

SEQ ID NO: 428874 - DNA, 90 bp, Oryza sativa
  unsure (1)..(90): unsure at all n locations
tcctacntggtcagcaaggcgcgtcactgccgccctggtcgtgatggtggtggcaaaaaacaaacacacaataaaataataaacaaatta

SEQ ID NO: 428875 - DNA, 440 bp, Oryza sativa
ttattatccaccctctcttccttccttccttccttccttccacacagaccagaccaggcatcccgacactacacgcagactctcgactttgtcactagcatcattgcttgatgatcgatgctgagctgcaaccaagcaccagcatatcctttccttcattccttcctggtgctggtagaagaagaacaagctagctagagtgataagaggtaattgtttcctccaactcattccaaccttgccttttgcctgccaaactccttattctctgccactgcataccatacgtgtgcgcgcctgaatgcctgcctgcctgcctgatactgatacatacacacagcacacacgttccgcttttttagctacctttgcgattgatctccggccagcgtttgatcccatacaggataacaatggcgggcattacgcttctacgttca

SEQ ID NO: 428876 - DNA, 118 bp, Oryza sativa
gatattgaagctccagtgctgagaaggggaacatgctttgagtaagtgaggagaacagatttaggagtgaattcaccaattgcactaacctcatgagcatttaatatttcagaggtta

SEQ ID NO: 428877 - DNA, 81 bp, Oryza sativa
taatggccaagagaaggcgcaattcttccagtccatatttagagagtcactgcgagccgctgaagcaaggacagatggaag

SEQ ID NO: 428878 - DNA, 122 bp, Oryza sativa
taataatcgagaaaacgacatctacttcctctatatcttataagagagagccctcacataatataatacaatttatatatataatattattaaacatattcttaataaataattaaatttta

SEQ ID NO: 428879 - DNA, 171 bp, Oryza sativa
tcggtacaagcttggaaacgagttgatctgctgcggcacgtattgctactgaccaggtacagctgacgtagctaaagaggccatggcgctggtaatgatggtaggagaacgacgccaccggagggaagaaaggaggtaataaacgtttactgacttttatttttaattact

SEQ ID NO: 428880 - DNA, 73 bp, Oryza sativa
ttggtggaggtcactgatggagcaatgctggtcgtcggaactgttagaaagaccgagcttcacggaggttgac

SEQ ID NO: 428881 - DNA, 127 bp, Oryza sativa
tgttcgctccatctctctccaccacacaacggtggtggcttggtggaggcggaccggttacagaaagggaggccgcaacagtgttagtttattatattttttttatttttaaatatatttttattta

SEQ ID NO: 428882 - DNA, 147 bp, Oryza sativa
tgataagaatgcacacaaaactcgctaatctgatagggttagtttaacctggtcgaagggttcagcccgcagaaaggtggtagaacacagtgttcgaatttgacgattctgcttgatttaagtattctagcaaaccgacaaggtaaa

SEQ ID NO: 428883 - DNA, 307 bp, Oryza sativa
  unsure (1)..(307): unsure at all n locations
tnnttaaaatacatccattgttggtaaatctgaaattgagagaaaactcgctgaaaatgaccagaaggcagaaaggtggttgaacaaagtatcccaacttgatgattctgctgatttaagtagtctagcagccgacgaggattttcctgagatcatgccgattaggaagggggtcaattaatttgtggttagcacacgcatgataccattggagagaagactggtatatgcacagtacagtagttacaatagcccccaagatggattatctgcatccaagattatgtaaacattttacaggattctt

SEQ ID NO: 428884 - DNA, 202 bp, Oryza sativa
gctactagtattgtagtatgtaaaacatgacctgaaaaatcctcctttaaaaactggttatcttccatactatcttcttgcatctgttcatgtgatctaccaaaatgcatgtctattcaagtgtttcgcacgtcctttagcatatcttttttaaaaactattttatgtctttagtgcagcttttcttctaataaatttgttt

SEQ ID NO: 428885 - DNA, 163 bp, Oryza sativa
  unsure (1)..(163): unsure at all n locations
ttatacgccagccacacctctctccatcctctcggtctctctctgtctcctcttctctctcccccgacggagaggagagaaggcgaggagccgggggagatgggatcggactcgncgccctagaaatggggcctcagggagcagcgcgaagcctacctccggt

SEQ ID NO: 428886 - DNA, 121 bp, Oryza sativa
taaataaaaaaaaaaaaaaaaaaaaaaaaaagaagagagatttttaaaaaaattaatttgttcagaaaaaaaataaaatgaggggtggatgtaatgaaatggggtggtttttttgggggta

SEQ ID NO: 428887 - DNA, 99 bp, Oryza sativa
ccggcggtatctggtggagccggcggcgatgtggtgttcgttcaaccttgtgctggtctccctcttcagggcgctctactagaaggaagcatggcgcaa

SEQ ID NO: 428888 - DNA, 138 bp, Oryza sativa
gttctagtgtgttaaagatactttagatgcccagctgcctgttgagaatccgttcctgggtaattcagtatgttctttagatggtcatcagagtgaccatgttgttactaatatggatagcatgtggggtcctgatga

SEQ ID NO: 428889 - DNA, 538 bp, Oryza sativa
tgtaatatgttcgctaataagcatcgatcgaaggcgaggtcagttagccagccggtgcgccgggggagctggggaagattttatttttcacttctttatttttttttttctattttccttttttttttttattttttttttttttcattttttttttttttttttttttttattttttatttattttattttttttattttttttttttattatttttttttttttatatttatttttttactttctttattttatttatttttttttttaatatttttttattttcttttttctttttcttttttttttttttattttctatctttattattaactttcttttatttttatttatttttctattttctatttattattttattttttttcattttcttttttattttttattattttttttatttttatttattacttttttctttttattatttatttattatttttattttcttatttttttttatttttattatttttttttttttttttaatttttattttctttttattctt

SEQ ID NO: 428890 - DNA, 517 bp, Oryza sativa
cgtgatagtgagcctagaaactgcggcggttttgggcgcgatttggtttccaaccacctcgattggagtgcgccggcggtgatcgagctggtccttggcctttggttcatgtttttttacttattcttatttttattttttaatctatttttatctttattatttttaatttattttttttcttttccaatttcttttatacttttttttttattattatttataattctctttttctttttcttttatttttttttatattattatttaattattataaattattttatcttaattatttttactttcctcattctttttcttttttttctatttttctatcttttcatattctatttttcttttttttattatttctttatttatttctctatcttttatcttcctttatcttattttttattattctttattatttataaaattactattattttttatattatcctttatttctcctatttctactctatatcctatatttaattattttttt

SEQ ID NO: 428891 - DNA, 276 bp, Oryza sativa
ctgaatagtcatgggagttttgattttctccaagcaggtcctagagtagttgaggctaacttgtataacaatggtacgtttagtcaagttttagaccaaagatgcagttccacttctgggatggtagggtataaaaccatctgtttcatattaattttcttcattcttctcaattcattgtgaaaatggagaattccacatgacaatcatttaagactctgatgtccattcttttggttttgatgtccaagtttcgagcggtttgaaatcaaccta

SEQ ID NO: 428892 - DNA, 161 bp, Oryza sativa
acgcgtgggcggacgcatgggtacgaatccggcagtggcagccatgacgccctccgccctcgcccacctagcctccgactcgccgctccccgccttctcccccaagctccagggcgaggcccggctcggcggctgggcccgcgctgaggcggctggctgtg

SEQ ID NO: 428893 - DNA, 82 bp, Oryza sativa
ttctttttcatactatcgattatgcagttcagtcctcgaataagcaaggacttcgagctctgcccttaggctcgattccgac

SEQ ID NO: 428894 - DNA, 51 bp, Oryza sativa
gtcttaccctcgcgggccggagagtgagagatcgacgaatgccagcatata

SEQ ID NO: 428895 - DNA, 315 bp, Oryza sativa
gtgactactggcgaccaagccgccgccgtctctcccctcgccatccgcgtcgccgtctcccccgccatccgcgccgccgtcgccatccgccggcgccgtccagacgcgccgacgtctatccccgtcatctcccctcgccattcgcgccgtcgtctttccccgtcattcgcgccgtcgtttcccctcaccatccgtcaccgacggtcagacgcgccgtctgcttttcccgtcatccgtgcagtcgatttctccagagtgtttcggcgcttttctcgtttagcacgcatccgaaggagccgaaggcttcattcgctt

SEQ ID NO: 428896 - DNA, 56 bp, Oryza sativa
ttatttataaaattaaataaaaaatgaacaatgaaaaaaaaacattaataatggat

SEQ ID NO: 428897 - DNA, 145 bp, Oryza sativa
tctgttattttgatcacaaccagcaaggctataaacaattgacatgcctagtgcaggaagaagatcattgaatgtcagtggttgctccttgggaattgactcgcactctgatattccctcccaatatttgtatgttgatcttgtg

SEQ ID NO: 428898 - DNA, 183 bp, Oryza sativa
tctgtccaaacccgttttcatggactatgccatgcagcagatgccgtggactctacagctgcacatagtcccaatcttccggatcattctgtgagagttcaacgtgtttgcatatactagtcttctatggattttatcttcatgaagtggtcatacactctcacccattcaaccctaaatttc

SEQ ID NO: 428899 - DNA, 162 bp, Oryza sativa
cttggccgaaccccccctcgacacgccgtcgccgccgaggggagagagagagaggccgccggccgccgctaccactgacccccccccctcgccggagcgccccgttgtcgggtatgatcgatggcgttcatgaggattcctgtaaggagttgaatgaccttc

SEQ ID NO: 428900 - DNA, 161 bp, Oryza sativa
ttcgatgagagcgtcctcgtgcggggcatgctcgccgcgatccgtcgcgagcaggtctaggtggaggactctttttttttttactaatttttttttatttcatgttatacttaattttatacttatattttatacttttattataatttatattttttatt

SEQ ID NO: 428901 - DNA, 287 bp, Oryza sativa
tcgtaaaacgagcggataaagaaatctaagaaaagaaaagtcttcttcctcttcctcccctccttccgtccccatcgcccaattcacatggctctgcgtctccacggccaattcgatccaacccgcgaagagagcccccgcttctccccatccaattccgccacctgctcgttctcccagttcctcctcgccgccccagttgacgacggccacctctgttcgatccaccgctgactggtcccccccgctcctggtttcgggggcggtcctttctttctatgcgatct

SEQ ID NO: 428902 - DNA, 60 bp, Oryza sativa
tcgttgttggataatgagaacaggcacgggttggtgctaacttaaactagccaagtctgg

SEQ ID NO: 428903 - DNA, 240 bp, Oryza sativa
ttcgttcaaccacatcccgctgtctcccgatacggttatcgaggtgaatggtcagcggagtagcatgcacaccgagttcatctcttcatccctcaggagggacagggttgacaaaatgaccgaggaggctacattcgtgagcacagatagtataaggatgacagggagtgtcaggtttcaggtgtttgatttgaacgatctgctgctcacaggcgacctaaagttgtgcagtgccaattg

SEQ ID NO: 428904 - DNA, 61 bp, Oryza sativa
ggaaacaactcatgaattcctagaaacccatcagcgtgtggtttttcttaatgtttaattt

SEQ ID NO: 428905 - DNA, 353 bp, Oryza sativa
tcggttagattagattgatctaacaggactcatggtcaagcgcacctcgcccctttccgtgcgtgagacgcaccgtacacacacctcctctcctctcttttgctgcccctgccctcccctctccataattctcttttctatttgtaagaaatattttttatcaagaaatcaacagtttgatgagttcaaaataattactatagtttttaatatattttgaaagcaaacaatcagatcaagaaaattctcttatgcacctacccactgctgtgtcaatataagcgatgcatgcaacttccatctcttcgattgatctctcacgccttaccgtgcttgttactatgattccatgt

SEQ ID NO: 428906 - DNA, 131 bp, Oryza sativa
tttttatcgaatagaaattgccaatttgttcgatgatttccaactcttgaagaatatgatcgataatttgccacaatttatgtcttatctgtctagcgacttgctactttagatcctttagctaaacaatg

SEQ ID NO: 428907 - DNA, 155 bp, Oryza sativa
tttttaattcaataattacacacaaaaaaaataaggcattataaggcagttgcagctgctagctgctgttgttgttggttgtatcattaattcttttttttttttttattattatttttttcttttttatctatttcattctttttttattttca

SEQ ID NO: 428908 - DNA, 92 bp, Oryza sativa
tttctccctcgttgtcctcaccggcgagcgcggcctctgctgctgcttcaacaacaacgtccttaagaaggtcgagacccgttttgtggagc

SEQ ID NO: 428909 - DNA, 266 bp, Oryza sativa
atggttttcaactttgatgaggatgactgggatgagattgtcgctagagatgcgaccatggatgtcgttcataaccgggggtgtgattttgtggaggatgaattttagtcttaggacttatctatatcttttcattacttatgcttatattttttttatcttttcttattttttgtcatcttttctttctctttatttctttcttcttctcttttttttttattttctttttttttactttttttattttactctttatttttatt

SEQ ID NO: 428910 - DNA, 428 bp, Oryza sativa
tcggtcataccaacatgataagaagattagagctgcacaaggagttcaaatattagcacagggtcttgaacatgcaattgcagggactgctctttatgtgcttaagcctgaagatgatcctgacagacttaaagatgctgtgttggtagatatcactatttttttgaatccctattcttctttctgttctatacatttttttctccttttcattcatattcttttatatctactttttaattttttattttatatttctttttttaattttattcttttattatattttaacattttatttttacttttttttttttttttttttcatttttttttttttaatttatcattatatttttttctcttattttattctatcatatttatctatttctctcttttttacttcttttttatacttttttatt

SEQ ID NO: 428911 - DNA, 63 bp, Oryza sativa
tcgatagaaatcttgggaacgaaagcatggcagttgagggttttgaggaagaatgtcaactcc

SEQ ID NO: 428912 - DNA, 238 bp, Oryza sativa
ttgtttttcctcaggaagccccaccgctaatatccagtgctcttcagaaacttatcttcatatgtttgaatcaagacgatgaacataatccttctaggacaactgtccgtgcatctgcgggagcgattcttgctagacttctggtgatgaacacaaactttacaggaaagctattatcagagcctgcccttctgacatgcattcaacttacagggattttttgtaacaataattttgc

SEQ ID NO: 428913 - DNA, 95 bp, Oryza sativa
tcttgattgcatccaccatggcgccgccgtgctacatatacttcgcctaacacctactcataactgactgaatcccgaagacctacatcagtcca

SEQ ID NO: 428914 - DNA, 66 bp, Oryza sativa
atttttacgaattaattaatttaaattgtaaaggtggtgaaattttttgatttgctgatttctttc

SEQ ID NO: 428915 - DNA, 69 bp, Oryza sativa
ttagtctccatacggcgtgtttactttcggatgaattgtgtcgttcttgcgtagcagattgaagtaact

SEQ ID NO: 428916 - DNA, 454 bp, Oryza sativa
tcgttcggcgagttggcggcgtagagggaacgagaagaggcgagttcttgacccttccaccgttgcgcgcttcgtctgagttttgcgcctctcctcgagaccggcatggatgcaaagaacttaggcaacagacgacaaaatcatgagaagagtacaatgacagaagatgcacggagccgagatcaggagaccttgcagcggtttgcagattcagatattactgtgagttcagtcaacagtcatgaatctggagatgtgaacatggaagctgccatctctgctgaggatgtcttgcgagctggtggtttctgagcaaaagatgacattggcagccttcttcccacagtcgtagattcgactgatttcgaggccttgttaccggatgcttgctacttgaaggtgtgagcttaaaactatgtattctggacttggatacttatgcatatgaaactga

SEQ ID NO: 428917 - DNA, 83 bp, Oryza sativa
tcggttttcgatcgcaccgcgcattgcattgacatctcctaggaaagctatggtatatattgttgttaaactagcacctgcat

SEQ ID NO: 428918 - DNA, 95 bp, Oryza sativa
tcgtttgaccagtctagagctaccatggtgcttcataatttaggaccacagtttctgtagaattcatccaatagacatggttgaaaaggatgttt

SEQ ID NO: 428919 - DNA, 154 bp, Oryza sativa
attagatctgcagcgagagagagccagcgaagcgcgactccgttttaaccgccttcgccgtcgtcgccgtgatatcgattccctccctctcgccgtagacgtcgttggtattcatggtgccagtgctttataccgtcattggcaagatgaccag

SEQ ID NO: 428920 - DNA, 61 bp, Oryza sativa
atactttagggctatcatatgcagggggggaaatgctatagctgtttcacaagaccacaag

SEQ ID NO: 428921 - DNA, 267 bp, Oryza sativa
tcggtttgaactataacacctaccttcacggatcaagggaatcctaactggggatggagctggatggaacgctggatgacatcaaggccttgggagagccgagtgattatagataaggattctaaggaccattattgaacaaagaatcccagcactagcgcttttcgtacttatgtaccccgcgcaatcttaatccagagacctgtaacaccaaacaagtctagccgttcaccaagtcggtaattttcattaacttcttcgttaagg

SEQ ID NO: 428922 - DNA, 76 bp, Oryza sativa
gtgatccaaattagttcctctactgctcatcttcacagatgcactccttctaggcgttatgcgtccaattctccag

SEQ ID NO: 428923 - DNA, 151 bp, Oryza sativa
gttgtgtaagcgagtaacacacacgatctagagaagggggttcatgaggcgaccgtacggtcacccattagcgagtccgtcgatgcacgagtagggactgctggcccggttgtatacatgcatgtggttgacacgaacatcatcctagttg

SEQ ID NO: 428924 - DNA, 57 bp, Oryza sativa
tttactcgtgggatctgtattttttttattaagagaaagctcttttcgacttctttt

SEQ ID NO: 428925 - DNA, 126 bp, Oryza sativa
ttttattctcctctctctcctgcttctctctctcctgctcttcttcacctccttgtctgtccatagatcgagccgctcagaccaaatcttggatgcgttctttattctttctcgctgcgagggagg

SEQ ID NO: 428926 - DNA, 93 bp, Oryza sativa
tcgatctatagtcttctaccttcagaggttgaggagcgagagatagataacctccttgtctgtacttagatcgagccgcttagacataatctt

SEQ ID NO: 428927 - DNA, 74 bp, Oryza sativa
ttgttttcaagtataagacctatatttgttgattaaggtaaaattatcagggtcctgtgctttaattgaattgt

SEQ ID NO: 428928 - DNA, 192 bp, Oryza sativa
tcgatcttacttataagagaaacacttgagtagcaaggtgaaatcctacaggaccgggtgctttaatactattgtgcaggatgtaaatgtactggctacaccggtaagatttggaaaaagtgcgaacttagttaaattcaaatatgtaagaactttaatacgaaaaatcattacgtataactcaacttaaaa

SEQ ID NO: 428929 - DNA, 114 bp, Oryza sativa
tttgttctcatttgccagacagagattacagtctgagctggattaccacccgtagctatagttaaacactactcgttaacctattatccttcagcttgctcggtgatcttagat

SEQ ID NO: 428930 - DNA, 214 bp, Oryza sativa
tttgtttacctgtgccacacagagcttacgttctgagctggaatacaacccagagccatatatatacactagtggggaacctaccgtcgctgacaatgctcgtgttcatagctcatgtgctatagctcagcctctcccaagtcagtgtggccctggatagcgtgttcaccgaggtattcttgctctcgatcgagaatctggccctgaacggata

SEQ ID NO: 428931 - DNA, 253 bp, Oryza sativa
atctgctatatattaaatacatgagccatttttcttttgtgggaacactaggggataactctattgttacagtacaacataacacaagcctcattagtgttctctacttctgatattttgcatcactatgtacattggtcctattagttctactatgccatactgcacgttgtgttgtaagtaccttacaacacaaacattagagttgcttagcctctttctatttgcctatctggctgaagcctctgcttgg

SEQ ID NO: 428932 - DNA, 283 bp, Oryza sativa
gcaaagaacaaactttacaatgttttcttttcaggtgagtggtgattggtgaatgagaatatgctccttgtcccaggttttcctgtgatccattttacagacagtaacagaagctccgaaccttaaagttcctacctgttttgcggttcacaaaaaaattctatgaaattgaatgcccgtacttgtttgcggttctgtaaatattaaccttacagttttcccagattacaaaaaaaagggatccgtgttcttccaaattcctcttaccaaggctttcggttag

SEQ ID NO: 428933 - DNA, 219 bp, Oryza sativa
gtagtaatgaacttgcacgaactgctgcaaatcaattcctccaagatttgcagaatgggagtttagacattggtccaggattaacaagttctgcaacaaacaaatctgggaatagcgtagatgatacggatgctaatggaaaaaaggggaaacttggaaagagccaagatgatttatattatgctgcttctaaggctcatccagttagctcttagcccc

SEQ ID NO: 428934 - DNA, 372 bp, Oryza sativa
gccatagtagcaccgatccacaaggaattcacaatatacccttcagtttcagtctcatgcggacaaaaaactccccaactttcgaaagacaaaaaagaaccaaccaggcgcagtgtacagtttcacggcacgcactagggccaaccaaggaaccaccaacgggagcaaacggtacggattcaaggcatccaggagattccaagatggctgccggaataaacgcttcttggtgaccggcgtttgaagattgtcgggtgtacccccacggacgcccgacgtagccacgcccatccttccttccgacctccgcgtcccgttcacccaacacattgcgtgggcacgggtggggacagccatttgcgcccatggacc

SEQ ID NO: 428935 - DNA, 121 bp, Oryza sativa
tagtcttcctgcctggacatctacatccgccgagtagcctactacaccctgggtggcacctacacagccctgcacctgtaacgtaacccaactactcgctaaacattagtcaacctcaact

SEQ ID NO: 428936 - DNA, 101 bp, Oryza sativa
tttttttttttttttttttttttttttttttttttttttttttttttttttttttttttttttttttttttttttttttttttttttttttgttttttttt

SEQ ID NO: 428937 - DNA, 121 bp, Oryza sativa
ttttttttttttttttttttttttttttttttttttttttttttttttttttttttttttttttttttttttttttttttttttttttttttttttttttttttttttttttttctttttt

SEQ ID NO: 428938 - DNA, 131 bp, Oryza sativa
gttttatttaatcttgctaagacacagattatggggggttgcataattctcacatggggcataaaaacatccgtggaccggaaaaaacactcgatactaggggattagctggactcatataccagacttca

SEQ ID NO: 428939 - DNA, 91 bp, Oryza sativa
gtcgtttgtacaggggggaggacacggatgatggggtgttgcaaaaaaggaggcgttttcatacccagaggggtgggcggggaatgacatc

SEQ ID NO: 428940 - DNA, 100 bp, Oryza sativa
gttgtgtttaaggggggaaggaggcggcctaggaagagttgctaaaatgctcaccttcctaataactacagtagtaaatggggaaaaacacttgctaatg

SEQ ID NO: 428941 - DNA, 166 bp, Oryza sativa
cctcgacttattttcctcttcatatcgcagcccaacttattttcccctttctgaaagcccaacaattccaaagttcatgttcttttttatcggatactcgggatcaacacatcagttgatcgatcgatcacttgatcaggtttcacttgagttcagcacttcagag

SEQ ID NO: 428942 - DNA, 226 bp, Oryza sativa
tctttgtgcagcaccctggatccgaagctaccgagatacacagggtcgatttcctgatactctgcactgggagattcagtggagttgcccacaccccaacatttgcacccaaccgaggccccgaagtgatccacggccaagtgcttcactccatggactactccaacatgggccacgccgccgtcgacgagctgatcagaggcaagcgcgttgcccgtgtcttttt

SEQ ID NO: 428943 - DNA, 100 bp, Oryza sativa
tttttttttttttttttttttttttttttttttttttttttttttttttttttttttttttttttttttttttttttttttttttttttttttttttttt

SEQ ID NO: 428944 - DNA, 79 bp, Oryza sativa
ttttttttttatttttatattttttttttttttatataataatttttttttttaaaaaaaaatatttaaaataatttat

SEQ ID NO: 428945 - DNA, 283 bp, Oryza sativa
gaagtgttttgtcgagaagagagagcagagctgaggtcgctcatagtgagtagcgtgctgagctagctgacgggagcggcgatgtctaaggaggtgagcgaggagcccgagcacgtgctgcccagggactacaccgacccgacgtcggctcctttattcgaactcagagagctccggatgtgggcctttaccgggcactcattgctgagttaatgatcacgctatcagttttatacataaccgtgaacaccgtgagtgggtacaaggtgcactcgaacgtcgt

SEQ ID NO: 428946 - DNA, 96 bp, Oryza sativa
atccggctaagacacagcttatgaggtggcgcataattctcagcgtggtcagatcaacaaccggcggcgggacaaagcacgccctgagggatgaat

SEQ ID NO: 428947 - DNA, 59 bp, Oryza sativa
aatattgtaaataattaacatttaataaattaaaaattttttcatttatataaccatac

SEQ ID NO: 428948 - DNA, 90 bp, Oryza sativa
tactcctctaacggggataagacacggcctacggggggctgcttaaatgataccgtgggcttaaccacagccgtaaacgggacaaaacac

SEQ ID NO: 428949 - DNA, 53 bp, Oryza sativa
tttttttttttttttttttttttttttttttttttttttttttttttttattt

SEQ ID NO: 428950 - DNA, 121 bp, Oryza sativa
tttgtgtcctctggggcaaggagacggattatgtggtgctgcataactgtcggctggggcatacaccgatcatagtatggttaatgacttgctcggcttgatgatctttcttgacgtgtct

SEQ ID NO: 428951 - DNA, 97 bp, Oryza sativa
tttctcgtctgctggggcgatcagacggacgaggaagacttgcacatttgtcgcgttggttataacacaatacgtcagcggggcatgacacgagctt

SEQ ID NO: 428952 - DNA, 131 bp, Oryza sativa
ttttttttttttttttttttttttttttttttttttttttttttttttttttttttttttttttttttttttttttttttttttttttgtttttttttttttctatatttctattgattttattttttttt

SEQ ID NO: 428953 - DNA, 248 bp, Oryza sativa
  unsure (1)..(248): unsure at all n locations
atggttaagagtgacatttgcgtacggaagatcatatacttcatacattatagtttcaacaccattcactcataaagttctacaaaatagaagggtgatttccaataacttcagaaaaccgttactggaaacatgtttcgaacggacaagcagaaatgcccaaaacgggagcacccagcttaccattatgtaaacatattggaggtattacaggnattagttcccgatagttgttttaaaattgaaaa

SEQ ID NO: 428954 - DNA, 501 bp, Oryza sativa
cagttcttctccgcaccgcagaccgcaaaccccaggtgctcaagcatcgaagaatggaaagaggagatggcgctatacccttccgcgccaccaacatcgccggcgccgccggcacgcccacctctgcttctactgcgggccgcccccagcaaggggatagggaaaatgctgtcagtgctgagattgagagggttaacaaactgccagccaatagttcctatgccatacaccgcttgaaggttctaaacaagcttcgccatctattatctatcaagagaacaacatctcaagatgaggagcttgaacttctttttgcaagcctttcaatgtaaacactatcggactatcctgtatcctccatatgtgacatatggtagctgggcgctccgttttggcatttctgctgtccgacgaacatgtttccagtacgggtttctgaagttattggaaaacacccttctattttgcagaactttatgagtggatggtgttgaaactatg

SEQ ID NO: 428955 - DNA, 69 bp, Oryza sativa
ataatatattatttaataaaaataatttttaaaaaattataaaataataaatttaatatccaataaaaa

SEQ ID NO: 428956 - DNA, 75 bp, Oryza sativa
aggtgcctaggacacggctgatgaggacttgcataatgggcgccttcgtcagatccagagccgacggcggggcaa

SEQ ID NO: 428957 - DNA, 52 bp, Oryza sativa
gtttttctctagggggcaaggacacggcttacgaggagctgcataattgacg

SEQ ID NO: 428958 - DNA, 55 bp, Oryza sativa
tttgtgcccaacccggctaggacacggcttaggggggccttcataaaggacggcg

SEQ ID NO: 428959 - DNA, 59 bp, Oryza sativa
catgcgtctaacgtggctatgacacccctaggggggtctttaaataataatggcgtccc

SEQ ID NO: 428960 - DNA, 343 bp, Oryza sativa
  unsure (1)..(343): unsure at all n locations
agcaaaactgcttcgcgctaatgcactgccgtctatacatatacagcaggatgtcacaccaacaaaactacaaaactgaagggtacacatgatcataatcatgttccatcttttgatgttgatgaacattttattactttcctaactcagtttgcacangtccagcccttagcccaatcttttggccttggcccattctgcagggcttggtcaatngaagttatataagctgctttgagacaccgtacacccaacttccttttgtttgccagcaatatttcgaacccttttttcccttgaatagggtaaatacttaccccacagggaagacaacttacgacag

SEQ ID NO: 428961 - DNA, 63 bp, Oryza sativa
attaaattattaattgttcattaatcccaatacaaaatgtcgccactatccttgcttacgctt

SEQ ID NO: 428962 - DNA, 102 bp, Oryza sativa
ggctctttttatggggggaggagacggctgacgaagggctgcaaaattgtcggcttccgcagataacgaaccgtcggctgggcaaaagatgccctgagggat

SEQ ID NO: 428963 - DNA, 100 bp, Oryza sativa
ggtgtgttttatccggctaggagacagattacgaggtcctgcataattgtcgcattcctcagaaacagaaccgacaacggggcaagacaccacctgaggg

SEQ ID NO: 428964 - DNA, 64 bp, Oryza sativa
gtcttgtttttaccggtgatgagacggctgaccagggggggcataattcacgcattcctcagaa

SEQ ID NO: 428965 - DNA, 85 bp, Oryza sativa
ttttttttttttttttttttttttttttttttttttttttttttttttttttttttatttattattttttttactttggattttt

SEQ ID NO: 428966 - DNA, 101 bp, Oryza sativa
gtctttctttaaacggcaaggagacggctaatgaggggcggcaaaatggacggcgtgcgcagatccaaagccgtccgcggggcaagacacgacacgagagg

SEQ ID NO: 428967 - DNA, 80 bp, Oryza sativa
aactcggttgtgacatagccaagggaggttttatatacattctccctcatattcaaaacgactgacagataattacaaaa

SEQ ID NO: 428968 - DNA, 54 bp, Oryza sativa
atactatatatacgtatccatagaagatttattgccctaattaggcaagcagag

SEQ ID NO: 428969 - DNA, 65 bp, Oryza sativa
tgtctcttggatatctgctatcagcatgccgggggaggtttgctgaggagttgcgtttgttatac

SEQ ID NO: 428970 - DNA, 60 bp, Oryza sativa
aattatattacaaaaatgggggttacacatgaacataaaccatgttgcatcttggtgatg

SEQ ID NO: 428971 - DNA, 641 bp, Oryza sativa
tctacttatgagagctcatctgctgcctctagcttacttggtgataaggaggaggaggcggacgtcctctctccctctctccgcactttttctcttttcctctttcctctttctcttccccccccctctcttcctccctcttcctatttctcccctccttctcttcccctttttctctcctcctctctctccctcccttcccgatccttttctcctccctcctttctctctacctctccctctcttttcccttccccctttctcctcctcctttcccctctttcctcctctttcccttccaccactctccctctatccccatctctcctctcacatattcccccctcccccttttccccttcttatacctctccctcatctctctccctatttttctatcccctttctcccctcctcttcccttctcctctttgtttcctcttattatcttctttcttttccccttccttacctcctcctcctctctcccccctatccctcttatcatcttttcttcctctccctcttccttccctctctctcttttctctctcactcactttatctctctcctccccttcttcttcctcctctttcctttttctctcctccttccttcctctttctccttttcctctctt

SEQ ID NO: 428972 - DNA, 333 bp, Oryza sativa
ggaccatacgtccagtagagatacaggttaaaaaaggggggatgaagcacatgagcagaatgtaaatggttgttgcaaacaacaaatgtttcgtttttgaagtaaaaaaaagcaaaggatatcgattctatacattttcatatgttctctttttaaatggttttcctataacatgtcaatatctgatctaggagtattgggactttgggagtatattcctatcaagaaaacggcctatccctgaatatgctaccccatacttggttacatttcactacgaaaggaatttccttgagacctcagatagtcagcgttttatgtatgctaaatttt

SEQ ID NO: 428973 - DNA, 257 bp, Oryza sativa
cttcaatctgttggagatcatgatcaaaataatagagcactacatagtttttgctggatcagatctcttgcaaagccatgccacaagtttagaaagcatcgttgatactattgtgggcaatgctgatgataagggccttctcacaacacttcctatcattgatcttcttgttctgatgtttcctcaggaagttccacctctgatatcaagtgctcttcagaaacttgttttcatatcattgagtggtggtgatgagc

SEQ ID NO: 428974 - DNA, 68 bp, Oryza sativa
gtcttttctatctcgccaaggagccagctaatgaagggggggctaattcaaaccttgctgaggttcat

SEQ ID NO: 428975 - DNA, 131 bp, Oryza sativa
gtctttttttagcgggctaggacacggactatgtaggggggtaaaatttacgcataggtctaataaaaaacatacagtgggacaagagacttcctgatagttgattctgtgggcctgcaatagatacttta

SEQ ID NO: 428976 - DNA, 57 bp, Oryza sativa
ggtgtgctttcgtttgccaggagggggaagacgggggggggctatatagaacggggc

SEQ ID NO: 428977 - DNA, 86 bp, Oryza sativa
ggcttgctcttatcggtaaggagacggactatgagggggggtaaatttgaaggattgggccgataaagaaccgtttgttggaaaag

SEQ ID NO: 428978 - DNA, 113 bp, Oryza sativa
tttgtgctcaacacgccgagcaaaagaataacgaggggcttaattaaagttggatggggcataaaacaaagagacggcaggaacagagacagcatgagggatgctaatgtggg

SEQ ID NO: 428979 - DNA, 60 bp, Oryza sativa
tttgtgcctaccgcgggaaggacaccgctaggggggggttgctttattgttgccctcgcc

SEQ ID NO: 428980 - DNA, 98 bp, Oryza sativa
ctccgcgggctgggagacggcttagggggggttgcataatggtcgccttccttatatccagaagcgtgtgcggggaaagacattctaggatggatgat

SEQ ID NO: 428981 - DNA, 80 bp, Oryza sativa
gggagcacactaaaattaaataattcattaatttgatcaaaggaatcaacacgaagctttctattttggggaacaaaaac

SEQ ID NO: 428982 - DNA, 148 bp, Oryza sativa
ttttttttttttttttttttttttttttttttttttttttttttttttttttttttttttttttttttttttttttttttttgggggtaataagcccgagctttgttttaacaaattctaacccaacgaaaattggggtacttcttac

SEQ ID NO: 428983 - DNA, 121 bp, Oryza sativa
gtcttctcttagtagcctgtgaccttgcctctttatggttcgatcatgcgcgccaccggaaggcaccagccggtcacattggcgtgagaactcccagggcgcgattgcgatcgatgacttc

SEQ ID NO: 428984 - DNA, 95 bp, Oryza sativa
gtcttttttttgtaggcaaggactcagactatctagggggggatcattttcgccgcggcgaggaaccaaacgggcacattgacgtgagaactcct

SEQ ID NO: 428985 - DNA, 53 bp, Oryza sativa
attaatatatttttattaatttgataatttttacttaatacccatacaaaata

SEQ ID NO: 428986 - DNA, 116 bp, Oryza sativa
tttgtatctaatcatgtaaggacacaacttacgaggtgtttaatatccctagcgttatgtttatctcgatcactctagatgggaaaatcccaagcttttaagtgcacatgtggagc

SEQ ID NO: 428987 - DNA, 51 bp, Oryza sativa
attaattaatatattttaaattcagaatggtcaataaataccaatataaaa

SEQ ID NO: 428988 - DNA, 109 bp, Oryza sativa
ttcgtgtcccacggggctaggagacggattagggggggctgcataaatgacggcttgggtatataacaaaccgtctgccggtaaatacaatctatgatggaggccttgg

SEQ ID NO: 428989 - DNA, 66 bp, Oryza sativa
ataatatattattttaataaaattatttttaaaaaagtaaaaatcgaaaataaataaccataaaaa

SEQ ID NO: 428990 - DNA, 111 bp, Oryza sativa
ttttgccccaaggtgctaggagacagcagagggagagttgcagagcagacgcgttccccatataccgaaccttaggtcgggcaatgtctctccttgtatttgttactttca

SEQ ID NO: 428991 - DNA, 101 bp, Oryza sativa
aaaaaaacacccaaaattaaaggggtggaactttattggtaattgcttataggacccttcatagcgtaagtcccaccaagttcaggtctgatttctgattt

SEQ ID NO: 428992 - DNA, 156 bp, Oryza sativa
tttattgctccatggcggacggcgacagcgcggcggtgtctgctgttgaggggagttttattcaccacctttctcagtttatatattaccatcatacttcattttcttattctttataacattttttatttaattactaactatcttttatctttt

SEQ ID NO: 428993 - DNA, 430 bp, Oryza sativa
  unsure (1)..(430): unsure at all n locations
ttttttttttcatggtactactaccacacatgaaattattgatcggttgcatagtactttacatatggaattattgataggctgtcgtttatggattgaatgaacagcacaagcacatcaaaggttccagtttctgaagttctaacccagccatgatgcaattattccacgaatttggtttagactagattgggtaataacaagagctaactggacttgatcaccaacatccgacgaaaccgaaggggcaatgggggccaaaaaaaaggtgctgtaaaatcaacaatttattgacacaaaaaaaaatgtagtaactagtaatttactcttttccttagtcacagnatgacgcagcctgacttcctgctttcgggtaacgagggttacacattttaccctcagaaattagaactggcgatacccagccctc

SEQ ID NO: 428994 - DNA, 181 bp, Oryza sativa
ttgattaatccccaaaatacggggcaaaaatagaacaagaacatgaattacttgaagaactcgcgctccgtcctctccaggctcctccgccacaagcccaccggctgcccgcggctgccaccgtcgccgccgttgccgcagggtgcccccgctggagtctccttcacctccccgagtctcc

SEQ ID NO: 428995 - DNA, 105 bp, Oryza sativa
cccttttcttatagaatacaaactcacccctcgaagcgaagcgttgattagccttgtcaggatgcacacctttgagaagaccctgaccggccagaccatcaccct

SEQ ID NO: 428996 - DNA, 85 bp, Oryza sativa
ttttttttttttttttttttttttttttttttttttttttttttttttttttttttttttttatttttttttattttaataattt

SEQ ID NO: 428997 - DNA, 66 bp, Oryza sativa
gcgctcgtcttttcccccatctccgcgcggccacggccatgtgggccctcaacctgaaggcgggcg

SEQ ID NO: 428998 - DNA, 169 bp, Oryza sativa
gcacttcaaaacaagctttattccttactgtatccaggcttattacaaaagttcagtatttgggagaatgaccatacattacaaagtgttcaacacattggagcaaacaaaaacaatggaaaccttaactagttaacgcaacattagcattgacttcccaaatggtgga

SEQ ID NO: 428999 - DNA, 79 bp, Oryza sativa
ttcgtcgatagagtgaacgatcgattggtcgagctcgccctcgattgacgggtcgccaatggcgccgcggactctaccg

SEQ ID NO: 429000 - DNA, 52 bp, Oryza sativa
tttcttttcgcaaggaagacagtcacgggtgaggggggcttgtatttatctc

SEQ ID NO: 429001 - DNA, 116 bp, Oryza sativa
tattattactacccagctaacgatcaaggagatcaagagtggcctacacgccgcgttctccatgtccagatcctgagtccaggccatgctcaccggcatgggcccccttggagaac

SEQ ID NO: 429002 - DNA, 106 bp, Oryza sativa
ggccccaaattttttttattcagcgcttattcggttgtttccccaaaattccaaaatttattaaccaaaacacattgtgggaaagttttttgtacagttttcatta

SEQ ID NO: 429003 - DNA, 57 bp, Oryza sativa
aaaataactcccataataaaagggtgggaactttattcgaaattactcaaaggacca

SEQ ID NO: 429004 - DNA, 105 bp, Oryza sativa
tgttgattacaggggaatcgcctacacagccatgggggattttaaccagaaggcggccgatatcaacctcagaccaattatataattattagaattataaaattc

SEQ ID NO: 429005 - DNA, 81 bp, Oryza sativa
gcattataccatcttcttcttcttctagctagatctggtgctccattggtggtgtcggcgcatcccgacctaccaaatata

SEQ ID NO: 429006 - DNA, 141 bp, Oryza sativa
gtcgtgacgaggggcaaaatccaaaaacgaggggggcaatttacccggggggggcgggaaggccccaagccccccaaattgggtaaccaaatccacacgctaccaatgggcctggttacggaacacgacgagaaggcaagg

SEQ ID NO: 429007 - DNA, 86 bp, Oryza sativa
acaaggaccaagcacagcatcttctattcgtaattttatatcatacatcaaacaaaattacaaaacatccattatcactaacatat

SEQ ID NO: 429008 - DNA, 108 bp, Oryza sativa
gacgggcatcgaaaaccgtcgtacaaacccagtttgttctccctctgccataaacgtcttaagagcataggctttgccaagctatagaaccctttacagcaccacggt

SEQ ID NO: 429009 - DNA, 455 bp, Oryza sativa
cttgtttgggctactaagttctaacccagccaagtggtacatttcctcagctaatggggaggcacaccaatcgaacaatgcggcagcctcttccaccgaggaggtggtaacatgggtggtttaacggctctgatatgaggtgaggaatcctacccacccaaactgttctgttcctactgctatgcattgtcttgccactttgttaaaagagcaattttgttagagccttatttggttcatgcggatggttgataaaactgatccattccttttattttcctccaggcttccacaccaacatttttattccattcttactttcctaaacctggccttcttgcatcttggctttttatcccttttatagaattgccaagctcgttgcttttttagatccctttctaatggttatctcctcaagaacttgctttaagtttttttaaaggtattttcct

SEQ ID NO: 429010 - DNA, 143 bp, Oryza sativa
ctggtggtgataaacaggaagcagtacaaggtgacggtgcatgtgttcgtggagccccacaaggtgcccaatccaactctgggaaagccgttttctcccgaggaagaggatgcacggtcggcctcgtcgtccggacaagccgg

SEQ ID NO: 429011 - DNA, 68 bp, Oryza sativa
ttttcttctccggcacgggccgcgactacaggcgctgtatacatgtcatgctttagcggcgcaggcta

SEQ ID NO: 429012 - DNA, 78 bp, Oryza sativa
acacaaacaagttacaaactcacaataaagaacagttccggaatattgaaaacaagttatcaggattaaaggccaaat

SEQ ID NO: 429013 - DNA, 212 bp, Oryza sativa
atcttttcgacgaggaaattgaaggacaaacaggagaaattcaactgcgtgtagcggtgaatgacagaatatacataatttgaatggagtttgagaaagtgatattcgatcaggaattctttgactctataaagataatggaggagaaaagaaaatttaacgaacaatcacctaagaaactgattaaagaaactgaacctacattcaatttg

SEQ ID NO: 429014 - DNA, 97 bp, Oryza sativa
ctgggctcgtgcggaagcatttagagcgaaggggggctatttcacagagggggacgggatgccaccagacccgacgaacgagagaaactttcccctt

SEQ ID NO: 429015 - DNA, 115 bp, Oryza sativa
gaaaaaacatgcttttggaccctttattccatcaggcagggaatacctgattatttataatacatgggtttagtaaatgaaataaccccgggtatttcctggcacaagatttttc

SEQ ID NO: 429016 - DNA, 142 bp, Oryza sativa
aacaaatcacttgttcaaagcgaaaaaaactttgcaatttccatggtcgggttaaaaaattggtttgaaacccattttttccagtgacaaaaggggaaaatggggccttacaaaaatttgccccctaatgttccctaaaaac

SEQ ID NO: 429017 - DNA, 140 bp, Oryza sativa
tccggggattctaagttccaacaatccaatctgctgctcttcctcctctccttgagatccgatccaatccaacgcctgcggcagccgcctcgccggaggaggaggatgcacggccggcctcgccgtccggacaagccgga

SEQ ID NO: 429018 - DNA, 118 bp, Oryza sativa
cgatgcatgcacgacgtacgtcatggctatggcattcattatatagcggcccgtcctttttttttttttttggttttttggaacaacttcaaaagatctggtaactgttaagttacta

SEQ ID NO: 429019 - DNA, 171 bp, Oryza sativa
tggtagcaccgcatgagacgacgcctctacactgcgctcccttcccctccccttccctcgattcgctaccgacgcaatggcggccaccgtcgactacctaccgctccgtgcccaggcgcaggtgggcctggctccgctccggccgtcggactcggtcgttgttggggcgcg

SEQ ID NO: 429020 - DNA, 88 bp, Oryza sativa
acattctaaaggctttgttattcaaaccagaaaacgaacaaatggaacactccattcttttacatttctaaaggctttacatttccaa

SEQ ID NO: 429021 - DNA, 250 bp, Oryza sativa
gacttctgcgaggagggaggagtaccacctgacggccgaggacggcgacctccagagcaagacgatgctgctcaacggcgcaccgttggaactctcggacgacggcggctctccggccatgagccctgcgctcgttgctgtcaacatgtcggtgtacctggcatcgtcatctgacggtctttgttgtacttaccattgccttgagggtcattccctgttctatgagagattcattttttgtcttttctta

SEQ ID NO: 429022 - DNA, 62 bp, Oryza sativa
tttttttttttttttttttttttttttttttttttttatttttattttttatttaatctttt

SEQ ID NO: 429023 - DNA, 66 bp, Oryza sativa
gcctcctacacttgaaccacgtgaaccaatacggggggatgatcccccgcacagcccgtttgaccc

SEQ ID NO: 429024 - DNA, 98 bp, Oryza sativa
gcctcctccaccggtagtacctgaacaaatcctggggtatgtgtcttcacaattccccgattactccaacgccctcatcatgaaattgccattcttac

SEQ ID NO: 429025 - DNA, 55 bp, Oryza sativa
gcctctccaccgcagacaccgcatcaagaagggggggtttattttgcacaattcc

SEQ ID NO: 429026 - DNA, 199 bp, Oryza sativa
gttatctctacttgcaccacctgaaccagtatggaatcacgagacgtcgtatggttcggattgccacgtgcccacgaatgtgaacgccatttctaagatgatcgataagtccaaccaccagacagggtgatcaagctatgaagatgaaaaatagcagcatcaacatcaggatcaagcgtgatgacaggatgaccagaac

SEQ ID NO: 429027 - DNA, 70 bp, Oryza sativa
gtctgctccactagcacctcgagaaccagaagggaaggattatacggggaatggctagtttgcccacgaa

SEQ ID NO: 429028 - DNA, 86 bp, Oryza sativa
tggtcttgaagaccagtaccaggaaaaccaatgtgggatgttcttctcgtggcacaccccaatattgctgatgatacacatcccct

SEQ ID NO: 429029 - DNA, 335 bp, Oryza sativa
tttttcctccgctggtgccccggctatcacgagggtgtgaccacgctgcatttggccatgtctcgcacgaaggtggggctatgcacgacgtacacacaggggcagctgaggcgacctacgcacatgctaagactgccatgcccggtcttggacggggcattcagtccaaccatgcaggggtcctaagggatgcttgatgggctctctaaggtgatgcagacggccatacacagatgctacagcccgtgaacgctgctgatgagtgcatcccctcctcgaggacatgctgaacaccatgtgagcaccccgcggtagaacccgttcttgcaccagct

SEQ ID NO: 429030 - DNA, 188 bp, Oryza sativa
ccaaattaatttttttttgtccaatacaaaaaaggctccagcttataaatataagtccctggatggatggctacaatgtgagaatatttgtagcaaatgctgcttaattaacacaattaatgcactccattaattaaactcagtaatttaaattaactaatttaattcaaactaattcgattccctcc

SEQ ID NO: 429031 - DNA, 78 bp, Oryza sativa
agcatataaaaacaccaactctaaatagacaatcaaaacaacccttacaccattcggcaaattttatgaaccaataac

SEQ ID NO: 429032 - DNA, 185 bp, Oryza sativa
gttcctgtgacaaatccatatctaggagctgatcatgcgctggcatttccaggagctcagatagatctaagagttatcgtactagcacgcagagagcattcaccactaggtcttactgttggactatatttgaagagacacctgtgaccggcacagaggccagattaggcacatacacctacact

SEQ ID NO: 429033 - DNA, 56 bp, Oryza sativa
attatattgttactttaatcttttttattttctacattttattcttcagctttttt

SEQ ID NO: 429034 - DNA, 200 bp, Oryza sativa
gctatttccacttgcaccacgtgaaccagtatggaaggatgtttccccgcatagccacgattgcccccctccccattatgtgaacgcctgttctgtcatgctctttatgatctcccaccagaaatggggatcaaacatggtagatgaagaataggagcatcaacatgatgctcaagtgtgattgtcaggatgacctgtac

SEQ ID NO: 429035 - DNA, 81 bp, Oryza sativa
aatgaaaacattctttgtatatgcttttgcagttgtttgtcatccatataatccaagaatttcacctatgactttgaaata

SEQ ID NO: 429036 - DNA, 200 bp, Oryza sativa
gttaattccacttgcaccatgtgaacaagaatgggaaaaggagacgtcgcacagctaggaaggcaacgggcctcatgtatgtgaacgccatttattaaaagctctttaaggccaatcaccacaaaaggtgatcaagcaatgaagatcaagaaaaggagcatcatcatcaggcacaagcgtgattttaatgatgaccagaa

SEQ ID NO: 429037 - DNA, 73 bp, Oryza sativa
gtcttttatacgtgcacctaatgaaacaacaggggagcattaaacgactcgaggggtggatggatccataatc

SEQ ID NO: 429038 - DNA, 62 bp, Oryza sativa
gtctaaacgacttccacaacttaaaccaaaatgggattttgatacatctcatagtgaggaat

SEQ ID NO: 429039 - DNA, 100 bp, Oryza sativa
atacttattaaacttttttataaatgtaatgtcactaaaaatgcttaaaaaaaaaacattgaccagtctagcatatgaacaaatgctaactaggcaaaca

SEQ ID NO: 429040 - DNA, 136 bp, Oryza sativa
tcttttattctggttgaaggaccaaaataataacgggattttgttccttcgactggagatgtctcaaacaataccccatctatgaatgccatctaaatacgtttattcatggtcgtccaggagacaaatggtgcca

SEQ ID NO: 429041 - DNA, 471 bp, Oryza sativa
ctccaatacgcttattaaacgccattagaaatctccctgcagcagctctgccgcaaaatcacaccttgccccgtatagtatctgaacgcatggttattagtgccacaattttccaaaggtatatcagaacctataccatgatgaagcactagtggtatgtatcaatgcctgtatcagcagcttaatgtaccaccttagatgatgtttaagaatgtaaagcctcttggtaacaagttttcacctctgaactccgtcagcttggtatacatccgcgtgttgagtctagcggtcctgcaacccttgtgcactcagccagactttggtttactcagcttgggcagcatacatcgcaagagaaatcctcgctacatggctcttctctagggacagggtttcaagcttttcccacatgatgccaacgtgccagtctaaaatatggcgagcacctattgacaccaaccacaactgcca

SEQ ID NO: 429042 - DNA, 100 bp, Oryza sativa
ttttttttttttttttttttttttttttttttttttttttggtttttttttttttttttttttttttttttttttttttttttttttttttttttttttt

SEQ ID NO: 429043 - DNA, 55 bp, Oryza sativa
ggctcgtagaggagcagcacgggaaccagtaaggggggaggagacgcggcatagt

SEQ ID NO: 429044 - DNA, 98 bp, Oryza sativa
tttatgcggccggccttcctttttttttttttggggcacaacacttggtttttcttaggacacttactgcgtgccgggtccccggcttattttgaccg

SEQ ID NO: 429045 - DNA, 77 bp, Oryza sativa
gcttcttacactagcactagtttaaccaacatggagggatgtttcgccaaaatgcccggtaggcacccttacccctt

SEQ ID NO: 429046 - DNA, 58 bp, Oryza sativa
gtcttctccactagcaccacgggaaccagtatggaatcagtagacgtcgtatagcgag

SEQ ID NO: 429047 - DNA, 170 bp, Oryza sativa
gtcttttctacttgcaccaccagaaccagtaggggagcatgaaaggccacagggagtcgatggccccaattcggcttagaaggacaccatgtacgtgaaggactgtaagaacaatcatcaggaatgggggaccaagcaaggaagatgatgaaaaggagcaccaacctcag

SEQ ID NO: 429048 - DNA, 116 bp, Oryza sativa
gttcactactttcctcttacttgtatttttgagatgccacaacaaaggtttacataaacaactcaggccactgcggcgaaagctccaagcagaccctggctaattagcatagcaca

SEQ ID NO: 429049 - DNA, 337 bp, Oryza sativa
  unsure (1)..(337): unsure at all n locations
gcaaaacattattttattattagcacacgtactgcgtgcagtgcacaggcttatagaaccgcacttcacacaagttggtcgtcggcacaaacatgacgaaagcatagaacataacacaatacatacagacaggtacatactaattccaaatatacgttcatgttataacaggagacaggcagccgtccagacgactggatgaaatacgtttctacaataatctttgtgttgcgactcctgtccagttcagactatttttgagaccaggnacttttgtaattttgaacagcatggaaaacagattacttgagacttttccaagtatgacaagggaagg

SEQ ID NO: 429050 - DNA, 64 bp, Oryza sativa
tttttttttttttttttttttttttttttttttttttttttttattgttattttaatctttttt

SEQ ID NO: 429051 - DNA, 198 bp, Oryza sativa
tttatcactaattgcaccactggaaccagtctggggtaattgtacgtcacggggccaggatggccacggacccctcaatgtgaatgccagttctaaccagttctttaaggccaatcaccagaacgggtgatcatgccttgaagttcaagaaaaggagcatcaacatgaggcataagggtgatttcgggatgaccagaa

SEQ ID NO: 429052 - DNA, 138 bp, Oryza sativa
tctctattagctatgacgccccatgcacgcgcgacgttacgcttggtatgcctcctcattgttggccgcccttccttttttttttttttggtttttttttttattttttttttttttttttttttttttttatttttt

SEQ ID NO: 429053 - DNA, 131 bp, Oryza sativa
ttttgttagactagcacatgtgaaccagaacggaggaacgattcgcagcaaagcaaggatgaccacgtcccccctaatgagaaatccagttctgaccagtactataagaccaacgacgagaatgggtgatc

SEQ ID NO: 429054 - DNA, 140 bp, Oryza sativa
cctagttccaccaccataaccactacggaagaacgacccaccgcactgctggcatgtcaacatgcccccgcatatgaaagccctttataacaagttctgtccgtccactcaccacatcaggtgatcaagcctggaccatt

SEQ ID NO: 429055 - DNA, 194 bp, Oryza sativa
  unsure (1)..(194): unsure at all n locations
ccactagcaccacgtgaaccagcatggaagaaggaaccgccgcatggcgaggttttcaacgagccccatgaatatgaacgcccattctaaactgttcgtatcaggccattntccgaatggggtgaccaagcccggcggattgaagaaaagaagcatcatcacgaggacgaagggggatttcaggatgaccagaa

SEQ ID NO: 429056 - DNA, 170 bp, Oryza sativa
ttcttccctacttgcaccacgtgaaccagtaggggattatggaccgtcgcgtggcatggatggcaacggacctcattatgtgaacgccatttacgacctgaacgttatgaccaaccacgagaacgggtgaccaagcaaggaagatcacgaaaaggagcaccatcatgagg

SEQ ID NO: 429057 - DNA, 89 bp, Oryza sativa
tggtcttgcacacgagagatatgataaccagctggggggctttttacgtcgtatggccaggtaggccacgtgtctcttaatgtgaaggc

SEQ ID NO: 429058 - DNA, 52 bp, Oryza sativa
gtcatatccaccagcaccatggaaaccaatacgggagcttgttacgccgtac

SEQ ID NO: 429059 - DNA, 119 bp, Oryza sativa
ttttttttttttttttttttttttttttttttttttttttttttttttttttttttttttttttttttttttttttttttttttttttttttttttttttttttttttttgtttttttt

SEQ ID NO: 429060 - DNA, 167 bp, Oryza sativa
accaacaaccacactgttacttcagagaagaaccaaaggtaagtgcccctagtatttacatcgatgctaacatttgagttcctcctatgaaattcaggagggcatgctaaccacagtatcacagaatatgtcattgcaaatggttcaccagaatgctggtttgaaat

SEQ ID NO: 429061 - DNA, 81 bp, Oryza sativa
aaaataaccaaaactttttaggtttcatttcttcttctaaaaaaattgtacaatttttccttgcttcaccattacctaagc

SEQ ID NO: 429062 - DNA, 108 bp, Oryza sativa
ttttttttttttttttatatttattttttttttttttaattatattattactttaaactttaaaaaaaacaacatataaaaaaacaacaacatacaaaaactaatcct

SEQ ID NO: 429063 - DNA, 60 bp, Oryza sativa
atattattattttaaactttaaaaaaaacaacacataaaaaaacaacaaaagccaaaaac

SEQ ID NO: 429064 - DNA, 125 bp, Oryza sativa
gctatttctacctgcaccatcggatccagcacggagggacgattcgtagcattgttaggatggccccggtccccacaatatgaacgcccattctgtccagttctaaaagaccaaccaccacaaaa

SEQ ID NO: 429065 - DNA, 86 bp, Oryza sativa
tgtcttctccacttgcacctctttaaccagtatggaagcttgaaacgtcgtacggctagtattgcaccgggcccctcaatgtgaac

SEQ ID NO: 429066 - DNA, 79 bp, Oryza sativa
atacattaaattttaacaaacacaaaacttaatactacagatactgtcccaaactttcctagcctagccgctcaggtaa

SEQ ID NO: 429067 - DNA, 197 bp, Oryza sativa
ttcttctctacttgcactatgttaaccattctggaatcttgtgacgtcgcatagctgggttgacaccaggccccacaagatgaaagccagctataaccagatactagagaccactcaccataatgggtacccacacatggagctacaaaaaaagcagcatcaccatcaggctgaagaggaatttcaggttgaccaga

SEQ ID NO: 429068 - DNA, 65 bp, Oryza sativa
caacgtcaacattttccaacctttattctacagataccttccctagctgtgccatcctcggaact

SEQ ID NO: 429069 - DNA, 201 bp, Oryza sativa
tttttctcgactggcactgggttaacagttctggaagattttaacctggctggggccctttgaagccaatatctatatgatgaacagacattttatccgctacagctagtgatattatcagttacatgtctcgaaccttgtggccatatcaactgaagcaccacctccatgctgaaggtgaaatttagaatgactagacct

SEQ ID NO: 429070 - DNA, 94 bp, Oryza sativa
ttttttttttttttttttttttttttttttttttttttttttttttttttttttttttttttttttttttttttttttggacaacatgcaattt

SEQ ID NO: 429071 - DNA, 89 bp, Oryza sativa
tcctagcttagctactcgatcatcagatcatcgatcatcctacgatcaaatcagtaatcttgaatatggcggctttgaacggtaaggtg

SEQ ID NO: 429072 - DNA, 110 bp, Oryza sativa
ttggagttttgtgtgatgttgtaatccgacagtgctaaaagtcttgcgatgcaaatataacttcgcacacaaatacagtacgtagtacgtccgcaacacatttaaccaac

SEQ ID NO: 429073 - DNA, 248 bp, Oryza sativa
ttctgacgctgacccctacgctagccacccaggggccatgattacggtaaatctcgtacggcgcatggtggagggggcaacagcaacgtcattcacgtctcccacgagggataggaccaccataggcctacgccgaactacggtggattcgaaggcattcagtcccttgcaagaaacccgcccttaccacggtggcggaggatcgccaccggcgacccataggaactactgtaaggccggtgaggaca

SEQ ID NO: 429074 - DNA, 65 bp, Oryza sativa
gttccttttttttttttttttttttattattatattttttttttataataaaatgaatacataaa

SEQ ID NO: 429075 - DNA, 223 bp, Oryza sativa
ggtgaggcaaggtcgatgggctcggcggcggacgaggcagaaatcaccgggttgctcgtaggcgccggcggcggcggcaggggagacagtcccgcggaagactgatgtggagaggtgtgccgtatggagggagcaggtgacggttcagggaaacgtggagagcgcggagctggaagcgctgttctgtctcaacacgcacaagctgaacctcacagtgtgggtg

SEQ ID NO: 429076 - DNA, 76 bp, Oryza sativa
ggctcttccagttgcaccacgtgaacaattatggggggaggattcgcgatattgttcggatgacacccctgtcccc

SEQ ID NO: 429077 - DNA, 117 bp, Oryza sativa
aaacatggtcttcatatattgtcttacattccatcatgatgtttataaatatagctataacaggccatgaaactaatcactgcaacttaaactgaaacttctaaacccagaagtatc

SEQ ID NO: 429078 - DNA, 53 bp, Oryza sativa
ctccttgagctgaggaagaaagccagctggggggttttacgcaacgaagcccg

SEQ ID NO: 429079 - DNA, 201 bp, Oryza sativa
tttttctctactttcaccactaaaacaactctggaatattgttactcagcgcagttcggttgggcccgcacctacctcaataaatgccatttctatcatgttcttatttaccaatcactacttcaggtgacaatcccatgaagttgaaaaaatggaccatcaccttgaggcaataacttgatttttatttatgagcagaac

SEQ ID NO: 429080 - DNA, 66 bp, Oryza sativa
atcttcaggaacagcaccatgtgaaaaaaaatgggagatttttaggaagcatagtgcttttctcac

SEQ ID NO: 429081 - DNA, 78 bp, Oryza sativa
atataatcattcattatatgtcagcatcatccaaaatttattctacagatacttcccctttccttactcgtacggcaa

SEQ ID NO: 429082 - DNA, 96 bp, Oryza sativa
atcttctggacttgctctatttgctcatatcttgaaaatggttgagaggctgagctagcttgccacgaagctggtcatagtttagagcaattctat

SEQ ID NO: 429083 - DNA, 88 bp, Oryza sativa
tctcgaggacttgcacacatggaacgaacatgggatatcacaaaaaatgatgagcccctagccacaggtactaacgaaggtcatgcta

SEQ ID NO: 429084 - DNA, 73 bp, Oryza sativa
gtgcaaagaaacacttcactttaccataccccaaacctattcaagcagcacttgggacctaatttcttttaca

SEQ ID NO: 429085 - DNA, 313 bp, Oryza sativa
gggcattaaaacatctttttttggttaactaattattactgaaaaagctattacaacaaatgtctgaatgaacataagcaatagaacatgactcatatcatgactgttcagattaattgaagggatacgacattgctatttggcctttataaatcgctcatttgtaaatccctgaaataggctgattcttacaaggagaaccatacgaagctcaagcaccacagatagatggctattctgagctatcgtaaaacggctcataggaagcatctgagaccttaattacttaatgcgcatagcatgtttgtttttc

SEQ ID NO: 429086 - DNA, 484 bp, Oryza sativa
ggctaatgcatatgttcactaactgacaatgaaggggagtcatatcaagcacagcagaccagtgaactcctttacatatttttgccagcaacagcgaaaaaatcatcaagaccatggtatagctttgaagcgaaagaaataaaaactggagaagctcctatcgaagatggaaaacaggaaacctatgagggcattgatacctgtgaagccaaaaagagtgacaactgtgtctgcagccaacaaagtaatttcaggaagtaaaaaatgtctgctggataatggatgcaaagcataagagtttggctcatcctcgagtcattgatctgctccagaatgaagaaaaggtcaacagcttgacagttgacaagcttagtgtggagtgatattttccttggtatactttgatttttcactagcatcagttcttccgttatacattgtcttttctcttttattttacaaattttatcaattatattttttt

SEQ ID NO: 429087 - DNA, 107 bp, Oryza sativa
ggagggaacttttcacagttgtgttggcaatgtgcacagcaagatacatcatcacagtatggagtttggcatcagtgtatcgatatgtggctcctttacctttatca

SEQ ID NO: 429088 - DNA, 184 bp, Oryza sativa
gcaggccccggcccgaaattccgggtagccccacgcgccctttttctagatggcgctcttctccaccacaggggctctttaagggggggagatgacaatggccatacccaggagaggcccttagagctttccttccaagccctctaatcggcattagcagcttcagatcttgacccctaacttc

SEQ ID NO: 429089 - DNA, 124 bp, Oryza sativa
ttcttatctgccgcccttcctttttttttttttttttttttttagattttttttttttttggattttttcaacttgccaatgtgtgtttaataccccattacctttattaaattacacttctcc

SEQ ID NO: 429090 - DNA, 199 bp, Oryza sativa
gcctagcagcttcacggcagacgcaccacgtctgccggccgccaccgccggagagggagggcctccccgaccctccccgccaagaaggatcctatggcggtgggggcgcacgcttcgcgcgcttcggctcctatcattgcaggtctcacaagtgctcttattgcatcttataaagtttttcaactttcatgctttcagt

SEQ ID NO: 429091 - DNA, 111 bp, Oryza sativa
ggtatccaccaaaccctagccgcgagccctgacgttgcgaggaaggggaagaggagagatcgagatcggagagatccatccatggcgctgtgagccctgatcagcgagatc

SEQ ID NO: 429092 - DNA, 55 bp, Oryza sativa
attctaatgtttccattgctttttttgcttttttggccaaccaattattaaccat

SEQ ID NO: 429093 - DNA, 54 bp, Oryza sativa
tgtatattggattgcactctgttctaactactttgcaatgattaagaggcagaa

SEQ ID NO: 429094 - DNA, 324 bp, Oryza sativa
tgctgaggtcatgtcagagcttgcaccggtatgttttactgacagagaaactggacacgcatcttttatgtccaactgaagtgtagagcagatgatataagggtctttaaggtattttatctttctgtttcttattatctttgatttttttatattactttttatataatctattatttattccatttttttttatttttctatttatttattattttattattttttatttttttatttctataatatttctttatcttcttcattttctttttttatttctttttctttatttttttattgcttaattttttaattttcttt

SEQ ID NO: 429095 - DNA, 455 bp, Oryza sativa
tgaacatgtaatttataccatataatgctatgatctcatctaagaatcagaagatccacaacttttatgtccaactgaagtttcgtatagatgagagagactgagaggaggatgaaataattacttgaaataagaatgacattacaggtagcagtagcagtatttattaaccaaggtttttttagttacaaatcagtttcagaggatctaactttgaggtcattgctttttgtagtatggtgcttcaatcttgtattttatatagaaggttaattaaaattttcagtgttattatagcctttttattatttttttttctatgttgtactatcaattatcttaatacattcattattatttatcctttttattttttatatttttcttttaaattttcatttttattatttttttttctttaattatttttttttcttatatctttttatttttat

SEQ ID NO: 429096 - DNA, 375 bp, Oryza sativa
atgtcctggtgctccccaacgtgtcctgaaaacaaccttctatgatcagtggaagaatctcccagaacaagaaacagaggaaaatcaacctatcataggccacactatcatccatggtgtgcacagggatattcgtcggttcgctggtactgttcctaatgcgacaacaacaggtgatattgatagcatggtcatgtatgctggtcagggtgttgggctaatcacagagatcataccagctagtgaagttgtcaaaaggttagtttctgaagcacagcacgtcatcagagaaaagcttttgtgaatttcctgtactgtccaaggagcagtaaatactatctggtttttgttagcaaggaccaatgaaaataaaag

SEQ ID NO: 429097 - DNA, 426 bp, Oryza sativa
tatatattcctcttgtaatcgaattcttagctctcttctcatcagaatttgggtgtgcctcgtattctgttgtgcgtggcaacaaagtttttgccttggtcatttctcctagtttccacctctttcatatcgttaaaaacaagtggaaaatttgagatgtaaacaagtaaaaaaaaagaagtaacttttattttctctttgctggtctctattctctagctagtcatctcaggtcattttatctcgtctttcagtgtgattacaaagcaaggaaccctcctaccgtgttggtgagctgataaaggagctctgacgactcggatgcatggctttgccatcaatcaattgattcaacatggcaacttcgatcggatttgtgtttgttgaacttcttcaattgactcccttcaagttttctttcttctt

SEQ ID NO: 429098 - DNA, 182 bp, Oryza sativa
tgttaccaaataccgctatccaaaccgagccactgttctgatggcagttggggcggcggtgagatgagatggctcacgacaccacaagtgagcaagccacggacgcggccagggacgccgtctgtaatgaagggcagacaagggcgaaatctaaaagcgcgaggaagaagctgatgaaacat

SEQ ID NO: 429099 - DNA, 284 bp, Oryza sativa
cataggaaggcgagggagaggaagaagagacaggcaatgcttatggaacgcccgctcgaactgtttctaagagttattaggccattagcactataagagatatctcattcacggaggaagaaagtgtgtgtccaaaaaagccaacttcaatagatgaggtggagaaacatagcgagctatgtggtacgctcttgagctaggatgagagcaagatgaagtatggcaaatatttcaattgcttatttttaatgagtttattgccttattgactattatactatttt

SEQ ID NO: 429100 - DNA, 116 bp, Oryza sativa
gtcatttttgaaacggatcaagctaaacatcatcagcaaatctttggatccgaggcatcgagctaagcctagggatgagagacaggaacacattcaggtaggctacaagcgttttt

SEQ ID NO: 429101 - DNA, 80 bp, Oryza sativa
ttgagaggaccaagggaaacatcggcgggaaatttatcaaacgtgccttagcctaatcccatcgcgaacgccctggccga

SEQ ID NO: 429102 - DNA, 497 bp, Oryza sativa
tgatatgtttgatggggaccatgcaaaaaatctggaggaaatgaatgtatttgagcgagagaggtaagtacaggtatgaggtacggggaccctgagagggtggcaccaagtattgttgacacggatggtaacctacaaatataaggtagatgtgatgattttttactgattaggttagaaatataataggagaactttgtgctgatggggatttataaaggtatgaatttatctgcaatgattatttgctttgagcaatgttccgttctattgttagatcattcgatattttttatgtatatattttttttattaaaaaattattgtcttttttatttttattttatacttttatattgttaatttactatatttttttctatttttatcatttcttttacatttctttattcttctacttttccatttttttttatttccttattcttacttatatttatatcttctttcttttttttctttttttttattcatta

SEQ ID NO: 429103 - DNA, 499 bp, Oryza sativa
gttacgtttgaaagggaccaacaaaaacatctggagtaaatcattagattcgtgcgatcgagctaagtaaaggaatgaaagacgggaacaacttcaggtaggccacatgtgtatttgacacggtagactatcaagtaaggtacggtatatgtgtagtatatagccaattaggtttggaatactattaggggaacctgtagcggatggggaattatataggtagacgataagctgttacgactatctgtatgatcattgaatcctgtgttttgctagaatcatacaaatgttttaattagtgaaattcttttaatttctttctgccttaacagtcttttttatacttttatttgagttcatttaattatctttttttgtatttcacatatattgtttatatttatcttctatttttaatttttttaattaactattttttttttttatcttaattattattaattttatttatttaaatattttaattcttattattttt

SEQ ID NO: 429104 - DNA, 145 bp, Oryza sativa
atcaaggcccccgccgcacctcctcccgtactccggcggcctcgacctcctcacggaggcacttggggccgagagcttcgatccggacgacgacgactacgccaccgccgccttcctcgtcatggaggatttttatatttttttt

SEQ ID NO: 429105 - DNA, 488 bp, Oryza sativa
aacaaattaccctgcaagaccaaaatactcttctaataagcttccttcatcaaaagcttcccggaacactaagtctgcatcagataccatcaaaggatcatcatcagctctagacacgatgtcaacttctgctaatggctatccatcctcgaagactgcaaacaaggcatctggtgcttccatttcaaaagggtatcctctgtctagcaagtttgcggtgcatactaaccaaggaaaagacaatctttaccaaagtaaagacattggtatgaaggaaagtggtagaagctggaacagtactgagaagctcaaggccagaagtaagctaaatggatatggtgactgtgatatatcagataacctcactgataactccaaaaatagtttgagccctcaaggtggtcattatggactatcaagtgcaggggggggcaatgatgttacaccttcacctgttgcaatgagccgagatgcatataatcttccag

SEQ ID NO: 429106 - DNA, 488 bp, Oryza sativa
ttttcgagttcttaatgctcatgacatgcacaactattcgcaacagcagatccttcaagtttacacatgtacctataaatacagtttttggtcattctggcagaaaaagtttggatactggatgatcattgaaatgttgaattcatatccgcgtgagctactggataattttcaggtcatggacagctctgctgcaggagtaacatattcactgttatgctttttcatgactgacagtgtgataagatgcaatggctactgttcacattgttactgtcaaatggaaagtcaaaggatttcaggaatatatggtgatggaaaacaaggagaaggtttgtgacaagggtgttgtttgttccttgttgtctcattttatctagctaatgagaaacaattgtaaatgaactgactgatactgataggctgctggcaagaatctttttaagatgttgcctgcttacaggagatgcagatatcatgttggcagt

SEQ ID NO: 429107 - DNA, 105 bp, Oryza sativa
ggtgcctagtcggggtcgtcatggcagcgcttgggccgctctatcctggacttggctcggggcagagagtactgtacgatgatgactcgcgcattgagaagctaa

SEQ ID NO: 429108 - DNA, 126 bp, Oryza sativa
gtatatttgagagggaccaagcaaaacaacatggggagatgagtggattcgagccatcgagctaaatacaggcatgaaggacggggacgaagtcaggtaggcaccttgtgtacttgagatgtaaag

SEQ ID NO: 429109 - DNA, 145 bp, Oryza sativa
gtctcttttgagagggaccatgcaaaacaacttggggagatctatagatacatgccatcgagctaaccccatacatgaaggatggggacgcagatcgctttggcacctgagttctttatattctaagtttaatactctttttttt

SEQ ID NO: 429110 - DNA, 160 bp, Oryza sativa
gatcttctgcgagggaccgaccaaaacagcttggggaaatctgtggatacgtgccatcaagctaaccccatgggtgaaggacggtgacgaagacacgtcggcaccgagcagtacttgagatccaaagctacgcaactatctttgtgtctttttgtttagt

SEQ ID NO: 429111 - DNA, 131 bp, Oryza sativa
gtttatgtttgagagggatcatgcaaaacatcttcagtaaatctttggatttgaggcatcgagttaagtaaagggatgagggacggggacgaatactggtaggcgccaagtgtatttgacatggaaagatt

SEQ ID NO: 429112 - DNA, 564 bp, Oryza sativa
tatacgtttgagagggatcatgcaaaacaacagggggaaatctatagatacatgcggataagctaactacatagatgaaggacgtggacgaatagatgttggaattgagcattatttgagacgcatagttatgcaaaatttctttgtttactttgatttattttattgtttatttttattttaaatattcttttctgtttattatttattttttattaataatatttatttttttattatatttttatatttctattcttaattatattttttatattctatattctatttataattattttattttacatttttctattattatttttatattttattcatattttactatttaattatttttatatatttttctatactatatatttattttttatatttttctatatattattttaaaatttatctttatttttttatttacttaattttatttctatttttctttattttttccaattttattttattaataacattctatatctttttttattaaatttaaattattttttatctttatacttatatatttttatttat

SEQ ID NO: 429113 - DNA, 151 bp, Oryza sativa
gatacgtttgagacggatcaagaaaaacatcaggaggaaatctgtggattcgagccatcgagctaatcacaggggtgaaagacggggacgaatacagctaggcgccgtgtgctcttgacatggaatgccactctattttcttcgtttactt

SEQ ID NO: 429114 - DNA, 277 bp, Oryza sativa
gatatttttgcttggaaccccaggaaccctggaagagaaaaaactttttcttgttgaccttggattagctactaggtggaaagacactggttcggtggagcatgttgtgtattatcatgaggccttactttctttattttaatctgttctctattattttgatcttcaattcttactcattgtatttttcattattttctatttcttctatcttttcattttttttttcttttcttttttttttttcatctttactatttattatttttttcatata

SEQ ID NO: 429115 - DNA, 118 bp, Oryza sativa
tatacgcttgcatcctatcaacagaaacagtagggggaaatctatagatatgtgcgatcgtgctaatcacattgatgaacgacggggacgaatactgctagtaacctagtttatttca

SEQ ID NO: 429116 - DNA, 127 bp, Oryza sativa
gtacgtatacgacaaacaaaaaacaatctggggcaattctatagatatgtgcgggcgtttaatgacaggaagaatgacggggacaaagctcaggtcgtttttttatgttttttacatgagatgatta

SEQ ID NO: 429117 - DNA, 483 bp, Oryza sativa
gaggtgtttgtttccccagtgttttccctgccgagacaacagctctgccatagttgcacagatgcaagttcattgcctctttggaatttaggtcaggctaagcagaattaggcctgctgggattttttttgttagccgacaacacctcagccataactgcacggatgcaaactgttagattacatgacccctttagaattcaggccaggctaaccagaactaggccaacatagaaaatttttcgttgatatttggattttatttaacacccgcatgagaatatggaaagttctctactttttttaagtttgggactaggtaccatgtcctagatatcgaataagagattactctgaaaaattttcttcataaactggtgtgaatgggggagcatcagtcattggattatacctgataatttagatgtacgttgtcttcctatggcttttcatctaatgtatatgatttattattcaatggaaa

SEQ ID NO: 429118 - DNA, 117 bp, Oryza sativa
gtatgtttgagagggatcaaccaaaacatcatcgggagatctgtgtatacgtgccctcgagctaaccacatgggtgagggacggggacgcattcagtttggcgccatgtgtatatga

SEQ ID NO: 429119 - DNA, 83 bp, Oryza sativa
gtttcttttgatacggatcatgcaaaacatcttcaggaaatctgtggatctgagcgatcgagctaagttaaggaatgagagac

SEQ ID NO: 429120 - DNA, 301 bp, Oryza sativa
gtgtcttttactagtgaccaagaaaaacatcttcggtagatctatggatacatggcttcgagctaagcacagtggtgaaggacggggacgcattgagttaggttccgtgtgttctttatatcgatagtcatgccattttcttcgcttattatttggtcactctagtcgatcttcctttagattttttagttttatattttttcattatttttatttattttgttttttttttatattatctttattaatttttatttttttaatttctttctattttttttattttattttatattcttat

SEQ ID NO: 429121 - DNA, 89 bp, Oryza sativa
gtttttgtttgagtgggatccagcaaaacatcttcaggaaatctgtggatccgaggcatcgagctaagcacaggaatgagaggcgggag

SEQ ID NO: 429122 - DNA, 113 bp, Oryza sativa
gaatgggatcatgcaaaccattatgggtagatcattgtatctgtggcatcgagttaagtaaagtcatgagagacagggacgaattcaggtaggcgccatgtgttttggacatg

SEQ ID NO: 429123 - DNA, 116 bp, Oryza sativa
gttacgtttgaaagggatcaagcaaaacatcaggagtaaatcaatggatatgaggcatcgagctaagtaaaggaatgagagacggtaacgcattcatgtaggcaacaagtgtattt

SEQ ID NO: 429124 - DNA, 409 bp, Oryza sativa
gatacgtttgagagggaacaaggaaaacatctgggggaaatctatagatatgagctatcaagctaaccacagacgtgaaagacggtgacgaagatagttaggagcctagaatattttagacgttttgtctctcaattaatcttagtgttactttgtttagtcttcttctattttttttttaatcttatttgtttttcttttattttttattttatttcttttttttttttatttctctattacattattttcacttatatttcataattcctattttttttttcttttctttactacttataaatattattctctttatttaactcttcttttttttattctcattattatttctaaatatttttattttttattatatttttattatattatatatttattcttatat

SEQ ID NO: 429125 - DNA, 292 bp, Oryza sativa
atacatttgaaaggtaacaagcaaaacatctgggggaaatttgtagatatgagccatcgagctaattacattcatgaaggacggggacgattacagcttgtcactcttgagtacttgagacgtaaatgtactcaactttctttgttttctttgatttgtttttgtaacttgttttatatatttatttaatgttcttctaattttattctattttttttctattaatatacttttttttccatctttatttcttctatataattatctttattttattttttttttttttttc

SEQ ID NO: 429126 - DNA, 486 bp, Oryza sativa
tctacgcgtgcggcaattccgacattcaattttgggtcaagcactagaatggtggcagcaactaaatcagatagtacaaatacagtggcaaagccagctagcagtttattgttcggtactggggatgctatagctgaagccaaatctactgcccaggatacagccaacaaggcatcatcaaatttaagtaccactcctatttcttcaaatatttcaagttttccagtcacatcctcttctgctttttcaagcatagcaacattttcatcttttatggttgcagcttcaaatgatggaattgccttaattatttctgccttaacagtaccttttacattttcgagtttatgaatcaactattttttgttttattttctcatgttaatctgcttatttcagattattttgtttatgttttaaccacctacctcttcttattctctctctattttttctcaaatttttattattttttttccttatttt

SEQ ID NO: 429127 - DNA, 89 bp, Oryza sativa
gtgtcttttgaatgggatcatgcaaaacatcttcaggagatctgtgtatatgtggcatcgagctaagtacatgaatgagagacggggac

SEQ ID NO: 429128 - DNA, 111 bp, Oryza sativa
gaaagggatcatccaaaacatcatcaggaaatctgtggattcgaggcatcgatgtaagtaaatgtatgagaggcggtcacacatactggtaggctacaagtgttgtcgaca

SEQ ID NO: 429129 - DNA, 395 bp, Oryza sativa
gagagggaccacccaaaacatcaggaggagatttgtcgatctgagccttcgagctaagcccagggatgagagacgggcgcccggctagggaggctacacgctgtcttgacagagatggctgatgccaggatgtctgctagaactggaacaagagctcgtgtgtgcacacttatcaaaggattgcagccgaatgaaccacgggttatttttaagtaagaggctgatgttaaaccaaagttgttagcgggtgctttttgaccagtctgatttatgagccgtccaacctttgttgtactgtattgacaattgaactaaaaatttttggacctaccctgcacagtgtgtagatgaggagtgtagattcataatgtattatttttattatagtttttttc

SEQ ID NO: 429130 - DNA, 122 bp, Oryza sativa
gtctcttttgaaagggatcaagcaaaacatctacaggaaatctttggatttgagccatcgtagtaagcacaggaatgaaggacggggacgcattcaggtaggctacaagtgtatttgacatg

SEQ ID NO: 429131 - DNA, 88 bp, Oryza sativa
tatatgtttgatacggaccaaccaaaacatctggagcaaatctatagatacatgcgatcgagctaagtaaaggcatgagagacgggaa

SEQ ID NO: 429132 - DNA, 112 bp, Oryza sativa
gtttcatttgaaacggatcatccaaaacatcagcagcaaatctgtggatatgaggcatcgagctaagtacaggaatgagagacgggaacgaattcaggtaggcaccaagtgt

SEQ ID NO: 429133 - DNA, 94 bp, Oryza sativa
gtcacatttgaaacgaatcatgaaaaagattaggaggaaatttatggatacgagcgatagagctaactcaatgcatgaagggcagtgacgaatt

SEQ ID NO: 429134 - DNA, 180 bp, Oryza sativa
cctgattcgataaggtcaggccaccaaacatgccctttctaagttactgcctttctgtgatctttctcagcatgtgatacttcagatgatcttagcagaactgaggccacctatacacttgaattgagcagaatttataagagtacatgaacagatttttttacacttgtcattttattc

SEQ ID NO: 429135 - DNA, 114 bp, Oryza sativa
ggagaggcattgccgatgggctcggtggcggacgatgcggagatcaccggctcgctcctcgccgccgccggcggcggcggcggtgacagcgccgcggcggcgggggtggagagg

SEQ ID NO: 429136 - DNA, 133 bp, Oryza sativa
ggataatgaatggcggctctgcttgtggtcgtgttggttgccatgtcggccatggtggcgacggccaactttaaccaggagttcgacatcacctggggcgatggccgtggcatgattctcgaggatggccagt

SEQ ID NO: 429137 - DNA, 119 bp, Oryza sativa
gatgtgtttggaacggatgacgaagaacatcaggggcaaatgtatatatacgaggcctagagagaagcaaactgcagagatgcaggaaccatttcaggaaggcaccatgcgtatttgcc

SEQ ID NO: 429138 - DNA, 120 bp, Oryza sativa
gtctatatctggggcacccacgtcgtgctggtggcgctctacttagtgccgttcctgctcctcgaggccacatacgtgagcgccgtgtgcaccaagatcctccgcggagggtgggtgccg

SEQ ID NO: 429139 - DNA, 82 bp, Oryza sativa
tatgcagatagagcggctagcagagaagggcaggaagggtattaaatctgagccatcgaggtcgagagacgacatcggctgt

SEQ ID NO: 429140 - DNA, 310 bp, Oryza sativa
aataaaaagcaaccgatgaaacgaagatttaatgatcttagcgaagatgaggaagatccgttggcaatgatcaggagcatgtttaggtatgatcctagtaaatatgcatgcagagatgacaatgattgcgacatggaagtagtattggttactatagaaatggaagagcaatgacgcgcgaggattgcaaaggaggaggatgacgagcaatttcttctgattgaggtggatgacatatgtctgtatgttcagagggatgcaataatgctttttaatgtactgttatcagtcattgttatagtttttttta

SEQ ID NO: 429141 - DNA, 186 bp, Oryza sativa
gtgaattttcagaagaagaggaagcaaatgctgtattaaagaatactcttgtttttgcagaagcagatctggaaataaaaccaaagaaagaatttgatactgaaagagaggctaagaaagaagcttatgagaagtcacaacctacttagaatggacattgatgagggatatccaaaaggtctaatt

SEQ ID NO: 429142 - DNA, 157 bp, Oryza sativa
aaaataattaaaatgaatggttagccgctactttagaattaatggcggcatacattaaaagaaaactaaggcaagcattgaaatgtacatttatactgtattatttatacatgttaataaataaatgcaaattattattatgcaaagtagtttgggt

SEQ ID NO: 429143 - DNA, 80 bp, Oryza sativa
acctcccggtagagccggccttcatgaagatgcggaggcggctgtcctaggagctgacgcccccctagcccccccccccc

SEQ ID NO: 429144 - DNA, 509 bp, Oryza sativa
  unsure (1)..(509): unsure at all n locations
tctagctcagctcttactccgccatttcgaagcacatcgtggaggaggaggtggnttttttttcctttttcacccttttttttattttttttttcctctttcttattttctttttcttctttttctattcttttcttttttatttttctttcttcttttccaactttttttttttctattttttttctttttttttttatttttctttctcctattttctttttttctttcttcacttttttcttcttttttcttttttttttcttcttcttttttcttttccctatctcttttttctctttttctctttttttccttctttttttctttttctttcttttatttctctttctttctcctcctatctctttttttcttttcattctcttatatctcccttatctcttctcctttctttcttatctatttttacctttctccttctcttctttttatcttttcttctctttctcctttttcttctctttttctcttcttttttatttttc

SEQ ID NO: 429145 - DNA, 179 bp, Oryza sativa
cctcgatctgtagcttattagcggccatgtgcggcggagcaatcatctccgggttcatcccgccgtaggacgctggggcggggggaggagcggcagccaagaagcagcaggggaggagggtcacggccgcaaggcgaagaccagggacgccttgaaagacaaagcccggaggcatcgac

SEQ ID NO: 429146 - DNA, 169 bp, Oryza sativa
gcgaaattggccacattgaaccaagaatgaggcaatttcttgttgccattcatccattctacctttaataacacattcctgtaaattgtagtgtttgagttgctcatgactacacttacaaggttgataaacttcattcactgtaccacacacatataaagatcctacc

SEQ ID NO: 429147 - DNA, 74 bp, Oryza sativa
ggccaattcttattttgattcaggggaatttcggatctatttactacgtgcaacctacaatgtcacgtgctcat

SEQ ID NO: 429148 - DNA, 206 bp, Oryza sativa
gtctcacacgggcgtgaagaggtgcaggcagcgggccgcatacaaaaccgagccagaaggcgcacattcatccaattattaagggctcctctaagtggcctaagcacacgcagaaccaggacacacccgcgagaaaaaaatcctataaagaaatggattgggccatgacccaacgccgccaagatcctgtcctttttgtgtgcgca

SEQ ID NO: 429149 - DNA, 75 bp, Oryza sativa
ttctaactcgggcgaaaacagatgcaaggaacgggccatatacgaaacagagacagcttcctgcatccaccaaaa

SEQ ID NO: 429150 - DNA, 545 bp, Oryza sativa
  unsure (1)..(545): unsure at all n locations
ttgatcggcacccaccaccaccaccttccttccttcttctctctttctcagtctcagatcagaattatcagatcccgagggagggaggaagggtgttctcttnctccttccttctttttttttcctctcttctctttctttcttctctttcttctcttctttttcctcttttcttcttttctcctcctctctccttcctctctctctctttttctcttccttcatttttccttctcccctctcttcttctcttttttttctttttcctcttctctttcttttctctttctttctttctttcttcttctttctctctttccttttccttctccttctctcctccttattttttttcctctctcttttctccttttcttccctcttctttcttactttcttcttcccccctcttctccttctttcctctttcccttctctttctttcttttctttttcatttcttttcttttttctttcttttttttttcttctcccttcttacttctttccccccctttttttctttcctttctcctccctcttct

SEQ ID NO: 429151 - DNA, 53 bp, Oryza sativa
tgcttactggtcgaagatcctaggcacggagtacggcgtcaggtggagcgcgg

SEQ ID NO: 429152 - DNA, 69 bp, Oryza sativa
aactggatcttggtatagttgcatcaagaggtattagcaattatcccctgaggatgattggtagcccaa

SEQ ID NO: 429153 - DNA, 228 bp, Oryza sativa
gcacgcgacgaagctggaccttttattacggacgcccaaaaaaaagggggggaaaaaaagaaaaaaataacacaaaaaaaaaaccacaaacagaaaagccagaaaaaaaaaggaaaaaaaaaaaaaaacaaacaaggggaaaacaacaaagggaaaacaagaggcaaagaaaaaaaggaacaagaaaaaccagaaacccaaggaaaaagaaaacaaacagaaacaaaa

SEQ ID NO: 429154 - DNA, 137 bp, Oryza sativa
gtcggacgacacgtaagtgctggcggcgttcatgaagttcccggcgttcaggcgggcgctgaacggtggaccagacaatcagcgacgcgtacttgtcgatgagggcaccaccataagacgatgagaagatccagtcc

SEQ ID NO: 429155 - DNA, 433 bp, Oryza sativa
  unsure (1)..(433): unsure at all n locations
gttgttgttaacacttgtagatatcaaaatttttactcaaaaactcaaaacgagtaccttgtctagtacatggcaaaagaatctcttcctcacacaggaatacacatgttagctcaccacactctgatgtgtttgctacacaacattttgcttgcagtatacatttcgcaattgttacaaaaattacaggnagnacgtggtatttcctaaaacanngatgttatcccttcctgaataatgctagaggttgcaactatactcttcttctctttgcaatngccattcttcttctagnttagttgttatctctacttgatagcaacgaacaaaacaaaagggtgtcggaaagggtaccattcggcaatcaaacataagaggtcaagcgcacctgcatcacatttgtgtgtggaatgctcatcgacatcatcgccct

SEQ ID NO: 429156 - DNA, 422 bp, Oryza sativa
ggcgcggagcgtagccgcgagtcccgaggatcccatcggtgtgccagcggtggggctggccaacgacatcgacattcccgaaggcgcgcacggcgggcgcggcgcgcgacacggcggcggccagctcgacgcgctcggactcgggcgcatcggccgagaggtggagcaggtagcggttcctgggatggtagaccgcgagcagcagccgcagcagcttcctcccctcccctctcccccccgacagcacgtacgcgaaggacggcggcgcggctgccccgcggcggacgtaggagggcggcgggaggcgcgcgaagagcgaggaggaggcggagaagcccgagagcgcggggaggaagagcagcagcgagacgaaggagaccgacacgagcgggaggagccacttgtcggcggctcccaggctg

SEQ ID NO: 429157 - DNA, 230 bp, Oryza sativa
tcctgcgtgtgcgtgtctgcgaagcgtgagagagaaacgttcgcgacgcgacgagctcctactccgatctccccgatgcgatctcgccaaaccctaatcccacccaccaccgcgccggagtcctagcgccgcccgcagccgtcgccgccgtccggatgctgcggccgtgacctccttctcctccgcctttgacattccagccatgggagccgcccccaagtggcttcctc

SEQ ID NO: 429158 - DNA, 156 bp, Oryza sativa
gctgatttagggcgaagcaaggagcagggaacgggtcaggtttcatgcagagacgcatagtagccctcttcgaaatagtaagattgtttcctaattgagcgatgcatgccatgtgttacgtctcctatttacgtggtagatcatatttgatattta

SEQ ID NO: 429159 - DNA, 216 bp, Oryza sativa
tcgtctaactagggtgaagaaagaagcaaggaattattctggtacaaaagctagacacaaggatccattgatccaaaaaagaagtgcatcacttattggaccaagcacgccaagtgtaacgtctcctagccaagatgaatatcctatttggaaaatcatatgggtcttgatctagctctcgccacgatccttttcaatttttgtgtcatcctttgt

SEQ ID NO: 429160 - DNA, 104 bp, Oryza sativa
tttgtctttctccagcgaagacaaaagcagggtgtgttacatataaaaaacttggacggtattcacccttcaacagaaagacaagtgcatgtttaattgaaaga

SEQ ID NO: 429161 - DNA, 394 bp, Oryza sativa
tgcaagataaccatttacgtctaagttggcctagatttaactgatgtcgtcgctgtagccttaagtttgccctgcggttagcaagtgtccaaccagcatagtaatcagctttctttgattaagtcatggtgtaccgcatctgttaattttctacgttgcttgtgatacataatatacttcgtgtttgcgttttatatggatacagcttgtctccctcatcttccttctgctgttacttcatttattcttcttgttagttatttgtctgcatctaactctctactattgatttctttgcttatagtattctttttacttttttctttttcttttctttattatctctttactttatttcttttatcttttttttttttctctcctttttcttttt

SEQ ID NO: 429162 - DNA, 133 bp, Oryza sativa
ttgtatatatgttctactactccccccgcgggttgctgagccccgcgcgcgcgcgatcaggaaccctcggggtactcggattccgcccgcacgggggtcgacgaattccgcatcccgttgtttctcttctttt

SEQ ID NO: 429163 - DNA, 135 bp, Oryza sativa
gcgttcataccccaattcccaacacctccgcgacgcgagcgagcgaagcacgaggaaaaaaaaaaatccccgaatccgcgacgagcgaggcggcgagctcgctgcttcgatcgatccggagagggaggtagggag

SEQ ID NO: 429164 - DNA, 462 bp, Oryza sativa
  unsure (1)..(462): unsure at all n locations
gcacaaactggtccttgttatcaacaacactccaacagtcatgctgatacaggtagcaatgcatagcggatttacagccaaatcccagacagttactatgcataatgcacaaacgtcatggtgccagaaatttaattcttgtttcattagaaggcggaaaccnncgcttctttaattaccattgcatctgtgctattatctactattaaggtttgngcgctttttgccttcctatgcaccagaaactgtgggccnnatctctccaatctttcacttttggagtttcctttcaaggaaagtccggcgtttattcaaaccaaaatacctacttttcccagccatttcagggtcaaggcaaaggggaggcaatcttttgtgtttgaggccctcggtagttgggaccctggccttgcccgcaaaaaatcttttccccctaagttctttttgtaaaccaaactcaac

SEQ ID NO: 429165 - DNA, 64 bp, Oryza sativa
gttattaaccattttcttatgagaatttacgttttttgtggcacatgtaagccaacttacattt

SEQ ID NO: 429166 - DNA, 123 bp, Oryza sativa
ttgatcatacttgatacagatagtctggaagttctaaacctaaatgctttgacccttgattcgtttgagctcattgggaagggcactctaaagcatatcaagattgacgatattagtgtcact

SEQ ID NO: 429167 - DNA, 107 bp, Oryza sativa
ttggtctacggggagctaattcgtctaacgcattggatttttccaaccgcggcttgttgctccctcagatagttgagtacgagttttattgtgttttttcatttcat

SEQ ID NO: 429168 - DNA, 77 bp, Oryza sativa
tcggtcgaacccgggcgaagcaagaagcagggagggtgttatatacaaaacttcgacacttacctccattcaccaat

SEQ ID NO: 429169 - DNA, 78 bp, Oryza sativa
ttttttttttttttttttttttttttttttattttatattttatttaataaaattaaaattttttttaaacaataatt

SEQ ID NO: 429170 - DNA, 56 bp, Oryza sativa
tcgttcaaacttgggtgacaccacatgcatgggagcattccatgaccaagctccga

SEQ ID NO: 429171 - DNA, 103 bp, Oryza sativa
gtcttcctccggcgaagccaaaaccatcgaggtctactcttacaaggctaggacgagagttccctctgaaccaaatatttagttcgtctttaatagtacgatt

SEQ ID NO: 429172 - DNA, 345 bp, Oryza sativa
ctcggtaaaaaatcgcatccgatccgaatccggcgagccgaatcaaatcctcccctcgagcaccagcggagcggaggagcaaattcgccggagacgagacccctcgccgtcgtcgattcccccaggcgagccggcgcattcattcctccgcggcgagcagaagcggtgtgcctgcctgcgatggcggcggataagccggctccggtgagggtgctgtactgcggcgtctgctgcctccccgcggatttctgttagttcttcccggtcttttaagcgttctttgcctcattcttccttctccctattttcctttttaattctctctcattatcttcctttatttct

SEQ ID NO: 429173 - DNA, 598 bp, Oryza sativa
tttttcctttttcttccctctcgttttgtgtgtgtggcctcttctctagtcttgtccttttttttttttccttccttttgtcttttcttggcttggtgtggagaggaggtggtggtgttttttttttttttttttttttttttttttttcttttttttttttttttttttttttttttttttttttttttttttttttttctttccttctttttttttttttttttttttttttttttttttttttttttttttttttttctttttttttttttttttttttgtttttttttttttttttttttttttctttcttttttttttttttttttctctttttttttttttatttttttttttttttttttttttctttttttcttttttcttttttttctttttttttctttctttttatctagtttttttctcttttttttttttttttcttctttttttttctttttttctcttttttcttttttttcttttttctctttttttctttattttttttcttcttttttctatcttctcttttttttttttttttttctttttttcattttttcttctttttttttttcttttttttcttt

SEQ ID NO: 429174 - DNA, 123 bp, Oryza sativa
tccggagtaggctgtgaatggcggtggagagatgcgttctctacgcgactcgctcctactcccacctacccgatgcgatcttgccaaacccaaatcccacccaccaccgtgccggggtcctag

SEQ ID NO: 429175 - DNA, 408 bp, Oryza sativa
aaaaaaaaaaaccattggttcacattcaagagataccagtaactcgggacatttcagtacctagctcaatatcttctgagctgcaaggaggaagagggagttccgtatgccttttacaactgactccctgaaataaaaattgtacccaggaaagaatggctagatctcaaattctccttatttcaatagtaccggagataaaattttgagttatttgctaactgaattataatacaagcggtacaccaaacagtttccccttctctattagggcttttttatgtttccttttaaatagtttagctcaatagacttgggatcagcactagaatttcagccaatatagatggaaccatttttcttttaccaagtacatgggcagaacagctataatctgaatgcactcta

SEQ ID NO: 429176 - DNA, 101 bp, Oryza sativa
ttttttttttttttttttttttttttttttttttttttttttttttttttttttttttttttttttttttttttttttttttttttttttttttttatttt

SEQ ID NO: 429177 - DNA, 56 bp, Oryza sativa
ctcgtatataggagaggaagacagaggcgaaggggtgttttacacaacccagacgc

SEQ ID NO: 429178 - DNA, 52 bp, Oryza sativa
gctgaacacccaggaagctacgagcatcgcaggagaccctattgcaccgtat

SEQ ID NO: 429179 - DNA, 68 bp, Oryza sativa
gtgggtcgaaggggaaggggggagcagcgaaggggggacttttttagcaatgcccgccataacccccc

SEQ ID NO: 429180 - DNA, 180 bp, Oryza sativa
gtctttcccgggcgaagcgaggagaatgcaacgggtcgggtacaaagctgggacgccctgaaggactggccgaattaagaagtgcttggctaatcggacccagaactcggagatccaggtcacccagcctggttgggtaccctataagaagaagcatagggcattggagaacgagttcta

SEQ ID NO: 429181 - DNA, 83 bp, Oryza sativa
aaaaataaaaaaccattggttcacattcaagtagataccattaacttgggacatttcagatacctagctcaatatacttctga

SEQ ID NO: 429182 - DNA, 60 bp, Oryza sativa
ctcgttagaaggaggaggaagcaaaaagcggggggggttttaaaaaagaaaccgggacag

SEQ ID NO: 429183 - DNA, 66 bp, Oryza sativa
tttttttttttttttttttttttttttttttttttttttttttttttttttttttataattttttt

SEQ ID NO: 429184 - DNA, 132 bp, Oryza sativa
ccgggacggaccgggcggaccgacccacgcgctcgtttgcaggaacgcgacgccaacccccgggggggccttctaaccggcggcggcggcggcccaacccgaaccaaaccaagcaaaaaggacggccgggaa

SEQ ID NO: 429185 - DNA, 66 bp, Oryza sativa
cttacaatacggttttactaacactctgaacattaattgtcgacctgggtgtaaattaacatctat

SEQ ID NO: 429186 - DNA, 369 bp, Oryza sativa
cagtgcagaaatttttctgaaacaaaatgagtacatcatcctcctctatcatctccctccttaattaaatcatcacagaataatcatatatttactccgtgatgcagtagtatagtgtgtgacgaaaagttccggagcagttaaataaataaatccaaaaggccgaattttaccgaagccaaggcaaagcatttagtgggttatttaaatcttcccttcaatttaaggggcctccttcctccttaaattcaacggcgagggtcgggtagttggctgcggccttgggcgggcgtcgcccgttcggccgggcgggccttgggcgttccatggacggtcttcgaagggcgccgaacaagccgccttcaccct

SEQ ID NO: 429187 - DNA, 124 bp, Oryza sativa
gtcgttatcggagcggacgccttttctaggggttctgtcaaatcaagtgcacctttgacccactccaccaatagatttgtgcatccaacacacatgtcaaaatatcacatagcccattttggaa

SEQ ID NO: 429188 - DNA, 273 bp, Oryza sativa
caaatctcccaaatatgtatatatgacaagtaacatatagtacttaaaatgtataacattccccaccaccatcctttcttttttttaaccaccaagtctatgttccatgttcaccaagaaaaaggtgcccccatagaaaatttcttttacaaccaccagaagtgaacccccaaaatccagcaataagtaaaatccattgccacaatttaaaggaaagggggaaaaaattccaaacattttctttctcgttcattgaataggttgaattagaac

SEQ ID NO: 429189 - DNA, 122 bp, Oryza sativa
cctcatcctttttattcattcctcccagagagacggatccatggaagttttcttgccctcatcaggcaagcagagcacaacacacaccggtggacagctggaatctgctatgcaacacagac

SEQ ID NO: 429190 - DNA, 114 bp, Oryza sativa
gcctgccccgcgtgaagctactagcagcgaaggcggcatttttcttgcagtgagcgccctcaggacccaaccaaaggttaggtgatgccctactcaaactgttacctttctttt

SEQ ID NO: 429191 - DNA, 84 bp, Oryza sativa
ggtgataagtgaaatacttaatagtaaatagactcttttgatggggaaatgacaaacatgcagcagttggccattaataccgcc

SEQ ID NO: 429192 - DNA, 231 bp, Oryza sativa
gttgtccgcgcgggaacaaagaagcagccaaggggagggggttgaagccgggacgccggggacgaccgagacgatcaagaacggcctggctaagcagagaaagaacagggagaggcaccacacccacccgggaggaggacccgatagaaagcggcagcggcgacagaaggatgagtgcttcgatggacaacaacaactagggacacggcgagcacaacaagaccgcagccg

SEQ ID NO: 429193 - DNA, 117 bp, Oryza sativa
gtcgtactaaggggaagaaataagtaaccaaggggtcagatttaatacttagacaccttgaaggatccatcaaaaaatctacttctatagaatatatactagtctctctatataata

SEQ ID NO: 429194 - DNA, 102 bp, Oryza sativa
  unsure (1)..(102): unsure at all n locations
cactatagaacgtagctactgacgtatcgcatcgcacgacgttacgtcataggctatggcattccttattctgagccggccccgttcccttnntttattttt

SEQ ID NO: 429195 - DNA, 126 bp, Oryza sativa
cctgccggacgagcgcgaagataaaagcatggaaggatttttttaacagtcgccgagagctacctcgatacagaagtaaggtgagtacttgacaacctaaaccatgcaacccatgagaaatttctc

SEQ ID NO: 429196 - DNA, 127 bp, Oryza sativa
tcgtcgaaggcgcgggaagcgaaaagcaagggaggagtcggtgaagaggcagggacgccatccaccatacacccaaggaagaagtgctgcccgaagcaggccaaggacgcgaagagcaaggaccccc

SEQ ID NO: 429197 - DNA, 152 bp, Oryza sativa
aaaaaaaaaaacccaatgattcacattcaatactgaccagccacacggaacatttcaatacctatctcaatttcttctgagctgcaaggacataaaaggagacccgtagccttttacaaccgactccctcgaaaacaaaaatgggacccagg

SEQ ID NO: 429198 - DNA, 316 bp, Oryza sativa
  unsure (1)..(316): unsure at all n locations
ggaaagtattaacccaccaggcttgcactgcctttcgttttacagggttacagaggaagagtcatacagaaaaatttggcattggtgcgataatacatagcaaattcatccagtttgtgaagagcgtataacaattcttttgtggggatttataaatggatcttggttctatatctgggcattctaagggtctggaaatacttggacgcaatatttctgtgcacagantccctattacacaatttacttattttctcaccaattcagagaatttggatttttccccctgaaatggttctaacaatgcctgggtaaa

SEQ ID NO: 429199 - DNA, 272 bp, Oryza sativa
gcctaaggattcagcatggttccgttgtactacagggacatgattgttcttgttgctttcggaggaaacaaaaaggaaccatctgataaggtcgaagtactagtggtactgcaaaacgagcactgcttcagctggcggtctgcccctgatgttgaacctttactgcatgaggactcacctccaagctcataggatctttctgatcacctgaacaacaattgtgctcctctgtactctactggatctgtagcctgagcatactcttttcctcc

SEQ ID NO: 429200 - DNA, 62 bp, Oryza sativa
gctgataagggaagagaaagaaggaagggggcagttaaaagcgagacggtttttgcactgac

SEQ ID NO: 429201 - DNA, 57 bp, Oryza sativa
ttttttttttttttttttttttttttttctttttatttttttttttcattgtctttt

SEQ ID NO: 429202 - DNA, 158 bp, Oryza sativa
gtctaacgcgggggaagcaagaagcagggagggggtcagataagaagccgcgacggtaggcacgaccgagcgaaaaaggaagggcacgactaagcagacaaagcacacgaagaggaaggtcccccagccaagaggagcaacctatacagccatagcat

SEQ ID NO: 429203 - DNA, 88 bp, Oryza sativa
  unsure (1)..(88): unsure at all n locations
gacgtatcgcatgtcacgaccgtacgtcataggctatggcatctcttatatgtagcggccccgtcccctttttnnttttttgtttatt

SEQ ID NO: 429204 - DNA, 131 bp, Oryza sativa
ttcgtcggacccgggggaagtcacgagcatggggggagtcagatacgacgccacgacggttaccaccatcgaccagaacataaagaacaggacaaattaaaaaaaaaacatcatgaagaatgtcacctact

SEQ ID NO: 429205 - DNA, 131 bp, Oryza sativa
tctctattgaactatcactgaccatgcacgcacacgtacgtcttggtatgcctctcattattctagcccgccccttccttttttttttgtatattatctagacttggctattaatattcatttggttagaa

SEQ ID NO: 429206 - DNA, 175 bp, Oryza sativa
ttcttatcttcctcctcgccttctgcttctgcatccatccatccatccattactcgccgaagacttcgcgcggggagagaggaggcaagctttgtcgcgggaacgcgggaagaaaggtccgagcttggaaggagaagaagaagttgccaagaacgcgagagcttggaaggccagc

SEQ ID NO: 429207 - DNA, 95 bp, Oryza sativa
ccgccccccttttttttttttttttttttttttttttttttttttttttttttttttttttttttttttttttttttttttttttttcaggacca

SEQ ID NO: 429208 - DNA, 72 bp, Oryza sativa
  unsure (1)..(72): unsure at all n locations
tatgacgtaatgatgcactcctacggaattgttggcaccctatattagcgggncgctccttttttttttttt

SEQ ID NO: 429209 - DNA, 97 bp, Oryza sativa
agagggagcatccacctctgctgctctaaggaaacggcatttattaaaccactattaattattcatagccaaacaaccagcactagttccagttgac

SEQ ID NO: 429210 - DNA, 68 bp, Oryza sativa
gcctgcctaagcatgaaggagaaagcaacgaaggggttgtttttttaacaaagacctcttaaagcccc

SEQ ID NO: 429211 - DNA, 60 bp, Oryza sativa
agcagtccggcctccccaaccagaagaaaagagcaacccaggggagactttttaaacaaa

SEQ ID NO: 429212 - DNA, 105 bp, Oryza sativa
tccgaactagcgggaagcaaggagaaaggagggggtttgttatgaaactgcgtcggtttccaggatacaccaaaataatgaggtctgctcaaataagaacacaca

SEQ ID NO: 429213 - DNA, 120 bp, Oryza sativa
gtaggacccgcgggaactgatgaaaagcctacgttttatctttaaaccggagtctgttcttgcgatacaccaaattaagatgctctcgtataactagaatcttagtgcgagaaatgctgt

SEQ ID NO: 429214 - DNA, 65 bp, Oryza sativa
tccctcactgccactaccatggatccttgcaagttctttctcgtcgagctcgctcgacacgaaca

SEQ ID NO: 429215 - DNA, 104 bp, Oryza sativa
ttttttttttttttttttttttttttttttttttttttttttttttttttttttttttttttttttttttttttttttttttcttttttttttttttttatttt

SEQ ID NO: 429216 - DNA, 200 bp, Oryza sativa
tcgtagaaggtgagtgcagcagttttaggattcaatgtatttctgcaaccgtataatgatgggtgagatccagaacgtggaagattatgacctgctgtttgatctttccgttgttcattatattgtttcttatatcttgtatatttttttatttcttctctcttttttcttatcttctcttttattttttcctttccttc

SEQ ID NO: 429217 - DNA, 86 bp, Oryza sativa
gggaacctaaccaatttatggaatgcaatgttaacttccaccatatatttgaatttaatgcgtcaaggcatcctcagatctggcaa

SEQ ID NO: 429218 - DNA, 111 bp, Oryza sativa
ggatcagtttcggttttggaccaggttgggctggagtggtttttatgccgccaccatgataaactccactattgaagtgagttttgtgttgaaattgcggccttgtggggg

SEQ ID NO: 429219 - DNA, 76 bp, Oryza sativa
gctctcttaaactgattgggatggtttcaatttagttgcactttgtcgatgacattgaacacgttaacatcaaatc

SEQ ID NO: 429220 - DNA, 154 bp, Oryza sativa
gcatagcatcagcagcaatgcagcctcccatgctgctgccgcttctcctcctcctcctgctcctcctcgccgccgtctcgccacggccggttctctcccgccgccacgcctcgccgccgctcgccaccgagacgctcgacgtcgccgcgtcgct

SEQ ID NO: 429221 - DNA, 92 bp, Oryza sativa
acagaaggtaactcaaatattatttcagggtattgaatggacccccgggctattcattatctcaaattagttgttccaatgggcaaagaact

SEQ ID NO: 429222 - DNA, 232 bp, Oryza sativa
gttatatgaagaccaaccagagataaaagcacgggaactgaggagggaaaaaggcgccggaggcctaccgatcatagacacaagcggcacaaaagcaaggggcaacagcaacagcagagatggccaatatctccgaactgcccccaacatatacaaagattacaggacaaccacggccaaggattcccctaccgcggcccagcaacacccttcaggagcaacaacaaaggcc

SEQ ID NO: 429223 - DNA, 74 bp, Oryza sativa
ccggttgttcaagaaaaaagacagagataagagggggttttataaaaacgaagccgaaaacccccaacagacac

SEQ ID NO: 429224 - DNA, 125 bp, Oryza sativa
gtaggtcaatggcaaaaaaggtttcctaatccaataacggcacggtaatgatgaattactaaacgattcttggcgatcgaacaagcacgcagccgctttacagtccctgatgctttttttctaag

SEQ ID NO: 429225 - DNA, 81 bp, Oryza sativa
tgtggaaaaatatagaaggagttaatgggcaggggtctttttttaaatagaactagcccttcccccccatacacaagaatt

SEQ ID NO: 429226 - DNA, 69 bp, Oryza sativa
tcccagaccaggatgaagaactaaaacacgggggtgctagctgaaaacaagcgcgcgaagccccccgcc

SEQ ID NO: 429227 - DNA, 86 bp, Oryza sativa
tttttttttttttttttttttttttttttttttttttttttttttttttttttttttttttttttttgtttttttttttttttttt

SEQ ID NO: 429228 - DNA, 69 bp, Oryza sativa
gcctaaaatatcatgatgaaaaggttgaagatgaagatgtttgttgtacaccagcactcagtacaacaa

SEQ ID NO: 429229 - DNA, 56 bp, Oryza sativa
agcagtcgctccatctcctacgctccttgcgcccaagacgagtcttttttaaacaa

SEQ ID NO: 429230 - DNA, 435 bp, Oryza sativa
  unsure (1)..(435): unsure at all n locations
aacaacaaacatcactagattaaatattaaaacacaaattgccagccatccctgcaattagactaagtcttggtacagctgcattagtggaggcatgatgctatcactaggacatgacatgggagataaccagctgggcacaagttctgactacaatgttgagnaacangaacaatgnngaaaagataagcattcggtcctacatcgactatagccataagnnacatatttacatnngcatgtaatcggtgnaatacattagnnatgatattacagnnaagggctgagnacaatcgaacatttgacattcgctggngcttaatctgttagcataccatgttttcttccctgngagctcaatatgctagtaggacgggtatggaaatttggttgcctgtcagtacgacggctaacgtcattcagaacagaaccaaa

SEQ ID NO: 429231 - DNA, 70 bp, Oryza sativa
aggaatgtatactcggattccacaacattggaagggcacaaataaggttttaaacatcccaaatttaaac

SEQ ID NO: 429232 - DNA, 55 bp, Oryza sativa
  unsure (1)..(55): unsure at all n locations
aaaggaaacccaactnattttttattgacatatgtgggatgaaatccaataaaac

SEQ ID NO: 429233 - DNA, 402 bp, Oryza sativa
cgaatccaagaatggacaaacacctcagagctaaccaaaaagaggaagaacaaggcctcaagttcgttcacagcgagtaaatgaactcgaggcatttctgtgcctgcctactctagtaccataagatagaagacgataacagacagaggacggttgtaagttaaaccctgttacccacctgctattctacaagaactctagaactgtatacactttatacagttgacctaccaagcaccaacacaagacaacttctcagaatctcatgttagtagccttttcgaatcaaggatccgatctgaactcttgaagttgtacaccgattcaaacgcttccatgcaaacgctggcgaatcccggcatcgcctgaaaaacgttagggaaacctgtctgaaggttgttc

SEQ ID NO: 429234 - DNA, 276 bp, Oryza sativa
gtgccatacaacaaagctcatgagaactctgatatctacagttagtgtgaggaatggcagctagccattgatcgaatccccgataaggtagcctcggaagggatcaaaactctcctgacagtgatacacgcagttgtggtacaacaggcggaggagcaaaagcaaaagaagaggtcagagtctgcattcaaggaactggagaagaaggcagaggaactaagatcccttgaattcaaatatgggccatattcgggtgctgaaggctatggagatatg

SEQ ID NO: 429235 - DNA, 292 bp, Oryza sativa
tccttttaagtatgtgaatgggaaaatccattcgttagtaggtgaaggcacctctgaggtggggtattacagctgttctaaagttacaaaggatgacagataatatgcattctttaactatcgtttggctaaaatcattttttttccttctcttccttgctgcttcttactggcaagtggcaacccaggtttgatggttcataatcatttgattccttgctttacaactccaaattattgttaagcctaacccccaaagatgatttttggtttaataggataatttatttac

SEQ ID NO: 429236 - DNA, 66 bp, Oryza sativa
actggcgaggcggcggcgccgcggaagccggtggacgttgttataagagaagagctacaagcccac

SEQ ID NO: 429237 - DNA, 460 bp, Oryza sativa
cctggccttctgctcagctggaaatcttggcaacttgctcctgattgttgtcccagcagtccgtgacgaagatggcaacccgtttcggaaaagacagcagccgctgccactctcttgggctctcctattcatcattgtccatggctcttggtggcttgtacatatggacgcatacgtacagtcttatgaagaagaagagaggtcaaatgtatcaccagcctaacagcattcagggcctggacgacagcaatgaagaacatcatgctaagaaattcaaagcaaatggtgaagctgcttgcgccgatgaggaggcaactcttctggtgtcagctaaactggctgaacacatcgaggagaaccaaatggttggcttaacaaactttatttctttttacttgctcttctttccagacgctcctttgttttttgtatatatttttattcccattatctctcctta

SEQ ID NO: 429238 - DNA, 550 bp, Oryza sativa
aactaacacgcaaacggatgggttggcacgagatctccttataaaacagaaactcctgggtatagataacaaaactaatatagagaataattaaaataatataaaaaaaagagactaaaaaagtaaataaaataaataaaaaatataaaaaataaataaactaactataataagaaaaataaataacaaaaaaaataaaaataatattttgaaaatataaaaagaataaaaaaatataaataccattaaaaaaaaataaataataatataataaataataaaaaatcacaaataaaataataaaaaaaaaaattaaataaaataataaaaaattaataagaaatattaaaaattaaattaaaaaaacatattaaataaaaaactataataatattctaaaaaaattaaaatacaccataatataaataatattaacacaaagataaaaaatacaagaataaatcaacaaaacattaatataaataacaaaaataaaataaaatacacatataataactaataaaaataataatataatttaaaataaaaa

SEQ ID NO: 429239 - DNA, 85 bp, Oryza sativa
acacacaagctccaagaaatatacattaaatttatagagagataaagagagaggatgaaaaaaataaagctaaccttacagctaa

SEQ ID NO: 429240 - DNA, 569 bp, Oryza sativa
gctgctaagttgcgagagagagagagagagatcagttagtttgttgagtggaagcagatcaggaagatgctggagaagctgtgggacgacttggtgtgcttttcttttctcttttctttttttttttttcttttttttttctcctcctctttctctcttttattttattttttcttctctttctcttttccttctctcttttctcctttctttccatttttgattttcctcttttttttttctttttttttttatttctttctttttattttttattttttttttttttttttttttattttattttatttatttatttatttttttttttatttttttttttttttttttatttttgtttttttttgtttatatttctttatacttttttttctctttctctctctcctcctttccttctttttttttatatttattttttttatatatatttttttctcctttttttatgttactatattttcttttcttcttccctttattttctcttctcttttctctctcttttctctccttctttttctactctctccttcttttccttttct

SEQ ID NO: 429241 - DNA, 101 bp, Oryza sativa
gctcctccgccgtcgacggcgatgtcccgccgtagcattcatacggcgagcaagactgctcgccggcaaggaggcaagctcctgtgcgtccgtatatattc

SEQ ID NO: 429242 - DNA, 297 bp, Oryza sativa
aaaaacttaacaccatccaaagagaaatcattgggattacagggacatcagttaaataccaaaaattggatacttgaacaaaaaacttctagggaacaaacaaaaaaggggacccatgagttttaaaaaaagagacgggggcaaaggggcgatctttgaaaactactttttgggaggagtttggcccccgctttttgcccaaaccaacaaaaggggggacaaaacggcgtgttggactggaaccgcttgggggcccggccccggggccttcaggtcctggcctgctttgccaccttt

SEQ ID NO: 429243 - DNA, 149 bp, Oryza sativa
agtgccgccgccgccgccgccgccatgggtaaggttcacggctcgctggctcgcgccgggaaggtgagggggcaaacccctaaggaagccaagcaggacaagaagaagaagccccggagccgagcccacaagcggaagcagaacaaccg

SEQ ID NO: 429244 - DNA, 76 bp, Oryza sativa
tttttttttttttttttttttttttttttttttttttttttttttttttttttttttttttttttttttccttttt

SEQ ID NO: 429245 - DNA, 339 bp, Oryza sativa
tcgtataaaaaaaaaaaaaaaaaaaaaaaaaaaaaaaaaaaaaaaaaaaaaaaaaaaaaaaaaaaaaaaaaaaaaaaaaaaaaaaaaggggcggccgttttggggggcccttttttaggtccccgggtttgcgacgcgttagttcttttttagggtcccctaattgggatcccttggccgaattttttgaccgtcttttttgggaaacccctgtggtaaccccctttagtcgccttgcttaacatcctcttttaacaagctggtttattcggttgggggcccgcccaagtgggcctttcccaacggtttttccaacctgattggccactgggactggcc

SEQ ID NO: 429246 - DNA, 432 bp, Oryza sativa
  unsure (1)..(432): unsure at all n locations
acacaatgctaattctcagtatcgaaatatatacttatagtgttaaccaaaaacgacggccaacatcacgaagtgctctgcttcatcacaactactaagaacgtatacatgagcacatgacaccaggatctgagtgcaccaacaattttcaggagttccagattatccttacaaaaaaatcaaccttattgctgctgaaagcctagaactatcaaaangcccttgagaggatgcattgcaactgacggggccactgttagggatgtttgtccgtggncttgatgcttactctctggtggctcaactatccaaaatttctgatatatgcacacgattacattaactccctgtatcctgactggnaagtttcttcccagtgttcttatcagcaagtttgttcccgagtagtgtaggatgtgaaaatgcgctgga

SEQ ID NO: 429247 - DNA, 267 bp, Oryza sativa
tggaaatctctggagcaaaatcttcatgtgtatcttcaaccagaacagctgaagatgcagacaaggatggacagccagtcccttgcatgaatgatgcgaagagtctgacacagcttcttgttaaggtttgcaggaatacagtttccgttcaagaagatttaaatgtcattactgtaaaacaatttgtcaaggctgtttgccaaaagataggggtccatgcttatgatttctatgctgttcttggtggaaacccattattggattacc

SEQ ID NO: 429248 - DNA, 372 bp, Oryza sativa
ctcgatgaataattcagggaacctttatatgattagaatgaattttgttccattttggagcgccggcaatttatccagtttacattttcacacaagggggtttttaatttttttataattaaaacaatttgcattctcctaatgaaagccatggagagatagagggggaataaacaacagatttactacataaaagtaaagggaacaaaccgggaaaggaaaaagggaacattgtccaagagcttttaaaaccctacgggtttagattttccagggcctccagaagaatgggcctgaaccttttgcagcccagcttaacattttgttggcccatgaaagtttgcctgatgaaattgaatccccgttggggga

SEQ ID NO: 429249 - DNA, 168 bp, Oryza sativa
caaacaaaagacctaaagacatttttaaagggggaaataaaaattatcaggtttcaaaaaaccaaaaaaaaacgggcccggtttattttttttacccctttgggtgtttctccagaaaaacaaccccaggggcgggcccacaattaagcccgacttttgagttccccg

SEQ ID NO: 429250 - DNA, 429 bp, Oryza sativa
  unsure (1)..(429): unsure at all n locations
gaagagtaacaagttaggactagattatccccaatcaccggccccaaaaaaatgtgaatcaaatcatctacggagtagaaacaaaccaatcatccgagatcagttcctatgattccatgagagtactagaacaatcagagattcacaaagcagtggcacttgacacgaaattaggaacaagnaaactgaatcatcttaaggnattggnactttcaaacttgactgttcttgatgcgatcgacacatgngctcgcttcttctcctggaggaactccacngagggccctgagcgcggcgtcgacgtcgtcgctagctgcgcagcagcatctccgacacctcggccggcgtggcgtccacgccggcgagcatgcatgtccatccgccccggccggagcagcgccgcgtcgaggcgttccttgtagttggtgg

SEQ ID NO: 429251 - DNA, 143 bp, Oryza sativa
tttttttttttttttttttttttttttttttttttttttttttttttttttttttttttttttttttttttttttttttttttttttttttttatttttttggaatgtttgattttaaaagggataaaaaaaaagggggagag

SEQ ID NO: 429252 - DNA, 411 bp, Oryza sativa
tggtgccagagacatccactcgcgtgcgcgctttgtgcgtccccgctcgcccgccccctgcccgcccgcccggctgcttttggctgctggctcgtgcgcgcgcgctgcccgccccttgcggctccggcccccctcccctcttccttcatcggctctcccctcctcccctcgcgcccctcctcctctccttctctctcccccttcccttctctcccctcccctccctccttcctcctcccctcccccccctcccctccccccctcccccttcccctcctcctccctccctttccctccgttcctctctccccccctcccttgccccccctcctccttctctcctccccccccctcccttccctcccctcccctcccctctccctttcccccccccctctccccccccctccc

SEQ ID NO: 429253 - DNA, 452 bp, Oryza sativa
ggcctgctggagctgcgcgtggagggacacggcggcggcctgctccgagagggccttcgcctgccacgccgccgcctcgctgcggaggcgcgccagccgctcctcgagttccgcgccgcgccgcgcctcgcgctccgcctccaacgccttctccctgagccggcgcgccgcggatcgctctgccgcgacaagcagcgccctgttatggcgccgcacccgatcggccatcgcccgcctgagctgctcgccctgctctttgatgaatcggtcgagctcctcatcttgccgcttcatctgtccggcaggctcgtcggagaacgagacgaacggcatgggcgacgacgagtagcacaaggctttcaggcgtttgctcttttgttgctgctgctgctgctgctgctgctcatccaatgccaggcgaaggccagtggacacgagtgccgccggcgcgc

SEQ ID NO: 429254 - DNA, 76 bp, Oryza sativa
atgggtgccggagacgtcgacgccagcttgtgctaccgtgtggacgatcccgccagtgcccactggagggcccaag

SEQ ID NO: 429255 - DNA, 217 bp, Oryza sativa
tcgtttctctctctctctctccccctccctccgatctcgccgcgtccgtgtcccctcgccgccgcagccagcgtcgagggctcggcgaccggaggaggagaggccggaacccgccgccgccgccgccgcctccgcctgtagcgagatcgctcgatccggttcgcctcccgcgcgccagaccgccagcccagttcgatccgttgagggggaggggact

SEQ ID NO: 429256 - DNA, 208 bp, Oryza sativa
ccacatgatcatagcgggcgcaggtatagatagcaaggaaggccgagcccccaagtctgacaaacgcctaacaccagacgtacattatcaagagcgctacatctgcacagcagaagatgccacagagcccttatgctatgatttagtcaacgttctgggcacacagctgttttgcatctcaggggagaggcacgtcacgattagtcat

SEQ ID NO: 429257 - DNA, 411 bp, Oryza sativa
tcgtgcgccgccgccctcctcccccccggcgcagcagcctccggagaggcctaggaacagcgatcctgctgagtcgcaggcgcaggctggagcgagccgaacgcagaatgctgctcctgctgatgatagggcaaggaatgatcatttgaatgatcatttcgagcggcgcacggaagcggcggtaagtcatgcgcagaacgtgcctttcactgagcaaaatactaggagcaaccattcttcgcagccgtgctctgcagctggagtataccctgcacagattgtattttcagaggctgccagttaagacctctccttcaccagaagtcaatttgtctaagcttgtgatcactttttgtcaaatactatgtttcttttccatctcattttttatcatttctctctttttctttc

SEQ ID NO: 429258 - DNA, 271 bp, Oryza sativa
aaaaaatgcccccccatatatattattatttatttcccctactaagtagaaaagaatgccccaaacccgggttataaaaatggccgtagcatcccttaaaaaataactttaatatacaccttgctatgcacggggccacactttgaaacaaacgcacgcgggaaaataaaagggggaaaaaaaggcacagcaataaaggctatgctcaataacacttttattccaaaaacggggccccagtaaaagaactcggcttggttcctcccctttg

SEQ ID NO: 429259 - DNA, 423 bp, Oryza sativa
  unsure (1)..(423): unsure at all n locations
gattaagtattgctcatataacaactattttgctacaagaggaaataagtaaaacaaaaatgaaagaactgttacatggtcaacaatttctgtcctacatccttttcatgtcaattgacatgagtacaagtacactacttctaattagtaattacacatgaaaagatttggngaaatgtacaaaatctattacacccaccaggggcagaaaccgtcagacttaattacgtattgccatctacaacataatgaatgaatgatcttacctacaaaatagttcctggaatggccaaaaaaaacatccatcggctgggtcgttatgctttcttgagttaagagttaagagtgttcccttttgttaatgacgtatttactgtacgtctttactaaaagccctgtaaatgaagtccctgaaccttttgc

SEQ ID NO: 429260 - DNA, 561 bp, Oryza sativa
aaaaaaagaaaaaacaaaaagaaaaaaagaaaaaaagaaaaaaccaaaataaaagaaaaaaaaaaaaaaaaaaaaaaaaaacaaaaaaggaaaattaaaaaaagaaaacaaggaaaaaaaaaaacacaaaaaaagaaaaaaaaaaaaaaacaagaaaaaaaaaaaaaataataaaaaaaaaaataaaaaaaacgaaaacaaaaagaaaaaaacaaaaaaaaaaaaaaaaacaaaaaaagcaaaaaaaaaaaaaggaaaaaaaaaaactaaacaaaaaaaaacaaaaaaaaaacaacaaaaaaaagacaaaaaaaaaaaaccaataaaaaaaaaaaaaaaaaaacaacaaaaaaaactagaaacaaaacaaaacaaacaaaaaaagaaaacaaacaaacaggagcaaaaaaacaaataaaaacaaaaccagaaaaaaaacaaaaaaaaacataaaaaaaaacgaacacaaagaaccaacaaatagacaagagacaaaaaaccaaaagagtaaacaaaacaaaaaaaaataaaaaaataaagataaagaaaacaaaacaaaac

SEQ ID NO: 429261 - DNA, 515 bp, Oryza sativa
atactttttggtattcccatacactttgtttgtcttttttgtctcgcggtcgagagaaaccccgaggagagagagggagattatccttctttttttcttatttattttaacttatttttttattctttaattttttttttttaaattttttttatcataatattatctattttattatatttttttttttacttattattttttatatttttaatatatacatctatttttttttatatttttttttttttaatcttacccatatctttacttattttttttatttatttttttttatttattttacatatctcttttttttttctttttttttcctcttttcctaatccattatttcttcacttctttttatttttttttttacttttttcttcatttttttttaattttccatcttattttactattcttcttttttttttttttttatttttaaaaatttattttttttcatcttttatctttcactttttatattttttatatctttttaa

SEQ ID NO: 429262 - DNA, 83 bp, Oryza sativa
ttttttttttttttttttttttttttttttttttttttattttttttttttttttttttttttttttttttttttcttttttt

SEQ ID NO: 429263 - DNA, 436 bp, Oryza sativa
tgcatatatctagtgatcttcggctctttcaacacaaccaactccactgcatgggtggtccttacaggtgccatggtcctcctcgccctccctctcatcatccctgcctcctccagttgttctcatgtggacacacatgaccctgaacctactgttcaactcaaccacgaagattcaagaaaaccacttttgctcaatagtgaccacagcacagagtccaatgccatgatgcagaaaacagtggaacacccaatgcaggattgttgcttgggaacagtactgtagaagggacgcatgttggttctttgcgaggagcttagtgcaaagtagcttatccagtgcgtctacttctggcttttcttccttgcccttcttctgtggtgcacacttttcggtcttgtgtccattctcctctttcttctatttctcctattcc

SEQ ID NO: 429264 - DNA, 72 bp, Oryza sativa
attgagacaggataaggaggtgctggccccaaaagcattatatttacaatacacacagaaaaaacacctaaa

SEQ ID NO: 429265 - DNA, 249 bp, Oryza sativa
taatgagccgcccccaccgttcacattattcaccgctcgttacatgtcttgaacttcctcattcgaagcctgaacctataggttcgttccatgtcttccactctatacaccactccaggccgccaaggttttacttttcacattatttattatagggaggccttgcgggatctttcaattggtgtactgctactaccttaattcaacaaagaagcccattgcaaccaaaaattcatcggtgcaccagct

SEQ ID NO: 429266 - DNA, 95 bp, Oryza sativa
ttttttttttttttttttttttttttttttttttttttggaggcttcaaaaatttagcattttcttattgctgcacggggtatcaacaatccttg

SEQ ID NO: 429267 - DNA, 360 bp, Oryza sativa
  unsure (1)..(360): unsure at all n locations
aaggggaaccatttgcacaatatatgttttttgtttgtctacaccaagggtacttttccaaaccctatttttcatgattaaaacagatcaagaaaaaaaagggttagaggcccggttgaacataggtagagcagcattcttttgcttttcacagagaaaaggacctttcatttcactgggaaactagcacaccaacggggttgcggtttgcagggccgcctccaccaaaagggacctggaaaggcggggttaaaacggccgaatgcccaaagattttaggccggngaatgggtcctagggctccagttttagggagaccattcgggactgccggtttcgtttgggcgcccttacgaaccc

SEQ ID NO: 429268 - DNA, 593 bp, Oryza sativa
actcaccccgcgatcccctcctccactcccccccgctctctcccatcaagaggagagagagtgagaggagctttctcttatcttttttttttcttttttactcattttttattatttctcttttttttcttttctttttttcttctcttctctcattttttcttctttctttttattttccatcttttctatttttttatttttttttctttattttctattatattttattttttctttttattttttactttttacatttttattctttttctacttttctcttctttttcattctttttttctcttcttcttttttcctcttttctttccttttctcttctcttctttattattttcttttttaatttcttctattacatcctttttatttattctcctctcttctcttacttctcaccttttcctctatcttttcctacttttattatctctctctttttttttcatcttaatccttcttatcttctttctatattctttcttttctatttctcttttttttctttcttattttttttcctctattctttttcttcttccttttccttatttcatccttattccttctt

SEQ ID NO: 429269 - DNA, 364 bp, Oryza sativa
ttcctttgcgcgtggccaacgagggggcaccgagcagcgggcggtaggcggcgtcgagcagcgggcggcgggcggcggcggcggctcggcttcctcggctcagcggccgacaacgacgacggccgcggtgggagcggcgacggcgggcggcgggagcggctacggcagcggcggcggctcggcggccgacaacgacgacggccgcggcgggggcgacggatccgatgccgccgccgacggatccggcaccggtgacgacgatgggtggcggggccgattggatccgccaccggcgacgacgctgggcggcggggggacgggatcccgctgcgtctacgactgttgtggtgggagcagctaccgt

SEQ ID NO: 429270 - DNA, 435 bp, Oryza sativa
atattgaaaatggtacatcatttttatatatatcagagtggtagcatttcccttaacaatgaagggtatgaaaggcaaaaatgggggacaaagttcctcaacgtcctataacaacttaaatttcgagaacaaatagagaaatattaaatataattacatttagaatcggctcgggagcattttatgtaactaacgtacagagaggagaggcatcaggcgcagctaaaaatacattattgatcaaatttttaccattttcaaatcgtttccgagtatagggatctttgtcattgcaaaattcaggcactttgtcccaaattcagggcagtgagagatacagagggccaagagctagctcacattcttcttcctccggttccagactccctctggcagttgaagttgacggcggcgaccgggaggcccgggttgtag

SEQ ID NO: 429271 - DNA, 187 bp, Oryza sativa
tcgtacgcgtgcgacagtggagtaaagtgaagcagcagcagagaagcagagaccatttccctcctccctcctctctcgccaaacacgacgacgtcgcctcggtttagtcgtcgtcggccggcagccggatgacgggcagtagctgtccggccgattcttcccagttgctgtaccctcgccggggcgt

SEQ ID NO: 429272 - DNA, 439 bp, Oryza sativa
  unsure (1)..(439): unsure at all n locations
agggctgaaatggcccatcgatcgaataatggtatcacaacatgcatttggccaaaatgacaccatggggatcagcaacaaaggggagcaactgataaactgaacccttacatccatccatacacgcctgcatactactacacctttggnaaaggcaggcacggatcacaatggttgataatgatgaactgatgtacannaaagatgtgccagccaaaattcaacttcaagttatcacttgctccaaggccaagcctttcttgaaggccggttcgagcatacgttggaggttaaccttgagcgagctattaatcctcctggaatcgccgggaggtcgaacatgaggggggtttcatgaggttttggtctttgcatttgcatcatttcccggtgattcccctatccccctttcaagaaacggaccaccgatttcatgcta

SEQ ID NO: 429273 - DNA, 231 bp, Oryza sativa
atgattgcagcaatagcgggtcagtaaccgaagccgttgtataagcgaagaacccagtgacaggagcagcactgaagaacccagtgacaggagcagtactgaagaacccagtgacagagtagtggtggtgacagtagctttcaattgttgtttttgtggaggttgttagaggcctctatttttgttcctatgtctttatctttattgattatgttattcattcattttttt

SEQ ID NO: 429274 - DNA, 73 bp, Oryza sativa
attcgaaatgtataagattctaagtaagaagcttttggtgtcacaggcatcacagttagctaacccaatcgtg

SEQ ID NO: 429275 - DNA, 113 bp, Oryza sativa
  unsure (1)..(113): unsure at all n locations
ttttttttttttttttttttttttttttttttttttttttttttttntttttttttttttttttttttttttttttntttttttttttttttttttttttttttttttttttt

SEQ ID NO: 429276 - DNA, 75 bp, Oryza sativa
ggggagaaaccgcaattttttggtttgggggattaattttttaaaaaggggttaataccttttaaatttataaaa

SEQ ID NO: 429277 - DNA, 380 bp, Oryza sativa
tgtagcttctctcctctctctcaactccggcgagaggaggaggcggcggtggggcgttcgtcgggagagagaccagggccggggggctagggttcggccgttcagagaggcggcggctgaggaggaggaggaggtggtaagctatacctctttttcttctattcttttctttgactttattatgattcttttttagctttttttttttccttttcttttcctcatccaatttccttattattcatttctactttcatctatatctattttatattcttctcatcttttctttcattgattttcttcattatcttacttctgccttctattcttttagcatcctttttatcttttttctcctctttatttattttcatcct

SEQ ID NO: 429278 - DNA, 177 bp, Oryza sativa
atgatcctccaggctctacgatccccaccgctgcgctgaccaccctcctcgtgccgatgctgcgcagaagatcggtctttggccgcctccccgccagattcggccggtgaagctgccaaggctgctgcgcggtgtggttgaccagtttctgcttgctgactcgctgtagctgatgcc

SEQ ID NO: 429279 - DNA, 135 bp, Oryza sativa
aataataataattttagtttttttttggctttagatatatttccaattcccaaccttccaataatccgatctctcccagttctgttcggatcaaggctgtgtcgaccgcaataaagaaaataaaacatttttcct

SEQ ID NO: 429280 - DNA, 126 bp, Oryza sativa
  unsure (1)..(126): unsure at all n locations
cgtaaagagaagaggagcggcggcgagatccaattccaatcgatccttgtgctgctgctgctgctgcgctcgacgatcccatccggatctcgatggcggncatggctcgccatcttcctgttattc

SEQ ID NO: 429281 - DNA, 208 bp, Oryza sativa
gtacgacacaatcactcaatcaggatggaatgaggcgacaatgacgtttcacattctctgactgaagtcagatacatcagtagcatttgtctcttgttcactgaatgctgatgttgcatctgaaatgagctgctcagttttcatataatggatcattaggaaaaatcaactaagcttcattttgacaagtacatgtctcattctgata

SEQ ID NO: 429282 - DNA, 517 bp, Oryza sativa
atcagttgcctcttgcctccttcttcttcttcttcgtcttcgtcgtcgcgaaatacaggcgtgtggggcgagagtgatcaggtggcagctgggtgtttcttcttcttcttcagctcgagttctttcttagccatggcgctcctgctgctgcgtatgggcgttttcattgcgctgctctttgcctttttctcctttctgattttttttttagaggtcattcttccgttttgttctattgtgctcattacttttttatttgttttgttcttgttctgttttttcatttttattcctttttccttctttatcttttcttattcttttcatttttctcattttctttctttttccttttctctttctttttctcatttttttcttctcattctctttttttcttccttttcttttatcttctttctctttttctcttctcttttacttttctacttttcttctctctattcttctcctttttttcctcttttccttttctttctcttttttcttttctctt

SEQ ID NO: 429283 - DNA, 184 bp, Oryza sativa
caggcgacactattaacgagctctgacgatgcatgcacgacgtacgtcaaggctatgcctctcttatttagccgccctcctttttttttttttttttttttttttttttttttttttttttaaacattttttattttgatgattctttttggtgttccataatgttcatttacaagacacacac

SEQ ID NO: 429284 - DNA, 102 bp, Oryza sativa
tcacacgacgaggaggagggggacgaggggctgctttcttccttctcgcgccgccgccgccaagacgagtcgcgtcgcggttgaacaggtgaggtccgatcg

SEQ ID NO: 429285 - DNA, 86 bp, Oryza sativa
ataacctaataacaagggcccccgtacaggcagtggacaattcacaaacaaggtttttgcatttccggcccggggctgaccccaca

SEQ ID NO: 429286 - DNA, 360 bp, Oryza sativa
  unsure (1)..(360): unsure at all n locations
ccaaatgctggattataagcacagaacattgatataaaagtccatgattcatgtctccctggttgcaaattacatgatggtcatgggccctaatggcagaccttatgaactcaaactggaaaagatcaacaacattggtgcttgngtaaagatgtgctccaaccacttaaccttggggaaggcggccccgggttttccgccgcgttggccgccgacgcgatctaggggggggcgcgtggtcgccggagggggcggtagaggccgcgttgtaggcggccttgccgacgagggaaaatcccgaagggcgacgatggcgatgccgagccccggcgtggccttggcccaattggttccccacca

SEQ ID NO: 429287 - DNA, 580 bp, Oryza sativa
actgggagagcggcggcggccatggcggggaaggggtttttttatacattcccccttttccccccccccaccccctcttttcttttatctccctccttttctctctcctcctctttcttcatcctttttttttttctcttcttttccattcttccccctcttcttttacttttttcttccttacttcctcattcttcttaccttctcttttcatatcctttcccctcttctctctttttttacctctctatttatcccctttttctctccctttctcttttttcccctttttttcttcttcccttaactcctttttccttctcctcctcttcctctatttcttcttttcattcctctctcctcttttctcctctcctttttcccttttccctctctctctttcttttttcctccctcttattttcttttttccttattatctttcttatcctttctatatcttccatcctccattctctttctctttctattttttctctcttcctttatacatatctattttattctcccctctctctctccacctttctctcctctcctttcccatatctcactcctc

SEQ ID NO: 429288 - DNA, 374 bp, Oryza sativa
ccagtgaacaaccaagatttatcaggtgattgagttgggagtctatcccttcaatcgaatcgatttatacaaccatttttgatcctatactacaaattgatttcctgccaattcttttagaaaaaaaaaattctacaatctttgtaggatcagaacacaaaccttgtttacattcttacaaacagcctgaattatatgaagaaccggttaggaacaaacagtttgtttaaattacatggctactttcaagccccttaattggagggctttgtagcccaatggaactttcttcacaatttcccaggttgaatttcaatgtgttttattgtccaaatagcaggccttggttcagccttaattttaataaatttaat

SEQ ID NO: 429289 - DNA, 256 bp, Oryza sativa
  unsure (1)..(256): unsure at all n locations
aagccacaaagcactatattatgataagaatgattacgaagtcaagaggttccaaaattgccaaatctgtcgggtaaatttaccaacacggtcccaactgccaacaaagtacataacacggctagaatgtaacagttccggaggtaggccaatttcacggcctcactagaattcgcatatattaggggcggatggnaggattactaccaggtacttagaacaaaaaatcgggctcaaattgtttcggtcttagtcg

SEQ ID NO: 429290 - DNA, 359 bp, Oryza sativa
cctggccttcgttctccagcgcatacttattctgtccttgtgctcctgcaattactgtatagcacttgcactgttccaacctactatatcccttgaggaccgtgcacatgaacatattcggttcttggtagactagcccaagtggccatgcgcatatttgacaccagccacccagggcacaatggatgaaacccactgagatcttacaaatcacacgactttgcccgattccaaccaagaggctggcacatcattttcccaattggacatcaagcgcaagccttttccatgaacgaaaggaaccattcttaggcagctaaatattctagtccatcctcctttcactagattactttctc

SEQ ID NO: 429291 - DNA, 637 bp, Oryza sativa
  unsure (1)..(637): unsure at all n locations
ttttctttgcagtcgcagtcgttttcgtttacgtctctcttttttaggaggagaggtttgtttttttatttnctttttttttttttttttttttttttttttttatttttttttttttttttttttttttttttttttttttttttttttttttttttttttttttatttattttttttttttatatttttttttttttttattttttttttttattatttctttttttttttatttttttttttatttttttttattatttttttttttattttttttttttttttatattttttttttttttttattatatttttttttttttttttatattttttttttttttttttattatattttttttttatttttttttattttttattatttattttttttttttattttttattttttattttatttttattttataatttttattttttattttttttttttttttttttttattattttttatatttttttttttttttatacttttttttttttttatnttttttttttttttttttttattttttcttatttctttttttttttttatttttttattatttttttttttttttattttattttttattttttttttatttttcttttttttatt

SEQ ID NO: 429292 - DNA, 57 bp, Oryza sativa
ttttttttttttttttttttttttttttttttttttttttttttttttgtttttttt

SEQ ID NO: 429293 - DNA, 243 bp, Oryza sativa
tggcgttggtagggtagccatggcggaggaggccaccctgagccacccgccgcggtacgtgaagctgagcaggccacacgacgccctcacccccgccgaggacatcctcgcgtggaaggacaaccagccagtccacgtcccgcaactcgtggacaggaggtgcagccagtgcggtcagctcctgacttagtggtacaagcccccttgccacaagccctggaccaccggtattctgacctgggc

SEQ ID NO: 429294 - DNA, 107 bp, Oryza sativa
gaagccaaaatcatccaaatttctacaatgacaaccgccgatttacaaggttccaagattcccatacaacctcgaaaaaaaattcccactacggtttcaaagtgtgc

SEQ ID NO: 429295 - DNA, 227 bp, Oryza sativa
tcggcggcggctacggcgaggtccggattccggcgcatgttctacatctcggccttcaccccgcccaagccgttgacgaagaccatgaagaatgacgcgccaccgaccccctaaaataagactaatgcggcggtgaccgacgatataagcaaaaagaaatggaggagggcgggggcaaatccataacataacataaaacatccaccaccaattggaggcatgaactg

SEQ ID NO: 429296 - DNA, 111 bp, Oryza sativa
ttttttttttttttttttttttttttttttttttttttttttttttttttttttttttttttttttttttttttttttttttttttttttttttttttttttttttttttt

SEQ ID NO: 429297 - DNA, 86 bp, Oryza sativa
acctcacggacgctgatgtgatcaccatcgagaactcccggtccgacgagaagctgctctccgccttccgcgagggtgtgaagtat

SEQ ID NO: 429298 - DNA, 594 bp, Oryza sativa
actggatcgatctgttccctagccaagaagcatcgatcatctgagtgagctggcaagcgagagatactagctaggatgtacgacgtggccgttgagcgtttgcgcttctttttctttctcttctcttttatttctttttctcccttctctttttctttttcttttttttttcatcttttctcctttatttcttttatctcttattattctactttttctttttttttttttatttttccctctttcttttattttttttttttcttttatcttctccttttttactttttttctctttttcttcattctcttctttttcctattttttcgttctatttttcttttatcttatttttatcacctcttcctctcttttttatattatttttaatattttctatttttctctttcctcttcttcttcattcatttttctctactctttttatatctttcatttttcctttttttcattttcatttcttttatttatttccttcactctttttgctctattattttcctttaccttcctatttttacatcttctttttttcttcttttactttctctctcttctctctttatactctt

SEQ ID NO: 429299 - DNA, 190 bp, Oryza sativa
gtacggacaacgtggagccggagttcaacgagatcgtggaggcgagccgcgtggcgcaggaggtgaagcacccgttccgcaacctgctccagcgccggaaccggccgcagctggtgatcgccgtgctgttgcagatatctccagcagtttacgggtatcttcttcatttttgctctactcttcccgtgct

SEQ ID NO: 429300 - DNA, 184 bp, Oryza sativa
gccggaatgaccgaaggcggtcatttaatgcaattaaaataggaagaaaatattacaagaaaagttttacctcgacaggctggctgtcccggaaggatgtgcaccaggagcacacgccttgaaccatggtgccaaccgggccaaacacacgctttccagacagggaaagccaacccaaccgaac

SEQ ID NO: 429301 - DNA, 167 bp, Oryza sativa
ggtggctcgggaggcgaaaccctagccgcccgcgccgccgtatcccggccctctcctccacctcgccaccgccggagcttgctggcgtgctgccggcgagctgggaaggcggcggcgaggccagttgagctcggcggcatcctccttggcacgaggaggttggggca

SEQ ID NO: 429302 - DNA, 72 bp, Oryza sativa
gtggaactattctgtgatagaaccatcggatgcgaacttcgctgatgaagccgagggagagcgctctccttt

SEQ ID NO: 429303 - DNA, 73 bp, Oryza sativa
gctaccgccgcacgacatatgccgaggagagcgggggttgtttaacccagcggcgactatcgccagaaaggag

SEQ ID NO: 429304 - DNA, 64 bp, Oryza sativa
ggggagaatttaccaaaatgtgttaggagaaacattgtggactgttaaattacctttttctgaa

SEQ ID NO: 429305 - DNA, 232 bp, Oryza sativa
acctgccgccgccgccgcagagaaggaagagagggagagattgtcggatcgccgcccgtctccaccacgatgtcgtagatgctgatcgtgttctcgtagatgttttgttaatcatttttcattatattttaattctatttcttttgctttttatatattatttcttttttatttatcaattttagttattatttatattttacatataatttttttttatttttttatatat

SEQ ID NO: 429306 - DNA, 463 bp, Oryza sativa
aagccaagctgcaacaccagatacaggataaggggattcaacatctatcatgagaaacagcaaaagttgaaacaatttagcaacaaaacttataacttatagaagttaaggggagaacaaaacttatacggattaaacagatgcaattcagacctaagatctgcgggttggcagaaaccattcaccagaagggccagaagtcacagcacaggatgaacatatttaaacttgattcccaaccattaaacagcatgattgggattgcccttcccccaagctttcatcgcgtcctcctgcataaatgaccaaggactttaaggtcctcaattagtttcctccaatcggccacagctggggaacatcatcaccaataggtagaatgccattctacgacctgtaggtcctcatccttggatagaacaatctgggaatctaatatcagagttgggctccaagtccctgg

SEQ ID NO: 429307 - DNA, 189 bp, Oryza sativa
acctgcaaaaatctccatcccccccgcccccagagatccttcaatccactcgattcgatccaatccggcgaggtacaggatgctgccggggccttctctctccttccttctctctccctctctctctctctcctctcctttctcctcttttcctccctcccttatattttctctctccctttctcttct

SEQ ID NO: 429308 - DNA, 306 bp, Oryza sativa
  unsure (1)..(306): unsure at all n locations
gtatcaagatcaacactgcagcaactaaactcccctgtgttcttgagtgaatcactttcaacaagggccattattttcagaggagaaggcaaaaacactcttgtgaaaaattcagagaaatgcaaacgctttgtgtgaagcatcgtctccatcttgttgtngatcagtgcatgacgttagacgtttgtactcgtacaatggtcggtacgccggtctttgaggctccaagggtgtgcgttcctgagccttgggcgtagcccgcgggtcggaagcggtaaggccgccggtgtccgtccgattcaccgg

SEQ ID NO: 429309 - DNA, 492 bp, Oryza sativa
actggagacactcactcacacgatagcaagaagctagcttggttgctcacattgagctcaacaatggaggccaagggagtggtggcgatcacccttgtggtcttctttgctgtttttgtcatctctctcctttcaccttttcctttcaactcttttcctcttttcctccttctcttttctttttcctctcttttctttcttttttcctttcttcattcatttttctccttactcttctctccatcccttttaatccttcttatcccttctttttccttttttcttcctttctttctcttctctatttcttctctcttctttactctacatctttttattcttactcacttttctttttctctcttttttttatctcttactttctctttcctctctttcatttctttctttcttttttttctctcctcttatatctcttctttctctctctcttccttttttttacatatcttttttctcatttatattctt

SEQ ID NO: 429310 - DNA, 125 bp, Oryza sativa
acatactaaatatttattattttttcagtttttacacaattccgttttaaatgaatttgttcaggatacaacgaacggcatccttacacaacaaatggacccgtaaaacgcctacgcttcccata

SEQ ID NO: 429311 - DNA, 130 bp, Oryza sativa
aaataatgtaatgctcctgagatgaatttattaagttcaaaacgttgatttgaactacaggagaaaggaaagaatgatgagcaacatcccgagcctgactatataatacatacgaatacctatcaattac

SEQ ID NO: 429312 - DNA, 156 bp, Oryza sativa
  unsure (1)..(156): unsure at all n locations
gactgaatatccaggttgaatagaccaaaaggcccctacctacactggtttccaaacatggggngaattatacaagaagacaaagccaataaggggaacactttttctgatacatgccaccagggaggtagccaccacccaagatcgcccgaggtc

SEQ ID NO: 429313 - DNA, 57 bp, Oryza sativa
ggaaaaaaaatggaaaaaaaattttccaaaaaaaaacttctttttttttttttaaaa

SEQ ID NO: 429314 - DNA, 63 bp, Oryza sativa
attgataggtaaaaagaaaaaaaaacaataaagtataaatggttaaaggcctaaaccaagggg

SEQ ID NO: 429315 - DNA, 210 bp, Oryza sativa
caacagttcaccattcatatattcatgcaggcagcctgtttgtgcccttgtgcagatgcatttcatttatacaagtagaaggcactcaaatcagccaccacatgaacacacacattgttccatcattcgatcgatctacaccatgcatgcaccccggatcatgcaccttaacaaacataagagatcttacctttgaagaaagtacgtgga

SEQ ID NO: 429316 - DNA, 134 bp, Oryza sativa
attcgtgattttgacgtctcattttgggatattggaagatgatctgctctcatatggcactaccaaattccataccatgaccacacgtacatagtcacgttcaagatgccaaggttgtaaggtttacaaagcaa

SEQ ID NO: 429317 - DNA, 78 bp, Oryza sativa
agggacccttatgggggaagtttttattggatggcaaactttggaaaaaacctcttaagtggacccaatggtgttggg

SEQ ID NO: 429318 - DNA, 172 bp, Oryza sativa
ttttttttttttttttttttttttttttttttttttttttttttttttttttttttttttttttttttttttttttttttttttttttttttttttttttttttttttttttttttttttttaccctgaaaaaaaggcttttaaaaataatttttagggggaactataatac

SEQ ID NO: 429319 - DNA, 93 bp, Oryza sativa
atgttatatatttaaaatgctaaaaatttaacaaatacatgacatacaaaaagcattaaaacatataaactttttgacctcgacttttttgct

SEQ ID NO: 429320 - DNA, 57 bp, Oryza sativa
aaatagcacaaaatttataactatatcaaaactattttaacaatatagtttgaaaat

SEQ ID NO: 429321 - DNA, 66 bp, Oryza sativa
gggaagggaaaaattcccaacattattttaccccagagcctcataggaaaaggtcaaggggtaaaa

SEQ ID NO: 429322 - DNA, 431 bp, Oryza sativa
gtaattcaagacatgccgcattttattccaccacaccatcaattggcaaaaaatccacatgattccatatggctacagcggaattcaggttatttaaagctccgacttgtttgatcctcctaagaagatgcataataataagttaaagacatacaacaaatttatcctcaacatcaagcataaaacatgacgtgtctaaacttacaagataaatatcatatgagcaccaatacataataataatagtataaggaatggaggatataaacacaaagggcgcaacaggtattagtccagcactcattgaaaccgtcatacagatcggtgaattagttttgggctgaggctgcttggttcccgacaggaaatgccggcaaagttgcactattttcttggcccggagcatctgcacttgcgtgccgcataaattc

SEQ ID NO: 429323 - DNA, 88 bp, Oryza sativa
aaacacaataagaaaggtattattgcaaaattgaaaaaaatgggtactcatgtccgtagaaagatatcataaaccaaggggcaaaaag

SEQ ID NO: 429324 - DNA, 52 bp, Oryza sativa
gtcaaaataagtaaccataacgtaggtttgaagacaatataggtgtcgaata

SEQ ID NO: 429325 - DNA, 78 bp, Oryza sativa
aattgatactccacatgagcagataattcaaagatagcttcaaagtaaaggttaaaaccaccgttgataatacatggc

SEQ ID NO: 429326 - DNA, 103 bp, Oryza sativa
ttttgttatttatgtttttttttttttttttttcaccacaccatcaattggcaaataatccacatgatttccatatggctacagcggaattcatgttgtttaa

SEQ ID NO: 429327 - DNA, 80 bp, Oryza sativa
tttttttttttttttttttttttttttttttttttttttttttttttttttttttttttttttttctttttttcttattt

SEQ ID NO: 429328 - DNA, 178 bp, Oryza sativa
atcagaagaaaacaatggcactttctttacatatctgcaaactttattggaagggacataaaggaggagcagcactcgctttaagtttagttatttgagagcaaattacaaggggcatacgaaaggaaaaggagaatttacatttggcctgccggtccaaaaaatggaaaagaaaatg

SEQ ID NO: 429329 - DNA, 85 bp, Oryza sativa
ttttttttttttttttttttttttttttttttttttttttttttttttttttttttttttttttaaacaaaatttattcattttt

SEQ ID NO: 429330 - DNA, 54 bp, Oryza sativa
gtctgttatattattgtcaaaatacagttcaaaatcatagccataaaaacaata

SEQ ID NO: 429331 - DNA, 58 bp, Oryza sativa
cttattgtgctcatttgctcattacatctgcattgctccatccaagatccatattctg

SEQ ID NO: 429332 - DNA, 89 bp, Oryza sativa
aggttcaatttatttttattaccacaactttttaaggatggaattgggttacaagtacttttcaccccaaaagtacagtgctagcgaca

SEQ ID NO: 429333 - DNA, 122 bp, Oryza sativa
acattctgggaaactaataaaattattttggcaaaaacatcatttaattctttatctttatacagcccacaacacccacttgatcaaaatttagtcctactaaacccatttttccccaaccc

SEQ ID NO: 429334 - DNA, 97 bp, Oryza sativa
ggagtgaattttatttattatttcctgtgtattacactatacagtaagtgcttcaagatacatggcacatatatggactgcatttctggaaattcgc

SEQ ID NO: 429335 - DNA, 63 bp, Oryza sativa
gacactatatgaagagctatgcacgtacgccatgccacgcgttacgtcaaggcttggcatcct

SEQ ID NO: 429336 - DNA, 60 bp, Oryza sativa
cattacatgccttatttttttctacaagataaaaagaccccgggcgattttggctgtaaa

SEQ ID NO: 429337 - DNA, 188 bp, Oryza sativa
aaaaaatcattcttttgttcacataagttagattctttttttttcttttcgagaaaagaagatagatggttacacttgctgagcaactgaaatcctcagtccccttgaacgaagcagcattatttcccaagtcaagcaaattgaaaatgtcaaccattgcgctggtcttggaatagtctccgatcagt

SEQ ID NO: 429338 - DNA, 116 bp, Oryza sativa
gaaggttacacagctttagcattatttaaaaaacgatgttgcgcttgtgtaaagttaagcgcctatgaatagatcaagacttttttacacaccagggtacaacgcataagttacac

SEQ ID NO: 429339 - DNA, 89 bp, Oryza sativa
ccttaaattgtacgtgctttattttaatctactggataaaaagaaaatgggccactaaaaatcaagtaagtaaaaaatttcaagaaagg

SEQ ID NO: 429340 - DNA, 82 bp, Oryza sativa
atatacattacattctttttttttttatacgagataaaaagatagcgggtgacagtggtttaggaaactgaaatactaagaa

SEQ ID NO: 429341 - DNA, 128 bp, Oryza sativa
gagaaatgaagatagatggttacacttgctgggcaactgaaatcctaagcccgctgaacgaagcagtcagattttcccacagcaagccaaatgaaaatgctaacccactgcggctggtcttggcaatt

SEQ ID NO: 429342 - DNA, 67 bp, Oryza sativa
gttcttagttatctttactacaaaaacaagtcaatctgaaatgaataacattgctgctgatgtgtgg

SEQ ID NO: 429343 - DNA, 143 bp, Oryza sativa
ttttcagtaccaagctgcctgagccacaacaaacgacgccttcattcatcgcctccgggcgatggcaactgcaaccgaggaagcagcccgaaaacagtgatgtctccaggggaggcggcgcatgatgaggggacagggctaaa

SEQ ID NO: 429344 - DNA, 105 bp, Oryza sativa
gggaaaaaaaaaaatggggggtggggtaataaaggggggggaaaaaaattttgtgaccggttgggggataaaaaatttttggggggagatggatcgaacctaaat

SEQ ID NO: 429345 - DNA, 223 bp, Oryza sativa
acaaaacggggggagtttagatcaagaaaagaatggcaggctcggtttattttcaaggggccaaaaaaaaaaagggttttaccccttggatgcaagttttcaactattcaagctggggggccctggggtatcacccaatataaggctactgtataaaaaccgggtaaaaaaatcgatttgaggaaaaaaatgggcacttggggggtgcccaaaccccagcaag

SEQ ID NO: 429346 - DNA, 364 bp, Oryza sativa
ctctcctctccgctgtggtttcttgctggttcttggaggcatccacttggttaaatgatgggtgtaggtggttctaaattttatatataatttattttttttttatattttttatatttttatttttttatttttattattttttatttttttattttattttttttttattatttatttttttttttatctattttatttttttttaattttattatatttacatttctttttttttatttattattttttaattttatttcttttttaatttcatatatctaatttttttatttattttttattttaatttctttatttattttttatattatatatttattatctttttttatttaatatt

SEQ ID NO: 429347 - DNA, 71 bp, Oryza sativa
gaaaaaaaaaaaggtgtttttttaatttaattttttaataaaaaattggagattttttttaaatataaaaa

SEQ ID NO: 429348 - DNA, 328 bp, Oryza sativa
agaaaattgatccatgggaccatgggggcaaaatagttggggcacaaatttacatgttaaacccaaaccctaaacccatggataataaaacattggatatacctacggacatacataccccttttgatcacacccaccattgatgggacaaaggtgggtacatacatacgtacacacattttcccatacccccgtacatacatacctaattaaaaacccggaattaattaaaatcctagttgatgggatttttaaaggaacttgaggctggggaggatgtttttgtggaccggatccagggggggaacaaaccgggtttttaaggggc

SEQ ID NO: 429349 - DNA, 316 bp, Oryza sativa
gctttgctggagcagcgagcaccgtagcagcagcagcaggagcctcctggtacacactgcactacacagcgcagcagctagcgatagtgtatcgcacttactggatacgcagtcgagcatctccagcagcagcagcagcggagtgatcagcgatggagagcagcttggtcgacacagccgccgtcactctctgcctggcggcggccgtcggcgggcggtgccgtgccggcagcttcttgaactgctcgtgctccttcaaagagtacagggtgagcgcatcctacttcattgggcggtttctgagcggcgcgcggtt

SEQ ID NO: 429350 - DNA, 298 bp, Oryza sativa
gaccggaacggaagtgccgacccacgccgaccacttatgtttagacgcactataacacatggacgaacgcgagatgaccgtgatcctcgttgccgcaataattccgatcatggcgagagcgccgacacgcccatgccgtgggcgaaggaaggccactctttgcagggcgagatggtggaggatactccgacgacgcagagcagcagggcggctaatgacttccttcttggtcttagctgagctgcccgtgattctcgatcgctcgctcgctcgcacttcagttctggcggcgcgcgcg

SEQ ID NO: 429351 - DNA, 325 bp, Oryza sativa
gcagtaatagggtaatatatcatccagttacatacacaacaacaatgcatagcaaaaccttgggttctgaactatgcaaattgatctgaagaatgcaaatctttcatcacatgaaaacaagaataaagaaaacgtttacatcacaagcaaaaggctatacaagctcggatgaggctcctctgttctttcatgacaaactcttcgctgtcccaaactgacaaaggcttcagtacgtctgctatgcacactttagtgcagttcatcttcgctaaaacatcaacatttttggcaatggcatcagagagatttttcgaatgctttcggg

SEQ ID NO: 429352 - DNA, 370 bp, Oryza sativa
cagtttttataacgaaagcaaacggaatccagatctcacccaccccaccccacccacacgacgagagaccaaaacacgcgggaaaacgctcccgcgccgcgccaaacctggcctcgcgtgaaccggcggcgggcccaccgccggcgtgcgcacacgtgccaccgccaccggcgtccagccggaccgacgacgacgagggcgacgacgacgtcacggtgttggttcagtgtcagccgacgctgaccagccgggtccacttactatctgcccccaccatcgtgctgtttgcctgcctttctcttgctttgcttttttgagctcgttttctcgtgctctttttttctcctttggtgctactcttggctttcta

SEQ ID NO: 429353 - DNA, 166 bp, Oryza sativa
tttatcacatctcccccccctcctctcttcttcctgccctcccacggcgactcgccgccgccgccgacgccgacgccgatccggtctccgctccaactccggcgagattggatttgggggcggagccgatccgatcggggtccatcgcacggaggaggaggaggag

SEQ ID NO: 429354 - DNA, 349 bp, Oryza sativa
attggaaggaggctttgctgggtttccttttggtaaggccctgtttggaaggcatgaattttagtttcaaatgaaacgggtcgatttccaaaggaatttgagcattttcccgcataccaaacgagcccctaagccctaactaaaccaatgcaagaaccaacctaaaaagccaatacaccctgttaaaaggggcttggaagcagaaaacccaaattggactgaagaacaaaacaatttacccagttaaacactaccaaaatttaaagctttccactctttttttttaactggaaggaaaaaactgaaaatgcattccggaaaccatttttggacgaaaaccggtgccccc

SEQ ID NO: 429355 - DNA, 306 bp, Oryza sativa
aataagaaagaattgaattcaatagcactttacatgcaggtacacccccctctcatcatgtcccaactcaaattcatttagggcttattcggttgatctcttaagaaaatgatcggggtagataaggtatgaaattaaatccgctgaattttttcttagaggagggagggattaaccgcacaagccctgagaaaacacccacacctatcaatgtatgcacctccctggcaccctccatgagaagtagtccatgttcccggcagcaacccttttccttatacctccttccaaatcgtcggagcacat

SEQ ID NO: 429356 - DNA, 258 bp, Oryza sativa
acgaggcctccctctcgcaccgcaaccaaccaaacacgacggcgacctcctctcccccaataattcccattccttcgctctcgccgccaccccggcccgcgcgcgcaagcaaccttaccttcccatgctgctgtgatgtgtcatacgccgccgccacagagcaaccggccgtcttcttccttccttcttggtcttagctgagctgcccgtgattctcgatcgctcgctcgctcgcacttcagttctggcggcgcgcgc

SEQ ID NO: 429357 - DNA, 79 bp, Oryza sativa
ataataaattatataaaaaaaaaaatgaaaaaaggaaaaaagaaaagagtaaaaggaaagggtatagggaaaaagtgaa

SEQ ID NO: 429358 - DNA, 317 bp, Oryza sativa
ttatgttggccgccctcctttttttttttttacctaaacatatggaaaattaattaattatgaagagaggtacatacatagactctaagaaaattacaccataaataacaatggaacggcaacagcaaatggcccatggctaggggacaacagatggatcccaaataacccggtgctggccagaaccgcaatggaaaaacaaaggcgggacagcacggcagcaaagcttgaaacttgagcagaagggcggccaacccacaaaggagaatgcaacacaacaatgagcccatggaaatggaacaaaactgaaccagacc

SEQ ID NO: 429359 - DNA, 308 bp, Oryza sativa
gctttcttttgacgctttgtcttctcctcgccggcgacgagcggtttgcccctcgagctttgttgccgtccatcacgcgagggtggacggggtaattgaaaaggatcaacacgttctatgacataattactatgcacatagcatacaatttcaatctctactgaattccgcggtaagaaaagccttaattttacaacatcaatctggctatattgtaatccttgactttcttggatacgacttatttatcactggcttcttgggtctttttttatccaaacatatctactcttactccaccgtaaaaa

SEQ ID NO: 429360 - DNA, 116 bp, Oryza sativa
agaaaagggggtcctattcatgattgcccccattttattcatggattcaatttattactcgggggaaggggcattgaacttttgtgggtaaagaaaaccggttagtggccaaaaag

SEQ ID NO: 429361 - DNA, 114 bp, Oryza sativa
gggatttcatgaagggagttccggcctacactgcttcacagccagaagaggcaatgattgctctgaaacaaagggcttcagaattgggtgtttcactccaagtcgcccattctt

SEQ ID NO: 429362 - DNA, 375 bp, Oryza sativa
attttgatttggctcctaaccgtcttacttctttcaagaaccagtttcaggatcaagggtctgctcggcacttctctgacccatactactatgtatctgcacagacttccctaactgttgaatcaagcacacagatgctcacagacagaaaggagttacatttctggaatggccatagaactgtgtttggtgattcgagagaccaaccacagaattatcagattcgaacataacccatcagcgtttacctaaatgagctacttgaccgacccgtacacccacgagcgaatagacctgccacatcaatagcttctatgcgaattggaaaaatgatccagctgagaatggaagaataacctgtatgaatgatttcct

SEQ ID NO: 429363 - DNA, 533 bp, Oryza sativa
ttttgcggtctcgccctcctcgcgatcgactcccctcgccccgactcaccgccggtctcctcccctccgccacagattcctccctccctcctctttgcaattccaccatcctctttccagaggggctctcacccttgctccctcccctaaccctaatctcgcccgcgcccccaccagcttctaccgctgaccgtcgcgccgtgccgccccgcctcgccctcttcaaccgccgaccgtcccgtcgccctgcatcttgcccgcgccgccgccgtcgtgttatcccgccaccgcagaattagcatggatcaggcaaaagggttgacgtgctccagtgtaagaattgcttgagactcggttgtcaagagcgctgctttgacgactttctactcggcctttcgctttactgccaccgccgacactgccgcgttgtccgacaatatttggctcatggtagcacatgggtatggtaaatctatcccaacgaaaaatggtgttcattgatcatacctctcctctcctctttatagctttgg

SEQ ID NO: 429364 - DNA, 405 bp, Oryza sativa
gttgaaaatgatgctcgagcatgagaggtttctacttatactaaagcaaagttgtctgtcaaatcagctataaaccagcacagcatatttgttcacacgtaaaggtcatatgaacaaaggagattataacagctcgtcatatgagcagcaagtcagttcaaaagtatgacatcatgtcgtcaatgaatgaaccagtcgaggcattggtgtcgcccattgatgcttatgcacctgcaaaatgtaaccttcaccttggtagaatcgccaacttccatagttcaggcaagtatgacgtgagaaagctcacacatctcccagaagaaaaacagaaaagttgatgagagagattgggataagatgggacctttcttcttgcatagtgaaggctcatgaactgagggaaat

SEQ ID NO: 429365 - DNA, 502 bp, Oryza sativa
  unsure (1)..(502): unsure at all n locations
ggacccagaggatcagaatacaagactaggtagtacaagtacagaagaataagttgccatggagactatgcacttttcaaacatatcgaacctgacatattattgggggnacgagctaatggagnagttggcatcaaagggatnatccttagagatagntagcgtgaaaaaacccatccaaaaaaaataggggtccaaaattgggctattgtaaacgccaattggggactttaataggggggttggccttccaaaaggcacagctgtttcagtcttaaatataggtacaaaggagtagaacaattatatttacccacgatgtaaggttaaatgacagcctgtgagcttatgataacctagatagatccgacagtagggggcaaacagaacaaacgaagatgggaggtctgaagaactgattggataaaggattagataacttctgtcagagcaaaattcagcttttagatctttactggacaaccaacattattatgcacta

SEQ ID NO: 429366 - DNA, 134 bp, Oryza sativa
tatcttacttaagtgttgcggcacccagctctttcgttgttgctattctgcatctacttatcttgggattcctatcaggctagccacgtgagcaaaaacttttctgaaaatactgatgattgaggactgaatct

SEQ ID NO: 429367 - DNA, 350 bp, Oryza sativa
ctgctaaaaaaattgcattgtaggaacttggaaactttaaagccttcccaactgctttggatttacaaagggatgatacactcaggctttaacgcgcacgctggcgcacaaacgcgacacgacccgaaaaagggcgccaatctgagagccaagacaaggtcgacccgagcgacccacatggcaaagatctcatcttgccgatgaacttcctcagacttttttccggcgccgtcgggcatcggggccttggagaaatcaatctccttcgtcgccgcatgttgatgcgtggcttaactcttgaaatctcggctggattcaacgccaattttttttagctgatcattatatta

SEQ ID NO: 429368 - DNA, 90 bp, Oryza sativa
ttttaatagcacaaaccaccgagaaaacgcttctcaggtaaacattatcaccatggcggcgtttcttgcctgcgctttcttcttcgacgc

SEQ ID NO: 429369 - DNA, 329 bp, Oryza sativa
aaggcagcaatgggtactagtatcaacaagcgatcactacactttgtctcaaaatcaatacatgaccagaggtcaaatgcataggataaactggaaaaccctttggacaaaaattttttaccggacgtttacatgacctgaacaactactgactagattgcacaggaatctatttttggggggccaaatcaagaaaggataatttcatggaccaatcttggatcttcggttcattttcagagaataagaacttgaaatcgatcaggggattcattaatccataaggcctggcatcaatcatgcaatcatggggattctgcaggagcaaa

SEQ ID NO: 429370 - DNA, 273 bp, Oryza sativa
gaaagaaaaaaataaatcccagttttaaaaaaactttttttaaagtttaaaggtgacctttggggccccgggggtccccccggaaattccggcccggaccctgggggggaaccagttttccttatgggggggtttttaaaggttggggtaaaaatgggaaaaggtggttcccgggggaaaatgtttttcctataaaaattcccaaaaatttacgtggccggaaaattaaaggttaaaccctgggggcccaaaggggggggctaaccaaaatta

SEQ ID NO: 429371 - DNA, 61 bp, Oryza sativa
caaggattactcttaagcttaaaaaaatgtctgttagatgctggtattgattttttgcttg

SEQ ID NO: 429372 - DNA, 93 bp, Oryza sativa
tttttttttttttttttttttttttttttttttttttttttttttttttttttttttttttttttttttttttttaaaaatttaatccttttt

SEQ ID NO: 429373 - DNA, 372 bp, Oryza sativa
gctacaatggagtgataatgctatataatcaggtaggaaccacatgcaagaacaatctcaagaaaccctttcacagacaatagtccggcatgttttgaactcggaaaactagtattgctaaaccccctaacaaaaaaggcataagcatatgccaccgattctacccactgagaaacctgacctgactcctaataacatgcaaacggagagcatacgttaaatatatcttaaacgcaacagcatgcaaacgcacctaatatgaacatagatacccactgcttataataatcacctagtgttagccaccaccagaaccgttctatttaccgatgacgaccacctctgggttgacatctacagcagcacaccagc

SEQ ID NO: 429374 - DNA, 393 bp, Oryza sativa
gacaaaaacatcagcatcctagccatagaacaagcaatagcaaacccaatcttgtctatcttgttcccaacacatgagattccaaacaagcaaaacaatccctcccataaaacacccatggatggttttcccccgttcatgacacaaaacaggcacttacaagcctagatagagctcaagataatgtaagcctactactactgtaccaccaccaccactactactgtacacacactgcaggccttgagcagagcagaaaagaattgcatcagtacaggctgcacagaattggctgcattcttgtgcagatggagattctagaatttgtgggacaagcttctgcgtattctctatcccaggcaattttccttgccacataggactgtggtttac

SEQ ID NO: 429375 - DNA, 168 bp, Oryza sativa
  unsure (1)..(168): unsure at all n locations
cttanaatattccaatggtggtggcattgaatgggccacctcacccactccttttgtagattttacatattaccccttgaacttttaatgttacataacaactttattcttgtgggattgccacatatacaactaaattaatgtgggtatttttctataacattttga

SEQ ID NO: 429376 - DNA, 94 bp, Oryza sativa
ggctggcatggcgcgcggcggggtggcggcctagcacggttgtgtgccggcctggcgcgacaacaaaacagacattgcccttctcctcccaaat

SEQ ID NO: 429377 - DNA, 304 bp, Oryza sativa
aacattaaacttccattttttattccaactggcctcccatttttaaggcagggccccatttaaggaatccgaaaaaaatttggagtcgttgacaaccatgggaatgcctgaaaacatatttgggagcaaagtaagacaggcaagctccctgatattatatcgggttcaaaattttggggcttccaaactaaaatattttttaaacactggttgatctacctataatttccctttgaattaaggggccgggctaaaatcaacagggcccatttttttataaaggctttgccccccccccttgaaa

SEQ ID NO: 429378 - DNA, 399 bp, Oryza sativa
  unsure (1)..(399): unsure at all n locations
cttgccttctttctcatccgccattcctttgttcttttcttttcttttccttttcctctctttaacccttttcgcttcctccattcaacacattcnctntnnntttctttctttggccttttttgccctctccttttctaactctccttttcttgggccgnnctcttcttatatcccctcaatttaaccatcgagggcggccaaaaaaaagagagaaaggaagagcaaaataacacattacaccatggcgcgattcgtcatcatctccgtcgtcgccgtcgccgccttcgccgttgccgctgtcgttgagggccggcttggacctatcgacgtcgttccgaccaacctgatcaccaacccactcggtgccatttatcgacaatgggccgcaagatcacc

SEQ ID NO: 429379 - DNA, 81 bp, Oryza sativa
acgcctccccttaccgtaccggaactcccgtctcgacccaacccatccccctaattttattccaccaaaaatgccaaccta

SEQ ID NO: 429380 - DNA, 485 bp, Oryza sativa
accggacctgaattcccgatccaacccacccattttgttgtacccccatcacccggttacttctttcaagggcgagtttaagagatcgtggttctagtacactactcatgagaccgatactaccatgtctctccacagccatcactacctcatgcacaacgacaaccacaaccaccggaacgactacctgaccgttcgcgagaccaacgtggaggaggacttcaacacctgcaccggccagttcccgcgagcgcaagcagagcttcctgctcaagtccgactgatcgaacctgctgtgtgtacccttgtacgtacgtacgtatatgtgtgcccgtacgtagtcgaggtggtcatgtgatggcttaactctacgtgtatatcatgcttgcgtgatgtacctgcctacaccgagcttagctaattaccacctttttttttgtccaactgaagatcggtatgaaaaataaatttctgacctgaatata

SEQ ID NO: 429381 - DNA, 213 bp, Oryza sativa
ggtacaacctttttttcaaaaaatctgggaaaagctggaactcccttggaaaaaatttttccctggttttacttttacacattggggcctcctggggcaaggtaacaaatttcaggggggaaaacaaattccccccagtttacaaaactttgggggggggtttttccggtttttgggggttggaaaaatttgggggtgttttacaaagaattg

SEQ ID NO: 429382 - DNA, 301 bp, Oryza sativa
tgtgtcgcttgggcgcaaacgcagcagtagaagcaaccccacacgctcacaagtcacaagagcgaagaagatttccccaatttctttcttacccttgccgttgctcgttccgcgagaggcagcatccaaatccgccgaatttaatcgcgccaagaccgaattttggccatttttcattcaatttttggtccaggaaccccgaatgcgccgagttcacctcgccaagacatcaaattcgtgattttttttttttagtttgcgagttcgtgtgtttcgagctcgccggagggatcttggggtt

SEQ ID NO: 429383 - DNA, 302 bp, Oryza sativa
  unsure (1)..(302): unsure at all n locations
aggcgacactattttatagagctatcgacgtncgcatgcaccgcgtaccgtacagcttggtatgcctctattagttcggcgcgccctttttnttttttttttttgtattgaggcctacagtttgtgtattccttttcaccaaatgcagcacacatcattccctaataccattctatcacacatctgtgctttcttgtacatcataccgtgtcgcttctttctttttacattgaacaacagtggccactaattacagcttctccttgctaataaaactcgctgaagactggtagttcagtttc

SEQ ID NO: 429384 - DNA, 108 bp, Oryza sativa
tctatttttacgataggatcaagccatatgacagggaggccaagtgaactacattcagctgatcattgctcgaaaaatccttgatttagccttcttcaaaacttttct

SEQ ID NO: 429385 - DNA, 246 bp, Oryza sativa
  unsure (1)..(246): unsure at all n locations
agcgaggccctgcgcgttcccgacgccgtggagatgtcgctcgccccctcttcgccgcctcccgcacgtctcctgccaggcgaaccgagggggttctcgggacggcaattcgttgagcacctcggcggcggcggcggcggcggcgtcgccgccgccgaggtggcgngccgcggtgtccgcggcgctcgcggcggcgattgtgtccgcggcgcccggcctacgccgaatctttaaccaagtttcgaa

SEQ ID NO: 429386 - DNA, 63 bp, Oryza sativa
aaaggcgcagggaaaaaactagcttttattggtttaaaaaatgtcgggggtttaattggacag

SEQ ID NO: 429387 - DNA, 101 bp, Oryza sativa
gaccgacccacgcgtatatttactgtatagagtaagcctcggagagggagggcaggtatgtgtgctgccatgactgttccaagggaaccttgttcctatgt

SEQ ID NO: 429388 - DNA, 69 bp, Oryza sativa
gacaaaaattgcggggccagcaaactgggtcgttgttgcaacctggatacttaaatgttatgaagaaca

SEQ ID NO: 429389 - DNA, 403 bp, Oryza sativa
tcgtgctgcggtctgacaggcgcccatatgacccggagggcaagtgaactacactgagttgctcattgacggcaaactgccgtgattcagcagtctggcagagactttcccaactttggactatcacaaagctgagctgatagcgcatgcggctgcaggcgaatcgagagacattcactgcgagcgtcatgcggaccgcaggggtttcaatgtaaggccttgagcaaagatcacatgcctgatgagagatgcccagaggactcgtggcggcgggctcccttgattgagaggcacacctaagaaattgccagcattggagacactgatgacaggcggagagccatatgcagacgatgcctacattgaagcgacaacggaggcaccgcgctgatcgcggcaccta

SEQ ID NO: 429390 - DNA, 571 bp, Oryza sativa
ttttctatgaggagaaagaaaccacctgatcgagcccgtatctttgcagccgcaggagaggaggacgagtcgttcgttgtgcagtaggaggcggctgctaatatgttttttgtatactttccttttatcattactctgttgtgtgagtatcttggctttctctttatttttctttttattgtttggtcttatttttttctttttttttacttttttctttctttcttttattttttttctttttttgtcttttttctatctttttttatttcttcttttttttaatttatttttattttttttctttttattttttttttctctatctttctttcttcttttttttttctatctttttctttttatctttttctttttattttctcgtcttttttatttctttctttttcttttcttttttttttctctttttttttctatctttttttttttttttcttttttattttttctttctttttatttttttttttctttttctcttattttttttttttttattctttttcttctttttttttttttttttcttccttttttattttcttttc

SEQ ID NO: 429391 - DNA, 304 bp, Oryza sativa
tctttatataccactcgtttcctccacaaagagggagggaacaagggaagggtgtcgtccgccccccaccccgatctgcctccgccgctccgctcctccgcgcctgcgaaatctaccaacgctaactcagtaagatgggtgccggcggcaggatgacggagaaggagcgggaggagcagcataagctgctccggcttcatgtccttctctcccctctgtcactggaagttcagctacttcaagatcatggactccatgactccttacttctccccccttactccctacttccatcatcttcctt

SEQ ID NO: 429392 - DNA, 192 bp, Oryza sativa
tcttcttagaccactcgtttcctccacaaagagggagggaacaagggaagggtgtcgtccgccccccaccccgatctgcctccgccgctccgctcctccgcgcctgcgaaatctaccaacgctaactcagcaagatgggtgccggcggcaggatgacggagaaggagcgggaggagcagcagaagctgctcg

SEQ ID NO: 429393 - DNA, 100 bp, Oryza sativa
cggacgcgtgggctacagtaaaattcccctttctcgacccctcttcctcctcgattccggcggccttgtcgccggtgacgggagggagagatttattatt

SEQ ID NO: 429394 - DNA, 189 bp, Oryza sativa
gcatagaccactcgtttcctccacaaagagggagggaacaagggaagggtgtcgcccgccccccaccccgatctgcctccgccgctccgctcctccgcgcctgcgaaatctaccaacgctaactcagcaagatgggtgccggcggcaggatgacggagaaggagcgggaggagcagcagaagctgctcg

SEQ ID NO: 429395 - DNA, 114 bp, Oryza sativa
atgcgttgtaactaatcaaagagcttgtggaattggtggagagatgtattactgatgctacggtttaattttaattaatattttttatattatcttattttttttaattatttt

SEQ ID NO: 429396 - DNA, 134 bp, Oryza sativa
aataaagattttttaaatttaaggaaaaaaatgttatatattatttatttggggaaaattgggagggtataaatattgaaaaaaaaaagaatgaggaggtaaaagggggaaatgtggggggggtttaaaggggg

SEQ ID NO: 429397 - DNA, 214 bp, Oryza sativa
ttatataaaaaaaaaagaaccattaaacctacaaggagcagtattaaaacacacaaggggtcccaatccacgcaaaagagttcagattcccttttgggcattgttcctgggcttcgatggttacccacgctcggtcttcctcgagctcgggacctatccgggatgcttcctggtgataggcgccgatttttcccagggttcttcctttcatgcc

SEQ ID NO: 429398 - DNA, 280 bp, Oryza sativa
acaggagcaagtgaactctgcatttccgaatagaatgtaatgtcaatacagtgcaaaagggatgcccaggatcaattcatcacacgacacaaaggggggactacaatgggatagttcaacaaaagccttaacgccattccacattccacccacatgggccggttttttgattcatggcaggataggataggatctgttttttttgaaaatggcgacaaatattccttccagaaccgaaaactaaaaaagctttatttttttgggtcagggcacacatgat

SEQ ID NO: 429399 - DNA, 232 bp, Oryza sativa
  unsure (1)..(232): unsure at all n locations
aggttaagatattcctcgcttaaatncctgatgtggtattaattatccttaacancttatnntatgggcctnnttgagatttaataggataangtttgggccttagccccaattatttctaaccaccttattgacttatgtccttacctgannaggaataccattttaatcttttaacacccacgttcccttaaattttcctttggccagttttggcaccttgaaaaagatg

SEQ ID NO: 429400 - DNA, 96 bp, Oryza sativa
tattattttgctgttttagggtcaggatttctcaagctggatgcttgtgcaaggaaggacactaaaaaaattgcccacactgtgaaggaatgggca

SEQ ID NO: 429401 - DNA, 480 bp, Oryza sativa
ttttgttgtcaggcctagctcctgctagaatccacccgggatgattaagtaccatcgtcgccatgactgcaatggaccatactgacacgtgaaaaggaagagctttctaggcggttcttacacacctttgcagcaggtgttcatcatacagatgtgttctttcctcttaagtcgatatttgacccaaaactgtcccatttggatataggacacttggctttctccttccatctctttttctcttctatattcctttctgaatgagatgagagttggtgtttcgcggatgcacaaatgctccttagccgttgcacatatatttggcgttgcctcggttttgttcatcctgtccagccgattgtattgtctccttctggatctcaagctcgaactaccattgcctgaacgaatttacttgttagcgctgagaaggtccaaaatttcgattggtgtccttccgaccacacaacagcttgacta

SEQ ID NO: 429402 - DNA, 90 bp, Oryza sativa
gagaggaaaaaacgagggatgtatttaaaagtctaaaagattctgagtgaaatgcattgggaagcaatatgttaaaggaaatagattaat

SEQ ID NO: 429403 - DNA, 114 bp, Oryza sativa
tcgtgttgtcagtcctagctccaggtagaatccgtggttgttgatccaccaccacggagcgcatgtgcggattggtacagattacaggggaattaagctgttcttttatgccga

SEQ ID NO: 429404 - DNA, 67 bp, Oryza sativa
gatgtgagaattatagtttataacgatgatgtgggtgtgcgtattacatttaatagtgaatgaacat

SEQ ID NO: 429405 - DNA, 116 bp, Oryza sativa
ttttttttttttttttttttttttttttttttttttttttttttttttttttttttttttttttttttttttttttttttttttttttttttttttttttttttttttttttgggg

SEQ ID NO: 429406 - DNA, 148 bp, Oryza sativa
tttttttttttttttttttttttttttttttttttttttttttttttttttttttttttttttttttttttttttttttttttttttttttttttttttttttttttttttattttttttttttttttttttttttttttattatatt

SEQ ID NO: 429407 - DNA, 77 bp, Oryza sativa
accaaaaatttaaaggccaacgcccttaatctttaaaaattaaaagggggtgttttaaaaaacagggtggaaatttt

SEQ ID NO: 429408 - DNA, 373 bp, Oryza sativa
gcgttatgtgcgacggcggcgtgtcgtgcctggtggtccgcatcctggatgatcagggacgaaaccatttactggagatcacgctgcccatgaactacccttcaagtcctccttgccttgtggcagatgttccttatctaccagaattacagtggtcaaaaggctcaagactaaaagatgttgtctgccagttccaagagcacctgaagatattgcaagattactggtctataatggatgacattgataagggcctttgggttgttgatccaacaaagccaacctttgctatgtctcatcgccggatagctttaggtgatgacttgtttcttttactacatggtaaatgtgcgaaagcccaaatcattaccag

SEQ ID NO: 429409 - DNA, 295 bp, Oryza sativa
  unsure (1)..(295): unsure at all n locations
gatcaaatatccaccacatcaatgactaaatcacattatgcgaacaagtcactcaacagagaagtgaaaaccttgaccacacatcatcgagcaactaaancctacacaaacaacgttacacaacgaaacgcatttccaagtcttgggacgggattggaacggatcacttcatcaaaagcttacctcaatcgaaaacgcattactcatcaaaaacttgcacagttaaaaatgggacgagatgttactttttgacatagccatatggtttcgcccattacaaggccgcttctgcagt

SEQ ID NO: 429410 - DNA, 319 bp, Oryza sativa
aagagttgtacctgtcacattggttgatatgggagtactaatataaaacatactccatattgggcttgcagaaattcttctacttcaaaaattcaaatttagaatttgcaaatagttcaaagaggaaaccatcatacatgctaatttgaagtaattattcaactagctattggtctcagatagggatctcttgaatgcaactcgatggttcaggttaccccatccttgttccctttctatcctcaaaccacttaacaatggtccttccgtggaaggcctttgtcacttgaaactatgctgctgaatcatttggatttgt

SEQ ID NO: 429411 - DNA, 415 bp, Oryza sativa
gaataaattgatgaaatcaaacggccagagctgaaaaactggcaacttaagaggctggctcgtgctctcaaaataggtcgccgtaaaactagtataaagaatcttgcaggggaactaggcctggataggactttggtcattgaattgctccgaaatccacctccaaaacttctattcatgtctgattctttgcctgatgaagacccttctaaacctgaaatcaaggaaatagagccctctccagtagttgataacgctgatgtcactgaaaccaagccacagacggaacttcctgttcatgtcatgtgcgcagaatggtcttcacagaaaagattaaaaaaggtgcaactggagacattagaaagagtctactcccgaaccaaacgccctacaaatacaatgatcagcagcatag

SEQ ID NO: 429412 - DNA, 377 bp, Oryza sativa
ttttataaatttttagttccatccaaacagcccgtgagggtgacttttttttacagccatgcaatgatttagattaaacattaaataagatcatgtcacagttgttttattgtttagaaaatgaaaggtggcccaaactgccactaactccccttttttttttgttgatatccttcaggaaaaaccccatgttagtttgaagatttgaacttagacatatgtataattggtgaaaaaaaaaaattctagaagaaacttctataccggggccaaaacttcgtagatattcttactttcatggacgtatgtgtgcaagtcaactaactatttatgtgtgctactatgcacaaatgcagtgtgaaggaaactattgagag

SEQ ID NO: 429413 - DNA, 94 bp, Oryza sativa
ggcctgtaaaaaaataaaaaggattttttatatataaaggaggaccacattaaaaaatttttggtgcggtttaaacaacggggggattactact

SEQ ID NO: 429414 - DNA, 319 bp, Oryza sativa
tactcttcctgatatgatgacctattgtagtgggagggacgtaactagtccctgggatgtggtagaccttgctgtgcttcactgcataggtgtatattgcccagctaccgatggaacagtacctgccattggcacagctgctggccacttcagccgtagaggcccatgggttgctactgcattcgcttaaacactctgggaggctaccgggaacactctgtctgctgctgaaggattgcattaaccatggacgtcgggaacggttagctcaggttatttggctaacatccgtccgctgtatccgccttagctcactgca

SEQ ID NO: 429415 - DNA, 416 bp, Oryza sativa
gacttggtcggacttggtccttcttgcggttcttgccgcgggagctcttcttggccttgtccttcttctccggggcggcgccgccgtcggcggccgtgcagtccatggaggaggtggcggcggagcccctggagcggtgccgcctcgaccggcgggagtcgggcgacggcggggagtcgccggcggtgatgtccatgctgccgctggcctcgcttctggtttcactgaaggatgtgtctcctaggcttcctccgtctaccacgatttcttgagaagcccatggattagctgcagcagagccccctctgtcgctcctaaatgaggctgagtccagtggcgccgaatggtaatccttcatccagctaggtgctcctgcagtattattattggtgttgggggacactaggccccatccc

SEQ ID NO: 429416 - DNA, 176 bp, Oryza sativa
  unsure (1)..(176): unsure at all n locations
agttcctcgcatcaggttctttttctaggagttctttcttttcattggtggtttgctattgtggattataatgctaggaaacattttttctcaaagatttttggttttaccttgaaaaatttgtagaggtttatgngcacaacagattggaagtagtcgagggtagcttcagtttg

SEQ ID NO: 429417 - DNA, 97 bp, Oryza sativa
gatttacttggtttctgtctctatttactactacttcttgaaccttaagaagggcacgctccggtacgccgtcatccgcgacgagccgttgtgtgat

SEQ ID NO: 429418 - DNA, 496 bp, Oryza sativa
gtgttcctggatgtgatagcctattttggttagaggaatgacactggggttggtatttggcataccttgcatgtctactgcacctatgtatatattggcgagctagccatggaagagtacatgccattggcacagttggtgggcacttcagctgttgaggccgatgggttgctactgaacttgcttaattactttgggaggctacatgctacactctgtcatgctgtgaaggatttcattaaccttggacgtcgggcacgattagctcaggttattcggctaagattcgtccgccgtatccgccttagttcactgcatcatataggtcgtctggttgcttgtcaatgtcacagttcatcacaagtgggaagaatgggatagctttgtaacgcagggaatatctttgttggcatactaaatatgagcagcgccatattcgtcttcaggctgatgccaattgcgtagatgtggacagattaccataacccagtgacat

SEQ ID NO: 429419 - DNA, 96 bp, Oryza sativa
ttttttttttttttttttttttttttttttttttttttttttttttttttttttttttttttttttttttttttttaatttttttttttttattat

SEQ ID NO: 429420 - DNA, 541 bp, Oryza sativa
gacatcacttaggaagcatcgctcattctttggactgggcatgtttcacatcgtgttcttgaaagaagtcgcccattctttgactgttaaagcaagagtttctcgttgatattctaatacctgaacacaggaatacatcatacagatgttgaatgccccttcactccagatttgaccaaatactgtcgcatctggatataggacacttggaagttgcgtgtcgtttctttttcttttttattttctcttgagatgagatgagaagtggtgttcgtggatgcacaaatgctccttagtcgttgtacatatatttggcgttgcctcggttttgttcatcctgtacagtgtatgtatgtcgcctcctggatctcaggctcgaatttgtattgtctgaacgatgttactgctagtgctgagatggtccaaaatttgcatttggtgttcttcggacgacatacagtttgactattaatgctgaatctgcttgcttcagaaaaactaccatatatatctatcatattttccttttttttctcttttt

SEQ ID NO: 429421 - DNA, 299 bp, Oryza sativa
gcaaaaacgggttttattattgttacacagagcagaccctggctgtttcgcgacaaagggaaagcacaagacaaaataaatctgacaatccaatgaggaatactcttattcagctataatgacgttctaacactataattttttttcgttgttgttttgtacacacctgtggcttctacaattctgaatctttctaactgttaaattcacaaagttgcagccgagcaattgaatgtctttctacagagttgttcgctcattctttttgtaacaccatttggttagaaagagattgggag

SEQ ID NO: 429422 - DNA, 61 bp, Oryza sativa
ctagggtaagccctttaaaaaataaatctttcaatacaatgatgaatactattataaaagg

SEQ ID NO: 429423 - DNA, 92 bp, Oryza sativa
ttttttttttttttttttttttttttttttttttttttttttttttttttttttttttttttttttttttttttttttgttttttaaaattt

SEQ ID NO: 429424 - DNA, 691 bp, Oryza sativa
gcacgcacacggaagcaaggaagcaccattattgagccggaccaaaaaaaaaaaggggggggataaaaaaaaaaaaagaggaaaaaaaaaaaaaaaaaaaaaaaaaaaaaaagacaaaaaccaaaacaaaaaaccaaaaaaaaaaaaaaaagaaaagcaaaaaaaaacaaaaaaaaaaaaaagacaaaaaaaaaacaaaaaaaaaacaaaaaagaaaaaaaccaaaaaaaaaaaaaagacaagagagaaaaaacaaacccaaaaaaaaggaggaaaaaaaaaaaccaacaaaaaaaaaaaaaggacacccaaaaaaaaaaaaaacccccaaaaaaaaagggaaaaaaaaaaaaaaaacaaaaaaaaaaaaaaacggaaaaaaaaaaaaaaacagggaaaaaaaacaaaagactcgacaaaaaaccaaaaagaaaaaaaaaaaaaaactagaaaaagggaggaacacaaaaaaaagaagaaaagaacaaaaacaaagcctaaaaaaaaaaaaaaagggggaaaaccccacaaaggcaacaaaaaaaaaaaagtcaaagaaaagggaaaaaaaaaaaaacccggggggggggaaaaaaaaaaacataaaaaaaaagggaaaaaggaaacacaaaagaagaaaaaaaaacaaaaaaaaaaaaagcggaaaccaaaaaaaaacacggaaaaacaa

SEQ ID NO: 429425 - DNA, 72 bp, Oryza sativa
ttttttgttttttttttttttttttttttttttttttttttttttttttttttttttttttttttttttaag

SEQ ID NO: 429426 - DNA, 164 bp, Oryza sativa
tttttttttttttttttttttttttttttttttttttttttttttttttttttttttttttttttttaaaaaaaaaaaaaaaatactctaaaataaaaaagaaaaaaaagcccgccgtatggttttttttaagcaaaaaaaagaaataggtaatcccaatttat

SEQ ID NO: 429427 - DNA, 70 bp, Oryza sativa
cacgtaggatagcacgtcgtacggtaagcttaggactcctttttgtagcggccgctcctttttatttttt

SEQ ID NO: 429428 - DNA, 101 bp, Oryza sativa
cacgcacacgtacgcaagctagcaacttatttgagcggccgaccataattttgggggggagaataaaactggcatcagcagagacatatccataggcataa

SEQ ID NO: 429429 - DNA, 82 bp, Oryza sativa
gaaagaatgaagcttgactaaagagatgggcaaaaaaacctgggaaggggcaaagtttttggatctattaaaagaccaaggg

SEQ ID NO: 429430 - DNA, 210 bp, Oryza sativa
  unsure (1)..(210): unsure at all n locations
tacctttttttttttacaaatacaactcatacatcaccacaattcacgaagaacaagttacaagggaggggatagaaaggtacatgagcagtttctgcactacagattggccatncttttttttccctgttgaaaaatcctatactgtactgagtaaccacaaacaaccgtcagggactacaaggtctttatttcacacctttttgtaaa

SEQ ID NO: 429431 - DNA, 79 bp, Oryza sativa
aaaaaatgtaaaacttcatttaatggacccgggtgaagggggaaaaggcggaaaaaacccctcttttttttatttggtt

SEQ ID NO: 429432 - DNA, 310 bp, Oryza sativa
  unsure (1)..(310): unsure at all n locations
aatcaaatggagagtatatcttttcttttattcccatatcaaatggtacaaatattaaactggctaagaacataacttcgaatccgtattaaccaagagtaaagaaacaaataaatacaaacaaaataccgcctcttacaacaacatcatttttcaccagcatgtgtttccccttccctattagaatgaaggccctttcacttcagcctcaacaagccagccaggctttcaaggtaaccaanaagtaaaaaaaagccttcatcacncttcattttgcttcagtttcattggcaggtcccttcctttcatg

SEQ ID NO: 429433 - DNA, 95 bp, Oryza sativa
ctaccttttctactaccgttttcaaaaaaaaaaaaaaaaaaaaaaaaaaaaaaaaaaaaaaaaaaaaaaggggcggccgttcgcgatctagcggt

SEQ ID NO: 429434 - DNA, 159 bp, Oryza sativa
ttttttttttttttttttttttttttttttttttttttttttttttttttttttttttttttttttttttttttttttttttttttttttttttttttttttttttttttttttttttttttgggggtaaaattttttttccaaaaaaaaactttttat

SEQ ID NO: 429435 - DNA, 213 bp, Oryza sativa
aaaagagaccggttttagtcctttttttttccacttgtcatttgcaaagtttctatcaacaaaagggtttaagcatagaagaaggggacaaaaaaacaatacgatatcctgcagccatgtcgattgttttcgcacctatcacccactcgagtcgctaaagccaactttgagttttgtgcatgcatgtacattacgacagatgggtttgccttt

SEQ ID NO: 429436 - DNA, 430 bp, Oryza sativa
cagcgtacatcctggtccttcaggcttcaataaatcataaaaaagagcatggaacatgctttgtttgtagtttatcccacacaagaatctaattctcgatgttctctttacactacactactacagcaaccaccttttacacgttaccgtgccaaacaaaggtcaaacgattatcttttttttaaaaaaaaaggggagaaataagtaataaatgaaaaggttaaaggtataagataaaccttgtaccggtgtaatcctttattcttgcctaaactcgttcttaactacttacttttacctcccaaaaacttgctaccttttaagctgaacccagatccctgtccactaattcaaggaatttagtctttttttttacctggcccattgtttttgttgccaaccttacaaccgcatagtgcggcctttacgc

SEQ ID NO: 429437 - DNA, 131 bp, Oryza sativa
agaaaaaaaaaccggggtttatcaaaagaaattttcccgggaaaaaagaggcttaaaatttaaaggggtttttcagcattttacaaacttacaagagggggcaaattatacaaggcccaacctatttttaa

SEQ ID NO: 429438 - DNA, 124 bp, Oryza sativa
ttttttttttttttttttttttttttttttttttttttttttttttttttttttttttttttttttgtttttttttatttttttttttttttttttttttttttttttgttttttttttttttt

SEQ ID NO: 429439 - DNA, 250 bp, Oryza sativa
gaataaaagctagggcatgcataatgggcactcttaccagacgcctcaatgttcagacagactaatcattcaagttctcaaagaatgggcacaagatagctcaggacaatgttttccatctatcagatcatccctttttgtacagttttaccaagaattacatttcacaaacagcaaatgaccactttaaaagaactatctccaaaaatgggcttcacacaataaggttgtttgaagtccatgggaaacc

SEQ ID NO: 429440 - DNA, 71 bp, Oryza sativa
  unsure (1)..(71): unsure at all n locations
ngcggtaccagcctttccctatagatgaggtcgtcattgagagccttgggcgttaattcatggatcattag

SEQ ID NO: 429441 - DNA, 61 bp, Oryza sativa
tttttttttttttttttttttttttttttttttttttttttatattatttttttttttttt

SEQ ID NO: 429442 - DNA, 154 bp, Oryza sativa
gctatcacgctccatgcacgcagctacgtacgtcttggtatcctcttttgttggccgcccttctttttttttttttaaaaaataactgatgcaggtttggaaatgtttttgagcagactcgaacgcagggtatttcatgtagagtacttctaag

SEQ ID NO: 429443 - DNA, 70 bp, Oryza sativa
tttttttttttttttttttttttgtttttttttttattttttttttttttttttcttgctttgttttttt

SEQ ID NO: 429444 - DNA, 213 bp, Oryza sativa
caattagaagatatactcagcaataaatagaatagatctataaaacctgaaacactttctcgaatggcttccaatgaccatcatctcttcacttggtaaacttccaaaaccaggcaaaataatgccaaggaatttccccgtgggaagtggaaaacaaaaattaaaaacttagggaaagccaatgttccccagcccttaggctccaaaaagtag

SEQ ID NO: 429445 - DNA, 176 bp, Oryza sativa
ggaaaacacatcaactttattaagcaggaacagtatctagggaataaaccccattacattatccaagcaaaagagcccatccttaagaaaggcagagttaaactgaacttacgaaaagcaaaccttccttgaaataaccctaaccatcaataaccagaaaaaaagggagccaagtt

SEQ ID NO: 429446 - DNA, 113 bp, Oryza sativa
ggatgtactagcgcatgcgaatatatatggtttgcttcattatttcatacagcaggtaaacaaccgaggtaattccacaccaaaagaacaaacaggttttacgacatagactg

SEQ ID NO: 429447 - DNA, 70 bp, Oryza sativa
gagaagctgattcataatttggcatgtcaatttcacataccagatcagaaggaggataacttgagctaga

SEQ ID NO: 429448 - DNA, 195 bp, Oryza sativa
ttttgttgtaaaggcagaagtagagatttttcttctttttttttttcatttcagaatatacaattggccaatggtgggggattcgaagactacccaaaacccattaatttccccctcaatttacaaccctttcaaaaaaatttagtgaaattttaacggttagtaaaagaagcatttcttctggatggccataat

SEQ ID NO: 429449 - DNA, 73 bp, Oryza sativa
gacttctagagaattggatttataaatgctaacaagaagaatgggccagtgccaggcaaccataaggcaggtt

SEQ ID NO: 429450 - DNA, 89 bp, Oryza sativa
ttttttttttttttttttttttttttttttttttttttttttttttttttttttttttttttttttttttttttttttttttatttttt

SEQ ID NO: 429451 - DNA, 51 bp, Oryza sativa
aaacccttaaagggaccatactatgccagggaaattcacatgaagctaaac

SEQ ID NO: 429452 - DNA, 130 bp, Oryza sativa
gactcctagagaattggagaaatgaatgctgacaggaagaatgtagtcgggcaaggcaaacataaagaaggtcacatgcaagaaacaatatgctaaaagtcacatggtggaaaaaccattcaagaattga

SEQ ID NO: 429453 - DNA, 143 bp, Oryza sativa
actatacgaattacagctgccactcgattcaaaggatacttgaaactgataatgaaaagcattaacaagtatctcatgaccatccagtgtaacataaaatcgatgaaggttttgatcgtcactttcatccacaggttagcata

SEQ ID NO: 429454 - DNA, 428 bp, Oryza sativa
  unsure (1)..(428): unsure at all n locations
acacactctaaccagctactctcacttgcttttgcctgcacacaatatctttgggtacaaaccggagaagcaaaggttatactatgaggcatacatcaggaagcaagttgctccagccaaccgaaattgcaaccatctttttagccatggtacaacagggtcgaggctcaacaaaaatctttcccagnccagtcaacccgagggatttttccgattgctgttagctcaaccttgacctggngccagttgctagcacccattcaaacacatggccctcttccttgggctttttgctgcaaactttttgagcaccaaacaaatggtattggtcaatttagcttaaggccagcaaccaacccaccatccaaaagcttgatatttttcagctgactttgcatatcatttacaatcccccaaatcatttctgc

SEQ ID NO: 429455 - DNA, 79 bp, Oryza sativa
gtgttctcttcagccggtgcaattcttctccagctccagtgggctggcgccccttctgcatcttcgatgtggatgggtt

SEQ ID NO: 429456 - DNA, 54 bp, Oryza sativa
ttttgggtgttacacaaaaacacaatacgaattatacgatgtaagacgttacgt

SEQ ID NO: 429457 - DNA, 437 bp, Oryza sativa
gacttcttgagaattggataaatgaatgctcacaagaagaatgtagttgtgcaatacaatcataaagaaggtcacatgcaagaaacaatatgctaaaagtacatgtggaaaaccatcaagattgaaatcaatgactgaataggttatcgaatcggttgaaaaacgactgaaaacacttaataacagtaccagttagcacttttcgcccacaaattcttcttcagtttcgattttgtcggtcaacttcagttcctaacaaggcaaacaacaaaccaattaagataaccgaggtagcctaggtaagtaaaacaagtattagattcatttcaactttctgaggcaattgcaaggattaaatagaaagcatatgaattaggtacgggaagggtaaaaggactgcatttgcctccattgccgaatcaaatcttcattgtcat

SEQ ID NO: 429458 - DNA, 85 bp, Oryza sativa
actcaagctggtaatcagttatacttactgctagttcagtaagaaacacagttagtatcacgctcatacagtttcttgtccacat

SEQ ID NO: 429459 - DNA, 57 bp, Oryza sativa
ttttttttttttttttttttttttttttttttttttttttttttttttttttttttt

SEQ ID NO: 429460 - DNA, 218 bp, Oryza sativa
caacagatgaaggtgtgctttatatttgattgaaatacaaagtatatctcaaaagaattacaaaagattcattgccttgtacaattgtagagattcaccatgttaacaagtacaacgtcaatctaaacgtacgatctaacagcttgcaaggtctccaaagcaattttggtattattttatttcctttttccaccctgtcattttggggaaccatttat

SEQ ID NO: 429461 - DNA, 100 bp, Oryza sativa
ttttttttttttttttttttttttttttttttttttttttttttttttttttttttttttttttttgtttattttttttttttttatttttaaatatttt

SEQ ID NO: 429462 - DNA, 114 bp, Oryza sativa
tttttttttttttttttttttttttttttttttttttttttttttttttttttttttttttttattttttttttttaattttttttttatattaatttttttttttattatttt

SEQ ID NO: 429463 - DNA, 491 bp, Oryza sativa
  unsure (1)..(491): unsure at all n locations
agtaccagctacgccattgtagggaccatatgaagccgggaaaatccagctgaagttaaacgaccgacaacatgtataacaaacaacaaatggaatcagcttttatcgcttgttggtgagngaatcaaccgtccatctttgtcatgtttgaaattttcacgacaattgcattgtgataatttgtcaccacttcccttcgggaaaaatgccagtcttctgttcaggctttccgagccttgcttgcccttcaggtttccttccttcaaatctttcacgnnnagtgaaacagccatcccctcatttcgggaaaccacattccccacagcccccattcaactagcctaaaaattccagaaacttccaaatttcatccaatctattttcttggttccctgaaattctccaggaatcctttgcaacaaccaaattgcctttcaaccaagcggtttgcccaaatgccccgagaacaattgcaagttacaaccacctac

SEQ ID NO: 429464 - DNA, 91 bp, Oryza sativa
tttttgttttaataagtaataaaggagaacccaatgcatacaaaaattaacgacgaataacaaataatacagggaaggacgacttgaggac

SEQ ID NO: 429465 - DNA, 108 bp, Oryza sativa
ttttttttttttttttttttttttttttttttttttttttttttttttttttttttttttttgttttagttttttttatattctttttttaacttttgtttcaggttt

SEQ ID NO: 429466 - DNA, 162 bp, Oryza sativa
ataatgaacatttttaaaaattcatattcaaactggacgaacctatacacgtccattcaagacattattacaaaatgttcaaacatactactatcagataaccgcaaaaagaatttaaacataactgagaggtccagcacagatgtcgtaccgctggctgag

SEQ ID NO: 429467 - DNA, 96 bp, Oryza sativa
ataatgcttatgcatgtgcatttgtacttgaacaggtaaatattactgaaaaactgaaaagaagagcagcaggactgaacagaaaacaattcccgt

SEQ ID NO: 429468 - DNA, 77 bp, Oryza sativa
attgtgactaactaatcagcaaagaatttacattgagataaagtgcaacggatactgccacaggacctactgggcaa

SEQ ID NO: 429469 - DNA, 124 bp, Oryza sativa
gaggtggttatttttttatttatttatatatgtatgcatgacaagaaaactgagagaaatgcagtagtggttagtacacccacagaaacactatgtcatggttgacaagacctcaaggaggatg

SEQ ID NO: 429470 - DNA, 63 bp, Oryza sativa
gaaacgtgtgtgtttttcaatactggctagtacaccaacagaaacactatgtggatgtttgcc

SEQ ID NO: 429471 - DNA, 247 bp, Oryza sativa
agtcaaactaaaatattgattttttaagcttggttaaataacggttacataagcaacaagtgtcaaataagtgaatgatagaaaaactcaaagattatttaactaggaacctaaattgggaaacaaacactaactacacatctgaatagcaatgcaacaggttagtgccatacaggatacattgaaagtaagctttaaacagaaatacgccaattgtcaggggtcatcactatacactgtgactcag

SEQ ID NO: 429472 - DNA, 135 bp, Oryza sativa
gggccaaaacatccttaaaccaattttaaaagtttgttggggaatcccacagttgggccccatttgaaaaaaatcaaacttgccctaacttgggttccacaccacacaaagagaacctggggggctcccaaaggg

SEQ ID NO: 429473 - DNA, 78 bp, Oryza sativa
aaaattccctttttaagaattttaaaaaaaccaggccccaattgggtttttttaccccacctttttccttggttcttt

SEQ ID NO: 429474 - DNA, 74 bp, Oryza sativa
  unsure (1)..(74): unsure at all n locations
tagttgtgcccgcccttcttttntnntttttttttttgttgttttttattttctttatttttttttttttattt

SEQ ID NO: 429475 - DNA, 72 bp, Oryza sativa
gagcaaagtttcataacagggtattaatgttaaggggtgcatcaacccaaatccaacacatttgcaggttga

SEQ ID NO: 429476 - DNA, 83 bp, Oryza sativa
aattggcaatgttttgtttttataaatttacaccagtcctctatgctcgtaagatgtaccagacgtacacccaaattaccttg

SEQ ID NO: 429477 - DNA, 74 bp, Oryza sativa
gtcagatataaatttggagatttattaactcccggggcttgttacaaggatgagcaacggtgggtgacagctca

SEQ ID NO: 429478 - DNA, 361 bp, Oryza sativa
  unsure (1)..(361): unsure at all n locations
aatctgtgtcaacttgagacggtattggattatgcattgcttttaatgaatttatcatgctcatgtccactggccaggattggaccgttctgttgccagcctgccatcaaacacaagggtcttcgttcactcgcttcccaaaatataagccacgctaacactagnattaaaacatgggaaaaatgccatgnagccgttccacgcattaacaattattccctccggtcaaagatttcattgtcaaggatttccaaaggctacctggaacattaccgaaacctctttctttacaaatgcccattnacttcaaccaggatcgaggtttcaaaaggaaccccgaatctttcaaattaacagttac

SEQ ID NO: 429479 - DNA, 73 bp, Oryza sativa
gggggtcctggttgggtgcaggattagagttcgccacttgatatagcgtgcctgaagtttgggcagcagtcct

SEQ ID NO: 429480 - DNA, 167 bp, Oryza sativa
aattgtcgaatctaatattggcaaattgttaaatttcccggccgaatttaaggtcgatccattttgctttaatgattacagtcagccactgtgctaccctacaaaatcaagttgtgtcctacaatggacatatacattgggtatccgtttggagctctaatgcaaaa

SEQ ID NO: 429481 - DNA, 226 bp, Oryza sativa
aaaatggagaatgtgcaagacgcaaattcgtagcaatagacagagttattccatgtaaacagaccacatgcatataatacagaccattcaaaagattggttaatagtaaaaaatacaagtttcgttgaatgggcgataatactttaaaggctaccctccaaattagccgtgtagccatttgggttagccaaaaccaagccatattaacctttagggaccaaaccat

SEQ ID NO: 429482 - DNA, 58 bp, Oryza sativa
tttttttggttttttttttttttttttttttttttttttttttttttttttttttttt

SEQ ID NO: 429483 - DNA, 56 bp, Oryza sativa
aaattaaaaagcaatttaatagggaaaggcatattgtattaaagattaaagttagt

SEQ ID NO: 429484 - DNA, 107 bp, Oryza sativa
gtcattccattctacgtttaattgttgcgatatgaaccccacaggcgtttttcaacactgagccatggtccggagcccacttaatgtcagccaagccgcaccagaca

SEQ ID NO: 429485 - DNA, 170 bp, Oryza sativa
gagctagtctcggtacgtatgcaatccctgacgtacagctggtagcctcttttttggccgccctcctttttttttttttttttttgttattccattcgacatttaattattccgacatgaacaccaaaggcgtttttcaacactgaggcattgtcggaagcccacttaat

SEQ ID NO: 429486 - DNA, 54 bp, Oryza sativa
atgtagataaagaactttatacatataaattgccataaataaagagacaggttc

SEQ ID NO: 429487 - DNA, 412 bp, Oryza sativa
  unsure (1)..(412): unsure at all n locations
acaatattgaaaaaaatattttcaaatattgataacaatgttacaaatgcagcatgcatgcgatatccatgcgcatcacgcacttattacatatatatcatgggnaattatccaaaatataaataaaaaaaattttagtggtaaggggatatatagcctaagattgaagggtatgattcgatcgatcaattcattggctttattggcattttgaggaggtcgcgattggctgttggctcgttgagtcaggttcttatgaccccaaaccggttgggaaacctttcttgtacacccgtactttgaacaggatcaccttatacttgcactttgctcgtcgggcttatacgtattggggtcttccaaaattcttggttccacttgggcaccgtttccaggttcctccttactgggt

SEQ ID NO: 429488 - DNA, 61 bp, Oryza sativa
gatctataaaaaactgttacaaaaaagtaacatataaaaagaacacgcaaggtcaggaaag

SEQ ID NO: 429489 - DNA, 77 bp, Oryza sativa
ggaaaccaggcttggataggtactttcgaatgccccaaatgatggaggtttttttgacctctccccagaattttcag

SEQ ID NO: 429490 - DNA, 86 bp, Oryza sativa
tttttttttttttttttttttttttttttttttttttttttttttttttttttttttttttttttttttttttttttttcattttt

SEQ ID NO: 429491 - DNA, 338 bp, Oryza sativa
gcctgccaacattttcagctgaaactacttattcaacaaacaaaaaaggcactttgccctctcttccaacatcagcatgatcaacaataacccatggtttatactaggctccttttttttttcccacatatatatgtatacctttgatattcagtatcaagattgtatcaaaatgcccctagattttcaatacggtgattcccccaacctttgagtcagccttgattcgtttttggtaaattcgccagttgcccccttgttgccctttcttgtcaggttttctttcctcaaggaacggtgttagtatgttagttttcacccgcggatccctttttgag

SEQ ID NO: 429492 - DNA, 122 bp, Oryza sativa
tatgcctctcttagttggccgcccttctttttttttttttttttttttttttttattttttttttttatctattgtcaggtgcatcaggaatatttttcatacatattgcactagccaaggt

SEQ ID NO: 429493 - DNA, 64 bp, Oryza sativa
attgtcatgtatgaacggcggtgatcagattcaaagggccaaaaatagagggtctgggttcggt

SEQ ID NO: 429494 - DNA, 70 bp, Oryza sativa
ttttggggttttttttttatagaaggagcatactgaacaaagtcagaatgccaaaatgatttattacagg

SEQ ID NO: 429495 - DNA, 60 bp, Oryza sativa
gggataaccgctttttaaaatattgatccatgaggggttgtatgtcagtttcgaaccact

SEQ ID NO: 429496 - DNA, 54 bp, Oryza sativa
aaaacaatgaggaaattaattaattcccaaacatgtccctttatacatataacc

SEQ ID NO: 429497 - DNA, 116 bp, Oryza sativa
caggttacacacaattttactgttattttgttcttcagttatctacattgggatcaaatatatggggagtaaagaatgaatctgtgtagtcccttctgtggccaaagcaaacaaaa

SEQ ID NO: 429498 - DNA, 56 bp, Oryza sativa
cttaattgtcaggtttgaacagcggagttaagaagtaaaaggccctggtcaaattg

SEQ ID NO: 429499 - DNA, 115 bp, Oryza sativa
  unsure (1)..(115): unsure at all n locations
nannnnnnnncaggggaaattaagaagccagggaaaaggtgacaaagcacangaaaccagggcagaggggataccgaaggcacgcggggggaaagccaacaaaacccggcagaac

SEQ ID NO: 429500 - DNA, 57 bp, Oryza sativa
gttatgggtttatgaaaatttcttttggctcggaattaggggcaccgcatagggggc

SEQ ID NO: 429501 - DNA, 75 bp, Oryza sativa
aattaattagattgattttttttaatgtacatatatattttaaaggttgcttgatatcaacagaacacaaaaatg

SEQ ID NO: 429502 - DNA, 187 bp, Oryza sativa
caccgaaactgttcacttccacaaatggtttaaatcattcacaatagtcgttcaaatccatttcccaacagttttacattttttttttaacaatggccttggtgggggttcacagcagcaggggaaaaattggccgaggaatcaaggaatcattccatcacaacaggatctccaaattggccattta

SEQ ID NO: 429503 - DNA, 270 bp, Oryza sativa
  unsure (1)..(270): unsure at all n locations
actccactccatcaatctttaattggtatctccccatgaaccattcaaactattttcatgacatcattcaagattgttaagaaccctacttgtatttattagctactcatttgngcccaccttcttatttgtgcatttttgcaaacngaaaaggtggcttatatcaagggttgcaaaggcccagcctcaagtttttttgctgctgaccaagggtccctgaaaccagttagggcccgacatttttgggggtaccctcctgagggtccctga

SEQ ID NO: 429504 - DNA, 51 bp, Oryza sativa
aatgacatgtaaaaaaagcaaagaataaatataaaatgaccaaaaacaaaa

SEQ ID NO: 429505 - DNA, 81 bp, Oryza sativa
ttttggggttttttttttttttttgttttttttttttttttttttttttttttttttttttttttttttttttttttagaa

SEQ ID NO: 429506 - DNA, 55 bp, Oryza sativa
ataaagagagtttttcatagaaaatgtaaaaacccaaaactaagaatacccaagg

SEQ ID NO: 429507 - DNA, 73 bp, Oryza sativa
aacacttgtgaattattaaaaaaattgtattaaaacaattgacttggtattgcccacaaacccatatggataa

SEQ ID NO: 429508 - DNA, 129 bp, Oryza sativa
ttttgggtttttttttaagccatggttttggtgacaaagtacatcaaaccagtttagaggggatactgaatgcacctggggggaaagcttaacaaaacctggttatacacttaaaatggatccagaaag

SEQ ID NO: 429509 - DNA, 230 bp, Oryza sativa
cacgcatgcacggcgcgacgtaaagtcaaggctatggcatctcttagttggccggccccccctttatttttttggggggtttttttttttaggggtataactgacctgacatagattaagctgaaccaagggaaccaattattattgcactaattaagcaaaaaaggaaataaaaacaggtacaaaattggtttgaccttaaaaaaacaaaatttcgaggcacggctagc

SEQ ID NO: 429510 - DNA, 190 bp, Oryza sativa
agacagcaaaaagatgatccaggttccacatcgtcatagacgataaaaaagtttagacagcgactagatgtgaggaaaacagcttcgacaaagggaaagaaatcacacaaagagttttagataacaactagaacatgtagggaaggacacacagcgggcaaaaattaagttgtctaaacgaagggagcat

SEQ ID NO: 429511 - DNA, 237 bp, Oryza sativa
  unsure (1)..(237): unsure at all n locations
atgcacgcccgacgtacagcttggtatgcctctcatttttgagccgcccttncctttttttttggttaacaaattaatacagatcttgggaccttaattaatcatcatggcgcacaatatattttgatcagcgccgatgaaacgagagaggagaagaagaaaaaaaaattcaagaaaccaagaagaaaatatgtttgcatggtgatcggcaggattcaggaaggtcgggagcggcca

SEQ ID NO: 429512 - DNA, 193 bp, Oryza sativa
gcaaagagtgaagccattataatataatatataatgttcatcatatggtctatttcaaccaatatgaatgatcaatttgagatcaatgcttccagaaaaaatgcatatggacagttcaatgactaacctacagagttaactagtttaccaaaattttctatgacaagcataaattcattgctctatttgctct

SEQ ID NO: 429513 - DNA, 141 bp, Oryza sativa
aacatcgaccggatccaaataagcttgcagttccagcaactgttaaaaagggaaaagatgtccaagaaaggtgagaggttgagtatgacattagacgcagagactatttcaaattggagaaaacccaggaaccaaacacaa

SEQ ID NO: 429514 - DNA, 61 bp, Oryza sativa
aataattgcttcttttgattattcaatcattaaattatgacgatcgtgcaaaataatctgc

SEQ ID NO: 429515 - DNA, 61 bp, Oryza sativa
tttgaaagaatactatatgcgtttattgaagaattaaactttttaccaattttctttttta

SEQ ID NO: 429516 - DNA, 171 bp, Oryza sativa
ttggccgctcgcgatctagaacgcccctttctggtttctttgaggtgagattggtcaacaaggagtctagatatgtggaaggtatataatctcttgtgttttgttgattttgcaactccttctgaagcctcgtgctgctctggagacctctgcaagggcttgctaaggcga

SEQ ID NO: 429517 - DNA, 55 bp, Oryza sativa
attattatatttataacacataaggtagaaaggactttgcagccggaatatgtac

SEQ ID NO: 429518 - DNA, 85 bp, Oryza sativa
tttttgttttttttttttaatttttggtttttttatttcatatatttacaaattacaggctggaaacataaaacaagggggaaaa

SEQ ID NO: 429519 - DNA, 159 bp, Oryza sativa
gggttaaaaaatttattcgcacattaatttctatttatgttttttacttccataacacttaaaatattgatgacaaaaaaatttcaaataagacgaatgatcaaaagctgaacatgaacagtgcaaaactggccttatatttgggacctaagggagtag

SEQ ID NO: 429520 - DNA, 56 bp, Oryza sativa
ataattattacagggtataaaaatatttgagttgggttattattgtaaaacctcat

SEQ ID NO: 429521 - DNA, 53 bp, Oryza sativa
ggaattattacaacaataaaacatacgtgccgtgagaaaatctgataaaccga

SEQ ID NO: 429522 - DNA, 101 bp, Oryza sativa
tgtttgttttttgatttaatgggattatttggggttgaaaaataatgagaagctgccgaaataatagacatatgatgtgggcaaatttataggggcagaaa

SEQ ID NO: 429523 - DNA, 53 bp, Oryza sativa
gtaaaaaaatttttctgtaattttaaaaaaattcacaaaaaaaaaagtttata

SEQ ID NO: 429524 - DNA, 83 bp, Oryza sativa
  unsure (1)..(83): unsure at all n locations
tttagttggnnccgcccttttttntttttttttttttttttttttttttttttcttttttttcttttattatttttttttatt

SEQ ID NO: 429525 - DNA, 52 bp, Oryza sativa
ggggaaaacataatttaagggggaaaccatgatagaacgacggaattatggc

SEQ ID NO: 429526 - DNA, 54 bp, Oryza sativa
tttttttttttttttttttttttttttttttttttttttttttttttttttttt

SEQ ID NO: 429527 - DNA, 57 bp, Oryza sativa
attactggcttaaaacataatttagtgaagtaaatatgataaaacaacagaataaag

SEQ ID NO: 429528 - DNA, 172 bp, Oryza sativa
gcacgaaaccttgacatgccattagaactattaaatatgcaccccccggactggacaatacaacactcaaatgcttgacccctggcaaccttaatcgccttaaaccaaccaggtcacataacagtagaataactgtctattctcctacattgttaaattaacccatgactgc

SEQ ID NO: 429529 - DNA, 137 bp, Oryza sativa
gttcgtaaagtataattgttcttgaaataaagctttccatgagattgtaacaaaaaaaaggctggttagttcggatacccagaattgttcaagaacacaaaacttggattttgacatttaaataacttcagtaactg

SEQ ID NO: 429530 - DNA, 405 bp, Oryza sativa
gatcgctccaaaaacattttggccctaaacattcaccttaactaaaagatccgttacacacatgccccgaacattactgatgaacatgttcgaaaagggtacacagagtgtttcaaatgttcaagaagtggacagagtctttacatagtagtagttaggggggctttaggcaaagaattagttttgatccttgcctttgggatattcaaacctgataacttgaaacccctaggtttccagataggttgcagtaaaacacctgaaacgccagaacccgaaaaggccaccttaaaacttcgggcttttttcagggagggcagaaccaacacgggaagtagccatttttttggcataaaattgtaaacgcttttcttcccaattgaattcattcttcagcaatggaaa

SEQ ID NO: 429531 - DNA, 165 bp, Oryza sativa
aaacgaattctttcaccatttaacatttcataatttatgagttatgacgcttctgaacaaacagttcagaacaaaccataattcacaatttcacatatgcacaattgacaaggaatagttttgtgtatgtacaaatttgcttgatcatcggcgcatgcattaatt

SEQ ID NO: 429532 - DNA, 72 bp, Oryza sativa
ttattgggcggccttcctttttttttttttttttttttttatttattgtttttcttctttatttttttttta

SEQ ID NO: 429533 - DNA, 62 bp, Oryza sativa
gattgctattcaatgttttgtttactacaaatatatctccaacaacaggggagagaacacaa

SEQ ID NO: 429534 - DNA, 110 bp, Oryza sativa
gattgctcattaattttttgtttactacaaatatatttcaattacagggggagaacatatttgaagggggaaaatatactagtacaacatcatcagcaccaagaacacaa

SEQ ID NO: 429535 - DNA, 101 bp, Oryza sativa
tttttgttttttttttttttttttttttttttttttttttttttttttttttttttttttttttttttttttttttttttttttttttttttttttttttt

SEQ ID NO: 429536 - DNA, 182 bp, Oryza sativa
ggagtgccaaacagttataggcataccgatatctagtagtctttagcagcaacatggatatacacagacgtttcttaaaatgtccaagctagtgcactatggatagtaagccacctaaggtgtagaaactaataagcatgggtaaccaattccagggggaggggaagccggcccgattcctg

SEQ ID NO: 429537 - DNA, 68 bp, Oryza sativa
aaactaaatttttttaacaattatgaaacataaattaattcgagtaaaggctaaaagcccgacatttc

SEQ ID NO: 429538 - DNA, 57 bp, Oryza sativa
attacatgttgagaacataattgaagggggaaaatatactagtacatcataataatg

SEQ ID NO: 429539 - DNA, 93 bp, Oryza sativa
actacaaatatattttaattacagggggagaacataattcaagtgggaaaacatactagtacaacataatagatcaccaagccacacaattct

SEQ ID NO: 429540 - DNA, 177 bp, Oryza sativa
ttttttttttttttttttttttttttttttttttttttttttttttttttttttttttttttttttttttttttttttttttttttttttgaaatggaaaataccccatttaaattaaaggtgttttcgttaacggtttccattttttttggaaaactaaatgttagaatccttttt

SEQ ID NO: 429541 - DNA, 112 bp, Oryza sativa
gtaccaaatatatatcacaaaggttttataggaccaattaacatacaatattacataggcccaattaatatctaatagaaaaatacaaacccaataacataccttagaaaca

SEQ ID NO: 429542 - DNA, 115 bp, Oryza sativa
tttaggaggacgaaaataaaagggggtttaatttatgtttacaaaagaattacagcttgtatcatactttaaccattgaatagattaacataacatcaggcaaaaaagctcaaaa

SEQ ID NO: 429543 - DNA, 190 bp, Oryza sativa
aaaaatcccttaacaattaaccacaacaccaaaaaaactataagctggcaaaaaatttacacagttttacactcaagtaaaagggaaaaaaaggtattcaaaacccgaaaaaaagccccgcacggttaaattaaaagaccctggaacaaactgggaaccccccaaacaggggggggaagaaatcattgca

SEQ ID NO: 429544 - DNA, 88 bp, Oryza sativa
ttttttttcttttttttttttttttttttttttttttttttttttttttttttttttttttttttttttttttttttttttttttttt

SEQ ID NO: 429545 - DNA, 224 bp, Oryza sativa
atgaaaaataggattataaagtatattagttaattaagtaatattggatccctattacatatcccgtatagtctatttatagtttcactgtcctagatttacaattctaggttttttttatgccaatgaatttacatgaccgcctttataacagggaggttttaaaggggaaaaaagttacaccgaaggtcctcttcaactttgtccatcaagtttacaaaaac

SEQ ID NO: 429546 - DNA, 108 bp, Oryza sativa
aaaaatatcatatattcgattatatatatatatataatagcaaacagggtacatccattagaactcagaataaccggaattgaaaatcaaaagggacaaacacaagca

SEQ ID NO: 429547 - DNA, 158 bp, Oryza sativa
cgatgcacgcacgacgtacgtaaggcagcacttgagttggccgcccttctttaataaggggggttttttttaatattgttttttaattataaaaagtgtttttattaaggggggaaaaaaaaaataaaaaggaaaaaaaaaagggaaagtaaaagaaa

SEQ ID NO: 429548 - DNA, 345 bp, Oryza sativa
aaccaacccgaaagggttgatgccccccccccctttgccgccttgtttattccccaacttataccaaatgaaaccacaagttggttttaaaaggcttttttttttaaccccaatatttttgaccggcctggaaaagggggccctaaatgggcccatttgcggcccacctcaatttgggggttacatactggggggcctaaacagggttttcctttcttaggactggtttaacccctttgggtttggcaagggttttgtggcttataccgggaccaatgggtttggtgacaaggaggtttattcccatgggcaaggcttgggggttggccaatgttacgccggggg

SEQ ID NO: 429549 - DNA, 140 bp, Oryza sativa
ttttttttttttttttttttttttttttttttttttttttttttttttttttttttttttttttttttttttttttttttttttttttttttttttttttttttttttttttttatttttttattttttttttttttttt

SEQ ID NO: 429550 - DNA, 54 bp, Oryza sativa
gggggaaaaattaaatttaacgaaaaaaaaaggcttgttaaaaaaaaaataaaa

SEQ ID NO: 429551 - DNA, 432 bp, Oryza sativa
cagtgaaaagaagcagtgaattgcagctaccgagaactctcgaactatatatatctcaaccaaacaatttcggttcgttgcaaacaatgtcagcaacttatgagaattttcagctaaggctgggactttacaagctacggtagttgcaatgtcctaaaaaaacaaggaagatgaggttatcttatgaaagcttggctgtcttctggttgccattgctggtcgccatcttttctttaaactccccatctccatcttccgtcttccggttattttgacgcgcaatcccccattgatacggattcgattcgggacgaacttcggtgggctgcgtttgctggctgctctctagattgccactgccaaatgccattttcctgaatttcttcaggtcttcattgtaatggcccgggtcgtacttcgttgctgttgtat

SEQ ID NO: 429552 - DNA, 80 bp, Oryza sativa
aaccaaatcaaacttattttattcttttaataaggcccttgcccaagaaactaaataaaagcaaacaaaggctgcaacta

SEQ ID NO: 429553 - DNA, 407 bp, Oryza sativa
  unsure (1)..(407): unsure at all n locations
cagagaagattataaactttccatcagatattacatatacagcatcgtcagatggaatacaacagtataattcagcaaaccagtcatagctcaattgaaactaagttactaactactggtctattagggcccagtttcttgattcacacacgcgcataatagnaaaacataaacgaaatagttgaaggttagcatcctgcagggaacagtccgaatcattatgttgctcggtacttgcctggaaacctcaggtctgaatttgcgggcttttcgagcatgttcaaattgtcacatttcacctgaaagttttgtggttaccctccttccttctgggtccttcattggccactggcccccgagaggttgcttggctgctggctgcctgcctgcctgcctgcttagcattg

SEQ ID NO: 429554 - DNA, 390 bp, Oryza sativa
  unsure (1)..(390): unsure at all n locations
ggaaaatctttcctttggcaacagcccattagcccatgtgttgggttgggttgggttgcaaactttgcaattggaacccaaaagttgcacacagtctggaatcagtcttatgggaaaatttacggggtaataactggtgttttgctgtctaaagggatcatttggtttacactaaacattagcagggaccaatgccattggagaccatagngctggcggccatgttaaaaccagaatccaaaaaagaagagcaaaaaattacacttaacgcaaagatgttttgctcataggagcgatggcgatgcattcaagtttcgcaaatccagcctcctgtcattggagtccttgaactaaaaggacggcgaaaattttaacttcagctccagtttc

SEQ ID NO: 429555 - DNA, 170 bp, Oryza sativa
agcacgtcgattgattgattataaatccatggatctcccggattaattccagggacatggatatgatggatgggatatggtttacacgtcgtcttttcgatcgatcgggtcttggccttcgtttagattcgccggggatagatgattcgccttggcggttgccgctgcca

SEQ ID NO: 429556 - DNA, 131 bp, Oryza sativa
ggggaaaaaattttccgggattttgggggccgtgtaaaaaaaaacttgcaccaaaaatttttggaaaaaaaaaccctaaaaaaagggggaggagaaaagaggccgcccctcttttaaaaaaaggggaaaaa

SEQ ID NO: 429557 - DNA, 348 bp, Oryza sativa
gggcaaaaaatttttcaaccattttttttccattttggattccccaaaaaaaccctttgttagggggaaaaagaaggaaaaaaagaccaaaaacgatcacaacacggttggggtactccaaaacgtaaccttccgggcactcccactaaaacccaaaaacctttttaaaaagagggaaaccgggcccaaattttggggggcactttaaaaattggggcttttaaaaacacccagggttttttgggtttttggttttccaaatatttaaggaaaaattcctttaaccaaagccccccttgaaattcccccttcaaagtttttgacaaattttttttaaaagcccagggg

SEQ ID NO: 429558 - DNA, 107 bp, Oryza sativa
ataagaatgcattgaataaaaaactagcttgaatcaaaaattctttaatgcaataggaaacagaattggttactaagataatgcaaaagtttcaaacacagaaaaac

SEQ ID NO: 429559 - DNA, 77 bp, Oryza sativa
cgggggaactggtggccccataccaatgaaaatttaaacccataacacccgttttgatccccgatcccgagtacccc

SEQ ID NO: 429560 - DNA, 428 bp, Oryza sativa
cgttagggggcaaaatggattatcacaaaactctgaattcatcatacatcagacaaaaaaaggtgtatttgttgagcaacagataacaggacaatcctgggacgacacgatttgcacgatatacacaaggatgtaacagaaggacacaactggcgcaactcgggtacaaatagcttacgaagtcggccgatcccaaagtgcagtaaactagccatttagttctgcgtttgtattgcgtgtatgggttctgaactgcagctgtattggccaggcaaggtccgtatttctacggagcataccagcaaacaggggcccagccaacttttctgattagcctggtagtgaagacacgtaggccacttctgtgatcaagggctctggtatccagatctactgcacgttattgtcatcacaaataggtacttcct

SEQ ID NO: 429561 - DNA, 173 bp, Oryza sativa
ttttttttttttttttttttttttttttttttttttttttttttttttttttttttttttttttttttttttttttttttttttttttttttttttttttttttttttttttttttttttttttttttttttttttgcccacaaagggggggagggaagtttttttttttatt

SEQ ID NO: 429562 - DNA, 192 bp, Oryza sativa
ttttttttttttttttttttttttttttttttttttttttttttttttttttttttttttttttttttttttttttttttttttttttttttttttttttttttttttttttttgttttaaaaatggggaaaaaaagtttttttttcacagtgggaaaaactacttaacgggggggcccccattggggtcac

SEQ ID NO: 429563 - DNA, 838 bp, Oryza sativa
  unsure (1)..(838): unsure at all n locations
aacaaaaaaaaaaaaaaaaaaaaaaatataaaaaaaaagaacaataaaaaagaaaaaaacaaaaacaccggaaaaactccaaaaaaaaaaaaaaaaaaaaaaaaaaaagaaagagaaaaaaaaaaaggacaaaaaagagaaaaaaaaaaatacacagaaaataaaaaagacacataagacaaaaaaaaacgccgcaaaaaaaaaccacagaaaaaaaaaaagagagaaacgcaaaaaaaaaaagagagaaaaacaagaaacaccaaaaaaacaaaacggaaaaaaaaaaaaaagagacacaccaacacaaaaaaaaaaaaagggacaacaaaaaaaacgagagaaaaaaccgggaaaaaaaaaaaaaaaaaaaaagacgcgcccccaaaaaaaaaaaagcagaacctaggagaaaaaaaaaccaacaaccacgagaaaaaaaaacacacaagcccccttaacaaaaagcaccccagaagaaaaaagagggaaaaaaaccaaaaaaacaaaaacagccgcgacaaaataaaaaaggagaaacataccaaagagaaaaaaaaaaaaatacaacaaaaaaaagaaaggggcaacaacacaaaaaaaacagaaaaaaaccnaccaccaacagggggagaaaaacaaaaaaaaaacaaaaaaaagggagaaagggcaaaaagccctaaaaaaaaaaaaaaaacagaagcgggggaaaaaaaaaacatataaaaaaaaaaaaagngggacaaaaggggggaaaaaaaaaaaaaacaacaaaggggccccccaaacaccggagaaaaagaaaaaaaaaattcgcgaaaaaagaaaacaacacaag

SEQ ID NO: 429564 - DNA, 110 bp, Oryza sativa
tttttttttttttttttttttttttttttttttttttttttttttttttttttttttttttttttttttttttttttttttttttttttttatttatttttttttttttt

SEQ ID NO: 429565 - DNA, 437 bp, Oryza sativa
gcaggcaggcagcaggaagagccaaacatagccgatcgagtttgacacgaacttatgtacacaacatggtcacgtactcacatcacatacatacatacagacatactactatcagcatgtacacaatacacaacccgacgcgtggtggacaggttacacgtagcgtggtagcaggcggaacgtgtccggggttcgaagagcgccggtgagggagggtatttccggtccgttgcgcgaccgtgcgacgttgttagcctggctgcccggtggccctttgtccaccagccagccgcgcccggcgttagcccgggttaccgcgcccttgccgtacacggcccgtgcaccgcccgtcgcggccctccagcgccgtggccgagctttccctggttgaacccgtcgtcgaacggttttggttcaccgtgccggccaccatgctg

SEQ ID NO: 429566 - DNA, 203 bp, Oryza sativa
  unsure (1)..(203): unsure at all n locations
aatgcaactgtgcaagtaagtttcaacaattttgtcacaacattataagttacatctcgtagctctaattcacttcccagtactagctaggcctttcctaactggatgtctttgacgcctttgcatggcaccccagngcttggcgtcttgttgaaactggtctcccttgctttttgtatagatggcggtgcggtcatttattt

SEQ ID NO: 429567 - DNA, 126 bp, Oryza sativa
ttttggtttttttttttttttttttttttttttttttttttttttttttttttttttttttttttttttttttttttttttttttttttttttttttgtttttttttttcggcccgggggagtttt

SEQ ID NO: 429568 - DNA, 216 bp, Oryza sativa
ttggcgcctttttttttttttttttttttttttttttttttttttttttttttttttttatatttttattaaaggatgaaatttaaagaaaaaatgaaaaaaaaatattaaaaaataaaaaagtaagaaaaaaaaaggaaaaaagaaattaaagaaaaaataaaaagataaagaaaaaaataaaaaaatgaagaaaaaaaaaaataaaaggaccaa

SEQ ID NO: 429569 - DNA, 62 bp, Oryza sativa
gggaaaaaaaaagggcccaagaaggaacaaaagggacggaccctaaaagaaggaaggggaag

SEQ ID NO: 429570 - DNA, 57 bp, Oryza sativa
ggaaaacgggcaaaacgggttaacaaatgagcataaaagttaaaaaataagtttaaa

SEQ ID NO: 429571 - DNA, 84 bp, Oryza sativa
tttttttattttttttattttttattttttgttttttttatttttatttttatttttattatttttattttttattattttttt

SEQ ID NO: 429572 - DNA, 363 bp, Oryza sativa
ggaaggcaaactggaaaaaagttgcatttgccattgaacaatcggtaaagttggaaagcctttttccaaacttatacctaaatcagggttagcaagactgacgggaggggttttttacatttgggaaggggtggacccgaggttatacaaggcccccgaaggggttgtggccagaacaaaaaaggcaactatcacggggccctggtttacagaaaggaccacgggacaagcccatttaaccttaatattggggtaaatttattccctcggggaagatttcactggaggccaggaaaaaattggggatgaacggaaaaagggcttgggaaccacggggtttgttcggaccaaaatcggggggct

SEQ ID NO: 429573 - DNA, 108 bp, Oryza sativa
tgtagttgggaccgcccttccatattttttttgttggggattgaatatattaaccagactggcatttcagaatgcacgatcaactgtatcatcagtcagagtatttct

SEQ ID NO: 429574 - DNA, 186 bp, Oryza sativa
ggttatccgaattcgagctcgctctaatggcgtcgcatctctgcgccgctcagattagtagtgtatacaagatgaaatccgagacctaggagaaatcaggctactacatttacaacaaaaacttctcgggttcaatctacaagatcgaggattatacaagcccgaaaacttcaatttttgttttcg

SEQ ID NO: 429575 - DNA, 201 bp, Oryza sativa
cgctgaaaagatttattgcgacgctttattgcttattcaaatatggtacagtttcagaatttcagcttccaaaccaataaatcagaaacaatactgaaatactgaatgcacacatctacattggccaacattccaggcatttcttcaggatggggattaattatggccaactttcaacaaagcttattaaactgggtctat

SEQ ID NO: 429576 - DNA, 78 bp, Oryza sativa
ccacgttaagattaattccttaattaaacccctgggggaaaattttaagttaaaggtgaccgaaaacaagtgaaataa

SEQ ID NO: 429577 - DNA, 394 bp, Oryza sativa
gtggtggtggacccggtcgggcgtctcgggggattgggtgcggtggcggcggtgtcgctgatgtcggaggcggagatggtcggctcggcgttgacgaacttgttgatgacgagcgaggagcggtgcacccgcggcccaacactgccgccgccgttgctgcgcgcctgcggctgcgtgctgaccttgacctcgacgatggtgcccctgtccacgacctcgacctcctactcgtcatcctcgtcgtcctcctcctcctcctcgtcgtgcgcgacctcgtcggccctgctgctcggggttcttcttggtcattgttctcgacgtcctcgtccgaggaggggagcggcggtgttcggcgaaggagaagagcaggcgcccgccgcagcgctgcgcgcgg

SEQ ID NO: 429578 - DNA, 52 bp, Oryza sativa
aaaaggggaaaaggaaagggtccaaaaaaattgggttttacttggacaaagg

SEQ ID NO: 429579 - DNA, 88 bp, Oryza sativa
cacccttggggccccggggtttgctcttaacccaaatttggttacaatttaaggttttttcccggaccccaatttggtaccctctttt

SEQ ID NO: 429580 - DNA, 195 bp, Oryza sativa
ggcggcgcatctctattgaagtagtgtatgacgtatgctgcacgccgtcagatggtaggctcttcattggcggccgtcctttttttttttttttagtatgccaaccgtaaatttttatttttgaatacattggtttcgtaaaatcaaggtacaaagcgaaacaatcaaaccagttagaataccaggaaaggatca

SEQ ID NO: 429581 - DNA, 175 bp, Oryza sativa
gtgttttttgttggttgtttaagacgtgaaaattcaagaactttaactatgagcaagacggcaatgattagggcacacaaagggcgaggctgctgagaaaatcaagcacaaaagctgaactgaccggcccacctgtaagcccatgactggccgaggccggggactcctgggaaaa

SEQ ID NO: 429582 - DNA, 465 bp, Oryza sativa
  unsure (1)..(465): unsure at all n locations
actagaatcatgaactccataaatcatggattcatggcagattggtagccattcctggcatttgtcaatattacagtaaaaatatttccctattgttctgtatcagttcacactcaacatacatcncggatcacttaatcaccagggtaaaattcaggcaataactagtcgccaaaatggncatgttctaaaagtgttgattttaacaggnagtaataaacaagaatactttttatacccccgggggacttgttagttctcatggacgggattataaccagaaaccaagttctgaaagaaaacacncttcaggcagtaacgggattataccagcctctgnatgattaattttgatattttgctggccaacgttctgaaactctggaactgaaacttttggggtttcctgacaataatgtctgattggtcactggctttaatttgcctcaagccgctgtcagcaag

SEQ ID NO: 429583 - DNA, 413 bp, Oryza sativa
atctagattgattaacatataaatgaacgggggcaaagctagaaaggtttacattttaaaacgggggaaggaaaactcatacgcgcacacgtggttgaaaaagaaaaaaaaaacaataatttttttacggatttttcgcttaggttgggttgaactttatttggtggggccaatgggaacaacgtccaaggcactttaattaattcggaacctcaccaaatttacacccactaatggggaaccgcggggggtcgtacccgggtaatttccgggaccggtcaccctgcaggccgtcaccaggattttccctatagggggggcgttttaagagcttgggggtaataatgggccataggctggttccccgggggaaaatggtatccggttacaatttccccccaacattcgatccg

SEQ ID NO: 429584 - DNA, 342 bp, Oryza sativa
aaccaaaaatttgaaacggtttattttgggacggaaaaatccatccaaaacatttaaaaaggcccttggtccaaaccaaaaacaaatatattaacaaaaagcaaaaaaggggtgggttttccagcgcacttaaaagggccaggttaacttcgtggctgggattcttccgggctcccagatttaaaacggaaagacaagggttatttcaccggggaaacgttatttaaaaccttataaaggcgaaaaaataagcgtgccattttgaagagcttcggttttggggcattttgggatttaggaaacaggggcttagcaataatgccccaaaattcctttgcaaac

SEQ ID NO: 429585 - DNA, 295 bp, Oryza sativa
  unsure (1)..(295): unsure at all n locations
gcactccagaagaattctattcatctctgtctaaggcatcaaccaccctaaacattttgctagtctcagtcatcactcatcagtaaatatcagacactagcacaagagacatttatacacacgttacagtacttagctggtgagctgttaccttgcagcctcagtaactagataangaattcttgtttgattcagttgagtgggntatctttttccctgtggagcagttttttgagcttcctaagaaaacttcaactaaggagatcccttcagttaaaaaacaacccccaaaact

SEQ ID NO: 429586 - DNA, 368 bp, Oryza sativa
aactcatgaaagaatccaaagttcccatgagttccagaatgtttgactgatatgacagacaaacttttgtaaggttctcctaaataacacaaagaaatttctcgtacactacatggctgtatggattgaacataatttgcctgtgacactttgtcacacttgtgacactttccaggtttccaatacaaccttacagccaatggagcaaagagcacagtcaagaagagaaatatagagttgcattttgtttggcaagaaaagaaaaaaattgattctacaattacatcaaggcttatgccttttcagaattcaaccaagaatagtttgcatatctagagccaaaattcagtctaatgtaccactaacca

SEQ ID NO: 429587 - DNA, 87 bp, Oryza sativa
ttttttttttttttttttttttttttttttttttttttttttttttttttttttttttttttttttttttttttttttttttttttt

SEQ ID NO: 429588 - DNA, 125 bp, Oryza sativa
aaaaaccattagccataaagagcgggaaaataaacacacaaagtaacattacataaagttttaataaaacattatgtaaaaagaaagcaaaagcaaatgaaaaccaacaactaaagaagatatac

SEQ ID NO: 429589 - DNA, 67 bp, Oryza sativa
agccccaaaaaaaaaaatattttaaattcaaaattttttgggtcccaaaaaaaaaaatcacaaaaag

SEQ ID NO: 429590 - DNA, 267 bp, Oryza sativa
ggcatctatgttatctttgacacaagagacaaaaggctagaagagttcgatagctggctgcacggtttcattgacacgcagcaacctggcttcacgtggtcaagttcactccactgcttgctctatggaataataaaaataaaaagtctagcttccatcagtttgcaggtcatgtgtgcgaatacctggctagcaagttatgggaaacgaatttgtaaacaggcgtatgagtacagaatctcatggcatttctccccgtctccatcg

SEQ ID NO: 429591 - DNA, 122 bp, Oryza sativa
aaaacacctgttgggattgcataaaaaaggaaggcagcccatttgggctaaaaccctcgcccggacccaagttctccgcctttaagaagttcaacttatgcgtacggccggatttaaaccaa

SEQ ID NO: 429592 - DNA, 88 bp, Oryza sativa
agacacctagctagctagctatattgaggtgaggtgggggggacttttacaagagacctggggggctacacaacctaaccccaccccg

SEQ ID NO: 429593 - DNA, 317 bp, Oryza sativa
ggacccttaatcccttatcttcccatttatcagcttatcatcatccaatagattataataatagagggaggagaagtagcagctactagccagtggagctgattcgagcaggggatgatttggagtttctcatcatggctgaagagggaagggtttggccatgtacgtaggaggagatcccatcaaagccaaaagcaagggaagaagtaagcaacgaacgaaaaaagaaaaagggaaaaaatgggaagaaaaaaatccttccaaagacacatgggagtaacacaaacgaggggaaattcaaaaaaccaaacctccct

SEQ ID NO: 429594 - DNA, 153 bp, Oryza sativa
aaaaaacatggctaaaattgattaaggggagaccacaggctacaaacaaaagtttaaagggttctccaaaaggggtaatgatacaaatggccccaacccccgaaggacaattttgggaacacaattttttaaggggaacacaaaagggggtat

SEQ ID NO: 429595 - DNA, 109 bp, Oryza sativa
ctttccgtatttcccttgtctaccctcgcgtccgttctctctcgcgctgcttctgcttgcatcgtggtgcgaggagggtagaggaggttctcctcctatctctcccatc

SEQ ID NO: 429596 - DNA, 364 bp, Oryza sativa
  unsure (1)..(364): unsure at all n locations
ggcactgaagattatcagctcataatctgacaaccaaccgagttattcgctgcacacatatacagggactagctgagtgcccgtgcgttacaacggagaaaataattcacacctaactacgactcaatatataaatgatgcaaaattgtgaaaaatgcaaaagagaaaggaacagctttacgncctaaatnctcttattcctaacatgaacattagagagaaccatgcattgatactaagctggtttcttgaattttatgcagagtcccacgaatttccggagcaattttggcttgtcgatcaatgcagcttcctgaattcttttggtattgtccagagagtaagcaaagaacatggagtgatc

SEQ ID NO: 429597 - DNA, 142 bp, Oryza sativa
  unsure (1)..(142): unsure at all n locations
gtacctgatcggcgacgtcatgggtggcggcgtgggggtggtcgacagagagagcatagaggacnaccttttcagcggagccggaaactgcgacgacaggcccgtactgacggcgcccgatgccatgaaggaggagggcatc

SEQ ID NO: 429598 - DNA, 60 bp, Oryza sativa
gggttaaacccttaaaattcgaatacaatttcttaacatgtggtaaaaaaaaaaataaaa

SEQ ID NO: 429599 - DNA, 267 bp, Oryza sativa
gccggttctatccgatccgatcacgacgggagaatcaaccgggatcgcaatggcgtcgaggagagccgcggcggcggcggcgctgctgctggtcgcggcggcggtggcggcagcggcggcgggcgctggcgcggagggggaggagacgaccgctaacgccggctagctggactgctgtcgccactgcaggaaaaaccaatgaacaacgctgcgagcagtgtcccactggcccgactggacgaactcctgttcccaggcctctacgca

SEQ ID NO: 429600 - DNA, 87 bp, Oryza sativa
acaaagggagggaatttatgcaatatgcgtcacaaattacaaaccaaaaccaacctccaacaaggtgctttgaatccaacttccacc

SEQ ID NO: 429601 - DNA, 180 bp, Oryza sativa
gcgtttcttttcacaaaaatcaaacaacaagaaattggatggcctagtgtgtgaacttcctaaaccctagcgcggaggggagcttgaacaccatgaagccgttcgacctgaccgtctgcggatctcacagcggggcgggtcgcgatggagctgtactcgaaggaccttgcgcggactttc

SEQ ID NO: 429602 - DNA, 191 bp, Oryza sativa
gggggaaaaataggacagggtttattatattcagggcacgaaataatttttaaaacccctccttcgttcggacagaaaaaaaggggctaaatagctaaactccgggtacgcacgtacaaagcgcaccgcatgataaacaccttagagagtaagaccatctaacatgaccacccaacgacatacgctacggg

SEQ ID NO: 429603 - DNA, 96 bp, Oryza sativa
ctcactctctcctaactaacaatggctcactaccaggaggtggactactgctcggaggaggcgagggcgttgacccccaccggcggcttcctcgac

SEQ ID NO: 429604 - DNA, 289 bp, Oryza sativa
tacttataatgagcatgacgatcgacggcatgcagcacgcagcgcaggcgtcgtgagcctctagtagttagcgcgccctcttttttttttttttgaagcgtaccaaatttgcatatatttatttttcagaacccgcattgaacaacatgtatatttcatcgcagtttattgatccatctttattcattcacaaaagtagatacaagccagagccttggtagagtgtggaggtatcgagcacttttggctctacaatgcctatatgctaacaataactggccgatatgaa

SEQ ID NO: 429605 - DNA, 117 bp, Oryza sativa
ttttttttttttttttttttttttttttttttttttttttttttttttttttttttttttttttttttttttttttttttttttttttttttttttttttttttttttttttttttt

SEQ ID NO: 429606 - DNA, 122 bp, Oryza sativa
gggacaagcaagaaggatatatattcatccatttttaaaactactacaagagggcggggggaacccaaaatcaggggggatttgggaaaattttacaagcaacaagggagtttgggagaacg

SEQ ID NO: 429607 - DNA, 231 bp, Oryza sativa
gctataccattatcaccctcttgtatatatataaaagcggtttaccctcgtttacaacacaaagaagtgaaaattgcagactagtaaactttgatctttcaggaagtgaagttccaaaacatgaatcaagaaaattgtattagatgggtggttggcttggccaacccaaatcataatggcattcttgaaaaaaatttcttgaaaaccagttagccacctaatattcaatga

SEQ ID NO: 429608 - DNA, 171 bp, Oryza sativa
tttttttttgtttttttttttttttttttttttttttttttttttttaaaacaaaaacaaaacaggtttcacaaaattacagaagttgtaaccacagcttggtaccaggtgataggattaatcatttgttttgggggggataaaccaggccactccagaccaagaacggcc

SEQ ID NO: 429609 - DNA, 376 bp, Oryza sativa
catcagtctgatagtatgtcattaacaggctcatagcatatagaaatacactgaagtctaaaatttcaagcacaagactgtaaacagctagacttaaagcactagaacaaagaacttgtttaccttccaaataaaaaagaacttgtttttccacatagggatggaacgagttctcagatgacttcttattactaacaagttcttattactaaccgatctgttaaatagcactatttcctatctaacaatagattacacagggatggaactgtatgccagttaaatggcattattcagtattaaatacttggaggattttccagatcatgcattttagttggggcagtggtcctttgagctttcattatcgtagctg

SEQ ID NO: 429610 - DNA, 104 bp, Oryza sativa
ggcgctctcagcatgcattttatttaggcacgtttcattttttaaaaaagaatagaggatacgtattgttggcagacactcactttttaaaaaaatacataaac

SEQ ID NO: 429611 - DNA, 484 bp, Oryza sativa
gagatcagaggtgaacaaaattttggagagggctcgaacaggaaagctgaggggctctagcttagaggcaaaagtttatctccacgcggaaaatgctaacacagtgtccaaactaaaggagctggtttcggcaaccaatgacgctgatgctctgcaccgcctgtttatcacatctgaggtggagatccttccttccgtaagctccgaaactacatcctggtgtatcctacactggaacttttagcagtgagcgcaccggcaacatctggattggtgtgactcgcgccgatggcgaaaaatgtgagaggtgctggaattatacccgagacgttggattcttccttgaccatcctactcttttgtgcccggtgccacggtggcattggtctgccaccagttcctgctgccgcggctgtcagctgaggctgctcgagagtggcaagggccactatcagcttcatttgaggatattaggtggaattaa

SEQ ID NO: 429612 - DNA, 67 bp, Oryza sativa
ataaattatataaaattatttatataaaataattataaataaaaaaaaaaaaaaaaaaagagcaaaa

SEQ ID NO: 429613 - DNA, 92 bp, Oryza sativa
caggcatttttgctcacgtccctctctgctctcgattgattcgttgggggttcggagggttgagtgctcaatcgcttagactgcgtgaatca

SEQ ID NO: 429614 - DNA, 308 bp, Oryza sativa
ggactatcaaattccaactttattagcatatcacttttgcaggggcagatgcaaagaaagcatcatatacgattatttgaagtgggaagatataagcaaaccacccccatgaattacactcattatgctggagtaatcactgatcacgctttgtttagataagaaaaggcttgggctatatcacaagggatttagataaaaggcaggggatcacactcacctgtatccactttatttaaggccctaattgcaaactgattatttgggtagggccttagttaacagctgcctttacaatcctattgaaa

SEQ ID NO: 429615 - DNA, 96 bp, Oryza sativa
aaaaaaaacccccggggaaacacgaacccaaaggggccaaacaaaaaaaaataattcccggaaacaaaaaaatttaaaaaaaaacaatattaaaaa

SEQ ID NO: 429616 - DNA, 88 bp, Oryza sativa
ccttgttctccgcgaccgtctccgcgatctcggaggccatcaccgccgggatactccgcggagtctgatcctactccggacccgtctc

SEQ ID NO: 429617 - DNA, 281 bp, Oryza sativa
ggaaaaaaggggaccaaaaaaaaaataattcattaatttattggaaaaaagaaaacgaaacggggtttttttttgggaaaaaaaaaacaaaggggaaaccacacagttaaaaaaaactaaatgggtccaaaaaaaaataacgaggaaaacaatcggataaagaaaaggggggctcgtttagaaagaaagaaaacttggccatgagggccccaccggaaaattcctccagttcccgccggaattgccccccccgggggtgccaaaccccccgccgaaaccgc

SEQ ID NO: 429618 - DNA, 355 bp, Oryza sativa
atattaacataaaatgtatatgcattttggagcaattttttttataagtaaaatacaaacacaggcgctcacaatgcgctcacactcattcctatgaatacacacgcacactttacccctatgaagtcctcatagaatcatttgggactttggtacaactaagatagtctctgggttctggttctggaactggagttctggtccatatggttttactgaaatcaaccaacatgttatgttagggaaggctgtatttggatcaattagagatcggccagagattaattggcatgaaaaatgttcttgcaaaaccaggacacatatatgcaatatgtagaacattaatgtttgccaa

SEQ ID NO: 429619 - DNA, 380 bp, Oryza sativa
ttttttttttttttttttttttttttttttttttttttttttttttttttttttttttttttttttttttttttttttaaccaaataaaaaaaaattttaaatattatttttttaaaaaaggggggattaatgaaactgggaaaaagggaaggccctgaaaaaaattttcagggatgggggagaaaaaaaattggtaaaaaaaaagaaacaacaaaaaagaaaaggggaaaaacaaaaaccgaccttttttccaggggttccatagctacccaaaaaaaaatcgctttgggagccaaactaaaaaatggggggggtaaaaggttttgaacccggtttaaaaattttggctttttccaagaggggaaaaaaaaggggggtt

SEQ ID NO: 429620 - DNA, 324 bp, Oryza sativa
aaaacggggtttccaggctaacctaagggtttcaccagggctttggttaaaaaaggaattgggctacaaaagcaaaggggggcaaaaaaaagaggggatttacggggccctatttacatttaaaaaggaaactaagcgcacaaaaggccctagggggttattttggcagggaatttaccatgttagggtggctttttggctggctgggggattaaccttggtagccccgttcaccgttggggtggcccgggggggggctggggttacggggccaggggccaaattttggggcactaacaaggggccctttgggctaatgctttg

SEQ ID NO: 429621 - DNA, 368 bp, Oryza sativa
ttcaattcttcatcccctcttcgctctcatcaacaagcaaatcgagaaaaaaaaaaagaaggggagaaaaaataatataataacagaaaaggagatgaaaaaggagttccccggccaagcgccgacgagtcggttacactccgagatggacgcggcggcggccggcgggggcggggcggcaaagcggaagcgcagcttctccgaggacgacgcctacctcatcctgcacaggtaaatccatctcccccatctctctctctctccgttctctcgccccgcggcggaggcggcgggtcgtttctagggtttcgtttcaccggcgcggcgctgcccccccccccccccccccgaaccttgcaggttccagc

SEQ ID NO: 429622 - DNA, 400 bp, Oryza sativa
  unsure (1)..(400): unsure at all n locations
caacgacaaacacaaccaataagtctaactgcgtgctcaacaatcgtaatatggcactagttggttaacatgtgacaggaaaaatcaactagtgctaggactaggagcatcgtctttgattgcaagcagcccccttgccgtgcgaaatgcaaacgacaggcaggcaggctcattacctagtaatatctcattcatctgggacactcagggtgtaagggaactttctgtgggaatccttgtcacagtttcctcgttagtttgttattttcggctttcacccttctccggngacaggcttcaaagtggggatgataactggtctcccgtcgatttacaccgttcgatgagcccccgtaatcaacaagcctcaagaggaacccattatatcttgtctctatca

SEQ ID NO: 429623 - DNA, 154 bp, Oryza sativa
aggaggaaacagctttcaaggactcggggggtgagaaaatttaaatggccaaaaggagccccaaaaccaggacattcttctggccgacaataaaattatacctcaaactttgcgattaatactaaccctaccttgggggcccgcaattcctact

SEQ ID NO: 429624 - DNA, 409 bp, Oryza sativa
  unsure (1)..(409): unsure at all n locations
aatcatcttgaaagttcatcttttaaattgtactcagttattcactatcaaaattgttggtacattgtgccagaacaaatgtcacgcaagaactataagtaccaaaatagaaattctagatgcagaagcttgccttcagaaagtcctgtcacagggtgataattgaacaatnaaagggctctgtnntcagcagccataccctgccacagcctgtctgagggctgccggcagtttcaaaatttggcctgcaaaactggcaagccacttttgacactgcctcccagctgcctacccgcttgcctaaaaaaccgacctccccaaaacaccacccaaagatgtttccaagaccataaaatgttttgggccaccaaaaaatgctttattttttttagattgtataccttcctgg

SEQ ID NO: 429625 - DNA, 278 bp, Oryza sativa
tcaggttgttaccacactgccataggcagattgccacctaggggccacacatttccttgccttgcagcctccaacatggctctaatccctgttgagcggtgcagatatgctaattaggtgcatcacaaactgtcatacttgccagttgcttgacaaaatgattgacttcttaaactttgaaccatttgtgcatgtactctgtccttctgctggataaactgtagtgcttgtgagagtgacgtggtaattccatttaacgtcaaaggtggagtctaggg

SEQ ID NO: 429626 - DNA, 65 bp, Oryza sativa
gttggtccagcacacagagggtccgagggtggacaagtacaaggagatgctggtgaagaacgctc

SEQ ID NO: 429627 - DNA, 315 bp, Oryza sativa
  unsure (1)..(315): unsure at all n locations
ctgcctgcaaggagtgccagcgctcattatgttatagcacacggtgacgttacaacaggtaatcgtttgatcaggtacagtacagtacagagagggcgtgttaacaggtccagtactggttgcataaaacatataatggtaacaatagtatatatgtaggttctagatggggatacanataatggtaacaatanctttagaggtggagaagnnaagcatttccttgngctacgnnaaatgtgatgacccatgatggatcttgngattttgatgtttggngtaccaacnnaggcacctgcgatggggaggggaggg

SEQ ID NO: 429628 - DNA, 66 bp, Oryza sativa
ctgtttatggcagggaaagccggcggcctcaagggcgtcgccctcatcggcggcatcgtcttttac

SEQ ID NO: 429629 - DNA, 196 bp, Oryza sativa
ggagtacatagcaggttttatgcacaacaggagatgtctctgttaacaaaaactgaaatttaattattgcaagatggaagggcgcataaactacaaaatgttcaacagaactctaactgggcaagggttttttttttttaactggacaggctctccacattcctaaaccaactgaacaacaattggttccaaagac

SEQ ID NO: 429630 - DNA, 191 bp, Oryza sativa
ttttttttttttttttttttttttttttttttttttttttttttttttttttttttcccccgaacaaagcaacagggcattgggaaattaaaaaacgggttaacaaccagggataaaaaaaacagattcgggggggggccataaagtttaaaatttaacacactacacataagaggcccccggggcagggg

SEQ ID NO: 429631 - DNA, 67 bp, Oryza sativa
aaaaaataaaattaaaaaaaaaaaaaaaaaaagaaaaatacaaagaaaaaaaatataggaccaaaaa

SEQ ID NO: 429632 - DNA, 226 bp, Oryza sativa
caaaatttcttgtgattttggtgatactgaatatgggcactgatataaaggcatgatacactataccatcgtggcaatcaagctgtctagttcccaaagcttatttcaacaagaggtaacctggtccacttgtgatgcttggtgttagctgactccactcgcaatgtgagactactgcacaatgcccgtagtcggtaatggagacatccaactattatcacaatca

SEQ ID NO: 429633 - DNA, 490 bp, Oryza sativa
ctcactgatacaattaattcaggcaattattctccattcaacctgatgatggcaaagctgtgaataccttgaggttgctctccatcctagcactacatttgtctctggagctatatatagacttctgagatgacctatccctcgatcttgatgattcccatttctctccttgccttcatctgagatgttgcttctcctattttccacctcctatcactgcccttgccccttcaattccttccctccttctttctgtctccacactatctccccctattattctccacccctttttccttttctctcttatccctacccctctttcttaactcttttctctacttctacttatactccctcttctttttttcttctctcccttcatccatccccattttttcctccccttcatctttttcattttatttttctcacccccctctctcccctccccccctttccatttcttcctctctctatctcccctttt

SEQ ID NO: 429634 - DNA, 67 bp, Oryza sativa
cgaaatttttctcctctctctcaactccggcgagaggaggaggcggcactggaccgctcttggggat

SEQ ID NO: 429635 - DNA, 325 bp, Oryza sativa
aaaaataaattaaaaaaaaataaaaataaaaaaaaaagacaaaaaaaagcaaaaaaaaaaacgaccaaaaaaaaaaaaaaaaaaaaaaaaacaaaaacacaacaaaagaaaagaaaaaaaaaaaaaacgaaaaaaaaaaaacaaaaacaacccaaaaaacaaaaaaaaaaaaaaaaaaataaaacaaaaagaaaaaaactaaaaaaaaaataaccaaaaaaaaacaaaaacaaaaaaagaaaaaaaacgaaaaaaaaaaaaaaaacaataaaaaaaaacaaaacaaaaaaaaaaacaataaaaccaacaaaaaaaaaaatcaaaa

SEQ ID NO: 429636 - DNA, 514 bp, Oryza sativa
ctcatttgagcatcggatttatgatattgacatggggtttgcccgatctggtagttcacggaatcaaatgccaaaatatcaatcactgaagaatcaggatatgtcaagcttaaatgtccaaaaagagcatgaaaattaactggcccagaaaacacatgccatccgagctgttgaagctccaaaacagtctacgtggcagggcttgctcaaacaagaaattagctgcaaaacaaattaacaataatcacaaagaacatctatcttttgtaagggatccagaacagatgccatataatcaggttaactcaaacaaagagtttgagactgttggcaaatccagccaattattgccacgtgtacagctctctcttcatacgacagaagccttacagcatctacttgtcagtccttattccctgtgacaaaaggatctactcaatttaacgacttggagatgccttcactagaaaaattgaggttcggactttggggtcttttttattgacacttgggt

SEQ ID NO: 429637 - DNA, 117 bp, Oryza sativa
tttttttatgttttttttttttttttttttttttttttttatttattttttttttttttttcttttttttttttatggttctttttttttttttttttttttttttctttttctttt

SEQ ID NO: 429638 - DNA, 253 bp, Oryza sativa
tttatttctcgagcgcccgccgccgtcgagcggggtgcagcgccgtgcgggcagacctgctccttacacctgcctgcatcatcgctgcttgaatcgatccgaagcattgtaaatggctgctgggaggggcatcaattcagctgttgaagaaagcatgtcggccatatagctgatcgccgctgtctcgattctggatacatgacgaagagtcctctggccacactggatcgcgagcattggctattctgggagt

SEQ ID NO: 429639 - DNA, 388 bp, Oryza sativa
  unsure (1)..(388): unsure at all n locations
ggaatattcaatcaatttttgttaatttttcaaataattttggcgaaaaagtatgaaaattcctgaaattttcagaaattttgagccatactacttacagttacagtatagatgaatatangttcttgttttcatgaaaagnttgaagtgtgcccacttagctgtatnntattattaattgnnataaaaaatagataatggtcgattnnntgttgttcttttaggcaaaaaannnaagagctaccatcacttttttgtcgattttgagaaagttcaattttganggaggtttttataaattcccgataaattattctgtttaccattatttagcctttcgattttgtgttccgcttctgtttttcatattcaattaataattaaaatt

SEQ ID NO: 429640 - DNA, 468 bp, Oryza sativa
tttgattatccctcgagggattaaaatagtttcccttacatatgatgcatgccactcttctgatcacctcggcttgcgtgtgttccgagacaccgaatatcaccgatcgaattgcatgaattctgggtacaggaaggttaggctccagcgtgagccagaagggagacatcctgatcaatggccggagacagaagctggcgttcggcacgtcggtgagtcgatcggcgacgaatgatctcgttttttctttgataaagattcgagcaatgatgcaagcatggtgagatctcgtgtcgtggaacgcatgaatggatcgcgccacaggcgtacgtgacgcaggacgacgtgctgatgaacacgctgacggtgcgggaggcggtgcggtactcggcgcagctgcagctgccgagcgggatgagcgcggcggcgaaactggagcgggcggaagagacgctgcgggagatgggg

SEQ ID NO: 429641 - DNA, 157 bp, Oryza sativa
ttttttttttttttttttttttttttttttttttttttttttttttttttttttttttttttttttttttttttttttttttttttttttttttttttttttttttttttttttttaattaatttttttttttttttttttttatttagcagggggg

SEQ ID NO: 429642 - DNA, 395 bp, Oryza sativa
  unsure (1)..(395): unsure at all n locations
atcacaagagcttatatctgattgacacgtggcaaaaattttggtgatgtttagctaatttttcaggctgccacgtggcccaataacattctagaatcatgaccctgatataggtagaagagattgctgataaagaaaaatggcattttgcaacacatttaacttgttcagtgttcaagctaacngttgaacctggtacaagtacaacantgctggcacgcatgttccacatctcgcgggttcgagggtttcaaagccgaatacaacacacggcatgttgcatttcatcataatttaaagtacttagcatcactttgaacaaggttttggtggtcacatgtatattcgcaaccttcttaaggtgtccgcaaaagacgtgcgcagcataatacttt

SEQ ID NO: 429643 - DNA, 71 bp, Oryza sativa
atttttttttggggtattttttttttttatttttttttattatttattttttgtttttactttttttacat

SEQ ID NO: 429644 - DNA, 109 bp, Oryza sativa
tcgcggatttctttcgccgccctcgtggtagaggcctgaagtcccagggggagagataggctagcacgccagccatggtaatcacttgatctgcccaggtcaagcatgg

SEQ ID NO: 429645 - DNA, 350 bp, Oryza sativa
attggttccccaagcaacagaggcagaaatatccggggggaacagaagccgaacagggggacctaaagagaacacggatgaaggatatttccgccgactcttcagaggacagggggccctgaacataaaaggctctggccctccatcccacaaagaaatatggtcagcaggagacgacgggttgacaaaccatagcctccagctgagcctgaaccaactactgatgatcatccagcagcggagactctcagggaagaccgcatcagacctgccatcgagcgggtttagaggcccgggggtaagggcgaagagcccgggaacaagccaccagagactccctaggagaaaga

SEQ ID NO: 429646 - DNA, 110 bp, Oryza sativa
aacaaaaagttacgagcacacgcattcggtataataacaaggtaaatttgccattttgataaaccaatacgattaaatggggcccgtacagaagccgtattcggtatttg

SEQ ID NO: 429647 - DNA, 123 bp, Oryza sativa
gggctacaacaaaatcggattttatgactgaggtagcagtggcgactgtgatacataatgaaaaggggaagaaaaaaaatacaaacaaaaaaagctctcgcctatggccctgaaaatggaaaa

SEQ ID NO: 429648 - DNA, 627 bp, Oryza sativa
gagctaacaccgcacacgcacgcacacgaaaccttgtcccctccagatcgccccccctttttcttttctcttcctgctctctccccctcttcccccccccccccccctccccctctcctccccccccccccccccccttcccccccccccccccccccccccctcccctcccctccccccccccccccccccccaaccctccacccccctcccccccccccccccccccatccccccaccaataccccccaacccccacacccacccccacccacccccccccccccaccatacaccccccacaatatacaccccacccctcccccccccccccccccacacacccccccccccccacacacccaacccccccccccacaacagacaacccccacccgccccccccccccacctaccagccccccccccctccctccctccaccccccccccaaaaccaacaccccccccccaccctccccccccccccacacccccccccaccccccccccccctcctcaccaccacaccacccccccccacccccccacccccccccccctcctcccccccccccacagccgcccacccccccccccccccccacacccccccaccccccccccc

SEQ ID NO: 429649 - DNA, 180 bp, Oryza sativa
tttttttttttttttttttttttttttttttttttttttttttttttttttttttttttttttttttttttttttttttttttttttttttttttttttttttttttttttttttttttaggggggggtaaaaaaagggccctaaaaaagggaaaaaacgggcattataaagatgacgag

SEQ ID NO: 429650 - DNA, 117 bp, Oryza sativa
aaatcatctctatcgatcgacaaagctatagctagcccaggcatggctgactctcccgcaatggcgacactcctcctcctccttctacatgctgtactcgtcgtggtagccgatgcc

SEQ ID NO: 429651 - DNA, 101 bp, Oryza sativa
ggaaaggcccaaagagggcaacaacagccattccaattttaaatcgaccctgggcccagggtcacatagacactttaactcatctgaaggttcttttgaaa

SEQ ID NO: 429652 - DNA, 419 bp, Oryza sativa
actaacaattccgaaccattttattttgtgtattactacatttcagcaagtaagacctatttgtacatggcaaaaacatgaagagttgcaaaccattttattttctgtacattttctgcaggtactatagtgttgtttgtacacggaaaattgctcccatggcttctcagcagatttccaacttccttgataagaaagtttcagaaccgagcttggggaaacattcctttccaaaaatcgtttcaccaataacttacctgcgaaaaaaccccaggaaattccacaacacaggttccattcgaaaagttctcaaaatcttattggaccaagaactttgaagcaccaatactgggggttggagttggtgactaccaagctttgggtgcatggaacataaagaccggtgagaccaacaagcg

SEQ ID NO: 429653 - DNA, 227 bp, Oryza sativa
gcttatcattggtcgcctcacctcacctgctccaattgggaacgccactccccttcttccgcccgagctcaagtcccaatccgagagagtcgatcagcggcagctagagcagagcgatggccgcgctggtgggcatactcctcgcggtcttcctcgccgtcgtcgccgtcctttttgcgctccgcctgctccactccttcctgtgggtcccgcgccgcctggagcgc

SEQ ID NO: 429654 - DNA, 142 bp, Oryza sativa
ggagatgggtatctcggccaccgcccaccgccaccgccgcgccgtctccgcgcgcgcgcgcgcatcgtgtcacgatctcgcgagaccccgaaccccacgaaccctcgccgcgtcgccgtgggccgtcgcggtgggggaggag

SEQ ID NO: 429655 - DNA, 146 bp, Oryza sativa
cttccttcattccccttctccccgaaactctcccaaacgccaagtccccaaccatggcgaccgccgccgaccaaaaccctaacgacgcggagcaccgggaggccgcggcgggagccaatgcggcggcggaggaagacaaggaggag

SEQ ID NO: 429656 - DNA, 85 bp, Oryza sativa
atataaaaaagattttgggattatggaaggaattttatttaggggtccaggggtggaacatgacataacatgagaccgcttaggg

SEQ ID NO: 429657 - DNA, 87 bp, Oryza sativa
cgccagactcaattaaggatattatcgagagggtcatttctctctgtatggtgaagatatcagagtatcgaggataatcaccgcggg

SEQ ID NO: 429658 - DNA, 94 bp, Oryza sativa
aaaaaaagcatagaaggtttaattgatacttccacatgagcagataattcaaatgatagctctcatagtataaggttaaaaacccctcgtttga

SEQ ID NO: 429659 - DNA, 124 bp, Oryza sativa
cacacattgctgctcgaccacccacaacaccacaaaaccgagagagccaataaaaaaaacccgggggcccccacccccccgccatacaagaccaggcccaccccccccccaccaccacaccccc

SEQ ID NO: 429660 - DNA, 161 bp, Oryza sativa
ggatatgagcgaaaacataaaacatttaatggaggtcattttggttccgtcacgtttccgttattttgcatttttacagggaacgatcagactcagttttggagttgagcgggggagattctcgaggggattcttttgggcgacttggattttcgtccttg

SEQ ID NO: 429661 - DNA, 239 bp, Oryza sativa
ggccaccgccggcgagaagggcgccttggcggcgctgaccccctccgcctcttcccgcgcgcggccccgccagccggccaccgtctcgggtcaaatcgaatcgaatcgaatccaaagaggaaaatctggggttcagttgaaccctaatgcccccaggttaggtcagcctcgctgggtatcgcggctgctgaggtttacttggagaggggtaagggtggaattccctcggagggcctgat

SEQ ID NO: 429662 - DNA, 119 bp, Oryza sativa
  unsure (1)..(119): unsure at all n locations
gcgagtcttctctttatttttttccatattanaaagaaaggggggttttgcccatatatgggtgtggaaggaactctgagaacttaacagtgacacgagccttagtgaatatacatact

SEQ ID NO: 429663 - DNA, 74 bp, Oryza sativa
attaaaattgttaagggggcggggtaaattgtattgaagagaaaaatatggggggtaataaaaaaacacaaagg

SEQ ID NO: 429664 - DNA, 357 bp, Oryza sativa
gtttgtttatagatttgcaagtgagggtagtagaagatggctattatgaatagatagagccattttttgcttgtttggctgatgcttgatgtaaaatttgtgtgtaatagattgctcattgttaagagccgcatgtactccatattcttttatggatcttgctgtataatttcttattaaagttcttatttttgagtttattacattgtgggcttatagttattttacggttctatattttagaatattgcttaattatttcaattctctcatggaaatagtaaagtcagagtaactagtgttatactgatgagattgtttgtgtggcagatatctggctgagttgcttgccgagag

SEQ ID NO: 429665 - DNA, 91 bp, Oryza sativa
ataattaaatcacaacaccatatttcattgaacagggtcaaaacctgcacagaaatacacactaccgggacagaactcaccttttttccaa

SEQ ID NO: 429666 - DNA, 377 bp, Oryza sativa
  unsure (1)..(377): unsure at all n locations
gtccaaacagctgtcaatctcgttgtgtaactgatggttttctgacaacaaaatatactttccaccgacacaaaaatgatgaacaatcaatgtgcaactaagaacaaagaatttgaatttagcctgtgtatgcccttattgacaggacaaaacaagggggtcaaaaaaattcaacaatagaaaagaattaancctgcatcgatgaggcgcaaggntaccaatttgaataaaggtgccacangcccaccaccgatcgatcgttctgtcccgtactctagaaggtgagagtgatgctccctttacctgaagcctcactaacactcatcatcattgtctactgcattatccttcagcttaagactaatttctctaactgt

SEQ ID NO: 429667 - DNA, 93 bp, Oryza sativa
gagaacacacaggctacaggagtataatataactatatatggcctgacggccatcctacgtacacgtgctgcttgaattttgagttcaaataa

SEQ ID NO: 429668 - DNA, 64 bp, Oryza sativa
atcattttttgctgagcttcctgcttatttaaatggggggtctgattgcttcctaaatgtcgat

SEQ ID NO: 429669 - DNA, 243 bp, Oryza sativa
gcgagttatattcatttctacacgatagtctttaaaggaggaaagtagaattgcataaacgccgattagcactcgaaaaagaagtggaaaatttgcgagatcagctacagaaggagagaaattcgagggtttcattgtagtcagggctgatgaatttgcgatgagggcagggcgacttcccatcaacaattgacaacatgggttctgattggccgtggccgtgtaagaggaagtcccaaagga

SEQ ID NO: 429670 - DNA, 246 bp, Oryza sativa
cgctacgccacgccacgcttctcctcctccagatccggttcgcctcgccggcgatggccgaagatccggcggggtcccgccgctggcggtgcgacgccggcgacgagcacggctgttggctcttcttctccgccggcggcggtggttacttccattttctatcgtcttcccctacccctttcttgcttgttatctttaatccgtatcggcttcgcacaagtgctcttgtttatttgttttcttctc

SEQ ID NO: 429671 - DNA, 117 bp, Oryza sativa
gcttacttctgcattgcctctgaagctctacaagcctatggtgtttgacgaggtcttcactatcttggttctgtcgattgctctacgagcggtggggatgctgcttacgcggctgct

SEQ ID NO: 429672 - DNA, 278 bp, Oryza sativa
aatccctatcgatcccatcccctttcctcctcacccatggcggccacgctcttctccaccgccctctccccgcacctcctccccctcccctccacctcctccaaccccgcctcctcctccctctccttcctctccaagccgctgctccccgccctcgccgtcgcgggatggccgcggaggaggaccagccccttcgtgccggtggccgtggccgtgtcggaggaggtcgagacggaggaggacgaggaggaggaggaggtctgatgcacaaagctagg

SEQ ID NO: 429673 - DNA, 262 bp, Oryza sativa
actgtccatccatggtggtggtcagacaaccccagcacacaagaaatctgccatttgcccagtccaccgctgggttgcagtttttgatgaagagattgacttgacctgagcaccctttcgattgtaaatagcagtttttgtattgctgttggttgagtgattgggcattcatccaatacatatcttggcttcttggttggactccagtaaccgtggtcgcgtgccctcatttgcttgttcgctcatcgacgtattttttctt

SEQ ID NO: 429674 - DNA, 159 bp, Oryza sativa
ctctctgcgatctccaccaccaccaccacgacgcgggcgcgcgcaccaaccgggggggcttcgatgcgggcgatctcgtcggcagcgggggggatgctgcgggcgcggctgctcggtggggcgcgcgtccgcggcggcgtcaggcacggggaggggggc

SEQ ID NO: 429675 - DNA, 74 bp, Oryza sativa
tcgcatttcccaaaatggacgccgtccgatgaggccaccgcggcaaaaaccctagctctcgccctctccctccc

SEQ ID NO: 429676 - DNA, 429 bp, Oryza sativa
gatttgttagaattttctattatcttgttttcgtggatttcccatgtacgccgcagtagtgcgtccatatctagacaccattatagatatcaggggttttagattagtttacacccgaacaaaattatcaatatatctacaattttgtgttctttacttttctgttattttctattttcttttcatgacggaggtccagtaatcctaaaatttggttaatctttgtcgttttgcgctaaaaaagggtcatgctttttcacgaaagtaaggacattatcttttgctagtttgttcggaaactagtcgttcgtcgtcacgtaagtacggtatttatttttgcaaatttgctcttaaattagttcggtggatttacaaaagtgaattaatttaaaattaggtttacttccgggttttatctttggttttgct

SEQ ID NO: 429677 - DNA, 181 bp, Oryza sativa
ttcttgcttactttggaaccattgctttggtcacaatacctgcattatacagtaagaaccaggagcaagttgataggtatgctgggatggtccacaggaacatatcaaggcattacaagattgtcgacgaaaatgtgatgagcaggctaccaagaagctttattagagataaagaggattg

SEQ ID NO: 429678 - DNA, 492 bp, Oryza sativa
gtttgcaacacttggtatttgcaagactttttcttttattttgttaaagaattactcaaaacaaagccaaagagacaaaaatgcattttttttccaatgaaggaaaagtcaattttctgtccaactgaaatatgcatgacggataaatagctaccttgaaagagaccaaatcccactgtttaaactttcactctgtgctgcagttgtcagttgttattgtcaatcaagtagattccagcttacttttttctggtggaccattttttttttctttcatggcaggtaatagcaaaggcccgtgtgccaattgtgaagttcgtggagagaaaaagtgaaatagcttttgacataagttttgacatggatggtggaccacaagcagcagactttatcaaggattatgtgaagaaggttcctgttttagacatctgtgtatgattctgaaagtttttttacaccaaagagagcttaatgtggtctttaccggtggaa

SEQ ID NO: 429679 - DNA, 264 bp, Oryza sativa
gttgttattcattaaagctttggttgatgttgtggaacacaggcgtcttactctcatggtttacctcttgaggacgttaggagagagaaaatgtctgagcaccgtgatcatgtgtctgttgcactcattggttggccgtatttctcattctcccgaacaccagggcgccctatccttgagagccatgccacaagagtgggagtatggtttggcagtttacttaaccaacctatactcatataaactatggattaattgtctttc

SEQ ID NO: 429680 - DNA, 186 bp, Oryza sativa
gagcgagcagaggcggcgctgccgctcgtcctgctgcttccgccgcatccacatccttcgccgccgccgccgccgcctgcgccgatccccccatccatcccgcgagcgagcatcctgctgcttccgccgcatcctgaaatttggcttaaccttgatgtttgtttgttcccaaaaagcctgggggtg

SEQ ID NO: 429681 - DNA, 346 bp, Oryza sativa
agttcctatgatggcatatttataattgcctatatggacaatgctgccagccatctaattcatgctggacacatagatgtgctttacaccatccatgaacttcttatttctggttgtaaaggtctgaccatttcatgccattggtcttacctggaggtgataatagaagtggaaaaatagaagtcatctattagtttgtactgaagcaacactaagcatttagtaattaatgatcctgtttgtagccacaccaccgggtacatgtgacttttctagccgcacacttttgctcttggacatctatgtgttgactggtttgcaaagcttggaggtctttctggtgttc

SEQ ID NO: 429682 - DNA, 213 bp, Oryza sativa
aaaaaaaaaaaaaaaaaaaaaaaaaaagagaattttataataatagtcaccatgatttcgtgcggtgtaattgggccgtacttctagtggtactcggtttttttggccccctttttcgtctctcattttatatagcctttaactgtctttttatgttttatggtgtccatctgtcttcaccatggtcttggctgactgtctcactggtttcct

SEQ ID NO: 429683 - DNA, 464 bp, Oryza sativa
ccgatctgggcggccactagctcaaccaatcaagcaaccaagcaagcgagctcggagctcgtcgcctcgcccatggttaccctctggaagcggaaacccaagcccaatccggagccggaggagaaggagaaggaggaggagaaggatcatcggatgtgcaagaccaagagctccgtcgccaccgccttcatggccgtctccgcctccaccgccaccaccccaagaaagcatcagcatcagcatcagcatcagcatcagtggctgcctcgcgccacggtgacccagtactccaccacctcctcttccttcgcgccatttcaccgtctccgtcacctactcctccaccgtcgtcttgcttcaggttttatccgattctttcctagacttcccccttctactcaccttccacgagctcgccgccgctcctcgtccattttctcttctcccaccgcatcgctctcaat

SEQ ID NO: 429684 - DNA, 561 bp, Oryza sativa
cctattctcaacctctcccaaaattagccccgatccgatcgcttcctagccctgattcgaggtaaaaatggggaggagaagatgaggtagattctttttatctcgttctcctctcattattttcctctccttctcttccttcttcttctcttctcttctttttttttctttctattcctttttctttccatcttcttttccttctcacatcctctttcttttcctttttcttcttttttcctcttcttttttttttttttctcattctttacctttctatccttctttctttcctccttctacccacttcttttttccttctcttctccttctctttattttctctaccccctccttttctttcctcttctttctttacattcttttcacttttcatatcttcttattttttcactctcttctcaaattctcacttctttactttctctctctttcttccttctttctatctttcttcttcatcctaccctcacctctatttcttctatctttctttcctcttttctttcctcttcttttctcctctatctttactctctt

SEQ ID NO: 429685 - DNA, 64 bp, Oryza sativa
tcgttatttttcgctagggtttttgactatcccttcgacgacgtcgttgacttgaggagaggag

SEQ ID NO: 429686 - DNA, 121 bp, Oryza sativa
ttgtcagtctgcttttctcacagaagagagcagatcactaatcgaataagaacggtggtgcgcatctgcttgtacgcaaaaaatggaacgagacattacctgtctcccgactaatagggtt

SEQ ID NO: 429687 - DNA, 339 bp, Oryza sativa
tttttacacttcgaacagaaggtaagacggtgtctgtcggcacggttctccccctctcttttctcttctcttcttctctttttctcctcctttcccctttttcctctctctcctctccttttttcccttctctcctccttctttcttctctctccttcttcctctcctctccccttccccttcttccttctttcttctctctcttttcctctcccctttttcttctctcctctttttctctctctccttctctttttcctctttttcctctcctccccttctttccctctcttcctctcctcttccccttcctattctctccttttcttcccacttccc

SEQ ID NO: 429688 - DNA, 592 bp, Oryza sativa
ggttgattggccggattagccggaggccacggaggggcggtgactagcagagcggccacggcggtcggaatgaagggcggtcgctttttttttttctatttctttttctcttttcttttttttctccctcttttctctttctttttattttccttccttttctcttctctctcttctttttttcctctcctttcttttcttttctcttttctctttttttctcctcttcttctcttttcttttttctttttcttattcttttactttttcttcttcttttttctcttttttcttttttttgtacttttcttcttcttttcttctttcatcttattcttcctattctttctttttctattcctttctttttctctttcctttttttttttcttctatatttctttattttttcttttttcttttcttttatatttatctttatcctctattcttttctatttttcttcttattttatccttctttcttttctcttctttctccttattctttttttttaattttctttatctttttttttatctttcttctctcttctttattttttttttttttctttctctccttttattt

SEQ ID NO: 429689 - DNA, 105 bp, Oryza sativa
cacgctgcgagatctcgcagcaatggcggcgccgcgccaccaccacctcgccctcgccgtcgccctcgcccttctcgaagtaaccgtcgcggcggtagaagaggg

SEQ ID NO: 429690 - DNA, 81 bp, Oryza sativa
gctatttgtacaagaagggaactgagaatgggacggctgactcatagtctcatgtttctgattcttccctggctatgttga

SEQ ID NO: 429691 - DNA, 106 bp, Oryza sativa
ttttcttcgaggaggaagcaaacagcgtcgctccacgaaaccatcgctgcggctgcgtgctcgcgcgaagaagaggagagagaggaccaaaccatcctctcctcct

SEQ ID NO: 429692 - DNA, 134 bp, Oryza sativa
tattaaaaaaaaaaaaaaaaaaaaaaaaaaggggggacaaatatagaggaaacacaagctaacatacacatacatgggaggtcttttttgtggtttcgggctatccttacttttgtttgctgccttttggtttt

SEQ ID NO: 429693 - DNA, 346 bp, Oryza sativa
tgacgaccaccacccgcgcgagcaccgggacatcctcacatggctcctagtctgctccgccccgcctccccgtgcctcaacctcgcgccccccaccgccgacggccccggccggagccgctccgctgtgacgatcggtggttcgaggccgctcagcgtttccctgcgtgtgggaggatctagccggagggactttccgtgtaccacaatggcctcaagagatcattctggtttgactcgacagcttttagattttcaacatggtacagtatatgagatagatggggaacttgtcccattcatggagtcgaaagctaggcttatggaccttctagtcaggaattgct

SEQ ID NO: 429694 - DNA, 57 bp, Oryza sativa
tttgtaccagcgcctgaggatccgacaaacccgaagattagaacttaaatgggctct

SEQ ID NO: 429695 - DNA, 52 bp, Oryza sativa
tttgacgcgagcgctccacgatttctctgcctccggaatcattatatgatat

SEQ ID NO: 429696 - DNA, 116 bp, Oryza sativa
ggtcatacttcaagatcctatatcgatattattggtcgtgggtttttctttttatcataagaaattgtatctaccatgcatgtttatatatttatgtgttggtggagacgctcctt

SEQ ID NO: 429697 - DNA, 113 bp, Oryza sativa
  unsure (1)..(113): unsure at all n locations
ncgctctccctctcccacccccacccccaccccgcctgcaccacggtggctgagtcaccacgcgctcaccgcaatttcccaccggcgtgcccgcccgccatgcctgatagcat

SEQ ID NO: 429698 - DNA, 405 bp, Oryza sativa
atctactccctactatgtttcggcggcacatcaggcggcgtgtagggcggactggtaggctgtgccgggcacgtaggtggttcggcggagcgggtttagttgccggctgcgttttcaggcaactgctaccccatggagaagaagagttcactgcttttcatctaaaatggctaaaggattcgcataaggattacagtataaaacttttggacgaatctggaggatgctggcgggacttgcttgttcctattgttaaagaagcctggaagaattgcaagaaagcaatcgagacatcttcaccacctaaaggatccaagtctgctattttacccctggattcatgttcatttggaggtgattcgtccattgccatcgtagagagaatttatgagatggtgaagggtt

SEQ ID NO: 429699 - DNA, 91 bp, Oryza sativa
tcggtttaattgtctatggatgtcggcaatccctgcagatctgaggtcctttatttctcataggtctcagatgtattacatctgatagtgt

SEQ ID NO: 429700 - DNA, 90 bp, Oryza sativa
ttctagatcgcgagcgccgcccttttttttttgtgtgggtttttgggaacaaaaagagtagattgaaacatcagaaagaaatcagcgagt

SEQ ID NO: 429701 - DNA, 248 bp, Oryza sativa
tcagatacggaactactcccctatccaacacctccgagtccgagcaactcaagatggcgtcgtggtcatcttcggtaagaccctgaccgttgaaagcatatttttggtggctgagttttttctccgtccgattcgcttacgacagaccctactcctatcacctatggtccgcatccctacactgaccatctagcctcggtcccatccattccggtacattaactattcctcctcctccagatggttgt

SEQ ID NO: 429702 - DNA, 153 bp, Oryza sativa
gaattttcaattccatgcaatgtatctgaagaagcaagggttaccctgaaagaaagagcagccattttgcagaaattgagggatagcatgggtgaagctcatagaagaatgaaacattatgccgatttgaataggactgaaagagtgttggag

SEQ ID NO: 429703 - DNA, 318 bp, Oryza sativa
tctctattttttttttctctctctttcttctccatctctcctccttccttcctaacctctccccacctacctccctgccgcctgatcctgatttccccaattgaggccagcgtcgagcacctgcacacacgcacacgctcgctgctgcgcctcgattctcgacccagatccgccactcccttccccaattcgccgtcacctgcagctgagtgttgtttgctcgagctagctggtggttcttgccttgcagggcgaggcagtggtagcttgcgagctttagctgcgggagcggttggctttggctttggtttggtaaat

SEQ ID NO: 429704 - DNA, 241 bp, Oryza sativa
tttcttaagaaggtacttggtgctacccttggggcacaaagtacatccaaaatccaagcacaacaactatccgagatatcagtggaggctgtgtcagtagctgaatatgtttcttctacaaagcgtttgtccgatattgaggagaaggtcattgcgatttttaccaagcctgcagaaatgccagctgataaagaggagatgcttatgactgccgttagccgtgatagtgcattgtaggagg

SEQ ID NO: 429705 - DNA, 406 bp, Oryza sativa
atttattgaaatgacctctaaattccacagatatcaggtgctcgatgcattagttgcccttttctgcagatctaatgtatctgcagatgttcgcttagctggtggctggcttttcaggcatctgctaccccatggagaagaagagttcactgcttttcatctaaaatggctaaaggattcgcataaggattacagtataaaacttttggacgaatctggaggacgctggcgggacttgcttgttcctattgttaaagaagcctggaagaattgcaagatagcaatcgagacatcttcaccacctaaaggatccaagtctgctattttacccctggattcatgttcatttggaggtgattcggccattgccatcgcagagagaatctatgagatggtgaagggtttt

SEQ ID NO: 429706 - DNA, 135 bp, Oryza sativa
tatggaagcaaaagctttgctgatctcagagatagtggcatagacaagcatcaaagttgtgttgcacatgaacggtcacttatcatcatcgaatttattgatgatggcgatgtagatgaggaaaactggagaaga

SEQ ID NO: 429707 - DNA, 190 bp, Oryza sativa
tgatgagcaatcaagaaactactggacaagatcaatggtaatgatcccaaaaaggaaggaatactcaaattttttcaatatctagttaggaaatatggaaagactatgaagcctgagggtagtgcaaagaatgaaggtgtggatgttgcaaacgatacttcgagtacaaaccttcttgctagtggttctc

SEQ ID NO: 429708 - DNA, 501 bp, Oryza sativa
tcttacttgatggaagttgctgctttagcttctagaatcaattggacaggtatgcattttatattgatgaaattctggatgagatggaagttgctgctttatcttgtagaattaattggacaggtatgcattttatattgatgaaatctgaactaattataaatttacatttcattattttttttgtttatttagagtatcagttagcttcaattgaagctgctgcgattggtaacataattagggatggaaaggtcattgaaattgctccaaactcgaaaggaggacctctacaggatgtgctgagaagtttgcttgaaaaaaatgaattgatgataaataaactgtgtgatgaggatgctccactggaaagtaccgcttcaaggccgttcttaggcttctttttaacacattatgtaaggagcctgggtatttcgcatttgacccatacgctgcggcaagcttttttaccctgagtcacgctttgctgattaccagagc

SEQ ID NO: 429709 - DNA, 72 bp, Oryza sativa
ttgtcttatatagtcagtaggggagggactgggccggcagccattctgacgtcagaccggagcggccctatg

SEQ ID NO: 429710 - DNA, 394 bp, Oryza sativa
ataggatctttcctttagctctttgtggaggatttagctaagtaaaacatgataaggtcacacaaccttatctgaagcgatgtcaagggagaagctaccttattgtgtgacggcatggttttaccaattgagatactattcacaacctacaccgattgagttctttgggcataagaattgaccggttgaatgtttgagatgccttttgaccttacatgacactggggattttattatgacacaaggaaataatattttccttagaagcatcaaattccagcccctggatgtatagttattaactacatgttctgaaccatggagagaggttaattttgtttttgggttgagctgcagttacaagggtatgagctaatcttaagaaatggttggc

SEQ ID NO: 429711 - DNA, 378 bp, Oryza sativa
agttcatgaaatattgacttgggaagcaaaatcagaagtgaaaactgaagttcttcatgatctcaaggaaattgggagtgctttgtattggatgagccttctggatattgttttgagacaaatagacactacacagttcatgcagtctgctccatggttgggattgattccaggaaatgatgggcaagtgaagcatgcatactctgataatactccatttaccactttgttaagtgctgccaccaatgcagttgcatcaagtcctgcatgcccaaatccatcttcatttcttgtcatggcaaagcaagctgaagctgtcagtctactctacaaatcaaacctaaactctgggagtgtgcttgtgtatgctcttgcttt

SEQ ID NO: 429712 - DNA, 87 bp, Oryza sativa
ccttactgtcagtgtcgacgatatcaagggcctgaagagggaattggaggaaggcctggacaaggaccaggcggatctccaagggag

SEQ ID NO: 429713 - DNA, 177 bp, Oryza sativa
ataatggatgatattgtcctacttcgataagttcactgaggaatcgaggaacctgacgattgtaaaaatgtatgatccattgggtcaaagcttgcaacgtagtaatgcagatagtcagtaaccagtggaatactgaaacagttcgctcatgctcttgcttttatgggtttgctggat

SEQ ID NO: 429714 - DNA, 384 bp, Oryza sativa
gcggtcccttgaccttacgctactggactcttacgacctgaatattttcagcgagaggtaagatgacttccagcacgtgcaggtaggtgtgctgaagcttggcgaggatgagcgctctaagggccctaggctgccgaactgcacaacctgtgaactagaacttcgtactctctctgctgctccaggtacaaaagagtgcagctcggaggacactgtggaggagctgccgcaggggaactctgtgactacgagcgaggagctggaggagatcaagcaggaacgcatgcgcattttttggcaggacatcatgtgcgaccgagtccagactacaggacggctcagggtgttgttcaggcctcctgttgaggtgcaggacggtccaga

SEQ ID NO: 429715 - DNA, 305 bp, Oryza sativa
gcttccagtggtagttagtctactgaacttttaggagctgaagatactcggagctaggtaagatgtcatccagaacgggcaggctgggacgtgtgagcctagcgagtctgagcgtgctagtgatccatggttactgaaaggggcagcctgtgaactacaactgctccgacagctagctaactgagcagaagagctttagcaatggcgacgccggggcagcagctgccgccggggttcaggttccacccgacggacgaggtggtggtgtgaccattctttactgatgaccgttcttcttttattca

SEQ ID NO: 429716 - DNA, 404 bp, Oryza sativa
cggttatggacggcggcagcagaggcactacgttgggcatcctacacaacaagcggtggcacaccgtcaccggcacgggactctgctccgccatgtggatatggcctaactacatggatctcagcgactgtccttacgtattggatccgcttttccatgaccaatgatgacgtgcagatggacaacaggagttgctctagctatgctacttacagctgtgagagcacaagaaccacccctgtctgattttactaagcagaatatagttgtggtgggagctggaagtgctgggataggtgtgcttaatatggccaaacaggcgatgctaaggatgccagggataaacatgatctgacaagggcataatcaattctgggtttttgacaaaaattgacttattacca

SEQ ID NO: 429717 - DNA, 339 bp, Oryza sativa
ggcttgtggaccgagaaagagaagaaagagagaggggctgctctcgagcgaccgccggctttcctccacccgcgccatctacgtcgaccgccgcatgaaattggccctgtaatctgtcgatgcgctcgatccattcccccgatctgtcgatcgttccttgcgaaccctcggttcccggggtcccgatccggtctttgccgagtcgccgttgccgccggagtcagagtctgagtcggagggggaggagatgaacggagccagcgggaaccaccagttgcagtaggagcagctagagtggttcaagcagcaactgcagcagctggccctcctgatgcaaca

SEQ ID NO: 429718 - DNA, 266 bp, Oryza sativa
gggtctttgtgcacctcactccgcctggtccggggcccaaagggcacgctaccctgcgtccgaccaacccaccaccagggtcacccatggtggaccagcgactcgccggcctgcacgccgccgcgccgaatggacttcagctgcacgtcctccgcctggcatggccgacccgcggagcgatccatcaccaccgctctcctccggggggccctcctgggggactacgacaccctgcgcgccggacgttctctgctaccgccccagga

SEQ ID NO: 429719 - DNA, 366 bp, Oryza sativa
ggtcctcaagccaagtttggaagagcatccctgggttgccaacctcggaacctcggctactgcgggcatctgcttcaatcgcattccattgcattccattccatccgatcctttgctttcttcgccggaatagtccacggatcgaattccaaacccgcgaggaattcgatcatatatctagctagctacccctcgaaccgatcaacctcgcgatcccgaagaaaatccaaacatccgagacgccatggatgcagctcttctctcggcttcgacgacagcgccatgtggtcatcttcgtcttcttcttctcccatcggcgggcgccgccgcgtgccgggacacggagcatcacgagcgcggcggcag

SEQ ID NO: 429720 - DNA, 129 bp, Oryza sativa
attgagagagagaaaaagaagaaagagaaaaaggctgcgccacgccgcccgccggctggccaccacccgcgccgtcgacgtcgtcggccgcagcagcagggcgctctcgacggtggaggtgccgatcga

SEQ ID NO: 429721 - DNA, 124 bp, Oryza sativa
ggcttgggtggatcggtacgatctaagcagtaaggggctgagtgcacttggtgacagggaaccagagtttgagtgcaggactgtaaaaaacactgaaacgtgcgacgtgcatggatttaagagt

SEQ ID NO: 429722 - DNA, 112 bp, Oryza sativa
gtctcggggtgctggctaccatcggaacaatctggggctgctgattagtgaagctcggaaaccctagcgcggtgcatagtgtataacacaatggggggccgtagacatgacc

SEQ ID NO: 429723 - DNA, 282 bp, Oryza sativa
ccctgcgtgagcggcagcaagtgttcactgcgttgttcttctcgatctatcttccttggtttctcagagctgaagcttactagcgaccatgtacgggggagtcaagatgtaccaccacatccctggcgcaagccaaggatagacattgaccccactggaaaaagcacacacaacatggaatggcgcaacgttttattctgaacagattgtctaaggctgattagagaataccatgttcagattcttctgacgggccagatctctatatgacgcactggacca

SEQ ID NO: 429724 - DNA, 197 bp, Oryza sativa
tcggtgtatgctacgctgaaaggagaagaatacccgtgggtctttgatgaacatacgggggctactcatgcacgttcgcctaaagcaatagggcacatggaagactgccactggaagtaggacgagagctctctccagaggcatcgtaaccaccattatctgcataatgataccgtacgaggaacaatctgacttac

SEQ ID NO: 429725 - DNA, 276 bp, Oryza sativa
ggtgacagatcaaaacaaagtcttgtgtccaccatggtcctggtgtgttgaaacagcaaaagctgcttttgaagctaacaacagcaagctgggtctttttgctttggaatatcttgcaagatggattgctcgttctgagcgtgttattcctcctcttcatctttcagtagatgaaggtttagtactttcagctctaagcgttgtaggtagaacttgtagaactgatctcctgaatgctgcttgaataatattacgtatgtccttgctccataaatg

SEQ ID NO: 429726 - DNA, 152 bp, Oryza sativa
tctgatccgaattccacctatccgtctgattcggcggcgccgagccagaaatgctggcctactactacttcaggggtgggggggagctcgagcgtcagctagctagctaggtgcgacgcgacgacgtgacggctggtattgctaaggtgagg

SEQ ID NO: 429727 - DNA, 373 bp, Oryza sativa
atctagtctaacggcacaataacccaaccacctggactctatgtaaccaaaggcggggttcccgacaatatctcgtatctcgtagtctacagcgaagaactcagccagtacacccaataaggggctcaactccaggtataccatgaacgccactgctgaaagcactcatgacattgagtctggagatgttttatttttaacaagatgcttaatgctgaatacagaatacccatgtcagattattttgaaggcccagatcttaatattattcattggactattgagcttggttgtctctggaggaccaggttgcatggatggtctactgtggttgaattgatagaacccatgtttatatttttcttgttggtcc

SEQ ID NO: 429728 - DNA, 56 bp, Oryza sativa
actatgtccaacgtcacacaaacccaatcaccaggactcttagtaaaccatggccg

SEQ ID NO: 429729 - DNA, 488 bp, Oryza sativa
tctaggttctcctgcgcacccaaaaatatcaaagaactcataagcggagagaggcgaataacaggggggacgccatgtacgtggaggaggaggtggggatgtctccagtggattttctatggggctgttctccacatataggatgaggcccccagctgacgtctggctgtatgttaagacagtagcgtcttgatctatgttgttagcttctattttcaggattggctcctctattcatttaactttttccttatagactctcttctccttcttttccgcttgacttattcttttaattttttcttgttttgttcttcctctttaatatcctttttttgcatttgttttttattctttatctctttacttttttgatattttattcatttttttatctgtatattttttcatccttttatattatctttacctttacctttaattttatttttttatttttccttactctttatcttctttttcctttt

SEQ ID NO: 429730 - DNA, 346 bp, Oryza sativa
ctctcctctgttctccctcctttgcttcgttcccatgccaattaatcaaccactttcacctccacatggcctaagaagccataatcttctattgacgtctgcatttgcacggcggtcgtcagcgattgggcacgacgggcatggcgtttccgccgcatgttctgattgctgcacttactatggttcttcgatttctctttttttattcttcttatctttttcttgtattactctttttctcacttccatatcttttcttccttttttctagtctctttctttactctcctcttcctctattcttttctcttcttttgttcttcttcctagttttctctttgtctct

SEQ ID NO: 429731 - DNA, 84 bp, Oryza sativa
acttcgtcgaacggcacactaacctaaacacatgggctaattgaaatcatcggccggttcacttctctaatcttcttatgcatg

SEQ ID NO: 429732 - DNA, 94 bp, Oryza sativa
acttcttccaacggcatactaacctaaacaccatgaatcatttaaaacaaaggacgggttctctccactttctattaaattacatatgaaatat

SEQ ID NO: 429733 - DNA, 417 bp, Oryza sativa
atttgttagaacaggataaacccccaactaattggacataatgaaaccaatgccggggattctgccacgttttattactgcgtgaatctgatgccttttttgagctataaatatagctcctgagcccctcctccactacacaccaaaacctctccaatccccaaatcctgctcatctacttttccagaacctttctttttcgatttcgtgttcgagttctttgtgattgcagcgatggcgttcgtggatctgaccccgaggcaggcgaggaaggcgcacggcggcgatggtgggacctactacgagtggagccccgcagacctgcccatgctggaactcgccaacattggcggtgccaagctgtcgctcaacgccggagggctctcccctgcccagtttttccgactccggaaaggt

SEQ ID NO: 429734 - DNA, 118 bp, Oryza sativa
atcatgcccaacgtcacactaacccaattaccaggactcatagaaaacaatggccgaatgcccgagaacatctagtatatcgtggtctacagcctttatctcaaattataaaatatat

SEQ ID NO: 429735 - DNA, 133 bp, Oryza sativa
attatgtccaacggcacactaacccaactaccttgactcatagtaaccaatggccgaattcccgagaagatctcgcatctcctggtctacaacgaagacctcagccagtagctcctataaggggctgctctcg

SEQ ID NO: 429736 - DNA, 247 bp, Oryza sativa
tttaagcccaacggcatctgaattcatcacctatgactcataggatgcggtggacgaggcactgcacaaaaacctcaatgagctgactggaacgatggttgcggccaagagagcctgtccaaggctgcactcaactggacctgttgcgcgtacacctgcggtagggctgacctatgctatgaggaggctccatagctcgttgaaagcttccaaccaggggtataacccaaaccctatgggaagttat

SEQ ID NO: 429737 - DNA, 416 bp, Oryza sativa
gccttatcacggccgggcgacgagagcaacagccaccgatcgtcggagtccgtacatggatcgggacggttagcgcgcccggccggccacgcctcataggaagcttaatgctctctttccagttgcaggatcgaacacaccgatcaagtgcggcgagcacgtagcctctccgagtgatggcacgcgctcccgtgctcgccggcgtggatctactactggccgtgctgctagcgatggcctgcgccgagcacgctgtgacatgccagacatcttccccggacggctctcacgagtggaacgagggcgagtcatctgagtctgaacagtgcgccagtggtgcggaggggccgcagatgctgtctgaagcctccgaggagcttggcttgggggccgggccgctcaagacgatgggcatg

SEQ ID NO: 429738 - DNA, 282 bp, Oryza sativa
tcccgggtggacccaccccgtccggttttgtttcggccttcctcctgacccacctccggggcccatgccacccgaaccgggccacccaaggcggtgggaaacccaacccgggataaccctagatctctctccgttccgcctcgtggctcccccaaaccctagatccccgtcatgcaccaccccagggcgcgctacccgcccggctacacctccggcggcggcggcggaggcggaggcggaggaggaggcggccgtggtaatggcggtgggggatttggtgga

SEQ ID NO: 429739 - DNA, 101 bp, Oryza sativa
cacgcgtccgatctcttcgaacggcacactaatccaaccaccatgactcattgtaaccaaaagccgagtgccctacaacaactcgtatatcgtgttctaca

SEQ ID NO: 429740 - DNA, 72 bp, Oryza sativa
tctttatgctgcgattgaaggtcttctttagggggttctttttatcagtgtgaggcggatcaaacaacaagg

SEQ ID NO: 429741 - DNA, 127 bp, Oryza sativa
atctcgtccaacggcacactaacccaatcaccaggacccattgtaaacaaaggccgggttcccgacaatatctcgcatctcgtagtctacaacgaagacctccgccaatagccccaataagggcact

SEQ ID NO: 429742 - DNA, 127 bp, Oryza sativa
atctcttcgaacggcacactaacccaatcaccatgactcatagtaaacaaaggccgaatgcccgacaacatctcgaatatcgtggactacaacgtccacctttgccattacctatatttaagggatg

SEQ ID NO: 429743 - DNA, 120 bp, Oryza sativa
attatgtccaacgtcacactaacccaaccaccatgactaattgaaaacaatggccgaatacccgacaacatctcgtatatcgtaaactacaacgacgacctcaacctgtagaacatataa

SEQ ID NO: 429744 - DNA, 92 bp, Oryza sativa
atcatgcccaacggcacacaaccccaatcaccaggactcatagaaaccaatggcggaatgcccgagagcaactcgtttatcgtggtctacaa

SEQ ID NO: 429745 - DNA, 126 bp, Oryza sativa
actatgtccaacgtcacactaacccaactacctggactcatagaaaccaaaggcggattgcccgacaagatctagtatctcctggtctacaacgaagacctcagccagtagcacctataaggggac

SEQ ID NO: 429746 - DNA, 371 bp, Oryza sativa
gctctagatcgcggcgcggcgcggccgccgacgggcgaggtttctcgaccgaccggaacatggcttcaatctttggatgcatgcgtgctttagtccatcattgatgtccccaaggtgcatgggatgatatctgaagaaaatatgaggggatgtttctagaagatgcaaaaaatgatatggtcattccttggaggtctacggaagataaacctcatctggaagtagggtcaaagtgtgtttgtcataacgtgcatctgatcctctttcatactgctactacgagatttataggattatgctccctccaaaatgtctgaaatttgttactttatcctgataaaagcaatgctttctatatgctcaagaaccct

SEQ ID NO: 429747 - DNA, 103 bp, Oryza sativa
actatgtccaacggcacactaacccaattacctggactaatagaaatcaaaggccgaatacccgacaacatctcgtatatcgtggtctacaaccaatacgtca

SEQ ID NO: 429748 - DNA, 259 bp, Oryza sativa
gtctagtcaatgggcgtactgatccaactgcccgggctacctgtataacatggcagggtacccgtgcttttctcccacgatttagtccagatggaaagcatcttgtgtttatctcagcaaagagtgctatagatagtggaacacacaatgcgacaaattcaatgcataagattgactggcctgcagatgggaaattggagggcctcactgttgctgatgtggtacctattgggaagtgccctcaggatggttggttttc

SEQ ID NO: 429749 - DNA, 52 bp, Oryza sativa
acctcttccaacggcacaataacccaactaccaggggtctttttaaccaatg

SEQ ID NO: 429750 - DNA, 131 bp, Oryza sativa
atctcgtccaacggcacactaccccaactacctggactcattgtaacccatggccggtttcccgacaacatctcgcagatcctggtctacaacgtaaacctcagccactagatcttataaggggctgcact

SEQ ID NO: 429751 - DNA, 127 bp, Oryza sativa
ctcatgtagagcacaataataacttaaagaccaagggacaattgaacactatgtacgggtacctatacgctctggagaatatacaaatgtatactgtttcttttataaaattattaatttaatgaaa

SEQ ID NO: 429752 - DNA, 122 bp, Oryza sativa
atctcttcgaacgtcatactaatccaattaccaggggtcatttgaacccttggaggggtacccgacaacatctagaaacccgtggtctactccgaatacttcatccagtagacctaataagg

SEQ ID NO: 429753 - DNA, 323 bp, Oryza sativa
ctctcttgtcggagttgctcctgctccatcgtcataggcggcgccaccagaaatgaaacaggcttagggggtggaagcccaaaccggggaaaccctagatatctctccggttcgtcttgttgcttctccagaccctagatccccgccatgcaccatcccagggcgcgctacccgccgggctacacctgcgggggaggaggaggaggcgtatacggaggtggagacctaccgctcctgcttagaagattttcatagatcgacatacgacctcgtctgctcctgtcgccggagtttatatccatttccctatatcttccttaaca

SEQ ID NO: 429754 - DNA, 257 bp, Oryza sativa
tcggtctcgatcgtgggcacgaaaggctattccccgggggtctttgtaacagtgtgacggttatccaacaacatatcgatgaaaatgatgaaattggttaccattaaggactactttttgctttggcgttgactcgttttgataggacacacctgtgtccagaagaggattaagaaaccaccttaccgtcaccacatgggaggatgtcctcaacaccaagggacgattccgctgatgctattactacctacatattt

SEQ ID NO: 429755 - DNA, 293 bp, Oryza sativa
ctgctgctctctccggagccaaggcgaggaggcggcggcggcggcggcggcggcggcgcgagacgagatcgtcgagtccggcaccccacccccgtccttcgcttcacacgaaaaggaagggaggaagatgagctccgtgtctgaggcggggcaccagaccgggatgctggtgtgcttcacctgcgcgcttcagtacattgcttttcccaattgatatgctgttcctataccattcctacaaaaacttttacactatcttttaaagcttaatattctacatttattcttacatt

SEQ ID NO: 429756 - DNA, 90 bp, Oryza sativa
gaagtaggagagaaacatctagagtgaataagaaagacggtgtttcgcccgcgccccggccctgcccccaatcctacacggtgcactccc

SEQ ID NO: 429757 - DNA, 489 bp, Oryza sativa
aataaaaaactgtatcaaacacgcgtcaattattagaccatatatacgaccaggctagcacaatggagaatttcccatggtgaactttgtattaattccacgatatgcttagcagtattgttacatgatatttttatttttcaagggagggaaaaagttttgcctcgtatattaatagagaaggaggtattattacatgataatcccaaattgaaagcaaagtagaacacagtacaagaaaacatttcgaaattcctctaaagctaaagaatatgaagcatatcgccattgcccattgtgcaccagcaactgcggacaacagtaacagcgtggttaatttgtctcaattctcaaacacgaagagctgaaaatgcttctttgattgtcatgacttcagcgtaaacatcttgcattgctgggcgatcctttgggtgtctccatggagcatgagataccaagcttagcaagttgcatgacacaacccagcat

SEQ ID NO: 429758 - DNA, 219 bp, Oryza sativa
cctgcgccgtcgtgcggccttctctcctgccgggcgtcgcccgccgcgtcgcttcgccacctcaccctcctcctccgatcgtcgccgtcgccgactaggcctcctgcatccatcgtagccgccactctttcctagcaaggtcatcgcatcgcatcagcgtgatggcccccgtcctactcgccggttgatgcgcccacacggagatggtgtatgcaattt

SEQ ID NO: 429759 - DNA, 82 bp, Oryza sativa
aagtgcggcaagttcgggtacaacctgctcgcgggggggtttataagccccaagagggggagaagacagcttgttatgcacg

SEQ ID NO: 429760 - DNA, 148 bp, Oryza sativa
ggataggagggcgcacgcaccacaccaccaccacgggtaacatgcaccgcaatcttctgtctccctttttcttcttctttctttctttctttcttccccttatccccaagaaccgcgtctctcaagaggtggggagaggaggaggagg

SEQ ID NO: 429761 - DNA, 395 bp, Oryza sativa
gccgtccggtctcaccctcctgtcctcccctcctcgacgtggggctagggttacgccccctgctgctgctcctcctactactactcgagagagggcatggccggaagcgaggcagcaaatgcgcaggaggcagagaacagacccggctgctaaggagaggggaaaccatatcacaaccatgggaagcatcatcaaacatcaattagtgaatagtgactggagggagagtaccagtgttaaaaacaatctcggtattctgcctgtatgcacaatattcatcaacatgcttcctggcttcaactctggggataccattttagttgatcataggttcaaaacaagaaagggtctgatttcaaaaacaaaataatacacatgctgccttttctctctct

SEQ ID NO: 429762 - DNA, 347 bp, Oryza sativa
gtcggattccggttggaccaaagggtccggtttaatctcccccccccttcccaaccacataatggtatcatgcgcaccgcctccagcgtgacacgccgcgtgagcgcgggagcacctctcctgacgagccttcccttttcctcctcgccttcgcgtcagcccggcatggggttcccggactgctggtacatccgagctgctgctccccaagcagctgctccacctcctcctgctgctcggatacatccgccgattcctcctctgggcgttccacgccgtcggcctcggggacctgctggatctcggggacgagcagcaggaggtgctgcaggaacacgcgcgcgagc

SEQ ID NO: 429763 - DNA, 226 bp, Oryza sativa
  unsure (1)..(226): unsure at all n locations
tgaagtcgttcgagtcgtcgtcttcgtctgcgttccgttgcgcccgcctcgtcggctcctcggcgccgccgacgccgacgncgacgcggggaagaggctagccctagaggagaagtgggggtgaggtgggagagaggagcggcggcaaatggataccatctatccataacttttaccgccaaaattatctccaggggcctaaaaccgtgtctgcaatgcactagca

SEQ ID NO: 429764 - DNA, 195 bp, Oryza sativa
tgggtaagccgatcctaagggacggacaaaccaaaaatgagagcgcgaccacgcgcgtgcacggacggggaacactcttaagaacctcagagccggcccggggctgctgcccgaaacattaggaagtcaccagactgcggcggacgcctcgggaagagtcctggtttctgcttaacagtccgacaaccctggaaa

SEQ ID NO: 429765 - DNA, 210 bp, Oryza sativa
ttactttttgtttgacaaaattgctctgaaacgacttggatctgtgggaaacacaaatgctctaacggacaggactctttcagggaattttgcaccccgttttcatggttggacaaaccctcgtatcattatttcacattgcacactttctgggggaatattaggaattttttaaaaacatggaaagcaaaacatgaggccccttgcaga

SEQ ID NO: 429766 - DNA, 91 bp, Oryza sativa
ccctcccccagggggttttttgtatttgggcggggggggaagaccaccccggccccttttattaaaaaaatgttcacaataataaaaaccc

SEQ ID NO: 429767 - DNA, 401 bp, Oryza sativa
acccgccgtaaggacctttgagcaatggtcttccgaccccatgattggggacaactggggctcttctcccccgtacgacgacccagcaggcgtggcaaagagctagccctagaggagaactgctgttcatgctcacctcagggggatccacctccctcaaagcgctgcagggacgaccacacggacgtaccggcgacggccgagatgaccaacacgccccagctggttgaggcgacgaattgggaccacagaaccgcaggcacaatcgttggcgggagcacggggagacttgtacccaacgtgcacttggatgattattacgctataacatgaactgcttccaaggagaaagcacttgataggtgctccaattggacatccaacctgacagagggtctcga

SEQ ID NO: 429768 - DNA, 287 bp, Oryza sativa
tttttgtttttttttttagagaaagagatgcagtgcctcgggggatcgctgacccgacattgaataactggagcgcagcgagccagatagtatacactacataggcatacagggaaagaacaagaagttcaataggggttgactaagagaagatgaagaacactaggacgtggacatggtacagaggacactgtcggagaacttgacgttgacggggcggaccgactcgaacaagctggggaagacctggacggcgccgtgggtggcggtatgaaccatgtacgggg

SEQ ID NO: 429769 - DNA, 375 bp, Oryza sativa
cttcaaaggggaaaagaaaacaaaacgggcccccaaacaaacaaacaccacaaccccacccaaacaccaggaagaaaaaagaccccccaaggagggggagacaaacaaggggggacaaagggaccaccaaccaacaaaggggggaagaaaccccccaagggccgggggacccggccaagaacacgggggcacgggaaaacggcaagccagccggcggcaccaaaaaggggaaaaacggcgaggaagaagaggacgacctcaaccaagatggtgacggagaccccaaaaaaaccggggggaaaacaaaacccccgaacaaaaccagcccccccacaacaagaaaggccccgggacgaaccagaaaacccccgcaaa

SEQ ID NO: 429770 - DNA, 437 bp, Oryza sativa
tgtctcctcttcctactgctgctgctgctttctctctctaggctgcttgctttgcttgcccctctctctctctctatctacaaatgttctcttcttttgagagaagagaggaatagctgcaacacaaaggaaggcactgcttgcactgtgcagtgtgcaggcacagccaagttttcaaaagaacccgccatcttctttctctctctactgtcctagcaattctctctctagctccagtattaatttctttccatcctccattttcttgggcaccgtgcgagcttagctctgcactgtttgcctcagttgggttggtttggttttggttgcttcttctttgcttcaacgggtggtcgccctcaatgcacgaaagccttgcccggaaatgctcctcccgttgagctttttcgtaaacgtttgaaatccaaagcaacagc

SEQ ID NO: 429771 - DNA, 407 bp, Oryza sativa
ggttggttgtttttgtgtttcacaggttttttcatttttccggccaaaaaaagaccaatgaccaggttggctggatgaagaagccctaaatcaatcccacgcctgtacaacaaaaacgcggccaaccaacagggggaaacccaccattcctggtggatgaccctcctgctgccgattggtgggcacttactagctttgaagagggggaggccgggatccatgttcattgcaccctgcccggaggtgcttgtcggcccttaggccctcgacggccatccttggactgggggaaaactccactgcctgatggaccaggggttttttggcggggggccccctgaaaagacaagagcaggggcgcaccaccattttgggcggcaaagaccccatggaaatgttggggaggg

SEQ ID NO: 429772 - DNA, 376 bp, Oryza sativa
ttgtgctctgagggactcataacctggctggggctaacaccggggatggctgataaaacacaggaggggcaggcgatgaaacagctgccagtacccatagcagtcagaccataaatccaggaccactttgaggaggtgtgttcggggcatagagagcagaaatagcgactaaaacactacgaagactggtgctcatgagagcacgtcgtgtcggaacaatcgatgatgaaactgtcaaaaagaagctccagaccgtggagatgccaatactgtcagttagaggctggggcttataagcgcaagcggttgctactttggatgacatatccctgctcagataagaatatgcgcgcgtggacacatgttcctggggtat

SEQ ID NO: 429773 - DNA, 368 bp, Oryza sativa
aaaggaaaatatcaacttttgcacacgggaagcccataatttttgcaagacacacaagtaatagaccaacagacagcacaggcggtttatttcagggaatacgcatgaaaaggaaccccttgacttccaaagaaaaagagggcatataaatgagcggaaaggggaggaagctaccaaacaaactaacaccccaggtgctcccggggaaaaaataacgccattaaagaagacggaatacagaggatccaagggccaggattgaaggcatgaaaaacaggggccccacagatggggggagcaaccactctgaactacttgacaaaagggggggggccaccataccgctaagggcacacggccccgcaaaa

SEQ ID NO: 429774 - DNA, 466 bp, Oryza sativa
  unsure (1)..(466): unsure at all n locations
gtatactgtggagggcccgcccttttttttttattttaactcatatttattcacggattcaaatagaactcatgcaatatattttccactatcgtatcattcccgcaaccgtcgggtcaggcgggtgcggaaaatacccgcccgttttcacccctaaatacaagatcccaacgcttccccattcttgaatccgtgtacaggcagctgatctgatgcaacaggagtcatttagaagtcgtcgtcctggttgggcttgggggaggtgaggacggccgncaaccaaattcttctccccctccaagatgggtctaaaaaggatagttcggggtccccggtttagggccccctaggggggccctttttgggcttaccaaaccctcttccccccccggaaaaatatagatttcccgcagaaaacaaaaaaaaccccttgggggtgtttggttttaaccccaccccccccttt

SEQ ID NO: 429775 - DNA, 381 bp, Oryza sativa
  unsure (1)..(381): unsure at all n locations
ttccaattgcttgtgtcaacggaactattcatctacctggggagagccgttggtttcacaatgcttgggcccttccggtggtgctcgatcgacgggctcgccgccgccgtagctgcacgccgccgngcgccatgtcaggcgagctctccacgcgcgcgtcgacctcctcgtcgagcagctcccctcccggcgacgcgcgggggccggaacatggagggacgccgcgtggcgaggtgtcgtccaagcgccgtctggtgctgcggcggcggcagcggtgccggcgtctcggcggcggcgccgcggcgtcgtgggcggcggcggacccgcgggcgaggtgggtcagggagtggaaccgcgcgtacctgctggcctgcgcggggg

SEQ ID NO: 429776 - DNA, 492 bp, Oryza sativa
atactgcaatattaggaatatataaaggcatgactaccattatgccaccggtacaatgcgaactacggaaaagggtgaaagaaagaatgtcaagtaaagaaagaaagacggaaagaaagaacggcatgtaaaccgctgagagaagttttacagaggaacgtttggattggatgtgtgcatcaaacacgtgtataaagtttcacgcatagattttgactgtaacgagcctcaccactactctgttaagaagggtgaacctaattaaagcagcgaagatttgcacaggtaatgaacgcctgaaggaacatggacttgctgctctccaacttgcataaaagttttccaaggggtggagctttcttcccacttcgtttaaacatctaggcaaaacagctgatactagcatctcaaatgtacagttgtgattcaaaagaatgacagaatctcatctaattattgacactactgaaactgcttgttgattcataatac

SEQ ID NO: 429777 - DNA, 471 bp, Oryza sativa
taagaacttgcagcagatggaacagttatcgataaaaactccagtgaagctaacaggattgtacataatagtgataagttggctttggagagttcaaaagaacaatcacaatcaggctctgcttctgcagctgttgataagggaagaggaaaacctcaaggtgtgggaacaatggaaaataatgccatttcagaacgtggcaatgttcatgagttgacatcgaatggggatttatctacaaagaatgaaattgttataggcgatgctaaggataaaactattgtttgcagcacagatcacagtattgtgggttgggttggtgatcctctcagagtagtcgagaacaagacttactattactcttgtaacattgatggtatagcatacaatcttgatgatcatattttggttcgcctgcagagataaggagtctgctccatccaagctgcagtcactgtgggaagagcatga

SEQ ID NO: 429778 - DNA, 420 bp, Oryza sativa
ggaaacaattcatgccatcattttttgggcaccggaagcccataatttttgcaagatacataactaattcaccactgtttgtccaggcggcataatttaggggatatgctgccatagcttcccctttctttcgaatgaaaatgatggcatatcaatgagcggcaagggggggagttttccaaacaaattctcaccccaggggctcccagataaattataaagtcattttagatgatgcaatacagatgattcaatggcctggtttgaagccattaattataggtgccccgttaatttctggggcagctcctttgttcttcttgacgtaggcagcgtattcaccatagggcatagggtacaaggtactttggtagcgggtgacacggagtttcttcctcaaagaggcggttatggtaccat

SEQ ID NO: 429779 - DNA, 423 bp, Oryza sativa
acaaaacggtctcatccggggacaaaattcaaaagcccttgggtaaccggttacctccccaatttttatttaaaggggaaaggggggtattggtttttttggtacaaccaaatttttggggggggggattcccggccagggggccttgggctcaggggtctttggtctaggtggccttggaaccaaagacttttttcgcaaaagacgggaaacaaaatgatgctggggggatcccggaattggaaaacttaagggggcctttcgattttggggggaaccccttatcctcaagggtaaaaaaggggggggggaaataaaccgggggccccccggggggggaaaggctaaaacccataaccccccttggggttggtggcccctggtgtccaagactatatttactgggcccttaaaaaccggggg

SEQ ID NO: 429780 - DNA, 387 bp, Oryza sativa
tttttttttttttttttttttttttttttttttttttttttttggtttttttttttttttttttgtgttttttttttttatttaaaaagaagggggccgacgtacacaattggaccgggggaaccctttttggaacagggaaaaactggcgcccgggaaaaaacgggtcccggcccatgagctggggaaacaggaaaaaaaaggacatttggggattaaacgggcctgccggaggctacgcccgcccgaaaaaaaatacccgaaccctcaaggttggctccaaaagggacaaccgaattcccattttaaaagggcccaaagggtaaacccttggggcttcaccaaggggggggcagacccgggagaacctaaatttcccggggggac

SEQ ID NO: 429781 - DNA, 275 bp, Oryza sativa
attgttattgtttctgtttttttttggtttctctgttagttgccacacaggtatgttcactctccctgctcaaatttgatgtttgaagaggaaggatggatgaaaaagctctgtcttaatccaaagtctttacaagaatgacgctaagaagaaactgggggaaacccaccattactgtcagctgatgctcctgctgctgctagctgggtcactttctagctgagaagaggccgaggacgggatccatgaacatatgctggttggtcagtggtgct

SEQ ID NO: 429782 - DNA, 123 bp, Oryza sativa
gctcccgttttaccaacacctagaatcagcattcaaaatcttttcaatagaaaaacctaaatttaatgcacttggacgttaatttacatggacgggactggcaaaaccttgacctggccaaac

SEQ ID NO: 429783 - DNA, 376 bp, Oryza sativa
ttccagcgacgcgaaacgcgagctcgcgaagtcccaccaccacccaccgccggcggggagggaagcttggaaggggcgcatcggggagggaagggagcggatcatggaggatttctacgtcaccatcccgtacggcgccgcggtcctcggcggcggcgtcgccggctacctcaagcgcgggagcaaggcatcgctggccgcgggcggcgggttcggcggcgcgctcctcctcgccggcgcgctgagcgcccgggcctttgcgcgcggccaccccggcggctccctcttcgccaccgtcctccagaccggtccgtttctggtagtgttgctacagtgctactccccccccatccttcattcatcccctccgttttat

SEQ ID NO: 429784 - DNA, 502 bp, Oryza sativa
gaaactgaaactgaaactgagctgccatggctacttgctaagttgctacacaggtatctccattttccctcctaaaatctgatgtttgaagaggaaggctggatgaagaagctctctctcaatccaaagtctttacaagaaaaacgctaagaaaaaacagggggaaacccaccatttctgtttgctgatgctcctgctgctgcttgcttggttctttctagctgagaagagggggaggacagggatccatgtacattgctgcttggtcagtggtgcttgaagggcctcaggtcctcgacaccatcatcgtcctcgtcgtcatctccactgcctgatggatcatcatctctcttccgcttagcgccctgcgaggacgagggcaggtccgtaccaccatcatcatcgtcatcaacctcatctctatcttcatcagcatcatcagcctcagctgcatcaaagtcgtttccaaccgccatggcctgaggttgagcaattggttgaa

SEQ ID NO: 429785 - DNA, 451 bp, Oryza sativa
tgaaaaaaataatttattttttataggagaaaaaaagaggagaaaaaaaagggaagaaagagatggacgaggcgtgggagagggcggtggaggcggcgcttcatgccgccggagaggggtgctcgtctccgtcgaggagcctgacgctggacggcgccgtgaagtgcctgcacggacggttgcccttcgcggacattctggagcgttaccagagcctgtagcccctgttcgtcgccggcgttggtgtcgtgtctcttgcccgggctccctcgtttgctctacctgtctctcctgccgttctcctcctcccgtttcgccttattccttctccaccttcgcttcttcccctcttggcccttcttcctttcctcatcctctgttctcttcttttcattactcctcctctcctcttctcccttcccctccttccccctcttttcgttcccctttt

SEQ ID NO: 429786 - DNA, 239 bp, Oryza sativa
agctattacattttttttttttttttgtgttcttcatattactgaataaaaggaaatattctgactatggcctctaccacgcactggttctaagccaatttaggccggaacccttaagtgcaggacaacggagggggcaaactggacagtacaccgtcggtgcggcaacgacccaaactaaccctacactggggtggaaaagggactatatggggaccaactcgaaaaaggccggccta

SEQ ID NO: 429787 - DNA, 228 bp, Oryza sativa
tatctcctccttcctcccaccacctcgccttgccatggcgggcaccctgttctccacctcgctcacccccaccttgctcccggccgtcccctgccccaagcccgcgccgccggcctccgtctgcttcccctgcgcgctgccgccgcgcgccgcgctagcgctgcggaggcggctttctcccgtggccgtcgcggtgtcctcggaggtggaggaggaggaagggtggct

SEQ ID NO: 429788 - DNA, 446 bp, Oryza sativa
gcttcggcatgcaatggttgaagtaggataaaagaacttctacaaaatatctttacacaaagcggtgtctgaaatcaatgtcaacttgcaattacattggtattagaattaggcagaatcaactaaggtatggtgatcttccgtgtttgactatggccaggaccccataaaaacaaaagggaaagcatttgctctattatccttgcaactggaccaatatcattcagaaaggcattacctatcatacaatttaacagaatatataccggtgttaccacactaatagattgaggatagtatcaatggcgaaaagggaaaaagatgcaagtgcagtgaatgtgattccgtaaagatgggtatggtatatataaacaaaggagatgttgacctattgaagaaagcaccagttattactgccgtcaacagaagagagaaataactcacga

SEQ ID NO: 429789 - DNA, 512 bp, Oryza sativa
ttcgtgccctcctctctgtcgctgtcgccacgtgccctcctctccgtcgctatcgccgcccgccctcctctccgtcgccgccgccgcgcgccctcctctccgtcgccgtcgccgtcatcgcgcgccttcctcttcgtcgccatcgccactcgccttcctctccgtcgccgtcgccgctgcctccctctatttcgccggcgacaccgccgctgccatcctctattccgccggtcatgccgttgccacctccctctatttcgccggtgatgctgccgccctctattccaccttcgttgttgtcctctgctctggtgccgtcaccgccaaactgccctcctagttgcagctagaggtgtttgcctgtgtggccctgctctttccctgccatggatacgtttctttgaatgagcaaacaagcttcatgctctatcactaactgcgaggacagacaattgccccataatgcttgagtcttttgtccaagacgattccaacatcaggattgccatcta

SEQ ID NO: 429790 - DNA, 294 bp, Oryza sativa
  unsure (1)..(294): unsure at all n locations
tcgtcgncgncgncgnccgaancatgggcgacgcgggggatggcttcttcggcttcttttggggccgcttcctggccaacacccttaaacccgggtcgctggcctcgatcgcgacgcgaaccctagcctccttggccaagcccctcgtgccgcaggcatcccgcgtcctcgcctccccccgcctcttcccctcgcgctgccactacgcgtcgaaccgatcctccggcgacgaggaggagggggacgacgacgatcactacgacgaggaggggagcggngatgagggnnggggag

SEQ ID NO: 429791 - DNA, 289 bp, Oryza sativa
acggcccgtcctttttttttttttttttttttttggaattttcacaacagccaaggaagaaatgaatcctacccgatataggtaaggcgtaccactgccggaacacagatcatgtaagctattgacagcttacaagtactagatacagttctaaaaaaaactgcctctggactacacaggaggggtacagaaggaggccaaactacccgcttatgtaatatgaagctcaggtgcccacaacatatggaccaaaaggggggggcctgcagggaccatgccaccaaggggg

SEQ ID NO: 429792 - DNA, 429 bp, Oryza sativa
tcgcgatctagaactagttttttttttttttttttttttttttttttttttttttttggtataaacaaaatatttttgttgcgaatatacccaacaaacagggggtctccaagtgtggacacgggggagaagacagagggggcgcatgtatcaagtctatacacacgagcagaagagacaccaccgcgggcccccatggggctcgcaaataacccccccgcgcgggggggaaataaactccaagcgggcgtaaaacctccttgggcaccccaccatttgcaaattggagaaccacccctttttacaccaaggggggcccccaagggggccaccccggcatcaaaaaagatgccccccgggggaacaaagcaaagggggccccccgcaggaacaaaaaaaacaggccaaaggttgcgctcacacactggg

SEQ ID NO: 429793 - DNA, 414 bp, Oryza sativa
ttgagacattttacagttgagcaaattactttaaagggatggcttttccaaatattcagggggggtcccggtaggtggaggggaagttaaagttttaaaggaatttgtcctggacattttgttaatgcacagttggtaagcgcaaaccttcgcctgatttttatctacatgctgtggaccacctaaacgttgatccagcaagctgcatattcattgatgacaggatgacaaacattgaagcagcccttagtgtaggaatggtttggtttgcaatttaaaaatgctgaggtgctcaagaaggatttatgctcgcttggagttgaatttgcacctgtgcatgaaggtgaaatacaagtccaataaggttgcactttgttaactcttttgctcatgtggataaaattcatttatctg

SEQ ID NO: 429794 - DNA, 458 bp, Oryza sativa
gggggtgttacaattaaccggtcttgttcttttaattggggttggttttgtcatttacaggcccttttttcgggaacacaaaggggcgaaccccggggaggcccgccccccccctccccggggggggccacccgggactcaccacagggggggggggtccaggatttcggccccaaaaaccagggcggggtgtttgcagaacccccagcgtggggggggaaaacccccccggggggccctcttgggcaataccatcttaaaaccaccaccaggctcgcccaaaatgggccccggatagaaaaagggttaccggtgctctgccaccgggggggacaaccccttggggcaaaggtggacttcctggggcccatctgacccaatttcgaagggggggcggcccccccccaaagaaagggggaaaaggggccaatgccggggggcaaaaaaaagcccaaagt

SEQ ID NO: 429795 - DNA, 260 bp, Oryza sativa
ggaacggcattgcaattggttgttgttggttgttttaccagccacaaaacatgttttctcactttggggttttaaggcaatggggagaagcacttccactggcattcggaggaggaacaaacaagaaacgtatgcaaaacggccgggtttgactataccccgtactccctaaaagcaaagggtaccacagggctctgtggatctatccactgggccaatgtgatcctagaacgcggtccttgtaccatacaatggaccag

SEQ ID NO: 429796 - DNA, 384 bp, Oryza sativa
gtcctttttttttttttttttttttttttttttttttttatttcttcctggttaaggttccacttttctggaggaaggagctttggccccaaaacaaaagtgccaacaagttgatcaggggaaaaccccccaatgcacataaggggttggaactttatcacccaaaagggtcccccttgcatcccacagcgcaaagggagggctaacaatggtgttcgggggcacacacaccccagacagaaaaacgacaccgggaatactggacacaagagggggggcacgttaaggggggggcaagcggggaaagggggggaattgaaaacatctttgaaggggggcgggggggtccaaaatcaaaatgcctcattggggcaaggggggttg

SEQ ID NO: 429797 - DNA, 561 bp, Oryza sativa
  unsure (1)..(561): unsure at all n locations
ttaccctctgcgccccgcacgctcccctctcccctcctctctctcgcacacccgccgccgccgctctcccctcctctctctcgcacacccgccgccggcgccgccggcggcgtcgatccgacgtcgattcccatcttcagatcgacgccaccggcgccccctcacgccgcttctactcacgccgcaagaacgctatcgcctcgcctcatcgatctccgacaacaccgccgcgcgccgccgccgatctccgccgcaagaacaacgtcgctccgcctcaccgatctcctccgacgatattccgcgtcaattaatcttcagatcaataaggcagtggaggccgaggaggccgccatccacaaccgacaacgacaacgcgatgctgctgccgcctcaagatccaccgctgcctatccgtactcacgccaccgttcctcctccgccgaaaggttcagggcacccttcgccacccctaccccatccctaatatgtctcctctctcccgataagtatccctgatgtcgatcttatgtaaaagcatganttatgctcaatatatattca

SEQ ID NO: 429798 - DNA, 296 bp, Oryza sativa
aggggaggaattaaccattaacaactccattttttcatatcggaaataagtttacagaatttccaaaacaacacctgtaaagagacgattatctttatacaagacagttaccgaggcgtgtttgtgaatgaaggagaaggagaagatcaggtccccttgacggggtccaagatgggaactgggaccacggggcccccaaaggggatgagtaccaccccccccgacacaatgtttagggggaagtttttgggcgacggactgaggcttaccttggggggcttcccgacatggggggg

SEQ ID NO: 429799 - DNA, 483 bp, Oryza sativa
ggacaataaacaatcaacatttcattgataaattgtaacttggcaacaatcaactttacttttgtctatgataaactgtacaattttctatatatagtttttatctcttgttaggcttgcccaggctaaaaaaatttctggctccgccaccggtagctggaatgaacggagtggactattctgcatgctgtccagacctgacaaaaatcagttcatctctgatccgtctttttttacacacttgatgtaatctgtaatatggatagacgagacaatgcaaaacatactaatgtctgaaaacaagaaataaaaaatccggctagaagagaaggcaaacatatttcttttcccccgtcttaggcgggcataaatgcaagaatccttctcttagcaagttatatgtgcagagtacgcagtgccaatcggaagagaggtattgcgagggatcatatgctcatccgatcccacagaaacaaaccaata

SEQ ID NO: 429800 - DNA, 493 bp, Oryza sativa
ttggggggagggagaaaatggtgtgtagaatactagaattcgattggagggacggaattttgcaggattctgttattgttctccgttggccgcgtgctcgctgttggttcctgaaaaggagataattgagtaatgtgatcaggccattttgagtaaatttccctaatgctttagtccctcttttattttttttcttccattaattaagatattaagaaagtaagaatagcatgatttacggaatcccggcagtggcagaatccagtttattgcaacctggagtggaaatttcactgaacattttggttcatcatgttgggtgtgttgttactgccgtaccggctcccattggttcaatattgttcgtcatcccaaagtagtaggatgagaaatagtgtacccgttttcccgcttaatatgttagcatgctacaataaataaccctcaatttctgtacggaagaaaataatattcttttttcctacagcctgaa

SEQ ID NO: 429801 - DNA, 469 bp, Oryza sativa
tcaaatttgactgcaaatagtatgtgttagaggaccgggaggaatggttttttcatataacctttaatgaggttaacagattttggttggtccttggtgggttgaattgccatgctgagaggggcacacctctgctcttctattcaaaaatattgattttaaacccaacctaacttttgatttttcacaacacttgaaggtctcgaacagtggtatcctaaagtttttgttatgtttgtttttttttaaaaaaaagttttttgttataagaaaattaaatgcacggtaagtcactcctctccccctccccctaaaaagaaaacctaatttggtggcaaataaaaatattttgtaaataaaacaataaccatcaagctaaacaggttctcaaatttgagttatgcttgaagtttaggagataaattcaaaccaaataacacggaaattaagctattggttgtttttacta

SEQ ID NO: 429802 - DNA, 396 bp, Oryza sativa
aagcaagtggcggaccaattcataagatgggaatgttctaaactgattccagaagctctgactacattcttctcccacatgatcaaaccctactagagatgtagacagatctgtactgttacttggctacccacggccacatacaaatgatgcctatgcccacaatagccgtgacaaacaggatgggattgtatgcatgcaaccaacacccctaccgagagattaaggctctgaacaaacaaatttctcactcggatgaaatattgtcataaaaaaggggcagactcgcaaggacttcacgatgaatcggcagtcgggaaattactgttcttttatgacgatgatggaatattatttgttcatgcctgtctcaagcgggcctatgggataccaacc

SEQ ID NO: 429803 - DNA, 555 bp, Oryza sativa
ttttaaagaagaagggaaggatggtgttaaatttggacagtacatctatgaaatttacaatcatgatgtggagcttagagtttcgaaagctggggttaacttgctcttgacaaaatggatgaaagaacttgagaagatattctatgggaacattgtgaaatatgactctgcaataagcccagaagcacgtcaggatgatcttgtaaatgtcatctggaggaatgtgtatgccgacgaaggttcagaggctatggatgcagcagctgtccctgctatccaggcattggcacggtacactcggagggaggcaacttgcctatcactgacagataaagaagctatgttctctggcaacttcaaatttacagccctgctgccgaattctcccagcccagcgaagcctgtgcggtgaaccatgacatggtaggttggtatcccatgcgaagattggtaaacaacatggacaaaaaatattctatcagcgtcataaaataacaggaatttccctacacttatttatcgtggaatccttgcgaatctgcccttttttatgac

SEQ ID NO: 429804 - DNA, 323 bp, Oryza sativa
gggggggatgaaatcggtttcgataggttataaccatccagtcaccttttcaaaacggccagggtcggaaagataattttgggtggtacctaaaacagaaacggatttacaaaattttttaaaaacagaaaccaattccggtggggttgttttctgggaaaacggttgaaattgtccgggtccctatttagataggttccggaaacaaatacctagcccatatttatttttattgggttcatagaatggaactgccttcactaggttattcaaagctggggggggatggaacagcatcacacaggtttatttcatttttgcaa

SEQ ID NO: 429805 - DNA, 392 bp, Oryza sativa
ggcaagcatgaaccatgccacactgcaaacactgcatgatagcatcaacattatgctgtacaaatgatactgcactgtttctacttccaattaaatatcagggcccaaggggctcttgttacatcagaagaccaagaacaaaaaagaaagaaaagcaaaagaggaaacaaagcctttcaagtagtacaaatggtggcgaaggaaaaaggaattctgtatgatgaaggggtatccaaaagcacactgcaaatcagcttcagttgttagtgattagcttatttcggaactaaaactctccttttttttttttggctgctgctgtaaactggtactcgcggattgttagaatcaaaactttgtttgcctggccaaatcttcctaattttacaatt

SEQ ID NO: 429806 - DNA, 506 bp, Oryza sativa
  unsure (1)..(506): unsure at all n locations
tctgctccgcccgcccgcccgccgccgccgccgtcgagttcgccgcacctctcgcacggcccccaccccgcgcttccttcctcgtcggaccgcccgcgaccgcgagcctgcctcccgtccaagttgacgggaaccctcgccgcggaagaccgcggagaggtggggggccgcgtcccgaccccggcggtggtcgatcggttccggacgagaggagcgatgcagggcggcgtgtccggattccagaacgcgccggtgacgcgggccgtcgtcctcgccagcggcctcctctccgtcgtcttcagcgcccagcgccgcgcccgcgccctcgtcctctcccaccaggggattgtcaaaaacttccgtctatggaagttgtttgcatctgggtttgcctttcagtcaacaccggagctattgtttggagtctacctgctctattacttncgtgttttcgagaggcagataggctctaacaaatactcggnttttagtttattcactatctc

SEQ ID NO: 429807 - DNA, 545 bp, Oryza sativa
atactgtggacggcccgccctttttttttttttttttgttccaagcctatgtacaactgttcataccattcatcaatgatttccccagcctccaatttcttgttcaagatgacctgacattacaacaccgtggcgctcaatagtaacaagaagtgtgccacccccagcactgatcgcaacacaaacatgaacttctattaactggcatgtctgtttagtttattattttacccatatggagaattcctatgttgcatgcagacatgttgagtcatataccttttccaacagccatatgctgcaaacaggcacaagtttacttcaaaagctcagcttgaagtgtgagctgaacacacattttttgacaacttggcagacgcacattgcctagtaaaccagggggaccaccatccgagcatgaacacaccgcataacgccccatcagcggccggtgaataaagggaaccgtgatccagggaaactaatgtaaactacagctactttctgatcctagttgcgtgttaactggaactggaactagggct

SEQ ID NO: 429808 - DNA, 508 bp, Oryza sativa
tttctttcccctctcctcctctcctctaccttctctctaaaagactggatacagaacaaaaaaaagggaaaaaacagaaagaaaggaaagaaagaagaacacctaccaagcaagtcttggtctttgagttcatgggctgtggaattgttcccaggaatcccctctggctctgaaaagattcacaccgagcaacagttctttgatttttttccccctttgttttgctgaagaattgcttgtacagaactgcttctttcctgtttccgcttggttttccggtgtttattttgttggaattttcttgggccctttcttcttcgcttgtggaggcgaggggagaagagaggcatgggaaagcaaggaccttgccgtcattgcggagtcaccagtactcctttctggagaaatgggccaccagataagccagtgctctgcaatgcatgtggctcaagatggagaactaagggttcgttgacgaattacacaccaatgcatgctccggatgata

SEQ ID NO: 429809 - DNA, 336 bp, Oryza sativa
ctacctacttaaaaaacacctgggaaagaaaagagggaggggggcaaaagaaacaaaaaccccacccaaaaaggaccgccagggaaaggggccggaaaaaacttaaaacccaaaaaaccaacagggcaaaaaccgaccggtaaaaaaaagaaaaaccaacacaagaaacccccacccccgtcaaaaaaccgcccccgcaaaccaaccctcaataaagcacggaccaattcagggggaacaaacaccggacagaacaggggccccccaaaaaaaaccccctcgctaaaaaaaaaaaaggccccccccctttggggggacgggggacggaacggaaaa

SEQ ID NO: 429810 - DNA, 385 bp, Oryza sativa
aaaaaaaaaaaaaactccccccggggaaccccccccaagaaaaggaggggcccccccctaaaaaaaattaaattaaagggggggcggccccccgacccccatttttcccaccccaaaaaaccgggtaaataaaaaaacccccacatcccgggcccccgcccaacgggaccccccaagggggggggggacccgggggggggcttccgggggggggggagaagaaaaagggaaggatggagacccggggatattgaccgggcgacctttttaagggtggggggggccccccccggggggggcccgggcccccctggggggggaaccccctaaattcccccccgaacccgaaaaggggggggggggggggggccccccgacccccccc

SEQ ID NO: 429811 - DNA, 298 bp, Oryza sativa
gcacgcgccgtagcttgatcctctgagcgggcggccttccttttttttttttttccacatgaaacagacgcgtgactatctcacgataaggtcatcggctctagcactgtcattcgagacaaataaacacggggtttgtcttcgacaatgatctccttggcgaacagtgcggcatgtaaagagagctagctgcattcgacaaaaatgcatgagacgcatcacatccaccccacgctatgtacacctgtaagatgagactcgagacggtttgcttatttcacaccaggaccgagttctc

SEQ ID NO: 429812 - DNA, 85 bp, Oryza sativa
tttgaataaaaacattactcgagtctttggtccaattttcggttcaggcttctaattttaattaattttttttgggggggggggg

SEQ ID NO: 429813 - DNA, 334 bp, Oryza sativa
acaattggtacgctgttctttgatttttaggtacaccgaaagaagaaggcccccccggggggggagaatataaaccggggggggggagggctgcacaaaaaaacaagggccccaacaaaaggaacccggggctaaatcaggagcgcggcccaaacgggtagcgggagggggggtccaaaggggcccctgggctaaaagggaagggggggccgcaagggcgcttccaccaggggggggaacaacaggcggggcccgaaaccaaagggggaacccgccggggggggaccatgcgaggggagctttggtatgcccccggggaggggcaaaatccccc

SEQ ID NO: 429814 - DNA, 295 bp, Oryza sativa
gcacgaaatgtccgggtatgcccacaatggaggaaataggccatgggaaaaggaacaccgaaggtccttcaactgggcattgagtgacaaaatcgcccaccaaccgcaaaacctggtatacatggtccattaactaacaaaaaccagtcacagtgggtccgttgggggttttgaccccggttttatcctacgtggcagctgaatcagtgcgggagccacgggggacctacatgtcaggctgacacatcagccaaggctgtctctatctatcctgtgccctattttctgccttact

SEQ ID NO: 429815 - DNA, 172 bp, Oryza sativa
  unsure (1)..(172): unsure at all n locations
tcngactcagccggtgggaggaggagggcggcggcttttgccagcaacaggcgacgcgatggcggtgattgggaggggcggcgcgcgggtggcggtggaaggagcggagcgcaggctcctacgtcggccaccgcccacgaggctcacgaggcataggagcaacgcatgggcg

SEQ ID NO: 429816 - DNA, 415 bp, Oryza sativa
gggacaaacatacgggtggttgttttgttccggttcatgtatcatatccagtcaacagatcgacaataaccggtcacagttacatgctcgcgcgcgcggtgcgtgcagatccaagcatgcgaacgctgcgacactgcatgtgtgatgagcatgtatgctgcctggttcgtgttagctttgctcttgtgggtatctgcatggcacgatatgtagcatatgtagctacacagcggaggagttgccgtccttgctcagctagagggcgcccttgttcttgggcgtcgacctgtagcagtagcagaagttgaggatcaactgcttcccgcccagtatggttcccatgccgatcggtatcgtgatgaggatgtcaaagcggatgaacgcctatattgtccagcatatgccgttgatgaag

SEQ ID NO: 429817 - DNA, 324 bp, Oryza sativa
aatcgccgccgtttgtcctggattccaccgacatgacaatgagggagtgaatgacaagccacaagaggccaatcgctatccacgatgagaacgcgagcgaggagctccaaggactctagcatggagatcagactgtgggacagaaacccggatacaagaccggtgagggaggagacgatactgttgacacctatggcagagagacagggagcgaccaccatggaacatgagctagatcagcagaaagcgcgactaccgaaactgacgatgatgaggctggcaaccaccagcgagtctatgatcataggcatgtcataagaagca

SEQ ID NO: 429818 - DNA, 173 bp, Oryza sativa
  unsure (1)..(173): unsure at all n locations
gtcgtccaccaccaccaccaaccccnatcgggggtttttttcggcgacttccattcggtcgcgccccgcgccggggcgcaccacccgcgccgacccaacccggacaccagggactcgtccgtctccgtcttccagaacccacgcgccggagggcccgcgccgccccgtggctg

SEQ ID NO: 429819 - DNA, 385 bp, Oryza sativa
ccagacttcactacagtttatgaacaaagttcaagcccaaaatctgtataatacagcatggatgcctctacctacatctctggtttattataaatagctgaattctttggtcttcgcaccgttccttccaacatctctggtttttgcaattagcattgcccagattgcctactccagtttgtgaagatgtcagacgaggatatccggaaattatgcacacatcgcctttccaaaattttgtacatgacacagttttcatttgtccaacgatgaaatgccatatatcagatagagataggcctgcaactctcatgcaaatgaatgctagcaaatcgtggcatgcaggtctgctagtctgctactgtttcgaagttggaacttggaa

SEQ ID NO: 429820 - DNA, 393 bp, Oryza sativa
gtcctttttttttttttttttttttttttttttttttttttttttttttcaaaagaggcaaagtttttttattaagataagttgtaaaaaaaccccaattccattaccaaacataaaaccatccatcaaaatcacatgggaaacggaatacagcccaccatgtcctaactttctcacgtagcaaacgataaagaggaacactctactaaaactacttgtcacaactaactcaacttaagcttcgattttttgacccacgcagggacccaaatgcaaagagatgcggaaattaataacgcaaccttgacctggaggggcttgggctttttgggctccgggggggggagcttctcgacggggacggggagcccgccggccgggcacacggggaaa

SEQ ID NO: 429821 - DNA, 399 bp, Oryza sativa
aaaaatcccccgggaaaaaaaaaaagggggggggaaaaccccccaaaaaaaaaaaaaaaaggggggcccccaaaaaaaaaaaacccaccaaaaaaaaaaacccccccacacaatttaaacccgaagggccccggggggaaaaaaaaaaaaccgtaggggggaaacgccccaaacccccaaaggggggggacccccgggggaggggcccaaaggagggggaggaaaaagggccccttaacccgggaaaaaaagggaaccaccggggcccacgggggggggccccccaagaaaaaaaaaaaccctaaaaaaaaatgcccaagggggaaaaaaaccccgcctctgaggggggaaaaaaaacaggggggcaaatggttggggggaagaagacccccccccccc

SEQ ID NO: 429822 - DNA, 491 bp, Oryza sativa
tctatattgggcatattacagggttcatggttaatttgtccttcggctacatgatttgatggtagcttcaacattagccgattgcatggtgtcttctttgtgtttaccgttcttaatcccatcagttttcaagtttttgatcaggtgcatgttttcttccgttctccaatgctgagtttattttctcgatccccaaattggaacatagctattaggtgagttgatgattgtactcatttttttctgcctttttgtaaaatagcatgcatgtgttcttctgattgccccatttttggacatataacttgataatatcgctatgttttatcttttgtaatgtcacttacatgatcgatctgaccctaattgacgaggtaaattttgattagacatttctacctttgtattcaattctgttctgattcctgaagagaattttacgtttccaagaaacgattgctgacgataacttagttttcctctccatgaga

SEQ ID NO: 429823 - DNA, 312 bp, Oryza sativa
aaaaaaaaccaaaaaataggggggtttatttttttttttaaaaggagggggggattttttcttttttcaccattacaaaaggtgaagcaataaccgataacaaaatctcctccttctttggggaaaaattttaaacacaaaacccttatagggccttatttttaggaaaggggcgggcatgggaataaaaggaagggggggggcggttaaaaaaaacaatggtgggggggggggaaaaaaaacaccattatgggaaaaaaaaaaaaccctcgaaagggagctttttggcggaaggcttttcccacttggggg

SEQ ID NO: 429824 - DNA, 331 bp, Oryza sativa
gccgccctttaaacttttttttttttttttatctatttttcttttttttttttgtacgggtcgattcacatagttagcaagcagtctagtaggggaccaatccggccttcggcacgcatacagtttcttacacgctactacgctttctttacatggagaacatatacataaattgcgacatagaagtgcatatgacatataattagtgtgcacatgtgtgcatgctgctgctgcatgcagcgctagattatttgttcccagcagggagcgaagttgtgagaccaagtttggtaggcgtggtcctcctcaccaggaagggccggggagaaca

SEQ ID NO: 429825 - DNA, 220 bp, Oryza sativa
  unsure (1)..(220): unsure at all n locations
tgccgcccttttttttttttttttaaatgggttttttttaaggngaaaaggctgtattacatacctaagaaagcttaccacaaacaatagcagtgaatgcattctgaggatcaacccctacgctccataattcaacattgacaaacatgagcatgaggaccaaagtaataagaagagccttgtaagcaccaaggctaagaatggaagtaatatgatggaa

SEQ ID NO: 429826 - DNA, 276 bp, Oryza sativa
aatctatatcatttgttttttatttacttacttgtaaaatggttcacatatggatgtaggggagggggccaaaaggcagcacaaaacctggggaaaggggaagactaaaaaaacacaaaagggttttttgcaaaaacaaaacaaaaaaaccccaattttttcaaaggggacccgaccaaccacttttcaacaagaggtcggcaagggcaggaagaagaaacacatcccctagaagatttgtacgaaaggctaaaaagggggggaaaggaaaattgg

SEQ ID NO: 429827 - DNA, 324 bp, Oryza sativa
cccttccttaccttaatccacaccatccccatcccaacaaggacacgagcccaaatcgcccaaccaggccataagcagcacacgggccccggcccccggaccgcccgcccacgaggaccgcccgatttgcaccacccatacacagcggagtgggccccacccatactcacccgaccccatccgggccgacacagcaaaccacactcacgaagaaaccccaagacacccgcccccaatggaccgcgaccccaggggccccgccagctatatacggggggccacaacccggaccgacagagccacccccacccgcatgggccccca

SEQ ID NO: 429828 - DNA, 401 bp, Oryza sativa
caaagaaagcaacgacccatgaaaacagggagggacacgttcatgaatggacaattttgggaggaaggagtatcacacaacaggcaaatctgaaacttgttatagggccttgcaaaagtagaactacaatataggctcaaattggtatttaattctggggcttttaggtcatatatatatatatatcagggaaaggttgggttcatcgaagggaaagaaacctaaaatcaactggctgaaatttcgagggggggacaaatgcttaaaaagggggggggaagaaggttgcaaacaaacaccaagttttttttattccggttaccaaaaactttgccgggggggggacggcttttttatacaagggacggagcacaacctttatatatacaagttataagggg

SEQ ID NO: 429829 - DNA, 451 bp, Oryza sativa
  unsure (1)..(451): unsure at all n locations
cacccctggggattcggatcccacctcgcgcgctcggcccgatcccgtcctgattcttctggaaccttccgcgcgctcgattcgtgctccgccgacgcccgatctcgcctaggtgtatacgctacatttacaattgattgatctggcttgtccacccctcacatgagctcacaagtctccacatcacggggtttgccctccccaagcaagcttgggacatttgagtcccctcacacatggcaaatgtcaggtcctacaggccaggctgaagctggtagcagcgatgaccaggatatcaggctgttgtctgtttcttggaatcaggactttggttgcttcgctgctggaaccagcaatggctcaggatctttaattgtgaccctttaaggagactntcagagggatctgaagagtgtgaatttggattgtgaaatgctgtttccgtgcaaca

SEQ ID NO: 429830 - DNA, 384 bp, Oryza sativa
gttcgatcccccctcatctacttctcccttaaaaaccttccgtcttcctaatcctactcccaatgatccaccaaaggacgacgataccgaagggacggggaaaaaaatagagctggaataaaaagcaggaggaacagagagagggggaagggaaaggaaaggaggaggggaagagagacaggacaggagagcaaaggaaggggagggggaaagaaaggaggaaagagagaggagagggaggagaacgaggacacaagcagggggaagaacaagaacaggaactgcggagaggaggggatcgagaggggcgggaagagcaacgagagagaagggctgcagggcggaagcgaatgaggggaaagagacaaggcgaaaggcaacaaa

SEQ ID NO: 429831 - DNA, 437 bp, Oryza sativa
gggcctgtagaaaattgaaaaagcttatattacccaccaacttagatagaattagggcacaggctcagatggaaatttgataaccatgagacttgaccgagccgctaactgaagaacaaattgagagaagaagcactgtgtcttgggactttcaggatcgaacagtagaactgatactaggcccaaagagcaataaatccttggctctgaacttagctagatcgtagcgaaatcaaggatttggggaggttagggtaaagaaaacggcctatggaccttaagcaatttcatcctgggcctactggaggcgagctgtcgtacccaccgccccgcggtgggacggcaaataaccaccagcaccaggcatcccaggcaaaccactactacccagtcctgcagaagcccctgggttaggcaaccctgaaccatttgcacca

SEQ ID NO: 429832 - DNA, 322 bp, Oryza sativa
tttttgtatgtttacctggctaagggaggactctattaaagcacagagtatgggctagaacaaacaaacaacctacacttgtacgaggtctacaatcgagaataattttcatcaaacgtgagaaagaaagaaatttgatgcacagaaatctaacgagaaaagtgctctattgatcataacacctgtgtagcttctttatttatacaatagaacaacaagaggctattaattacagctttatgcttactaataaaacgcccttgatactggaggtcagctaataactgggacatcggaatcaaccagggccatgagccctgga

SEQ ID NO: 429833 - DNA, 321 bp, Oryza sativa
aatatataatttataattaaaatattttgtataaaatataaaataattatgataaaaataaaaaaaaaaaaaaaaagaaaaaaaaaaaacaaaaaacaaaaaagaaaaaaaaaaagaaaacaaaaaaaaaaaaaaaaaaaaaaacaccggaaaaaaaaagaaaaaaaaagaagataaaaaacaaaaaaaaaagaagaagaagtaaaaaaaaaaaaagcacagaaaaaaaaaatgagaaacgttaaataaaagaataaagggaaggggaaagaaccaaaccaagagaaaaaaaaaaaaaccccagaaagaggggggggaaaa

SEQ ID NO: 429834 - DNA, 519 bp, Oryza sativa
  unsure (1)..(519): unsure at all n locations
tctgaaatctctttgagagaagtatccatcacataaggcaagtctcttacgtagaggaggaggaagagaagagaagagaagaaaaggacggatggttagccagtccaagacgccggcgccggagccgtcgacgacgaagatgccatcggcgcctccggcggtaaagggcgtagcgaagacgctggcgcagcaccacaaggccgtgatcgggttcctgcttggcttcttcctggtcctgctgctctacaccttcctttctggccagcttgtttcctcggaggatgccattgtgagggccgtcacacaacagtccacgcctgccgtgcataccgatcaagacggcaggaccacatctccgacttaccaacgtccacgtccagcaatacgacacaagataacttggaagggaaaaatactgagcggtctagccagccagctgtgaacgacgaagcaagtgacaagatggaggaggaatcttatccggcaagacattgatcaagctggaacgaanaatggcac

SEQ ID NO: 429835 - DNA, 514 bp, Oryza sativa
gaagatagtccacaacttcagagctcacatttcacaacagtggggcgccctagagactacacccgagtgccccactggtttattgtattattacctcaaatcagtcaacagtatctttaagcattacatgatcacacatatttacatacatgtatacaaagatgtacacatacaaaaacatttcgagccatgccccaccccgagggaaaaagaattgctgagcacacaaaactggctatctacatgaacatgattgatgagcaaaactagcctagggttagagcattattggaagctatacagatgccacggccacaacacgtgctagcgttggtaaactgccggatcagccgtccacaactccagtacaaagagaacacaagaacgtcttgtggaaacaactgaagcttcgtccgcatacaagcagttctccctcactcacttgttaccatgaacgggagatggcaactttgtgggatccaagatttccatgccttcagacttaattgggtcc

SEQ ID NO: 429836 - DNA, 396 bp, Oryza sativa
cgagttgtgcctttctttttcccaaaagaaaaaaaaggggctacggccccccctccccccaaaagaaagcccccagacccccccccccgggcgggccccgaagggggggcccccaaaaaggccggtgggggacccacaaccccgcccggggggggccccaaagcggggacccgggggggaaggccccccgggcaggccaacccccccccggggggggaaaaagacccccgccccccctgggggattgccccccccgggggggggcccccgggaaaccccccttggcaaggggggggggtccccccccccaaaagggggggctctggcaaccccggggccctggggggggggcccccacttcggcccgggggccagggggggggccccccccccccc

SEQ ID NO: 429837 - DNA, 498 bp, Oryza sativa
tttttgttttttttttttgagcgcagtaacaatccatttgttcttctctccagatcagaacaactgtattttatcgactaagctgcagaatgtttcacagatgtctgcaaggaaaactaactacagagagtttaaaacccgggtggttctgaagcagcaagcctacacaaaagggtacgtcctctaacatcccacctaaacaattttaatccattaacaccccacctataatatcatttttatccatgaactcttgaggtccaagaagcacattcattatcgctagatgcctcatccggctgtacctagcaacaagtgagtgccactccagcgattcgctgccatcgtccagcattgcgtcctgggagcgtaggatttttgcatccggcaagtacttgaggactgaataaccagcgggatcagaggtatcaaccatgaaaaccggagaaagtgaacgtcctctcacttgagcatggaaggtacatatgtagtacctat

SEQ ID NO: 429838 - DNA, 161 bp, Oryza sativa
tttttggtttttgttcccatttgtgttctatttattttttttctaaaaagaaaacccaggggcgaacaccacgaccaacggggacagaatgcgagtaacaaaggcccaacatgcgcaatctgtaccacgggggaggcgtacacaataggaaaaggtgcggg

SEQ ID NO: 429839 - DNA, 357 bp, Oryza sativa
tttttggttttttttttttttttgtttcttttttatttttttttttttatgtttttttttttttttggcaaaagaggagagggaaaattgcccccaaattgcccaaggggaaactttaggcgggccccaggacagggcctttctttaaatacacaaacaggggtggaccagcccggcacaaaagaaaggggccgagcctgccctaaaatcttaccaacaaaaagggcaaaagaaacccccaattacacaaaaatgggatacaccaaaacaaaataccttgaaacagggaaccgaaggatcgggccctgcaactaaaacggcaaaattgctaaccggttgaaaaaaaaggggaaaact

SEQ ID NO: 429840 - DNA, 521 bp, Oryza sativa
actccaaccaaaaaagaaataaagaagaaccataaaactatgaaagcagccgacagaaaatttaacggacactggaatgctttacacaatgtattatttctttgcccctttaaaattaaaagttacaacctggtggccatggcgacgcttacatctgccaccatggtctgtgacaacttatagcaggatttattatcaattgtgtacaggcatcaccattgcccgttggcatggcgatacagatgttctccattcaccctcccactccctaaattggtgtagttccccatttgctgtgaaaatccatttgggttaactccaaggttcactgctggatttgagaagttatgtagccaaggttttgaagtaatcgagtccatccttccattggaataagcatccaatgtggaattttgcccttctcttaacctattaaagagcattcagcctgtcataagccatcgggtagccctcgtcataagtatgatcgggcagtttaaccggcccagactactttatgg

SEQ ID NO: 429841 - DNA, 376 bp, Oryza sativa
  unsure (1)..(376): unsure at all n locations
tgtgccgtgccgtgctccggaagatcggaatcgccctcctcccccgatcgatcgtgtccccccaattatagccccccccctntncccccccttcctccttttttccactttctcatcttcatatatcttctttccttcttcctacacttataaatctttatcaatgtttctacttacattactaccattcattccccaggcgattgacctcttatacgaccatgatccatcttattatgaatcctttttaatcgtactatgaacgtgattctatgaatgcatatcttaaatgccttttttacaaatactaatctttagacttcctcatggattaaattcactactatttaaggcattccaaacttctaacttttaa

SEQ ID NO: 429842 - DNA, 557 bp, Oryza sativa
tttttggtttttttttttttttttttttttttttttttttttttttttttttttttttttttttttttttttttttttttttttttttttttaaaaacaaaaagggggccccacccccaatttcggggggggggggaaaaagggggggggccccccccctttacaggggaaaggccccaagcccccgcccccaaaaaaaagcccccgaccccccaaaccggggggggggccccaccccccgggggaaaggggcccggaattttaaggcggaaaaaaacaaaacggggggggtcaagggggggctagttggggaaaaaacccacaagggggggggacccctgaccccaaccccagggttgggggggggggggggggcccggttcaaaaaaatggggggggccaaaaaaaccccccccccctggggggggggggacccaaaaccccccccgggggggggcccccccccccccgggaacccggggggggggggggggggacccccgggggggggaacccggggggggccctagacccaaaatgttttgcccctggggccc

SEQ ID NO: 429843 - DNA, 157 bp, Oryza sativa
tgagagagcacccatccatctcctcggaggcgaaaccttaacccacccaacccatcgtcgccggcgaaaaccctaatccatccgccgccgaaccgaagtacacgatggggagacctcgaggccgcggcggaggaggaggaggagggagggggtggtt

SEQ ID NO: 429844 - DNA, 393 bp, Oryza sativa
gttgttaagaataaccattattctttttgagaagcccccagaaaaatgagcggacacaggagggcggcgcccaaaggggtatcgctgtgcacaatattaaaccaaagctgcaagctggcggccaaggcgacccttacttgggccaccgtgggaagtgacaactaaaaaacggatagaaaaaagattgctgacaggcattggccaggaccgtgggcacggaaactggggggtgaaaaaccaaccctgccattcattaggggggggccgggggcgatcggcaaggaaaagccatatgggttagctacagggtggactgctggggggaacaagaaatgtatccaagggtccggggggatctgagaccgaccctgagagcaacaggcattccagggg

SEQ ID NO: 429845 - DNA, 157 bp, Oryza sativa
ttttgggttttttttttttttccggtttttttgttttttttttaagtttatatataccgatagaaagaccgcacacgccccaaaaggtcacagacaaaaaagcacgagccaaaaacccgacagcaagggggggaaaaaacagggggggggacccccc

SEQ ID NO: 429846 - DNA, 129 bp, Oryza sativa
aaggacgcccgcggggacgtgaccgggaacggaatggccggttgacccactttttttgtagaaaggaagctaaccccaacttgggggggataatcaccaagagagcgctctcctcggccgtggcggcca

SEQ ID NO: 429847 - DNA, 445 bp, Oryza sativa
tttttttttttttttttttttttttttttttttttttttatttatttttataattttaatataaaaaaaaaaaaaaaaaaaaaaaaaaaaaaaaaaaaaaaaaaaaaaaaaaaaaaaaaaaaaaaaaaaaaaagaaaaaaaaaaaaaaaaacaaattcagaaaaaaaaaagaaaaggaaaaaaaaaaaacaagagaaaaaaaaacaaaaaaaaaaaaaaaggaaaagaaggggggaaaaaaaaacaaaaaaaaagggaaaaaaaggaatgaaaaaaacaaagtgataaaaaaaagaaatgaggggaaaagagacaccaggaaaaaaaaaccagtgatgatacgaaaaaaaaccgaaaaaaaaaggggcaaaaaaaaccaggaaagtcacaaaaagaacgaaaggacgggtggaccgggaacagaaggaatggaaccatgaggaac

SEQ ID NO: 429848 - DNA, 457 bp, Oryza sativa
gttaaaaataaaatatgggcaaaagaaaactacataaaagtctatttatacaaaaatgactaacaatggacagacttgcaactctcctatctatagactggaacaagattacccttgaaagcctggctgacccattgaataggctccatataataaaaaaaaacaccatctatctttagtgcactccataaccgtttagaataagagcgttaaggtatgaccttccttgcttcagaacataattgctcaacatcattcccttgaatgggatggtgaataatgagctttactgaacctgaattaaggatgcctttcattccagaaggcatcagtttccctgtgccgagaagagtaataggtatcacaggagcaccgagttttgtagccacactgaatgcaaccttcttaaatgcacctagcttaccatcttcgcttctagtcccccttggaaagaaaa

SEQ ID NO: 429849 - DNA, 518 bp, Oryza sativa
  unsure (1)..(518): unsure at all n locations
ctcctccctctcctcgcgccaccaccaccacgccccgtcgccgtccaagccggcgccggcctcctacgcggcgccactcgccgtcctcctcgcttgcaacgccacgcggttccagcccgcctgcgtctccacgctctccaacgcctccgccgacgcgtccactccggacctcctcgccgccacgctctccgcgctcagggcccgcatcccgccggccgtctcccgcngcggtccgtcctcgccgcctcctccaacgtcaacctcaccaacgccgccaccaactgcctcacgttcctctccctctccacccaccgcctctcgccgccgcctcgngtcggnngggccgtcgctcctctccgcctccaccgcgctcctccacctctacgactgctggtccgcctacaagtacgtcaacttctcccgcaccatctccgacgccatggcctacctcgacgacaccatcgccgtcaacagtaactacatctncatgctcgccgcgctgcagcgctacggcgacg

SEQ ID NO: 429850 - DNA, 378 bp, Oryza sativa
ttttaagtcatcggcatcccagctgccgagtatccctcctattctaccaccgcctgcgatgtcggttcctcgtccccgccgtggccaaagcgaggccgacgctccatacaggccgtaccgcgttcctcgtgagattcaagcacccagcactgagctcgatcgggggcaagtcaccgtatggttaggaatcggtggcatccaaaccataccgacgatgaagatggatggccgatcggatgaggtaccacacgcatcctctgtatatgcgctgagtatttactcaattttcctgtgggagcaacagagcgggatgatgcgacgccgtcatcttgcacttcttcctgcctatccctgcactcttgcctgctgccacgcatc

SEQ ID NO: 429851 - DNA, 241 bp, Oryza sativa
cagcgcagaaattttttggaaacaacctgagtacattatacgcctctgtcatatgccttcttagtcactggattgcagaacactcagatttttgctccgggacgcataagaataagagtgacaccacaaggggcgagcgggtaacgctttcaatttcacacggtggaactggcacaagctatgcaggcggttagtggttattaatgctgctcaggcttacggcactggtccgtgcttaatg

SEQ ID NO: 429852 - DNA, 521 bp, Oryza sativa
tttctttcctctcgccgccgccccctgatccaaagcctccgccgcgccgccgtcgagaggaggaggaggaggaggaggaggaggaggtggcttgtgcccctttgggtaccctcctccgtccgtgttctctcttccactcctcctgcgcctgttacgcctctccttctaccgctctcgctgtgtcggtgttctgctttcgcgtcctttttcgtgttgtgccttcctcatcgtttgctcctcctcccggttccttaagttgttgtcccgacttctttctctttgtctcttttttttacctttctgtgatcttatttcgcccttgtctgttccttttccattttgcattcgccgcatgctctctcattcttcgatttctttttctttgttcatatccgtttgcttcttcttgctgacttcagtttccttaatcttttttttgtctccatgtttttttttctttcacttttcctcttttttacctttctctattattttttccctttcatttttatctttttttc

SEQ ID NO: 429853 - DNA, 492 bp, Oryza sativa
tttttggtttttttttttttttggtgattattgaatgggttttggtgttatttttattgaacataaagaaccgtacaatgcgggcgggcagaaaaaaggggaaaaaggcggggcagaatggccccaaaacccccccgggaaaaacacagggggggaaaatgaggggggccaaaggagccagaacaaggggggggggaaaaaacaggggaaaggggggggaaagacgggggaaaaaggggggaacaacccggcagagggccccaggaaaaaaagggggaggaagaacccgcgggggcggaggacaacggggccggaaaaaaagggcccgcagaaccaccggagaggggggccccccggaaacagggccccccaaggccgccgctgggggggcacccccgggggggggggggggcccctaaaatgggcccacggccccacaaaccccgggaaagggggggggggggggacccggcggggaaaaaggagggaaaa

SEQ ID NO: 429854 - DNA, 486 bp, Oryza sativa
ctccttttggttgctcctcctcatagtaacctgtttactatacagtcacccgtactatacatatactcaattactaaattttactggccattctatttttctcacggttattccccgttttttccggatcgcaggtcggcgacgggcggtcgagcggcgggcggcctccggcttttgcttcctcggcgtgccgggtggtaggcggtggcgatggtgcgccagatccgatctcaacgcctccgaatggcagtggctggataacccctgattttttactccaatcgagggggtgtgttgcggccctagcaatttgcggcgttgtcaaggctcccctccatgaacggcagctccatctccgcgtaggcccatgtcaagaggcgctggaggcagatcgacggcctgatgatagcgcatgtctccaatgcagagatccctcactcattcgctgcctggagtactggaggcctggtcaatgcagctgagggc

SEQ ID NO: 429855 - DNA, 494 bp, Oryza sativa
tttttggttttttttttttttttttttttttttttttttttttatatttttttatataaaaaataaaaattaaaaaaaaaaaaataattatatttaaatttttttaaaaaaaaaaagggggaaccgggccaaaaggcaaaaaaaaaaaacagggaaacaaaaacgggggggggcccccccccccaaaaaagggaaaaaaaaagggggaggggggaaaaaaaaaaaaaaaaaaaaagggggaaccaagggcccccccgggaaaccccaaaaggggggggggggaaaacctggggaaaaaaaaaaaaccccccccggggaaaaaaaaaaaaatttccccccaaaaaaatgcccccccggggggggggaaaaaaagggggggggggccccccccccggggaaaaggggaaagggggccacaccccaaaggggggggggttattccggcggggggacccccgggggcccggggggccccaaatttacccggggggccc

SEQ ID NO: 429856 - DNA, 338 bp, Oryza sativa
ttttgatttttttttttttttttttttttcctgcacgagaaaatggcgtttaccccatgcgcttttattagatcatggggaggatcggatccattaagtccacaaagctacaaaatcccgaggggggcccacaggctgcaacacaaggatgtgattcatgacagcaggggtgggcgtgggccaccattgagcgcggcaaaagatggtgctggtatactccctaaaagccatgaaaaatgaatacgtgggcccacctcgtactacagatccgggggtatgggaaccgatgtttagaaaaatagaaccaccaatccacgaagaaaaaaaccgggctctcc

SEQ ID NO: 429857 - DNA, 585 bp, Oryza sativa
ggcgcaagcccgcggaccgaagcctgggacccccagagggggcggcccttttttttttttggttttttttttttttttcgtttttccttttttttgttttttgtctcgtgtctttaattaatacaagaggaacacagcctgcccgcaactaaagggttacccgggaaaaaaagcgccaccgggcccaagggccggaaaaaaaacccgggaccccggacccggggggggccccccccccccccaaggggccccccccgggggggggggggcagaaaaaaaaaggccccccagggggaccccgggccccccccggggagcccttaccggggggggggggggaacccgggggaaaaaaaaacccccccccggggggaaaaaaacaaaaattccccccccccaaatggcccccccgggggggggggacaacgggggggggggcccccccccccgggaaagggggggggggggcccccccccccgggggggggggccttctcccggggggggcccccccgggcgccggggggcccccttttcccccgggggggccggggggggggaacccccggggccccccccggcggg

SEQ ID NO: 429858 - DNA, 505 bp, Oryza sativa
cccatatctcgcctttcacatagttgcatcttctcctatccacagggataccttagcgttccattcagagatttggcatgttctcttccatgcactgctgcctcccttgatgtgcagcaggagctgctcatctttactcctttaggagttcttcagattgatcagaggcagtagccagcccattagacaaggttacgcattcaggcgccatggccacctcctcctcgccgatcacagccctatactcctcgttcctctcatatactccttccacgccatccatggcggcgctgccccggcggcgaagggccggctgccgctaccctcgtatccaggccgtcgatctcgaccagaacacgatcgcggcgatatcggtcggcgtcgtcagcgttgccatcggcatcggtatcccggtgttctacgagacacagatcgacaatgccgcgaagagggataacacacagccgtgcttcccctgcagtggctctggggcacaggtgtgcag

SEQ ID NO: 429859 - DNA, 367 bp, Oryza sativa
cagaaactatagaggaagaagaagtcccggttagtccaccggcaaaaccggatactgcaaagccagatgctgcggagatagaagctagtgatagggggatcattggttgggggcgaacaacgagacgttgtcgcacaccgaggtgtccatcaggctacaacatttctgccgcatcttgaaaagatgccgacagaaaacatcggactatatttggatttgtagtagagatcttgatggagtggtataagaaggtgaagtttctttgtgattctactcacccatcattcctatatttgctttcgattttttctgtttttcttttcataaatgttgatgttatgtatgaatgatgctgtcaatgattctt

SEQ ID NO: 429860 - DNA, 293 bp, Oryza sativa
attaaaattgatgttatataaattatttttggattataacaaacaaccacatatttgaaaacgtataagcacaagctacacacagtacgggggggggggaagaaaaaaaaaaaaatgcaaaacaacgcaaagaagccggccaaggctagaggcagggccaccaccaaaccaaacactaggcgaaatgaaaaggaacaagggcaacgaaaaaaacccggaaaggaaagccaaaacaagaagaccgcaacgacggaacagaagaacgaagcaatcgttggacacaggcgaacaac

SEQ ID NO: 429861 - DNA, 370 bp, Oryza sativa
ggggaggaaaattttaaaaaattttccttcgaaaatgggcagccggtccaaaaaccccaaaaaatttggtatagggaccccgtttatttaacttcccaggggaaaaaaaaaaaaggggtggaaaccccccaaaaccccccaaaatttaaatttaagccccccccccaaaaaagggggggccggggccctcccgggaaaaaaggaaccgtaacttaaaaattaggcccccgagccggggggggccaatgggttggggacgggcccaagataaagcttcttgaattttaaaaaaaaccaaaatccaaggggggaaaggtttggccccccccccaaaatggttaaaaaaacaatttccccccttgggggggga

SEQ ID NO: 429862 - DNA, 394 bp, Oryza sativa
ggaagatccctagttcactaccgtaaattaagtttcacttggtactactagtatcaatcaattttattacaggattgaatccgaaaggctaaaaatgcaacgtatgtacgtatgtgcggctcacaaacccttgctgcattgcagtaggtacgccgaggaggcatggacagcggagccgtatccttctttgacgacgaaatattcctcgcgctatggtttgatggctgggccgcggtgggccagcctcctgaaagagcgtccatttatgcccggggtctccatgatactcttccccagcggtggcagcgtacccttcgtggtccccgacacggccggcgacgtacagcccagcacccccgtggccaggctcactgccaccttaagcggccgcaac

SEQ ID NO: 429863 - DNA, 549 bp, Oryza sativa
tttttgtttttttgataggattgtcattaatgcttttttcaagagcatggttgtagttatttagacctaaacttgtcacaacaacggggtaaaccataaaatacaccaaaaataataataactcatgttgattaatgaacttctaaaaaaaaaaacccccggcctctaactttgcctccatatattgaatcccacaagttagggtcattcaacccgaattttttgggatgaaaccaaacgttagaccttgagtcccaaaaataatgctactttcaagcatcagtgtgccttcaaggcgaacttccccccgcccctaaaccaagttctgaacaaaagcccaccccttggtcctgcgcggcaaactctaaccttgggggggcaaaaacccgtaggggcaagaggaactaaaaatcatccttttgtttttgaaaatctataaaaatgaagtctggttttgtttccccccaacaatggggggacccccacggagcccccccccttgtctccgggaccagtttaaccccctctggaaaatttttttccaaaata

SEQ ID NO: 429864 - DNA, 458 bp, Oryza sativa
  unsure (1)..(458): unsure at all n locations
cactcacccgccgccgccgactcctccgagctccctcctccctcgtcgcgccttcccctcgacccgcgccgcccacgaccgccgcccagccgtcgtcgcatcccgcctcctccacaccatcgccgacgctccacgccgcctccgccgcatccccgatctaggccgctctgggcgcgctcctcctccgcgaatcgcttttctccccacaggcagatcgcgctcgcgatccaaccgccgacgccgctcccctcatccttcgccgcgcccctaccacgcctccaccgccggcgctcccatcgccgcgcccccaccacgtttccgccgtcgcgctcccgtcatccactccgcctccaccgncggcgcccccaccacgcctttgccgaccgccgctcctgctcgcccgaatcacgccnccgncgcgcgggcgaccgtcgtggttctccgcgggaccccaccgc

SEQ ID NO: 429865 - DNA, 266 bp, Oryza sativa
cattaggaacaccctacagtcgaagctcaaggggtgacatgaaggatccccgcggattatcgcatcagcgcttcagtgcttgtgaccggataaggtttgggagtaggccaagtgatgttgacaccactactgagatatggtggttccatctgatgatgagaatgtcgaccaggaaccacctagtgcatatagacgatcaaccaatgccatacggctatcgggcgtccactcggatccgaggataacagacgacagctgatgaacac

SEQ ID NO: 429866 - DNA, 469 bp, Oryza sativa
tttttgggtttttttttttttgttggggatgattcttttttcactaccgtaaattaaagttcacttggccctacttgtcaaccacaatgccattacaggattgaacacgacaggctaaaaatgtaccttcagaccatgcgtaaaggttgagaaaacgtttctcaattgaactggggcatctatggcggccccaaaagaaaaaaagttaaaaccaccggcgacgtaattacagttcataattggaatcgggggaagggatcgagaactaccgttttcatggaatgaggctagacatgacaggggtcatatttctcccatgttcgggaaaacttcgtgaacttgtgcaaaccccaatcagcttaaagttggggatgagactacatggggcgacattgcacaaccaacatggacaaatttggaacggtcgccgttaacatggaaactttttccttttcgggcttaaaggtct

SEQ ID NO: 429867 - DNA, 346 bp, Oryza sativa
atattatgtggggggtcaccgttttgtcgaggtctttgtttgtgttttcggtgctgtatgcggtggtgggagccgtggagatcccccgtaccgaggtgctcaagcgcctttgggcctacaacaagcagaacaaccggaaggaaccggcgggcaagagggccaccgaaagggaagacaaggggaaggctcgggggctggccaagagcgcaaaggggggctggagggcgccaagggaaaggacccccaccccgagaggggactgcccgggtaaaaggcgccgagagagcaggggtggcaaagggtgaacaagaagggggcccaaaaaagagggaatgtaggaaagagg

SEQ ID NO: 429868 - DNA, 328 bp, Oryza sativa
ggacaagcaccaagtatgttttttcagccatttttaaaactgctacaagggggcgcgaggaacacataactcggggggtttgtgacacttcacactaactggagtgtcgtgaacgaggtaagaacaaaacaggcagtggcggacctaccctcttcatttccacggaaattttacccatttggaatccatggaaaccgagccttccctcccggcgaacaggggccaccgtggtccgaggagaaaaatggtcattgggggcttataatacctatcgcatcccggcggccttgaagggggcgagcagattgtcctggcgggtgttgaggag

SEQ ID NO: 429869 - DNA, 237 bp, Oryza sativa
gacacaaaacaatggaggctttatagtatttcaaaagaaaatttcaacatggccattttgtgggggaaaaacgagggcacaaacttgattggaactaaagactgaataatgggaaccaatgaaaaaacttatttgcaattcttagctggaatataaaaggtttccacgcgaggcgctggcaaacaagagcacatagcagcactttcatgatgaggaatcaatgaacagcttagatcc

SEQ ID NO: 429870 - DNA, 405 bp, Oryza sativa
gaagtaagcaatcttggccaagcatttgtatattcagtacttaggtaggttttttttcccaatgtacaaatagttgagatgccaggctatactaaagctaccaatacatttccagccttaattgaggcctcagcaggaaataaacagcacactacaccaccctatagctaaactttgcttcaacatgaccggaggacgtttcctcttaaaacatgggaaccgtgtatctggagcttgcaactcttagccttctcagttgagcagagacaaatacaaagccaaaaaaaaaaaaaacacgaaaacgaagaagaagaaaagattagggttcaagcagaaaaccgtagaaacaaatctcaaacaaggcctcgcttaggatttgcacaaatgctaatcaagtgtggatga

SEQ ID NO: 429871 - DNA, 435 bp, Oryza sativa
tcgtgatctagaaatcgcgacggtcgcccttattgtttcttcttttttattatcccttttttatttaaccacaggaacccaacttagggggcaccttccaaaagtgacaactataaagactatttggtaaatataaaggaacctataagggaaagacaggcctttcccctcgaaaaaaaattatcacattgaatctgtttcccggcaatgagctagtcacttactcttggactctggacgaggattatatggcactcaaaagaacagcatgtgaccggcccaaaaaaaacacccctaccagcaactccctgctctgctgcaccaggggttaaaacacttttcaccgggagcagctaccaaaaaaactgccgctcttgttatcccctccttgaatatgcatagtacatgtacaagctgttccaagcggctgacccc

SEQ ID NO: 429872 - DNA, 390 bp, Oryza sativa
tttttgtttttttattttttttttttttttttttttttattttattttttgtttgaaaaaactttagggaacccaaagcgacaacgactaattacaaataaaaccagaactgacctgaaggggcactcaaatttattcacaagagacaaagaggggccagcgggcaaacataaacaatgcaattattaaatgagatgaccactcccgagcaccccaacactataagagcaaaacaccggtacaggaacctaactataaaagaagaccacagctccaaggacgggtgacccgtaacaagaaagagcctcgaaaccatgggaagaaaattacggaggaaagaacataggcaaggccgccgggatgaaagtcagaccgggaagggacaccagg

SEQ ID NO: 429873 - DNA, 473 bp, Oryza sativa
tttttggtttttttttttttttttttttttttttttttttttttttttttgttttttttttttttttgtttttttgcccgagggcaaattgttccaaacaagagggggagggagggtcacgggggtttaaaaggggaaaggggggaaaagaaattccccccaattaacataaagggcccacaaaataaaaccccccaaggggggtgatgggacccaatttgggtgaacgcacccgagggggggactttttcccaaaaaagggggggacaggggggaaaaaaaaggggttttaccccgggggaacccccgggcccaagaggggcggggagggagaaaaaaaaatttttcgcggggggggaaaaaaaccaagggggggggaaaaaaccagggggggggggggaaaaaaacaagtcttgttggggggggcggggtttaaaacaaggggggggccttgggttcaaccaaaccggggg

SEQ ID NO: 429874 - DNA, 516 bp, Oryza sativa
  unsure (1)..(516): unsure at all n locations
taaaagatttggtttctgaatctgccaggcaagatatacctgatgagtttcatgatggaatgttaaaaactactgggagtagtagttcgaatgatgtggaacttatgaaagataacgtggttcttaataaagatcctacattagttttccatgagaagctatcattggaatcttcactaggcgcaactgatttaaatggtaaactaactcatgaggtatcacaagatggtccaccaaacaagttaactagcagcggccaagaatcaagaaagagtgatggtaaatatgtagaagatgaaagtaaagatggttcaagtcttgaggatggtgatgctttcagcttccaggctggaggacaaaatatcaacttccaaaaggaagctaaaacttcagttgagatggctaacgagctaagtagattcagtgacacacctggagatgcctnctttgatgatttattcccacctaagaagcgaggagatcatggngctgaagcttcacatccactactggtga

SEQ ID NO: 429875 - DNA, 426 bp, Oryza sativa
ttttggggtttttttttgttttgggtttttgtttgtgtttttattgttggggtgaaaggggggaaaggtaaagaaaaaaagccttgaagagagggggacccactcgctcccagggggggaaaaaaaaggggggaaaaaataaaaaaacccgggcccccagggggggggggggccggggcccaggaggggaccccccgggggagggggacccccccaagggggggggggaaccccccaaaaaggggcggccccagaagaaaaagggcaccgggggacccggaggaaaggggggccccggaaaaggggggggggggcccccaaaaaaacccgggcccggggcccggggggcacccgggaatagggggccggaaccccaagggggaaaaaggggcacaaaggggggggggaccaggggggggcaaaaag

SEQ ID NO: 429876 - DNA, 167 bp, Oryza sativa
ttttgtttatttaaagcacggacttatttccctaattagccttgattttatggtcaaaaacaatacatgatccatggatcaaaaacaataataatactcattaatgccattatatgaacattgtacaagctgctggagcagcatcaaccaaccaacaataccaagac

SEQ ID NO: 429877 - DNA, 238 bp, Oryza sativa
gcggcgctcacctctcgccgtctccgcctctccggagacggcggccaccgcgcgcccgcctctcgtcggcgccgtgcctccctcaacggccaccacctttgcgggcgctcccatcgtactgcgtggctgctgccagatccaggccgtcaggatctaccccccgcccttctcgtcggagggttaggggtttgtgcgacccggcgacggcgagcgaggtctctcacccgcgaaagggggg

SEQ ID NO: 429878 - DNA, 398 bp, Oryza sativa
aaaaaggaggccccacgggggaacatttaaagaaacaaaagcttccagacgggaacaacccccggggccaaggggaccagattcccccccggggggttcacgggaaaccccggccaaggccccccccggggggacccccaaaatggcaaacccgggtccccccccaaagaaaaaaaacccccgggggcaacccaaggagggggggccttccccccagaaacaaaaaaaaagcccagttcaccccccgggggggcccgggggggaacccccaagggggggcgggaacccccccccggaaaaagggggccccttttttttgggggcccccggggggggccccaaactggaggggccccaggggggggggggccccctggagggggggccccacagaaaaa

SEQ ID NO: 429879 - DNA, 367 bp, Oryza sativa
gacgtaagcaatcttggccaagcatttggatattcagcacttatgtaggatgtatggcccaatggacaaataggtgagaagcccggctatactaaagctaccaaaacatttccagccttaattgaggcctcatcaggaactaaaccggacactacaccaccctatacctaaactttgtttcaacatgaccggaggacgtttccttttaaaacatggaaaccgggtatgtcgagcttgcaactattagccttctgactggagcagggacacatgcaaagccgaacaaggaatggacgcgttttctgagaggaggagctgattagggttaaagcagaaaaccgttcaaacaaatctaaaacaaggcctc

SEQ ID NO: 429880 - DNA, 278 bp, Oryza sativa
tcttcttcctcttctcccaagaactctctcctctctctctctactcttctcttctctctccttttgttgcttccatttctcgttcttgcacggggaagaggagagaaagatgtgtgtcgctgtggtttgaaaaaggttgggtgtgagaggagagagaaagtggagtggaggggagagagagagagagagacagagagagagagagatggctacctgctctttggctcacaaggacctctgacacaccaagaagcagattcttgctcagacgactacca

SEQ ID NO: 429881 - DNA, 363 bp, Oryza sativa
ggggcaccaaagaccgggccccccaaaaaaaaaatttttccctgggaaacggccaaaaaaaagggggaaaaaaaaatttcaggggggggaaaccctttcgagaaaaacaaaggggggggggggaaaaccaaatttttaaaaaaaattttggacccccaaagcaaagctgggacagggggggaatttttacaggaacagggttcctttggggggggaaaaccaaacccctggaagggggggaacatttagcaaaaagaaacctctccgttttgacggggaaaaaacaaaccctactttttattggttttaaagggtgaaaggggggctccccaacaaaatgaatcgggaacccgagggtttttt

SEQ ID NO: 429882 - DNA, 383 bp, Oryza sativa
aaaaaaacaaaaacaggtttattcattaattcgtttatttgggataacccaggaggggggcccccttacataataccccagattcaagccccgggcctgggcctgcagttaattaaacaacccctggggtggggtcccaattaaaaccctggaacccaggccgtccggccggagtaaaacccatcacgcccattttttttggggggctccggccatagcacagcccggccgtataataggccgtttaatccggggcttattaatcaaggtccggggggaattaattaacccgggtcggtggcctaacacagggggggggccgtaattaaataaccggttaaataattacccggggaaaaggggggggcacccgccaaaataat

SEQ ID NO: 429883 - DNA, 210 bp, Oryza sativa
cattatgcctcaattatcaatttgatggaaccgtatcaagcctcggggatggtaacaaaccacccatctgaactagctctatcaagatgggggcaaacatcaagtgattcctggggcttaaacccccacttagtttacaggcacaaaactagcttatacctcccttgttatgagaagaccaagggcaacttctggcgctcggagacgtac

SEQ ID NO: 429884 - DNA, 309 bp, Oryza sativa
tttgggttttttttttttttttgttttttttttttttttccaaaaaagttgtctgaaaccttttttggcccggtctgggggagaaggaaaatgctggcactctcattatacaagcctggtactgaaaacacgattccatgggctcaactctcaagggaaggggtcacatgaaacctagaggtaaccccccttggtagggcaaaacaaggtcaaattttggccaagcagcattaagtcccgttgcggggccagaccgtgagacaacgcaggataaggtcaggggcccaaagattttccataataacctga

SEQ ID NO: 429885 - DNA, 393 bp, Oryza sativa
ttttttttttttttttttttttttttttttttttttttttttttttttttttttttttaataaaaagaaaattaaaaaaaaaaaaaaaaaaaaaaaaaaaaaaaaaaaaaaaaaaaggaaaaaaaaaaaaaaaaagaaaaaaaaagggagtaaaaggacataaaagaaaagggaaaaaattaagaaaaaggaaacgaaaaaaaagaaaaaaaaaccccgggcggaatggacaaaaaaacaaccaacggggccaatgttcagggaccacccaaaacaaaacaaccggggtaaaaaaaaaagcccggaaaaggaaaaggaaaaaaaaaaaaaaatgggaaaaggaaaaaaaaaagacatgggagcaaaaaaaaaagaggggaacctgagaatcat

SEQ ID NO: 429886 - DNA, 128 bp, Oryza sativa
tttttggggttttttaactttgcgcggctcattcaaccataggaaaaacctgatcttagttgtccttcacgagactcgcacggaaagaaactggtgggtcacacacaccggccagtagttaagtatta

SEQ ID NO: 429887 - DNA, 498 bp, Oryza sativa
gtcaaaatggccaacgagtccatcctcgtcctcctccacctccgcctacagaaccctgaccggggtcttccccaaaaccctcgccgagtcgccgggctccgccgccgtccccatcgcgaactactcgcaggctactcctccggccatgaggggctcggatccggaccggggcggaggcgagccggacatctccaagctcttctgccactacaacgccctctacttccacgactccctcggcacctgcgccgtctcctgggccaccgacgaggatccactccccaatcgtgaagtaggtggctgtgaatattatctggtggtggtggctgtattatacttctttccagatccttgtatgaacaccacacagatttggatttaaagaatgcgctgctttatgaaatgattcatgcttatatgtgcatcaaagatagtaatgataaccatagtgaccatgggccaaaattccagaaactgatgaatacaatcaatttaaac

SEQ ID NO: 429888 - DNA, 305 bp, Oryza sativa
aaaaaggaaagggcctgggccctgctccggaaggccaccaacctttttaaaaatttttggcccctaaacagttttgggcaaaaggaaaaactggcccaaaagcccccgggggggtttttcccctaaaaacccccacctttttaaggggggggtcaaaaggaaacctggttaaaggggagaaaccccttttggggggggaaaacaataaaaaggggttttggttattggggggccccccaagggggggggaaatcataattttaaaaaaaaccggggtcctccaaaattgggggcccggtcccttt

SEQ ID NO: 429889 - DNA, 351 bp, Oryza sativa
cgagctgaacaataccaggcatgctaaggatgggaatttttaattgccggacagtttacagacagcgactgacgcaaaggcacatttgcgacagggagctcactgagttacaatatgaatagctgcatagacgagttacaacccaaaatttgaagagaagatacccagacccgagtattgcaggcaacatttgcaattgctctaattgctggcacatgggataaagataggttatttggggaaatacattggctggccaacctggggagcatggtgtggagcaactgggggtacaccatactggggcatctgatgtgaggcctggaacgattctggcagtgctccggaact

SEQ ID NO: 429890 - DNA, 420 bp, Oryza sativa
ttttgtttttttttttttggaacccaaaacatactgaagttaataaattgatttaagttggttttaaagagactattggcggttagaaactggtgggagaaactgcctggagagtggacgatacaatcagtgctttggtgagaaagaataggaaaaattgacaacggaggaagcaaccacatgtgcgccacacaggtttcttgggtcacacgcggggaatgtgaaacttgaaacggagaagcgcgtaattgaatgcaggccatacattggtaagaaggatacctggttccataggatctgattgggcagatagaaaagacggtcgactcttttactttctgggaggacattatctaatgcttatggtgggggaaaaactgagaatagtgacattaggaaggtttgacagtatgctattgc

SEQ ID NO: 429891 - DNA, 324 bp, Oryza sativa
  unsure (1)..(324): unsure at all n locations
gaaggtgggcgcgtgtgcgggccccgccgcggaattcggggcgacgccacacgcgcgctgatatctatgctaccaagaactcatagtccgctgtggctcgactcttgtctgatgtctccttgcggagataccatgtctcgtgctagcacgggaaagaggggtgagggatgcatgacgctggggagggaaaaagggagcttgtgagaggagagagaaagcagagtggagggcatagagagcttacgcttgccagtctacttagttcctgtgccgacatggcnggctgctaatgaggctactcagcttcatgcttacactgttaga

SEQ ID NO: 429892 - DNA, 380 bp, Oryza sativa
acatggttgaaaataggttaaggcactagttacaaggtaattaaacccagaaaagtgaacggaaaaacaccccacctgaaaaaccgggggaaaaaaaaagggaaggcaaattttccgggggaataaaatacaacggcggtaggggcgcccccaaaaaaacagaagaccctagtaaaaaccgcaaaagaaaccaaggggttgggccggagaaaaaaaaggccccctttttgagcgctaaaaaaaaaaggagtcaaaggcagaagggggtgggccccctccggggggaaaaaaaaaaaaagggggtgcccccgggcatcacccccggggggccgaaaaggagccaagggggcccggaaaccccaaaaaggggcccccccccc

SEQ ID NO: 429893 - DNA, 284 bp, Oryza sativa
tcttgcacgcagagaagagaaaaaaaaaagggaaaaagaaaatgtaccaggcgatcccgtacaacgcgaaccgggcttggccggcggcgagccggccggcgacggcgccgccgccgctgccatcgatctgttgagaggatgaggaggtgaggagggcggtggcagagtgccccgtggtggaggtgggcatgtttgctatgtgcctgagccacgttgtgaagctgttgttgcaggggatgggcgaaacaattgttgtgcacgaggtcgccggtgaggccgagctc

SEQ ID NO: 429894 - DNA, 372 bp, Oryza sativa
gagacaaccccccgggaaggttggaattaattttttgaggggaaatttacattaacaggtggtcccagcccaaccaaaaatacataattggttggtccataaggatgggctggatgacatgcattattttatttaagaaaaaccatttgctaaaagggagcccacttggctttatctactatatacgggaccaggtccctggctgcattggagggtggggggggttcatccttgggcacatttttggggaatcccaagacgcttttttggggggccaaacaaaaaccggggggcccggctgggttttggattggcacgaattttggtcacttcctcggagaatttttgaagggtggggccgcccttggggaa

SEQ ID NO: 429895 - DNA, 258 bp, Oryza sativa
aacagggaaacccgatacgtttgctatttctgtagaaaattaccaagaccacaccgtccatacaagctacaggaccgaccaaacacttatattattcacgtgaattgtgtacagaatgattcaaagtccctagacttattttttataccgaaatgagggctttaggaaggaatgtgtcagtccacgcagaattccccgttacacagtgcgcggccacgttaaaatggaaccagttcggatacaactgggcccgaaaac

SEQ ID NO: 429896 - DNA, 205 bp, Oryza sativa
tctaaaaaaaaaaaaaaaaaaaaaaaaaaaaaaaaaaaaaaaaaatgacttcctgtaataattaacaataataacctaactaggggctgctcgttaagagagctccagttgacttccccggggtggctggcgtaaaggccttttttaacggcctttaatgtgaatacactggcctgccttttccaacaccgaacatggaaaaacc

SEQ ID NO: 429897 - DNA, 408 bp, Oryza sativa
tttttggtttttttttttttttttgttttttttttttttttttttttttttttttaagcaaaaaaaaaagagggggccctttatttctttcttctagcaggggacatgcccccatttggttcttggctcaaacagaatgcctccattcatgtcacggggggcatttgggtttttgacaaggggggttttgaaacccaagctgggtttaaaggggggcccctggttaaaaagcttgaaaacaaaacagggggcgaacacaaaatgggatctgaaaaccttcatgggggaaaaggggtcaaacattgcttgatgggctgggggccaaccgaacttggggagaaacaaaacaggtttatgagcctgaggccccggggttccctttttttccgctacaaaaataaaaggggg

SEQ ID NO: 429898 - DNA, 393 bp, Oryza sativa
ttttttttttttttttttttttttttttttttttttttttttttttttttttttttttataataaataaaataaaaaattaataaataaaaaaaaaaaaaaaaaaaaaaaaaaaaaaaaaaaaaaaaaaaaaaaaaaaaaaaaaaaaaaaagaaaaaaaaaaataaaaaaaaagggagcagaaaaaaaagaaaaaaaagaagcaagcaagaaatttatcaaaaaaaaaaattgcccgatctaaaaaaaagattaaaaaaaaaaaagggaaaataaaaaataaaaaaaagaaaagaaaaccaaaaaaaaaataaaaaaacagaaaaaaaaaaaaaagaaaaaaaaaagagaaagttaaggatgtaaaaaaaaaagagagtgattaatattgaac

SEQ ID NO: 429899 - DNA, 515 bp, Oryza sativa
  unsure (1)..(515): unsure at all n locations
tatctagctaggtgatactgggatgtgttttgccaactgatcatgtatgagttcaaagagtaaggtggatttgttaatcacaaatgaaaatttagggtgcatctcaagcattggcgtgataaaaaattcagagaagagtaaaactgatggtgagataggtaattttggttccctgtattgatctttcattactcaccgtaaaagacatgatggtaaaaatatagtttactcctaatggttcaaaaaagttctggatgcattgcatggcgcacaatcctttgattcggcctaataattgtatagngagttgactaatagtaatataacctaattttgcattatttgtactatattttagttttttaaataaatgttttcctttgatgggtctatttctaaatgcagagagtgcatgcttatccacagtcaatatatgcagagaacaggttgattatatatgaaattccagcggaaatttttcgagggaaatttgacaggccagaactatttgtatg

SEQ ID NO: 429900 - DNA, 289 bp, Oryza sativa
agtatcaaagttagacagctgctgttccgatataaaaaatattggtaaatcgttctacatcaaaacaggcctggcttttacataccacagggctacctgctcctctatagtcccttgcacggccgggtgggcttttaataacacagtggaccgtgagaagctaccccagcaactagaggtggagttgtggatacctcaggtggaggccatggcgtgagcgtggcaccagctcttccttctggctgcagtggcagtggctgctgcggctgcggtacaagctgggggggag

SEQ ID NO: 429901 - DNA, 165 bp, Oryza sativa
cgatcgaattcaagcgtacgtacgtgcacggggcacccacgtgggaataacttcgaacaatcaactgagcaagttgccacatactcctacaatgtgtgttcatgcggcggctctgcccatcaagcttcacgccattttgaacggacgccgagcgtactacggttc

SEQ ID NO: 429902 - DNA, 449 bp, Oryza sativa
tcacacacacgcgaagcagcagaatcgcagacagatcgaccgcgcgcctagcttctctgttccgagaaagccggccatggcgtcgccgccggcgccggcgaaccgagaagagctgacccgcgcggctctcgccttcctgaggaaggtgagaagccgcttctggttgaagccgtgcgtctacaaggggctcgagaccatcctcaccgagtacggcaagtacgcgaacgcgtccacctccctggtggtggacggcgcgggcggtgctcctcggcgaccaccccgacctcatcgcggagttcaacaccttcgtccgtccggagtacaagatcgagctccccgccgatcacctttccgctgcggcaacggcaaagtcccaaggcaagggagacgtgtcgccgctcgaggccaagcgattcttggagcgggtgaaggcggaggaccagaagctt

SEQ ID NO: 429903 - DNA, 513 bp, Oryza sativa
tgtcgctgggcgtaggacacctgaatcccatggtggagctggccaagcacctgcgcctctcacggcctcggcgtctatattaaaatatctattgccttcaatacttaaaatattaataatataaatatataattattacaaattcaaaattaatataaaattacagatatataaaattaatatataagtataataatatctaataatatttcttaataaaaaaaattttaaattaaataataaattataaaaatttacataaaacaatataaaataattaataaaaatttttataaataattaaattattttactataataatttttaataaaatattaattttttaatataaataaaaaataaaactattctataattaaaataaataattttattattgtttttttttaaattaaataataaaataattttataattaattataaaacattattataaaattaacattatcataaataatatttactatctttaattaaataataattaaa

SEQ ID NO: 429904 - DNA, 194 bp, Oryza sativa
cgcgcgcgtgcgcgtggcccctcgtgcgggcgccctcttttttttttttgggaaatttaatttaaagggttacccccagtattaagacatgatgcattctggacatagcataagtacgggtagtcatttgacatgcaccataaaagtgtaagtaacttacactaaactattggtaaagggaacatttacatatg

SEQ ID NO: 429905 - DNA, 328 bp, Oryza sativa
gtggtgttgtttttggtttgttttttgtagatgaggatgccaacaggttcacgctgtggaaagccagagctgcagggggggggcagggcgggcggaggacggggagaggaaagagtgaagcacaaatcggcaggggaggtggagaaaacgcaaaatggggcggagggcaccaccagggcttggaggaagctgtgcctgcctacaaccggggccaaggtgaaaaccggggccggcgccccgtggggggagtggcccaagaccaagcagtagacgcaacgaaagcggaaaaaggggaagaggccgggagggcaaaaccccggaggggaag

SEQ ID NO: 429906 - DNA, 72 bp, Oryza sativa
ctttgtggtattgtgtactcgctggattttttgttgttatagtgctgtttgttgccattggctagtactcga

SEQ ID NO: 429907 - DNA, 125 bp, Oryza sativa
tttggggttcgaacattttttttccttcttggtttatataccatttcattccgatcgagtgcaacaaggcaagttcaaacacccttaaccaacagcgaactcaatctcatgggtaaccatcacgg

SEQ ID NO: 429908 - DNA, 455 bp, Oryza sativa
attggtattctattgtttctttttgcatgtttttttttttttttactttgtttttgggcaataccaattacttctgttttttttttcaccctaacgaagtacagactaccacagggacaggcatggcttccttcccagattttgtacaggagacaggcctaacaaaaggagggtgggggggcaaaaaaaaaaaattgatttctggggatgcaccgtgggagagggggtcgataaggaccgcacacttttgcaaggcttcgtggaactcggactttttgacggttcccaggaccaaagttggtccgtaagagacccccaccgaggggggtaagattgcaggccccggagggagcagggggctgttttcaatcccgcctgtgaaggggccataaaggaaatcggtaaaagggtttttaccagtgagcgggtcccaaatttcaatttccaaggggaaa

SEQ ID NO: 429909 - DNA, 173 bp, Oryza sativa
tttggggtaaattaaagcctgtggggacaacttgcatggcgagccatattcaaaagttggtccaggcacagtggcatcatttttggctatttgggcacattaaaccaaccaatccaacggagaaaaggtcagggtttaccaggagggcggtaggataatcctaaggccagctt

SEQ ID NO: 429910 - DNA, 374 bp, Oryza sativa
aagaacactaaacaaacagtttttgctattggtagaaaacaaaggcacacgtaatggaaggaaaagagggttttgagcctttgaaagggaagttctgcaaaatttttcaatacgaaaacagaaagcgtttttgcagaagaacacggaataccgacagcgacgcccatgggggatatttgaatgcgaaagggggagaaaatcacatggcggggcatctcctatcacatgggggtggaaattaatacccctggggctccaaaggggcagaatattggacagcaatggtgatgaaaccctgaagaagaaaacatagttcctggaacataaaacaagccaggggttcatttcagtcccgcttaggcacgtgctgaacc

SEQ ID NO: 429911 - DNA, 475 bp, Oryza sativa
ctcctcccctcctccggtgagctcagctccgggaagcgcttgcggttgcgcgggaagcgcgcgggcgagggaggccatggcgttcggcggcaggaggggctcgtcgcggtggggcctcccggtggtgaggtcggaggcgctcggcaagctgggcccctcgttcgccatcggcgccggctgcggcgtcggtgtctgcttaggcctcatcggcggtaggcaagcgattcgccatccatagccatcacccgcgctactgcttcctcctcctctggggcaccttcggtagggttcaacacggtgttcgagagggttctagcaggcttcgaactgcctaggcgcgcgagattgtttcgtcccgcttccctctccaatcggagtgaggcgagcatgggaagtgcaagtgcttcttattaggtgcaggaatcgccgctggattcctgggttgcagatgggattgggagctggtgctggatgt

SEQ ID NO: 429912 - DNA, 97 bp, Oryza sativa
cattccatgggttttattatcatatttttatcaaacccctcaaagggcaaccaagtttatttcaaattggaaatcttcccttgggcccctctaagaa

SEQ ID NO: 429913 - DNA, 341 bp, Oryza sativa
agagtacaaggcccaaacataattttgataatacattgtaattataagctttaatttcctcactatggttgcttagcaaaacaaattgttcaactgaacagacacagaactgcatctttctttggtctggactttgcaaccacctagacaatctattaaaattactgctcgatggctgcagaaatctactcttttaagagaggattcatgagatgttcatacactccgagtgaccccacaggaagacgcatgtttctaagttacagatgggactaacttttgttacaaattggacacgaattaacttaagagattgacaggggacaccaccggttaacccc

SEQ ID NO: 429914 - DNA, 308 bp, Oryza sativa
  unsure (1)..(308): unsure at all n locations
tcgcgccctctcgctttcaacccccacacggaagcaagaattgttcatcaaaacccgatctttggcgtggccccgtggatttcttgcgatctgtttggtgctatggatttctgatccggggtttcttggatcttggggagtaggaggttgggggnncgnnncttaggccgggagatgatgcgggagcagggagctcttcggagacaagattgggggtctttcatcagtacccacattagcaccgatcgtggacgaacccatcaccagcctgtatgcgcttacggagttgatcctggctttaagcccct

SEQ ID NO: 429915 - DNA, 428 bp, Oryza sativa
ttttttttttttttttttttttttttttttttttttttttttttttttttttttttttttttttccccccaaaaaacacacttttccatttttttttaaaggggaacagaacaaaatttcattccagatttagacagatggtatatgatttttcggacccctgggctgaaggctgactaaagaggggcaacttttgggggggtttttgaaaggcacccaattaacaaatttacctcatttttttggacagggtcccaaaagccctgctagagggggggggcacacaaaattttttaaaacactgacaataatgggccaatttggagggggggaatcttttttgggggttttttcctcccgggaatccgacaagggctcacaacattggcagggcctgggggccccactttcccaagggggcccttttc

SEQ ID NO: 429916 - DNA, 335 bp, Oryza sativa
ccccaagaaattgtagttggttgctgtgttgcatatgtaaacactttttaaacatttgggggataactgaatgcatgctctaacagtacaaggtgatgggtcgcacggacggactatcattttattatcttgtcacaaaaacacttccattaggggaaaggaccaaaaaacagaggtgtaacaaatactaatactactcatgattatgagatctgatcggggctataggttaccttgcaagtacgatcaaggcattctgtatgcagataaggtgctcacaccatgggtggaactcaaatatccaaatcgtcatctgggtcttcatcggaatcagg

SEQ ID NO: 429917 - DNA, 103 bp, Oryza sativa
tgttcccttcatttttcgttgattcgtgagcgcggcgacgtacgtacggtggtaagcatcgtcgtggattcgtctccggcgacgggggggagtgggtagggta

SEQ ID NO: 429918 - DNA, 395 bp, Oryza sativa
tgttatttggaccaccatttttctgacgggaagaaatctgccacatgattatgacaaagcaaagtgactttgagaattttaccatgcgactttctgctacaattctgaaagctcagctgcaagccaggcagccagcaatatataccgcttggccgaaggatccaaatatctaatcagcaaggatgaaaagtagtactagtacaatagtgcaaaagtatagctttgtatcagggaccaaggctggcatacaccctgtgccgtttttcacatagcatttgtctaatctgaacccatcacactcatacgtttttgcttttctcgcacgcttaagatgagaaaaacagactggattaaagctggattaactattttatctttttgggggcaacctgaga

SEQ ID NO: 429919 - DNA, 124 bp, Oryza sativa
gtattgccgattgcacacaacaatgacaaaacgctgagctaaacatatccagaaggactgcgcgcgcaagctgagaataaaatacaatccgcatacaactaatcacacgggggcatcctcctag

SEQ ID NO: 429920 - DNA, 293 bp, Oryza sativa
cagtgacgcccttatcggtggtggattcgccttccagaacccaaatgcaacaaagacatgtgggtgtggcaaatctttcgccaccggaaaagaaacagagagcacagcaacagcctgcaacaactaagctagaaacatataggtggaaatgccatatatatagctcacccttggcaaaatgttctatggatataccacagatgaatactcgaaactcagaagtgtaacgattttcattacagtttgtgtgtatcactgtatccaattggacaaattactgctcgatagaattc

SEQ ID NO: 429921 - DNA, 401 bp, Oryza sativa
gagattactaacagacggcccatactgagaatactgttattggtccacaacgtaaggttaaacgtgcaatgagcaaaaccccttatttatacgattttggagctggtatagcacatatctaccgattttagaggggtaatctaaccagttttgtcgataagaaaatatacctaagcgacactaaatatgaaaccctgcccagtcaaagtcttaaacctttggggcatgaacattacaagcaaaaacctggccataattgcccttgccattcttatccagatagtgagaccttgtattgagagctagcatgtggtaaacaagccagaatagagttgcttgaagggccaggaaggcggatccttcaaagaggccagtcttcgcagtagggcactgggtatcca

SEQ ID NO: 429922 - DNA, 333 bp, Oryza sativa
tttcggagagaagaagggattacagcggagcacgccatttgccatatgctcgatccgcttcttatcgtaaggcattctgttcttacaagcgtctcaccttgatgatgccgacggtggttggtgcgatggctctcactgagtctcaacggaccgctctcactggatctgtctatgaccttctatccttcttacttggcgtcatcgcagaaaacaagaaggtgcatcactacactgactaaaatactcgatcctgttaatgatcgcactgtctggaacacattttatgaaggttactactaataccgatgaagaaatagtagtaattattatgga

SEQ ID NO: 429923 - DNA, 116 bp, Oryza sativa
acctaattaaactattcttttattctatttatgctttatttcttttgctttactgtaaaccccgacaagaaaaagaaagggataaacaagcgaaaacccccggaaagaaaaacgaa

SEQ ID NO: 429924 - DNA, 118 bp, Oryza sativa
cctccgcagatttccgccgtctccgccccacgcgcttgtctgtcttcttttccaccactggcctagggcaagagatcgaggataggagcgtagggaggaggaggagatggcctttgtt

SEQ ID NO: 429925 - DNA, 239 bp, Oryza sativa
cctgagcggggacaatcaagccgccttccaaacaaccggaagcacgcgcaaggggcccaaaggagggcgcaacgcgggaggaaaaagggaacggaaacaggcaacaaaaaaaagagaagggggggaaaagcacacaggaagggggagggagaggggaaggggaaaaacgaagacaagccgtaagaggaccgggggggacccaaggcgggctgagaaggggcccaagagccccaaggggg

SEQ ID NO: 429926 - DNA, 309 bp, Oryza sativa
  unsure (1)..(309): unsure at all n locations
gtaacagcgagttgattttatggactggggtccaggtgctcactgtggtgaataatcatggtttttcaagggatgattttaacatcgagcataaaatccatcaaaggacgttaattcgggaatgctacaatgagttttttatcttctaaaatttgttttaaagttcttcgaaatggtctagaaaagccttccattgattttgcagattntcttacatacgcagagccagaaactgtcgtccttcttctcaagttttccaattctggtgctgtcttgaatgttacaattgagaagatccaaggaggcaat

SEQ ID NO: 429927 - DNA, 373 bp, Oryza sativa
acacaagaacaggcatgttttttgggaataaccaatcaatcaatatacaggcattggcaacgcatatatgtagctagcacgagatgacatgggtcatttcaacactaagctagcctagctaagggggaacctcctcctttgggacttgacggaattaatgggggccgttttcccgtcgacgatgcccgacggggccttgccccaaatgccggccttgaacgggttcagccggttaaacgtccggaaccacgagccctttttcccccttgacgacgacgaccccttggtttggtggtggatccccgacacggacgcccgaatccgggccagtttcgaccggagggccttgttttccctcgccagggacgcctcc

SEQ ID NO: 429928 - DNA, 120 bp, Oryza sativa
ctggtgcttaattgaaagttttacccagaagtttttttagtttgtcccgacccaggactgacgaaagaaaggaaaaaagggggggggtgttctgggaaaaaaaaaagaggggcgcccccg

SEQ ID NO: 429929 - DNA, 332 bp, Oryza sativa
ataattaaaattataaaaaaaaaattaaaaaaaaaaaaaaaaaaaaaaaaaaagaaaaaaaaaaaaaaaaaaaaaaaaaaaaaaaaaaaaaaaaaaaaaaaaaaaaaaaataagaagagggaatagggggaaataaatgcaaaaaaaaaaaaaaaagtagaagcccgaaaagggccataaaaaagagaaacaaatggggggaagaaaattaaaaaaaaaagataaaaaaaaaggggaaaaagggttaagggcggggggattgaaaaagaagggctaaaaaggaaaatgaagggggggaaaaaatccaaaaaaaaagagaaaaaaaggggggg

SEQ ID NO: 429930 - DNA, 289 bp, Oryza sativa
tcgtgaacctatcgctgcgagctgttaagccatcaatcaactagctggttgacgctacatggacacatgacacagggtcccaaccggttgcaactattcgtgctagatgtgcagatgatttctggcatgccatgcgcgtagataaataaatggctatccctcaatttaattacttgcaataagtgtgaatatatagcagaaaacatcacaatcgattcttttgcgttgtcattctgctaatgttgaatgtgaggatggaagtagagataataaggccgagtttagttcc

SEQ ID NO: 429931 - DNA, 462 bp, Oryza sativa
ttggatctgtagttcttggaactccaggtgccccttctgtcaacggtgacatgtacactgatatcagccctgagaatgctgtgcttcagggacagaggagattaagcaaaggtgtcgattacttagttgaagcatcagcagcagaggcagaggctattagtgcaactttagctgcagtgaaggctaggcaggttaacggtgagatggagcaattgcctgacaaggagcaatctccagattccgcatcgaccagcaagcattcaagcctcatcaaaccagacagtattctctctaacaacatgacgcctccacctggggttcggttgcatcatagagctgttgtagtggctgcagaaactggaggtgccttaagtggcatggtcaggcagctgtcaattgaccaatttgaaaatgagggaagaagagtcagctatggcacccctgagaatgcaactgctgaag

SEQ ID NO: 429932 - DNA, 292 bp, Oryza sativa
tttttggggtttttttttttcttggtttttttatttttttatttttttttgtttttaggaaaaaccccaagccctaattaaaaaccccccaagcggatttggccaaattggggggggcacccaaagggcaatccttttaaaccccaaagacagggggggctaccaaaggtgaaatcccagatggtaggggtccaccaaataacaccggaatgggttcccaataaaaccccattgtttaggccttgggccccggtgactacccttaaaccatggggtttttttatgaaagaac

SEQ ID NO: 429933 - DNA, 108 bp, Oryza sativa
tataataagagtaagcgcaagcaggtgtggggtacattatatagagtactcgataatatgtcaacggatgacttgcagcagggattactaaatatgtaaccgaaaaat

SEQ ID NO: 429934 - DNA, 51 bp, Oryza sativa
ttttggggttttaaatatcatgggttattttattttattccacggaaaatc

SEQ ID NO: 429935 - DNA, 351 bp, Oryza sativa
tgatacatatcaccggtcgccgagcagggtgcgcattatgagaaagcgggcgcattgttgcggaatgcgctagaaaccactgaggatcgctagactattaaccgggaagggtatccgagtattagggccaacatgagcaagatatgcgcaactgggggaatgcgggggatcaatgctggcctcgggccaacagtaaatgggacgctgacttatagccacatgctattactttatggacgacacaatcaagacttgtaactgccccatacataagaagagcgggatgacttggcctgagcgaccagacattggagcattggcacgtgtgaccgaaagcacaatgagctaccc

SEQ ID NO: 429936 - DNA, 149 bp, Oryza sativa
tttggggtttttttttttttttgttttttttttttttttttttttttttttttttcccaaccaacaatctcaacaaaaaatccaccttttaaaaccccggggccattggccctcatttgccggacaaaggccctttaaatagcatgaac

SEQ ID NO: 429937 - DNA, 290 bp, Oryza sativa
tcgttctcatacgacatccaacttcaagagaggcctttatgtgtgagatagagagatatcctattgaggacgggcccagtctcccctcctgctagatacaaaggcgacgttcctggcgcatgctcatggcggcgtgctgctcatcgtaatgtgagaacgacaggacagggctgtggcctgctgctgctgccgactcaagtgctgtggattatgcctccagtggccacaataagactggccagggatcgctcatttgaggaccctgagctggcaccctttgatggatagaa

SEQ ID NO: 429938 - DNA, 88 bp, Oryza sativa
tttttgggtttttgttttgatggggttttaatattttttaggcacagggaagccctacaaaaaaccaccccgggagcagaacagcctc

SEQ ID NO: 429939 - DNA, 286 bp, Oryza sativa
tggttaaattctacactctctttactgttggcgactcttttaccttttattatagtgtccacggtaagaaatcatagtgaccatatatttttgacgcaaatagtgaccatatatcgttggaacaactgtaggtgtgtgtctgatcgccgcgtaaactagtcgtttttggacctgatgaccttctggacatacgctctcctgatgaagtaacgatgcttacttgatcggtcccgttgtgatttgctccctgtaggctggcccagccttattcatggtcggatgacgt

SEQ ID NO: 429940 - DNA, 89 bp, Oryza sativa
  unsure (1)..(89): unsure at all n locations
gggttcataaagtccgcgcatagaatttgaatnnnnnnagcagtannnnaaaagcatggataaagtgtgacaacaggctcaaggcaaac

SEQ ID NO: 429941 - DNA, 125 bp, Oryza sativa
tttttttgttttatcaacatcacctattcaaatttataagctcctgatgtaactaactcccaacggtcagttttgataggaagaacaaagtataaaatcatgcgagaatctatctggtgctcaag

SEQ ID NO: 429942 - DNA, 405 bp, Oryza sativa
  unsure (1)..(405): unsure at all n locations
tcttacggagacgccgactgcctaatctcctgggctcgatctttacttcccaggaggcggacgacgcaggaggaagaggagctattcgctatctcgctgacgcccgcaccaggacacggcgatagagacagaggtgggagatcggtgatgaggaaactggacccctagccgatcatgccgacggagactgtgctcgcggctacacctgagatggctgccgtagcgctggctctggcactgccgagttgccgggaggaggtgaacaggntccccgacggggcaagacagggactttttattcctatccgcgactacacgctcgatgctacggcacgctggcatatttgaacagaagtcaagggccagtgcctgaatttggtggtactacccaaaaagtcttccatc

SEQ ID NO: 429943 - DNA, 90 bp, Oryza sativa
ggggccacaaaccaaaaatgcttgtgctcctattgaagtttccaaaatgtaacgcggtagggctaaacaggcaaaaacaaagtttttgac

SEQ ID NO: 429944 - DNA, 335 bp, Oryza sativa
tggtaatcgtcataactaacccttctatgggatgttattttacccatctgtgaaatacacagaaccatacggaggaaagtaggacatacacgaggtagtcattcgacgtgacgggggacagaactcaggcatactagagcgggatggagcagcactcaaaggacgagctactataggaggagaactttagtgcactctgcaattgacaaaagggtgtgcgaacgagcgggaggccttggaacatcatggggagctcatgttaccgtaagagcccagagaacatgctcaagggcaaacactacacctggggtgaacgaaccggaggggaccatatc

SEQ ID NO: 429945 - DNA, 284 bp, Oryza sativa
tacaaaatggccaacgaggccatcctaggggtgctttttctgcgcctacagaaccttgaccggggtcttccacaaaaccctcgccgagtcgtcggactccgccgtcgtccccatcgcgaactactcgcaggctactgcttcggccatgaggggcttggatccggaccggggcggaggctagccgtacatactccaagctcttctgacactacaacgccctctactttcacgtactcctacgcacctgcgccgaattctgggccaccgactaggatccactcccc

SEQ ID NO: 429946 - DNA, 277 bp, Oryza sativa
aaaccaggaaaccccaactaaacggtaaccaactaagtgggcaaccttttgattcgaaagggtaactttcgggaaggggagtggacccccggccaggggaaaccacaaaatgggcgcgcatcaaattaaggcttatgacaaaatacaattaggggggggccccaaaaacacaaagggcccaaagaggagaggaaagggaaatgggggaaagaaaatttaaacgggggggtaactctagggggaagacccccgggggaaggacaccttatttcccccc

SEQ ID NO: 429947 - DNA, 297 bp, Oryza sativa
tcggacgcgtgggcgactccaccactcacattcattgcctagtatatcctgcctgactccaccgacgatatggtccgcacgccgacgagcccaaaggcggagagcgccgtagacttagcctggcagggcctcaccgccagctccaccgaggaccaggtcggcacacgtggcacctgtctcctacacgagaccgaatgaacctctccggactcccctccactccgctttgagcgcgacagacactacggcaagtacaggatccagaggaagagcagtaccgcttcataccagaataga

SEQ ID NO: 429948 - DNA, 91 bp, Oryza sativa
tttttgggggttttttacttttaagaggtgaaaacttattccattcttccaaaggtaaaccaagtcatccaagatccattcgtccaccata

SEQ ID NO: 429949 - DNA, 305 bp, Oryza sativa
ttgtaccgtctcccacggctgagcatcctccaaccttgttgtggaacgttacgattttttgatcacggctacactctatctgtttctgcactgatcaactactacaaccagaagcaccggttcaaccagagcctgcttgtcgtcttcaccgtacggcatcagctacgccgatggtatgacagggaccttcgccagagagtaaggttattctggtgagagtaaatattacaacacgtgatgtgtgaagccagactgcctacacatactgggttggaaagagggacaaagactgagactgagacggt

SEQ ID NO: 429950 - DNA, 60 bp, Oryza sativa
ttttggggttttttattttctttcgcttatattacacattattttatacaatatttttta

SEQ ID NO: 429951 - DNA, 318 bp, Oryza sativa
  unsure (1)..(318): unsure at all n locations
tgnctgactgaagcttggtccaacgccatgtatctggttaaaagacgttgctaacctcaccgcggctcgccaaataatcacatgaggtggctgttcatatctggcatatgctaattgcgaaactcgccggttccctatggctgcctgtgtgccttagaaataatggcgaatgtttgccctatcatgaaaagatgcagcattcttctgatagcctttctcctcgcaaacgcatccagggagtcttcttgagagcagcggtggacagcccgaggcgaacggtccaacagatctccccgatgacagagggcgaggccacta

SEQ ID NO: 429952 - DNA, 326 bp, Oryza sativa
ttttggtttttttattttttttggttttttttttttttttttagaacctaaaaacactcaagctggtttcaacgttaatgaatacaattacacaacattatattcagcagctttacaagaacataaaacatttgaccttacacgtacaaggaaaaaaaagaaggaagggaaacacaaacacagccgaattgagcttttaaggagtttttctgtggcaaagttttttaaacgcaaaaaccggggaatcggaaaacctttatacgggggaaaaggggccccaacttggctttgtaagcacaaggaaaatttgaaccccgggggggacc

SEQ ID NO: 429953 - DNA, 340 bp, Oryza sativa
actgtagtaatgggcctagggaggacaattggcctaagatggctgattactcaaagaatgaacaaactgaaacgggaaaacatggattgcctactggagcgctttgaaagaggagatctatggggaggaggggaactgcatcaactggtggatattgagaagctgacgcagcactgaatagcaaactctcgcgagttggattattactcgcttatgcttagcgagaggtaagagagcctttcactggtatgttatcatagtcagatgtgtcttgagagatggaatgcgaggcagacagatctttagcataattttatgctaggaaggaccacacaacgat

SEQ ID NO: 429954 - DNA, 76 bp, Oryza sativa
tttggggtttttaaaatttttgggttttttattttttactacatttttcactaattgttaactcatatatcaaaaa

SEQ ID NO: 429955 - DNA, 279 bp, Oryza sativa
atcggagactgatgacaaaagatcaggctgagatggtttttagggggccgacccgtttctcacatcgcgatgttggccgatctgtcgaagcaggtggcctctggagctcaatacgcgattcgataaattcgttaccgggacctgcccagtggatctcgtcctctaggagtggcacaggagctccctgagacgaggactaggcggtgtggagagggcatagggggcggggctgtaccacgtcaagcacgtcaagagcggctactatgcttacgttactac

SEQ ID NO: 429956 - DNA, 110 bp, Oryza sativa
ttttggttttttttctttttttggtcttttgtttttttctttttttgttttttttgttttattttttttatatttttttttttttttttttgtgggaaaaaaaaaaacaa

SEQ ID NO: 429957 - DNA, 384 bp, Oryza sativa
tgtgtgcgcatagatgagaataaatatgggggttatttgaatggcccactagtttgagtactacggaaacgggagtgggtcgagagtaagccgggctttgactgttccagacgacgacgccgccgccgcgtggagaggaggaggaggtgaggagggcggtggcggagtgcccggatggaggtggtgggtcggagcgggtgctgcctgagccgggtggcgaatcggatgctgcaagggttcggtgccaacccgggggagcacgaggttttctggtgaggccgagctagtcaatgtgagtggccggcggttgtagacgtccgctgtgggaaaactttgctgtccccaggtttatcggcgtgctcgaccatctcattgtcgtgcaca

SEQ ID NO: 429958 - DNA, 399 bp, Oryza sativa
ttcttaattagctagctagccgctcaagtcatatatatatatatatatatgctagctagagggacgaccaaggagctagctagctaggagagggcgagagatgagcagcagctagaagcagctgatctatcgatctatctatctatctatctatctatctatctatggagagctcactcatgtatgcatatatacttggatctcctctcctctccggacatgtcatatatacgtatctatatcgatatagatcgcctgccggtttataggtagatatgcatgtatcgatcgggatactattactaatatatagctagttaaaccaaactaagaccgatcaaatacaatatatcgatcgatcatgaggggaagtagcaataatcacaagtcgaagtctga

SEQ ID NO: 429959 - DNA, 400 bp, Oryza sativa
tcttctcccagttctccactgaaccgtcgccaccccccgccgccacccccttgcattgtgtagcggcggcgcctccgccatctctcctgcgccgtggacccccattctcgagctggacgcggtggcacgccttcaccttccttgggtagcgactcctcctcatcctccccctctccaaagctccatcgttgacccctctcccaccccttcctgtgcattcggccagaaccagccaatagaagctatggccatggcatctggctcccctgagcttcgcggagtggagaggccaaggaggggaggcctgcactagtatcttcctctcccaagcaccattgctgacagctctttctgcgccttccggatccggccggatctaggcttcatcgagttggggact

SEQ ID NO: 429960 - DNA, 225 bp, Oryza sativa
caacagatgccaactgttgttttcagaaaaaaaaaacggtttttcacagtttacaagaacccatcatttttttttcagggttaatatgaggggccaaggttactaataaacattttaaatccaacattaaaggacagcccctttgtactgaaaagcatccccactttaataaacttggccaaatttaaaaaagggttctggggggaggggaaataagaaataaaa

SEQ ID NO: 429961 - DNA, 148 bp, Oryza sativa
ttttgggtttattaatgttaatactttcatttcacatcagtttaagggaaataataaggctcagaacaagtttaatccgaacagaaaaaaatagagtatttaattacacagtgcacacagtcgagcatatgatcaataacaggggaat

SEQ ID NO: 429962 - DNA, 118 bp, Oryza sativa
tttttggtttttttttttttttttttttttttattaatttacttaaagatatgacggacttctatattaaaaaatgaaaggaaaaaataaaagggctaaataaaccggcgacggaaaa

SEQ ID NO: 429963 - DNA, 56 bp, Oryza sativa
ttttgttttttttttattttttttttttttttttttttttttattattataataat

SEQ ID NO: 429964 - DNA, 390 bp, Oryza sativa
tgttgtcacaataccaccaccgaattgagcgttggagaattgtgagtgacatatgcaacatttggagctagggtgcgctgtggttgcaggcgatagaggctcacaggaagggggcgaaggtgtaccaccatgcgggactgtgcgcggtgaacgcgggggagctactagcggagattcacatgccggtgagcctgctgccgatgtcggtgatggaggaggacgagttcatccgtgccacggcgaccatggggataattcaccatacggacatcgcccacactcttaaggctgatgctctggaggagcatggcacgcctttaatagatgaattcttgcccaaggacccgctgatgaaatacttattctgaaacggttctaatgtgttacgag

SEQ ID NO: 429965 - DNA, 317 bp, Oryza sativa
gggaggccttcaaaggggaagggtttaaaaaagatgggggggtattttggattgggggggaaaaaattttcccggggaaaaagaaacaagggtaaaacccccaaattttaataatattctaaaaatttgggaaaaaaaaaaagacttcaaataaaaaaaggaagggtcaaaagggcaagaccacggggggcccagaataaaagcttggcccggggaaaaattttttttggaaaaaattggccaaaaaaaaccaacccgtgggggtttaaaattaagacaaacgggaatgggggtaattggttgggaacccgggggaa

SEQ ID NO: 429966 - DNA, 142 bp, Oryza sativa
ggaggagtaatgacaatgcaacaattcttctggaccatgaggactgtacattaacaggaggggggccacaaactgaaactttaatggcccaaaggcagaaatctatttaaagttcacaaacagcaccttttaacaaagtttc

SEQ ID NO: 429967 - DNA, 453 bp, Oryza sativa
  unsure (1)..(453): unsure at all n locations
cttataaaagaaatgttacacgaccaaattccatccagctatgagtagtcaccagttggcaagaaccaaaacaaaaccatgagtgcagtgtaccatacataaaatagtattgacagctaataaaatccaggatccaactggctggattagattggggcagttgtttgtttctttccctctactgtgcagtcacaatgaccagaaggcagaagcatccaccactcattgtacccaatcaaattatggaaacaaatatactgctaactgatcagatggatggatggttcatccaagcttactggcatcccaattttgcctcattaccaaatacaacgaaaaggttattgttgctggtatcaagccaggaaaaacataccatggncaaaatttatttttatgactattgttgtggttacctggtccagcaaaaggcacacgaataggttgagcaaa

SEQ ID NO: 429968 - DNA, 127 bp, Oryza sativa
tttttgggtttttttttttttttgtgtttttttttttttttttgtttttttttttttttttacccaagaaaaaaacatttaaaaatgaacaattttttaaggatatatacaagtggaatgctttaat

SEQ ID NO: 429969 - DNA, 80 bp, Oryza sativa
gatgcggaaggagaacaagacggcaacagggagccgacaagacgaggcgcaaaacaaacgagaaaagtaggggggaaaaa

SEQ ID NO: 429970 - DNA, 382 bp, Oryza sativa
tttttttttttttttttttttttttttttttttttttttttttttttttttttttttttttttttttttttttgggggaaaaggggaacccaaaaccccattttatacccacccatttagaaagggggttaagggggtgcaacattggaggggggcaaaaaaaccccccgggacattggcaacgtaccgggggggggcataggccgaacaaattttattacaggggggacctaaaaggggaggctggggggtaaaaccgggccttgccttggtggaaaaaaaggggcccccgggccaaggtctaaccggtggggacctgaaaccttttaaggcttagggaacccccatttggaaagcttggggggggcctccctgggagctt

SEQ ID NO: 429971 - DNA, 349 bp, Oryza sativa
ttttttttttttttttttttttttttttttttttttttttttttttttttgggaaaccaaaaactttaccattcaccctttttttttttttttacacatttaattttgggcacgaccaaatttgggcatgaagaacaaaaaaattggcccaaaccaaacaccttgacttctttggcataaacattattacaacagacttacaatttggcacattatcggggggacaaaccattttatttccaacatccaaatgaagctttggacttttaaatattatttatggttaccggttaaaggattttttgggggcctcccctggatttttcacgcttttcgggaccggagaatg

SEQ ID NO: 429972 - DNA, 319 bp, Oryza sativa
aaacaataagtaccacagtagaattataactggctagctcagatcacaagatcaaagcaaaggtacatcaacatgtctcctcaacttgcatagcaactactccaacattggaacctcaaattagtagattgtgttacaacatttaactgaagagacaagggtaccggaaattttactgatcatcagcactacttgatctgaaacgacgggagttcatcttcgcgttggtttggacctgagggggtaacaatgctttaggatcatgttcatccattccgaattgtttagattcatcagaggtacctgccggcagaccaat

SEQ ID NO: 429973 - DNA, 116 bp, Oryza sativa
atcgagaaggttgtggttgaggtcgaggaggggaggggggggagacctcctccggtcggttccgcggatcgactagggcttatagggtagagacggcggcacccgatgtagagtac

SEQ ID NO: 429974 - DNA, 542 bp, Oryza sativa
tgttgcggacgcgtggggccgaattgctcttcagattctttatccgatgttatcatgtttttgtcaagtgaataaactaaaactgtatgacaacagttacgtgttgaatcaactaaatttctgacagtagatgttcttaagtgcacaacctaaaatttctttaattcataagaacatgtaaccacattaggtataaagtttgcaagatatcaatcttgatggcctgttgctgctaggtgtatgcattaattctggtgcgctggatgtagtttgcttgcctctaggattatatgataagttagatgtattttgttggcctgctggatgtatgcattcagctcctgacttattcttgatttatttgtgcatgccggatccatggaagtatcaacccactaaagtctgaactttgaaataaggcttttggtatactgaggcctatatattctgcacgtcatagagctatcatgtaacaatatttgtgcaggttagcactggatggaaattaataccttatttgttttctatcttttgaacaactt

SEQ ID NO: 429975 - DNA, 460 bp, Oryza sativa
gctcgaaaaccgttgatttttttctttccggatttcccagaatgtctaatacttatatgtatcaggtctcgtatatgaatgttagacctaataccacagaagtacaaggcctgatacgtatggataccaacctgatacacattaatccacaagaaaaatggaggagcctcaatgaagcctaaacatccccaaacaaattacaactacgacaccatggatagaaaaatattgtggcggatttctgttgattgagctcagtgagagagaagctgttgttcaactgatcatctaaaagggggaagatgcctcgagcatatccaccagcaggcagcgatgggattctaactgatgaaatttcaagtgttagtttcaaatgtcacctttttaaataaatcaaaatagcaacaatacttctctgtcaagttttagtttgtcggctctgacggtcactgtaggtagg

SEQ ID NO: 429976 - DNA, 389 bp, Oryza sativa
ttttggggtttttaaattgttttgttttttttttttgtttttttttttttgtttttttcttatttgttttttggggaaaatataaatttggtataaacggcccaaaaagaaaattgttccgggcattggcaaaaaggggaaaattacaaaggcgtcttaaaaaaattcaaccggatataaaactctattggagggggggaccaagaaacaagaaggaaccaaagaaaaggaaaaaacctgaaaaggaggggttatttcaaggttccacggagttgcccacacccaaatgggggccactaaaacctttgaggggccacatttaggacaaattttttcaaaagggtaccaaaagggttgggggagaactttggaaaaaaagggcccttggt

SEQ ID NO: 429977 - DNA, 326 bp, Oryza sativa
aatatatattttttttttattattttatttttttttggggggaaaaaaacgggggaaattaaaaaagggagaggggtaaaaaaaaaaaccctttttggggggggggcaagcccctggggggggcaagaagggaaggggaaacggcccgggctcggggggggccaaaagagacaggggggtattagggaaaggcgaaaaaggaaagaaacccaaaccccgaaaaaaaaaaaaccccagaaaaaaaccccagggcccaacaaaaagggggggaaaaaaaaaacccccacccccccaaaaaagggaaaaataagggaaggggggggggg

SEQ ID NO: 429978 - DNA, 323 bp, Oryza sativa
ccaaaaaccccgacccccaaaacccggaaaatgggcggccaacccaaagaccccaggaaaacaaaacccacctgggatacccccgggggaaaagaaaagggaaaggggccccatggggaagaccacaaaggggaacccatcccggggggcaggatttttggggggcgccgcagtgggcccattccccctcatcggggccccgggggataaaacagcccaattgcaaggcgggcccactcatcagggggggggccccctggacgatttggggccgctcccgcccccggggggcccctttaacaacaccccggcctccaaagggg

SEQ ID NO: 429979 - DNA, 248 bp, Oryza sativa
tttgtctcctcgggccgcgtcgctcttccaatccaacccactccgagccagattaagggagaagagatttcctgcgaattcttcgaggaattctgttccaaatcgagtatgaaattcgggaaggatttcaggagccacctggaggagacgctgccggcgtggagggacaagtatctggcgtacaagtcccttaagaagctaatcaagaacctgccccccgatggagatccccctcccgtcgccgcggc

SEQ ID NO: 429980 - DNA, 169 bp, Oryza sativa
taactttcttcctcctcctcgacttcaggactcaattcgtcttctgatagctcagcttgatcggggcggatgacaatgggaggtggcagggccaagcacgacgagagcgaccaggggcttttttttaacatgatgcacggcgctgcccggcgacatgggtatcctcctc

SEQ ID NO: 429981 - DNA, 145 bp, Oryza sativa
tttttttttttttttttttttttttttttttttttttttttttttttttttattttttttttttttttttttttttttttttttttttttttttttttttttttttttttttggggaaaaaaaagggaaaaaaaaaattttttat

SEQ ID NO: 429982 - DNA, 426 bp, Oryza sativa
tgcgaagcgaccatggccatccctcccctcgccgtcagcggggtcgccgacgccaccctcgccgtgctcggcctcgccgtcttcgcctgccgacggtggcagcaggaataccatgagttataacacacattttgtgtaagacagtcgtactccaattttgaagtacatatcaaaggagaatgaaccagaaatgaagcctccaatatatgataaaaagggagtgagaccacataaaaaataggaagaaagcaccacattaggaacaggaaaaaaatgggactaaaatgtacaagcatgatgtggagatacactgctatttctgcaaagagcctagacataacaagaaagggtgcccactgaaaaaggctagacttatacccaaactgaagacaagtaggatcctagcttgccagtataaaaaagagt

SEQ ID NO: 429983 - DNA, 56 bp, Oryza sativa
cgccgcccttttttttattttttgggattttataaaattattcgctattttatctg

SEQ ID NO: 429984 - DNA, 66 bp, Oryza sativa
tggtaaacctctgagagcaaagaccaaggggggagatctagattcgccgccatgacggaccaggga

SEQ ID NO: 429985 - DNA, 64 bp, Oryza sativa
tttggggttttttttccacaatgtgcttatggatggaattgctttccatttcttttacccaaaa

SEQ ID NO: 429986 - DNA, 88 bp, Oryza sativa
ctgtatcgatcatccgacgatcaaatcagtaatcttgaatatggcgcctttgaacggtaaggtggtggtggcggcgatggtggagccg

SEQ ID NO: 429987 - DNA, 145 bp, Oryza sativa
tttttgttttttttttttttttttttttttttttttttttttttttttttattttttttttttttttttttttcattttttttttattaaatatggttttatttttttatgggagggggccctaaaaaaaaaaataggggcaaaa

SEQ ID NO: 429988 - DNA, 327 bp, Oryza sativa
tcttataattccctagattaaacgaaccactaaccaaattgactacagaaggtggtgaatataccactgttaatgactcaggagatatcacacctgttcaggagtatacataacatatgaacgcaacccaacctattcctgagacctttagcaatgacttttctgacctaaatttcagcttgaagggaaatgtcaaaatgtgcgaagagaaatgttctgatgaactcgaagattctactgcttcagatgaaaaaacaaaatggcgtgatgactttgaccatcatgcagtttcggagttgcaacatggcccttttgacaccaagatga

SEQ ID NO: 429989 - DNA, 118 bp, Oryza sativa
tttttgtgttgttttttttatattggcttttatttttttttataataatatttttatttttgttttattataattattttatttaatatattaaaattttaaagagttaaaaatatag

SEQ ID NO: 429990 - DNA, 235 bp, Oryza sativa
ttgtggtggtgtgttcatccaggagcaaatgctggtgaatggtcatgcctggcacttcaagaactatgacaaacggccacaatttgcaaaggtaagaaactatggagtatatttcaatatattctttaattgcgatattcatatatatattctgttatgtaaatattctcgtttgaactctgaaaatgataaatattattagcaacataagactaataaattgtagtcatacttg

SEQ ID NO: 429991 - DNA, 512 bp, Oryza sativa
  unsure (1)..(512): unsure at all n locations
tcttttctccccccccccccccccccttctcaccacaacctgctagcaagctcagagctagcagcagccatggcgggcagcaccaagctgcggccattcctcctgacgctgctcctcctcctctccaccaccgtggcttccatcctcgcggagtacgacccggaatgcgactgcgacaagcccaagcaccccaagccctcgcacccttctccctctcccggccaccccaagggccccaagaaccctacccctcgcccccccaagggccccacctacccgtctccggtcacccgcccgccgccgctcgtcgcccctcccaaggtccccgtcacccacccgccgaagggccccgtcacccgcccgccgccggtcacctaccccacacctgcggtcaccacccccccggtcgtcgtcggcccgccggtcacctaccccacacctccggtcaccacccctccggtcgtcgtcggcccttccggaacctacccgacgccgncgagacatacccgacg

SEQ ID NO: 429992 - DNA, 322 bp, Oryza sativa
aaaaacggaaacattgggcaccctggctcgctcatttgccaaacttacggggaagcaaaattaccaaccccttgttttcccccagattggttgccttattgcaaaatgggaatcacctatttacaaaacctaactttgggcctatacatgctagagaacatactgaactatggagtatccatagcaggctttgggggtaaaattgagaagcaaaattgaatatagcaaaactgggtgaatttggtgcggagcggtttcgtttccaacagggggaaaaagctgggcaggttaccaccggggccgccgccccaccaccgggggc

SEQ ID NO: 429993 - DNA, 336 bp, Oryza sativa
tggaagaacatattactattgatgtactcatgcctccttcagaatgttactacacagatctgttttttcagatctatgtgaaagaaggaaaccctggatcaagttcccatgaaaagttacttgccattggggggcgatatgattggttgatagagcaagcttgggataggacatataaatccaaacccccgggtgctgttggtgtcagcattgcacttgagaaatttcttcctaatagtccttcgtctgacattgggttcccaaggattgaaccgagcatcagtggtcttgtttgttcaaagggaggtggcggtcttttgaatgagcggatggaac

SEQ ID NO: 429994 - DNA, 294 bp, Oryza sativa
tgtgttagtgctagatgatgagagcaaagctcatgtaactgattcagagcccatgagcaaaatcgaagaagagcttgaagctgagcttgcgagattggaatgaaatataacttcaaactgcttgaaagaacaaacatttgactccagggaggctgaacaggatctcattggagatattgtccagggagaactgaagatcgatacaacccattgtgatctttgctgaccacagctgtgagagtgcccatggaagggatagtagagaaagctccccagattccacacatggatgca

SEQ ID NO: 429995 - DNA, 334 bp, Oryza sativa
aaaattaaaataaaaaaaattgaataaagggaaaaaaaaattaaaataaaaaaaatttaaaaagggggaaaaaaaaaaaaaaaatttaaacccaaaaaaacaataaagggaaaaaatttaaaaaaagcccatggtttggcccccggggggggaaaggggaacaaagaatttaaaaaaaaaaacacgaaaacataaaaaacaaaacggaaacaaacgaaaaaaatccggggttctacccggggggaaaaaaaaaaaaggggaacggtaatttaatttaaaagcccccaaccgccaaaaaaaagggaaaaagggaaaggaaaaggaaagggaaaat

SEQ ID NO: 429996 - DNA, 446 bp, Oryza sativa
cagcctaagagtgttcataaaacttgttgggtttcacacgcttacagttgagcccagcaaaagcaaaagtagggaagcaacaagtaaagcaagcctcttcggtttcaaatatgtatggaaccggggttttcctctctgtttctaaagaacaagtaaattaagctggcatcgacatactaaagacacaactctgtgttctcatcataaagaaatctactccatgctaacatctagaaggaccataaccttaacttcaagaacttgtttttctgtcaggactccttgggcacttagattttgcagcttggcaaagggccaggcccttgatgacctgcaaatccccctaacagtttcggcgaaacaaacggtttccagttttattgttgtgaaaatgtatttgtttccgtcgttctgcccggtcgcaccagaagtcccgaaaataaaaa

SEQ ID NO: 429997 - DNA, 325 bp, Oryza sativa
tgttgatgatccttgacagtgcagtgccaagactggggggggcaattttgctccctcttcccgctcgtgcccaggccggggccttgcttgctagctagctttgaagccagctcagcaacgccgtcgtcgtatgcatgaaggggagcggcgcatcgatgccgtcctccatgttctacgtgcacgaggagcacgtcgcccaaatccaccactttctctaggagtgctccctctgcggtaagttcctctccggtcgacatcttcatgtacaggggagatacgccgttctgcaacgaggagcgcaggcatgaacagatcgtggtggaca

SEQ ID NO: 429998 - DNA, 292 bp, Oryza sativa
ctgtcatcgatcgttccaattaccaagtctcccatcgatccacaactccagttggtactgcctatgctgatggcgacgatagcctacaggcgaaggatcagctgcgagttcgagaggcggcggcggcggagcaggaggccggagcgcgttacgatcgcgaccacaggacgcgacgccgccaggaggttcgccaccgccgccgccgccgcggcggctcctcctagcagggagcgcgtccgccgccgcgtcgtcctcccgccggcgtcgtcgttgtaccgcccgggccacgcca

SEQ ID NO: 429999 - DNA, 418 bp, Oryza sativa
tgttttttttttgtgaatggtagttagagtgctagattaagttaggcattgctatgacaagaatcctgtacaaacttaaacaagaatcgatgagaaaaacacaagaatttgcatattggcacatcgatcggcaacatcgcagtgtgccttcagtgacgcaaaaacatatacttcagactactgaccgcctgatggcacgcagcgacgcgaaaacccgagtgcttgacaacatctcgagatgtcaaatgtatggctcttgagatgctagacatgatcttgccaacccggtcgcgcaccctcacccgcaccgcccgcttcttgaccggcccgtcgtcggcgccggcgccggccaacgcagggcgccccgccgaccgggcgaagacggcggcggagcgctcctcgttgttctctatccatg

SEQ ID NO: 430000 - DNA, 89 bp, Oryza sativa
aatattattagataattatagttaacaattgaacttattagatgaaaaaagtaaattaaaaaaattaagaaaaaggcgaccattgagaa

SEQ ID NO: 430001 - DNA, 57 bp, Oryza sativa
tgtttacagagggaggactacaacatgaggggggtaggtgttatctggagggggatt

SEQ ID NO: 430002 - DNA, 153 bp, Oryza sativa
tttgggggtttttaagattatacgtttttatcactattaattaacataaaccaactcttggacacagaataagccgaatgaaaagttcaacaatttacaaaaacacgtccaaagctgcgaaaccacttaacagaatgcaacccactggccaag

SEQ ID NO: 430003 - DNA, 85 bp, Oryza sativa
taaaaagattgaagaacaatccaaaaaggaggtatttatgtgatctgtgcgcagattgacacttgaacacagacatggcgagcat

SEQ ID NO: 430004 - DNA, 196 bp, Oryza sativa
aattataattaattattttttatttttatatcaaaaaaaaaaaaaaaaaaaaaaaaaaaaaaaaaaacataaaaaaaaaaattatataaataaaaaaaaaaaaattttttataaaaaaaaaaaaaaaaaaaattgaaatatataaataaaaaaagaaaaaaaaaaactaaaaaaccttaaaaaaaaaaaattttgg

SEQ ID NO: 430005 - DNA, 408 bp, Oryza sativa
tttttggtttttttttttttttttttttttttttttttttttttttgtttttttttttttttttttgtttttgggaacagaaaagcccccggcttagcaaaaaccagcctaaacacggggaacccttaacaaaagggaccccttggccctttggaaaaaaaaaggggggaaaaacaggccaggaccgggttaaaacccagggggaacatctattacggggaacaggcaatatttttttggaggggaagactgaatacgggggtaataaagtacccggggaccgggggggaaacggcaaggggaaaggggggcccctttcaactcacctggccaaaggggggggccccggtattggggggggggaaccattggacccaccggctgggacaatcgggggtttgggggggc

SEQ ID NO: 430006 - DNA, 435 bp, Oryza sativa
gaaggcctcctctatggaggctaactcaccagtctttctggctgattctgttgctgcaagcggcactcatagcagaggaaataatttgtcagacagtaagaaccgcatgacaccaaatagagggaaaaatcagcgtaacaagggcataagcattatcagcttttctgaggaaggtgagggtattccctcgagttctactggtggttcggctcgttgtagttctagtttgcggcacatctggaaagttggaccaagataccgttctacttaccttgaaggataaacttcggaaggttggggcaacttttacatgagaaaaaattgaggggggaaaacttttccaagctcattttgaagccatgggagcaaagacgaagtgttcatttcccttatccagtcctttggatgaaaacactgatgttgggaagaagccct

SEQ ID NO: 430007 - DNA, 169 bp, Oryza sativa
gtccgagctgaaatccagagctggggggatctttgcggcgcaggaggcgcaccggagcgctgtgctactgaggagatcccaacattcgcaaggatgcacttgagtaccttcattctatacgagagacaggctactcgtctataacagggctggtctttatgatgtggaa

SEQ ID NO: 430008 - DNA, 217 bp, Oryza sativa
gatggaggagacagaaaacacctgatccagcgtgtatctttgaggtcgtaggagcgtatatccagtagtgcctggtgcaagaggaggcctgggccagaatttggtgataagggcacgttaccaaatcacttgttgtgcgagatccagggccaccgccttacctgcgctgccattggcagggacgacgaaaccttaaggggacagaggcgcgccttta

SEQ ID NO: 430009 - DNA, 459 bp, Oryza sativa
gataaatacggtctacatttgtttaataaacagagtacaataaagtataagtagtccttgtgaatccattaggtggcttaatagaagacaacacaccaacaaagatgaacaataaaaaagtgaattgggctataattttcatcaacaaaaaggacaaacactttcaaatgggtcatttagtggatgctatgattggcattcttctccaccataaaggactacaagtggaaagagctcattacaaaccacaattctgtctgcaaacatcttcaaaccagttcagcgcagctgcaagatgcaaatggttcgctattcaagcgtgtaaacatgttttatctttcagaaggtcactgcatgctcagtattcaacatgtcttcccaagcacttttacattttgtcaagaaatcaccagtttcggctgaccatttctgccaccagtagttgtgacaattatgtgg

SEQ ID NO: 430010 - DNA, 440 bp, Oryza sativa
atcgtaaacctaggcttgctcaccattgagggcttccttaattaacatggcgtgttgtccacaagacttatctcactttctatatctatgttatatggaggtgatggattgtgctatggtttactagatagctgatctatcaaaatcaatcctagcattccccaaattacctatcacaggaggtgtgcatggatcggtacaacatatatatatacagtaggttagttttgttctgttgtgtcaacacagagtcatgaggaatgttagatgtgttcattctgtgatgctgtctataattctatatgtattaaatttatatgacacgtgagtgcatatatgcaatgccattacgaactgctactatagtctccctgtgtcttcctttcgcatacatggataacacatatggcacaatttaaggcaattgccgttttacaggc

SEQ ID NO: 430011 - DNA, 348 bp, Oryza sativa
attaacaacacttcaacagttatgatgaaccacgctgcaatggatatggggtttccaggcgaacccaaacagggcttgacaaagcaccccacacgggccaaaaataagcccagcgcatagaccggaaaccatttttgtataaaaaggggaagaccttactattatatacattggagctgtgtctccaaatacagaacggggtccagcctcttatcacaaaagcgagggccatcaggaagtttgactggagaaccaaaacgaagttgcgggtcatcaaccaaaaggaatgtggcaccctttgggtaaaggcaagggggaggacctgggtggcgcccaaggttgggacct

SEQ ID NO: 430012 - DNA, 504 bp, Oryza sativa
caaggtagtatctagaagagttttacattagaaaatgtgatacaccccggtgtcttctcaataaaattaccctgtgccaagaatatttggtaattctggcgaatggtctccaaatcaagtacaattagccgagactataatgcctctcatatcattttaaccaggaatataatacttgctaccagtacaaattaaaccatcgaaaaaacaaaatttacaaagtcagttaattcggcggtaagcgtgccaacctttaagctgtaacaggtgacaatattgtgcacgcttactatttgtcatctggcacttgctcttgaaccattttttcttagagtttcatctgcccgtgaagtgagatatcagtatgctcagcagtactaacagcataatcggtcgcagttgtatggatatggaggccttgcgtctgttgacactcatgcctggacggtactcgacgccgatcagtggaaggaaacacacgcaatatatcagtacatagaacat

SEQ ID NO: 430013 - DNA, 461 bp, Oryza sativa
tttttttttttttttttttttttttttttttttttttttttttttttttttttttttttttttttttttttttttttttttttttttttttttttttttttggaaaaaacaatatgtttgacagggggcaccaaccaaagggatgcgaagccataaacagttaaattaaaaaccttcccttggaaaagttaaaataaaaaaaaaatttttgggggaaaacaacggggggggaagaaaaaaaaaaatttttcgccccaacaaggggggaaaacccttaagaataagcccacataaagggaatgccagggaaggctccgggtgaaaaccccaaaaattttttggaaagttaaaaggacccggttttaaacggggggggaacaaatgggcagggaggaaaaaatacccccggggcccgaaaaaaaaaatccacccctttttaaatccagggggaaacccggaag

SEQ ID NO: 430014 - DNA, 369 bp, Oryza sativa
attgtggagtccatggagaacaaaattaacaaaaatttgagctaaaaagggagcaagaaacaagacaaaacacaggataaataaaagggagaaagaacagtacacaggaagacgcggcaaaggggggaaaaaaaacgggcaggcaaaagccccacaagagacaccttggggcggacatggcgacaccgaggcggaaacgggggggctaaagggggacttttacacagaaaaaagtacaccggggaaactacggggaaaaaaagcaggcgggggggaaaaaatgggggaaaaattcgcgaaaaggttcgtgaaaggagaaataacgggggaaagggcccgaaacatcagccccattccgaaggggggggg

SEQ ID NO: 430015 - DNA, 401 bp, Oryza sativa
tttttttttttttttttttttttttttttttttttttttttttttttttgtttttttttttttttttttttttttttttttttttttttttgaaaaaaaaaaaatgggccatgaccaggcccaaccaaccaccatgaaaaaaccaaacatagctttggggtcatgccgggaaaaaaacccaacaaaaataaaaaatttttttgggaaggggggtaaaaaactttttttggggggaaaaaaaaaatcccctggatttggaggcccccaaaaggggggccccttaaagggggggtgggcatgggaaagaaaaagggtaacaaaccggggggggaaccccaattgggggggaaccaaaaaaaaagttttaaaaaaggggtcttaaaaaaaaagcccgccttggg

SEQ ID NO: 430016 - DNA, 354 bp, Oryza sativa
tttgtttttttttttttttttttttttttttttttttttttttttttttttttcaatgaagaaatttatattttcaaccattttttaaagcaccccaagaggcctaggggaccccacaaaaaaaaaggcacgcaaaaatacacaaacacagggggatgaaaaaaaaggggggaccaaaaaaggcaacacccaaacccccgtttaaagtcccacggaattttaacacctcgggaaggcacggaaaccaagcccaaccacccgaaggtttgaaggaaacggcacccaaggaaaaaaaagcgcacggggggcctaaaaaaaagaaaggcggcgggcggccattaaaggagggggaaa

SEQ ID NO: 430017 - DNA, 395 bp, Oryza sativa
  unsure (1)..(395): unsure at all n locations
ataaaaaaaattgataaatttttttacaaaaaaaaaagactgatttttacaaaccaaaaggctacctgcttgtttataaaaacaaccactcccgcttcgtttttaaaaaaaaaaccgtacttaaaaaaaaattccaacaaccaacctatttgggctggatacaacgaaaaagaaggggaggtcgacccttctaccagctatgaaaaaaaggtccaaatctatccgatacttgtacttttatacaagatggaacctaatgcactcccagcatacggntgttttttttgggaagggaacaacaagttggcggcggggatgatcattggacccattatgaaggggggcttattgatggtctgatcctcccaggcatgggaaggccaaagccactattt

SEQ ID NO: 430018 - DNA, 437 bp, Oryza sativa
aaagcaagaaatagggggcaaaaaaaacgggtgcccctggcacaaattaaaagatcgattgcattgatgagcttggtacaggtatactcacccgttttttgaagggagaaaaaaaaagggccaatcaacctttacgatccaattgggggcccggcgctcttttgataatatatggaaacccagggcagttatgccacaaatcccaatgttagggtcgttttggcagatgcttgcttaaaaaatgggagttggaaaattttccaggcatttatcgcccgggattccctgaaccacattattttatagggccctgtagtgaagactggagaaaaaaaacattttcccaatttctgtttggaggtacgcaaacccaccaaggcctcctagcggaacccctcaaacagttggccagttaattgcccttgggctctgggaaa

SEQ ID NO: 430019 - DNA, 322 bp, Oryza sativa
ccggcccaaaaggaaaaacggaaagggcccttttttcccccgtcaaaggcccccccccccaaccccggggggggccgggaaaataaacaaattaagccccgggcaagaaaaaaacccccaaaattgggaaaggaatttcgggaaaggggggaaaacccaaccccgggccccccccaaacccggggccaccctgaccaaaggccgggccctccaaaattccaaaggggccaccccctcagggggctaaaataaggcgggccagggcaacgcaatttgggcccatcggggggggctcccccggaatcttccccagggggggggg

SEQ ID NO: 430020 - DNA, 372 bp, Oryza sativa
gattataatagacgcaggaaataattaatagatagatgtgctgcgtatatatacactgttgatgggtggtaaaaacagcgatccgatgagaaagatggatcatgcatatacaaccaaatcggagtacgtagctagggaggtgtgttgtggtgggcggtggcggtggcggtggagaaatcgtgcagcgtgggcaggtcgacctccccgcacctccggcagcggccggggagagggaggaataatgtactagtcccgacggtggcgcggaaggaggggcaggtggcgtgggtccccagccacgtatcgatgcaggagacgtggaaggtgtgggcgcagtgcggtagcaagcgtagcttcccccccccggtgaac

SEQ ID NO: 430021 - DNA, 358 bp, Oryza sativa
ggaaaacaacaaagggaaaaggaaatatatttggaaaccaatacaaaccctttgttttgaaaaaagcaggggtggggccaaggacaaagccagaggaacaaaatttcaaaaaaaccaaaatgggttccttgggaaaaactttttaccttaacagggccattttaaggggccccagggggaaacaggccaaaacttttttaaggctttggggacggggggaaaaggccaccacctttttcctttacattaaaaactttggggcaggggaacaacatagaaccccgacctaaagaaaaacccctaaaacagggggggggggaaaacaaatttgattggggcccttaacgggaggggcatt

SEQ ID NO: 430022 - DNA, 433 bp, Oryza sativa
aaaaaaggtcagttggatactataacacacagtacatactggaaattggcaaaaaaaggggggggggacacagttaaaagggggaacatagggaccaaagttggcacaggggttacaaaaaaacccccccttaaaaggggcacaaaatagctccaccatggcccaagggacattttagggggaacgggggaaacaaacgacccctaaacgggtaaaccccccaagggaagaaggggaccgattttggaaaaggtaaactgggtggctaaattgggggggcctaaggacattttattttcctttcgaacggggggggggggcacacacgtacccataagggcggccgccctagttaatcgggttgaaattgaccctggggctgatcttgaaggggggggagaccttccccttggaggggaacccggcgcccccg

SEQ ID NO: 430023 - DNA, 398 bp, Oryza sativa
cattgtactcatgcgggaacaggaagaaaaaaaatatcacagtatcacgagcagtacgcgcgatcaatataaagcaaacggagccattgcaaccaacacatgcattacaacccaactagacaggccctacttagcttaggagtgtatatggatgacaaatactaatgacaaagcacaggtgacctagaatgcccgacgaattaaaaaaacctacaaggtggtatttgtaaaaccgggaaaagtgccagcacatgcgagtaaaggtaccgacctccctgtattgagcaattgcagactgttcgcctacgccccgagatgctcccgattgtgaaacacctgtgccacaaccacttagagcaataagttaccaagtgtctgatgcagcctagatgccccat

SEQ ID NO: 430024 - DNA, 368 bp, Oryza sativa
caaaaagggctttattaattaaactgccaacaaaggccaaaacattacgggtttaaagggaacaagcttgaagagacccctttggaaaaaaaggagttcccaaaacaggttaaatgaaatcattattgagggcaaagatggtctcaagcatatagtacccagctttgattgaaaaatggtttttggggcccactggggagtttaggggcccccagtgggcggggccatggccaagggctagggcgtgcacaaggtggccggccgggggaaaaccacaagggggggcctgggcgcccggggatcgacctagggctgcctgcggggggggaacatttcttgggccatgccaacaaaaaggcccttgacct

SEQ ID NO: 430025 - DNA, 390 bp, Oryza sativa
gggggaaaaaaaaaaggaaaaaggaataaaaaaaaaaaaaaaaaaaaaatttttgggggggggggtttaaaaaaaaaaaaaaattttaaaaaaaaaaaaaaaagggaaaaaaaaaaaaatgggaaaaaaaaattttaaaattttggggaaaaaaaaaaaaaaccctcaaaaaaagggggggaagaaaaaaaaattgaaaaaaggcccgttaaaaaaaacccaaaaatccggatttcggggaaaaaaaaaaaattttttttttaaaaaagaggcaaaatttttggggggggaactttcaaaaggggggagtttaaaaacccccaaaaaaaatataaaaaggtccccttttaaaaaagaaagggggtttttatggaaaaaaattcggggggg

SEQ ID NO: 430026 - DNA, 501 bp, Oryza sativa
ttttttttttttttttttttttttttttttttttttttttttttttttaataaaaaaaaaaatttttttttgatttaaaaaaaaaaaaaaaaaaaaaaaaaaaaaagaaaaaaaaaaaaaaaaaaaaaaaaaaaaaaaaaaaaaaaaaaaaaaagaagaaagaaaaaaaaaggcgaaaagggaagaaaaaaaaaggagaaaaagggagaaaaaacgagaaaaaaaaaaaattggtaaaaaacgacccccgttgtttggaaaaagaacagacggcttgtctactcgggggaaccaacaaccagggagtgggaagaaaaattttaggaacattaaaaaaaggttgaaaaggaactcaaaaaagacatttggaagaaaggtggggaaaacccttttaaaaaaaatttaaaaaaaaatcaaaaaaaacagtccaaaaaaaggtaaaaaggatgaaaaaaaaaagggacaaattataaaagccaaaaacaactgggggaatcccgg

SEQ ID NO: 430027 - DNA, 462 bp, Oryza sativa
ccctatacccctctcactcctgatggaggcaacaacaacaacaaggtgctggagggggaacagctagaccaatttttcatcaacaataagagttccagaaacctattatacatgaagaggaggcaagcagcaaaacaagattagttccactagtacaggaggtcaaataaaagaatcaccacacccaagggctgggggtcctatcgacgacgacgatttcaccgggcaccgtcagcagggtgcaactagttagcacagaacacagtagttaccacctattgtggtacacccctttcatccatttcatttctttcctttgaagaagaggaggcagaggcaggcttccaagccataggttaacaactggcggaagaatgcgcgacgtcttgcatctccaggacagtttcatgggacgaatccatctgagacaacttcttagctagatcctctaatcaaccatat

SEQ ID NO: 430028 - DNA, 349 bp, Oryza sativa
ggggccaaaacaaaataaagctggaaaagcccggggcccccccccaattaacaggaccattaccccggccaaaacacaggcccctaggcatcggaaccccaaagggggatgggtccgggggaccgggtaaaagaaattgaatggccgaggaacggggcccggacccccatgtttttgggggcggggacaaccccccccccaaagagggggcccaggggccccaaggccaacggggcgggggggggaaccccggggggggcccccgtctgaaggccggaatcgcgccccccccggtaaagcccccggggaaacctctcggttccccgcggggccagcccaaaccccccgg

SEQ ID NO: 430029 - DNA, 186 bp, Oryza sativa
atggaggtaacaacatcatcaaggttttttagggggaacagttataccaatattttatcaacaataagagttccagaaacctataatacatgaagaggaggaaagaagcataacatgaattagttcactcgcacaggaggccaacataaaagaaattaccaacacccaagggcttgggggatccta

SEQ ID NO: 430030 - DNA, 488 bp, Oryza sativa
tttttgggggtttcagtcagcccctctcactactgaaggaggcaacaatgagatcagggcgctggagggggaacagcaagaccaatttttcattaacaatactagttacagaaacctattatacatgaagaggaggcaagtactaaaacaagattagttccactagtacaggaggtcaaataaaagaatcaccacacccaagacattgggggtccttatcacaacatcctactttaacgggtacccggcacagtgtcagcacacgcgttgacagaacacagtagttaccacctattgaggaacacccctttcatccatttcatttctttcctttgaagaaaaggaggcagaggaaggtttccaagccattagtaacaactggcggaagaatgcgcgacgttttggatttcagacaggtttaagggacgaatcatttgagaacttcttagctagatccttaataacctatccaagttttacttgggagt

SEQ ID NO: 430031 - DNA, 358 bp, Oryza sativa
aaggaaagaaaaacttaaattacttttttttgggggcggaaaaaaaaaaaacccggggaaatttcccctttcaaaaaaaaaaaggaacagggaaaaaaaaaagggggagaaccccttgggatttgggtaaaccggcaaattaaaattggcccccggaacacggaaaaaagcgggggaaaacccaaaagggggcaaaaaaaaggaaaaaggtctggagaattggtacggggaaccagcaaaaagggtggcctccaagttaaaaaaaaaaaccctacgccattaaaaaaaaaattagagaaaattccctcccactgaaaaaacccagggaggtttggggtaaaagggggaaaaaaaggag

SEQ ID NO: 430032 - DNA, 335 bp, Oryza sativa
ataatattaattgttttatggtattagtaaacaaaataactgttaactgccacaaagaactatattctctagtaaaaaaaggcgcaccactaaattatttatatatatatagagtaggattatatatagaaaaataataaaaaaaagcataagaagccactaaatattacaaaagggataaagggctcatcttacttccaaaggagggcaaagaagcaaacaactaaaaggggagagaagctcaaaacccaaaagaaaaaggaagctaaaaaaacaaaaaatagtttgaacacttcacccgtttatacaccataaaccaaaaaaagaactttgat

SEQ ID NO: 430033 - DNA, 425 bp, Oryza sativa
ccagatgaccttatttttttttttttaagggaaacacacagggggaggcaaactctcgacacccaggagtacaaaactaaccgcaaaaacaacggaccggcgcccggaaaacaggggggcacaaaaaaaacaacttgcacacgcaaagaaggcaataagacaaactgggaccaggggcaaaaacaaataaagagaccacaacctcccaaaggtcataggggggcaactggcaaggggaaccaacaacagatgtacccccaacacaacactgaaggccctagtttaaagggaaacagaggtttaaccccaccacaccaaaacatcatgaaaacacaatattagcggcaaaaaaaatgacgccaaccggggggaccggttagagaccggacccgtcagaaagaggcttgcgagccaacacaaaagaa

SEQ ID NO: 430034 - DNA, 286 bp, Oryza sativa
aaaaaaaaaccccgcactttttttaattttaaaacacggggaaatcacaaaaaaaactttccccaaaaaaaaaaaaagcaaaggcccttccatttacaaaaaaaatttttggggcaaaaaaaaaaaaaagggtggaaaaaacgggttttaaaaaaaaaaattattcttgggacgttaaaaaaaaaaaaaaaggggggcgcaaaaaaaaaaaaaatttaaaagggttgggcaaaaaaaagggaaatctccggcccacctttgggggaaaaaaaaaattaaggggggg

SEQ ID NO: 430035 - DNA, 249 bp, Oryza sativa
aattgaaggttcaataaaatatgggttactgaattcaaattgggaagcaaattttagaaagtgagtgacataaatgctaagacaacatgtaggaaggataacagtaataacggggcaaaaggggcataaaggaacttgagtaagccataacagacaaaggataatatcagaactaccaagtgggaaccaggcaacggaaggtgggcggatagcggggtagaataaaaccgtcggaggggtggacctaaa

SEQ ID NO: 430036 - DNA, 341 bp, Oryza sativa
aaaaaatattggaatttttttttttatggaggaatgataaaaaagaaagaaaaaaagggaggaaaacaccatcggaagaaaggcaacaaagcaaagaagcaacaggggaagagaaaactagaggagcacgaacggcgggggcaaggacagcacgacaaggaaaggaaaaaaaaagcctgaatgatggagcaaacaaggaagaaaggaaaaaaacccacgaagaggccgtcggaagaaggtatgttgcagaagaaaggacataaccgccggcttcaccgggccgaacaaaaaaaccaaccgggggcaaggataaccggaacagcacaccattcaggaggaaa

SEQ ID NO: 430037 - DNA, 285 bp, Oryza sativa
tccgccgacgccacccaggccccgcacaagctctccgccctccccttccaccacctcctcttctcccgcgcgccgcccctcctccgcgcctcccgccgcctccccctcgcgcccctcgtcgcctcctccgacgccgccgccgccgccgaggccggcgtcgaatggagcgagacggaggaggccgatgagggttcccaggaggaggaggaggaggaggtggtcgaggagcaggcggaggcggaggaggaggcggtggtcgttgtggaggaggaggaggaggaagtg

SEQ ID NO: 430038 - DNA, 414 bp, Oryza sativa
attacttaaagtggcctacaaattgagagaacatgggtgtttcaaaccaagcatataatttgggacaatcattgatgctggggttaacagaatcggtgcttatgataactgtaatgacagggcacgtggagcataagctaatttttttaagctgttttagctttggtgtaacatcggaattaccatgtgtgaaccatgcacaggatggttgggggattactgactggaaaagactcgtttgaggggtggacggataacaccgtggagaccattgaaggcatgtaccagttcgtgcggagcgcggaggccctgaacatattgacgtcccgttctgtcccaagagttagtcgcaggagttcttgaagatgcagttggagctattctttatggggattggagcaaaaccaggagcgc

SEQ ID NO: 430039 - DNA, 389 bp, Oryza sativa
atacggctaatgttataaaattggtataatcattgatgttttgatacaacagactgtggcttttcatgaaacaaaacagcggggacacacaacaaaactggggacatcctttaacaaaaacttctcagtatcccccagaactataccgtggatggtatgactgcacacttgtgccctgccagctccagatgaaccagtgattataatatttttcgagtagatctaccaagacaaatcattcaggattcttcgctggtagtagtaggatgctttgttctattgctgagccgaagctccaactttatgttcatggccgccaacttggaggccaggtatttgaagacgtaaggcatggggacgggcttcatccctttgcttggtttgcaggc

SEQ ID NO: 430040 - DNA, 392 bp, Oryza sativa
ggaaaaaaaaaaccatttgggtatttttacccaaacaggggggaaaaaggacaggcaacgggtaaaaaataaaactccccagtgtgcctggcacagggggggactaaaaaaacggggggaaacaggggcaaaagccacagttaaaaaattgggcggggctggggatattgccccaaccccaaaaaaaaatttgacaaccattaaggggttttgggtgggccaaaagaaaaaggggttaagtttggagggaaaaaaaaaagcctggcggggaaaaaccgatttttttgggggttttgccccagggggggaaactcccggcgggggggaaaatcgaaaccggggtcaaaatttgggccttactttttggcaaagtttgacctgggggggggcct

SEQ ID NO: 430041 - DNA, 314 bp, Oryza sativa
gattcaacatactttttctttttatgaaataaaatatttttgacacacaacacaactggagacatcctttaaggaaaactttttaggatcccccaggaaaatgccgtggatggcatgactgcacacttgtgccctgccacctccagatgaaccaccccccccaatatttccagaggagatctaataagacaaatcattcaggaatcatagctggtaggagtaagaagctctgctctattgccgagccgaagctccaactttatggccaaggacaccaactccgaggccaggtatctgaagaccccaggcatgga

SEQ ID NO: 430042 - DNA, 315 bp, Oryza sativa
caccaaacaagaacatgggggagtttttaacattaaaacccaaaagcccaagcaaaagagggtccattggaaacacaacaccttttttaaagcaaagaacattactccagggggaaaaatgactccttcctcccttttataatactaggaaagattttggggggggggggaatttggccccacagaattttatcccttgggcggggggaaacaaaaacaccctgctgggctgtttccatgcggccccggggacacacagttggctacaggacggagcaggcgtgggggttctggtttttaaaggaaggggtgtat

SEQ ID NO: 430043 - DNA, 116 bp, Oryza sativa
ttttttttttttttttttttttttggttttttttttttttttttttttttttttttttttttttttttttttttttttttttttttttttttttgttttttggttatttccttttt

SEQ ID NO: 430044 - DNA, 86 bp, Oryza sativa
ttacggggaatttaaaaaaacgcgggaagaacaacaacaaccagaaggagcggaagtaatacgccagcccattaaaaaaggaacac

SEQ ID NO: 430045 - DNA, 489 bp, Oryza sativa
aagtaggaacaagtagtcttacttttcattcagtttggaagttatctcctgtctctcaggaagcgtaacagatatcgacatttctcatacattactcttaatcttttgatcaactaagctacttaaacaatcatttcttcgtacttacagttcaaagataaatatttggctcctgctactacttcacaataatataaattgactatatttgacaaatatagtaatattgcttgaaagacgctaatataactgggtccaattgcaacaggaaggcttctagttggaaagatgacacccatctgcaagaactgttttcccacatgtacaagtttgattatgtacatgcactatcacaaccatcaaatttgtctcaagattgatacaaagcttcaaagttcaaagtattgaagcaacccgcccaccttctattcatcaggatgcatgtgaaccttgaagcatttggaatgggcatagaagccgttagttgac

SEQ ID NO: 430046 - DNA, 386 bp, Oryza sativa
gggggaaaactccaaatgaattattatcacttgcttgcacaaactaccaagcatgttccaacaatgtctcaagaacccaagatactgggatatccaaccaggggaccagggaaaagctgttgccaagatctttccttgaacccaagtccaacttcaattttgtaagaaaaccaaaagaggaagaaactttccagggccccaagttggatgacttgcccttctttgggcgcaaggttaccaaccctttggataggggggccttgaaaaaaaagggcttttattatttggttgaggaggactttttttccttaaaaggaccaggaaccgggaatcactttaaaaatttttgacccaaggagggaatttttttacaagcggggatggaa

SEQ ID NO: 430047 - DNA, 179 bp, Oryza sativa
tgtctggccgctcgcgtatctagaaccttgcggtggatacctagggggcccagagcacgaggtaagggcgttagcaagcgacgtaaatgctttcggggaggttgaaaataagcataggatccggagatttccccaaatagggtcaaccttttttgaactgccctgcttgaaatccatga

SEQ ID NO: 430048 - DNA, 360 bp, Oryza sativa
tttttcatggatgtgttctgcgggcatatactgccattttccgttaaccctacagttatcttaacagcaacgagaatgaataggggatgtgatcatttcgtatctgaagatgccttatcttccggagtaatacatctttattcacgctgggaattgcaaatgcaggccctggtggagatcttcgtgtttatgctggagaacctcacagtttgcagaagatgtccgagtgctaaaattggcaacattccaatttggccaacgcttttcatcacacagtagtgaatccacacttggagctttctatgcaccaaaatagtgtggctagcttactcttattttcccttgatggcgccaaagtgc

SEQ ID NO: 430049 - DNA, 265 bp, Oryza sativa
ggaatattattattggtttccgcttttttcgaatcataaaagcttttatagacgccatgtaactaattaataattaagttaggcccttcactggggacatgacgaacaattccttacacgctagcaatataaggaaagatgaacagcaaaaacaaacggaaaaaaatgggcaggagggaagccaatcaatcttttaaagggtggaccgaaccaaaggtaatgagaaaaaccgacagtactggagggtaaaacaaagggacgaacc

SEQ ID NO: 430050 - DNA, 425 bp, Oryza sativa
gggcaccatcatacagaaactatttgtcatataatgcatacattttcacttaatttttgttccgctaatcaaacagtttctgcaattgatctaattttgctctcgtccttctggtcatgtagctacattgttctccctgacacaaatggaagaacagctttcgtgctaacttaaaatggattctcttcaatgttggagacttgatcgaagcaatgatctgaattttctgaattctgacatacatacagcctacggatttaatctttcttgaggagatcgtagaacacttcaggcttcttgtagtgctttttgcacgcctcctgcattgcaaatgctatgtggagcagagtcgccttggaccacggcctgccgatgaactggaagcccgtgggcaacccggctttgtcattcccaaccatgacggt

SEQ ID NO: 430051 - DNA, 344 bp, Oryza sativa
ggcccaaaaaaagctttttgtagggggaaaaaattttagttttttttgggacacgtcccccttgaaaagggacaaaacgtacgaaaccaacacccaaaaaaaaaaaagtttgtttgggggaccgggccgatcaaccatgggggcccccccatgcatgcttggggattggacgaaaccttagctgggcaatctttttttcccgaatcccaatttggccttccttggccggggaacaaaattgggttcccacaaatgccccagggggaatccacttggggggaatcgggccgcggatgaaattgtttgatccttttttttgaacggaggtttaatttaccctgggg

SEQ ID NO: 430052 - DNA, 299 bp, Oryza sativa
ggggcctgaaaaatttttttttcctcatcctttttattaattccccccaaaggggccgttcccagggagtttttttggccttataaggcaaggaaggaactaaacccccgggggcaggggaattgttttaaacaaaaggtttattaaactccaggggttaaacaaaccggggggtcaaaggaaatcccgctaaaaaaaaaccccggggaaagtcccccttttttttttggccccaaagccttttggggcacccccccgttttgggggtttttttttcccccggttttttcgcttagggg

SEQ ID NO: 430053 - DNA, 277 bp, Oryza sativa
gggaaaaaacaatttttttgcttacgggggggccaaccgcatgggataatcattttcccgggcgggccccttatcctgggcggtcaaattataccgcccacatggaacaaaagaaaaccaaaaattaaaaaaaaaccgaaaattgggggctctggacgcaaccggtccaccgcaactttgtcgggatctggggcggggtcccgtttgtttgtcgccctttccgggtcgctgccttgccaacgcccggtttgggtcccccttgttccctgttgttgcc

SEQ ID NO: 430054 - DNA, 416 bp, Oryza sativa
gtatcaatcaaaaatacatgtaagatcatagctcaatttggaataatacaaagtgatttcaggtatctaacctgtccattgcaatgactaaaccagctgctgtccattgcaatttcgttttgttcatgtctgtacttaagattggaacagagaaactcaaatgattttagcaagcgcaacgcaataagggtactgtgattctttctgagccatgatctgtcctcaagaccattgaagattgttttcattggacatcggaagatcctattttggctcgaatcacagcacttagccaaaaattaacttacttaagtacacatttaaaagtgcttgacagatccaaatgtttcccttttgaccccatttgttactcatcactttaactttcctcctcactttcgacatcttggttaaag

SEQ ID NO: 430055 - DNA, 354 bp, Oryza sativa
atgaattgggaagaaacaagaaagacgggtacccccaaaatggtttaataggggggtggggttcatcccaaaaaagtgggggggataagggttcccgggggggggaacccttttagagggaaactcccaccctggggggggaacccctaatcatggactttacaaacccgaaattaatttcaggggcagccctaatggcatgggggccactaggggccattgggaaagcccttggggggagggccataacgggccctgggtttggctgaaaaaatccccttggggggcttccttttataaaaattttgggacaagggggcaaccctggggggggggaacccccccggggggaaa

SEQ ID NO: 430056 - DNA, 343 bp, Oryza sativa
ggaaagtccaaagcttgcacttttaaagtaacatttgcaggagtccatccaccataaatgggggttttttcgatccaggggcattttatgttggtccatactaggggtacagtttaacaataaactgttgtttaaacccagcagtttttgggacgattcttgagtaatacataaattctattttacatatattatctccatgccaagtatttttgaagactggcatagggggcagaagtttaatttgcttttgcactccttggaaaggcaaagatgcctacaaggcaccaattgtatgcaagccctcctttgacttgcaaattttacatgcggtcaaattttt

SEQ ID NO: 430057 - DNA, 299 bp, Oryza sativa
tcgcgatctagaacgcggtgcgtgatattttgggtttcataaaatgggatgtaatcaaaagctcagagtaggtagacacaccgggtttcaaactcatggaagctatttagacacaaacacaattttttgggttgaggataaaccttgattggagtaagctatttttgttacacgcccgggtctatggaaaggctaaaaacttgtgggtagttccttggaaccgagtaacaagatttccttgtggggggctggtaaatcaaattcgtgttagataaccacaggaacgattaaacatactg

SEQ ID NO: 430058 - DNA, 122 bp, Oryza sativa
ccaaaaaaatactgccaaatgagggttccctaaggaaaaaaaaaaccccaccaaaatttcaaaggccacggtattgacgggcgggccaaaaaaaatgttaagtacactatttttctaaaagg

SEQ ID NO: 430059 - DNA, 118 bp, Oryza sativa
acccataaatcctggcccaatttaaataagatttaatggctagggaaaacttgttaaaaccagaaaaccggggcattggcgggggggattccaaaatatttggggtagggagttaaac

SEQ ID NO: 430060 - DNA, 106 bp, Oryza sativa
aaactacatgacttacatggtaaaatcggtatttccatcaagtttggaaatgctagtgtttgtttgctgtctttgtatcgtccactggtttttcttcatatattaa

SEQ ID NO: 430061 - DNA, 177 bp, Oryza sativa
ttttttttttttttttttttttttttttttttttttttttttttttttttttttttggaaccaaaattttttaaaaaacatgggtatttattttattaaaaccaaaggaacaaaactaaaaaaaaaatgaaatggtcttaaaaattcccaaaaacaataaaatgaaaggtgggaccc

SEQ ID NO: 430062 - DNA, 99 bp, Oryza sativa
gggcaaaatggaatttataaaacgtttcggtttacacgtagtacacacagattgggaacatccctgaaaaaattaaaatagatcatgcacacagggggc

SEQ ID NO: 430063 - DNA, 183 bp, Oryza sativa
gctcacacactttatttatggatgaatataatatttcaagtttgatgtgtttacttccaaggctgaagaatgcaattgttggtttccaaccttcaattgtgtgggagttgatgctgattgcctaccttgaattttgattcggttttgggcacgcgtgtacccttgatctttacataccttgat

SEQ ID NO: 430064 - DNA, 405 bp, Oryza sativa
gctaaaactttctatagataaggcagaaagaaactatgggcaaagttattgagaccaccaaaggttttatgacacacacacacacacaacattcactatatatataagacaccatttagagcaaagctatccaagcagcgcatattaccctccatttccaccgtttcttagagggaaagggactttgagctggaccattgcatagccatattcgaagccaagggagctgagagtaataagcgtttgggttaaggttaacgacacagtttgccttgtagcctaccctttcgggatttcctcgaaaggggaaaacccgttaatgtaagccttattctgttttaatatggaaggtaatttttccctttaacttatttcctgcaccgtgttgtttttagatcaaagtgt

SEQ ID NO: 430065 - DNA, 486 bp, Oryza sativa
ggcggcgacgggatcccaccccgcccgccgcatctcgccgagcatcgacttggcgaaggagcggaccgacctggcggcgtggcgcagcgcggcgaggaagtgggtggcgttgaggccggagaggtggaggccgtcgagcgcggcgagggtgcgtcccgggtgggcgcgctcctccagcgcgcgcgcggcgcggagatcgtcggcgagcgcggcgcgggcgcgctccgcctcggcgtcccgcgcgcgcagctcccgcccgagcttccccgccgtgatctcgtaggtccggaggaggtggcgctgctcgtcggcgtgcgcggcgagcgccgcgggcccggccgacgcgctcttggccgcggcggcggggtccctggcgaacctccgcttgtgggcggagagtttggtgagctcggcgaccatcgcgcgtccgccgactggatcgcctcggagtcgtaccggtgctgcgcctgctgcaattgcgcgtac

SEQ ID NO: 430066 - DNA, 240 bp, Oryza sativa
agggaataacctggaacttgaaaaacatgtctatgaaatacaaagaacttacatagggggtttacgctgtcaatggcgtgctaaaaatacgcacatatgttgtacgaattggatgatggaaaaagtattacataagctttatgaaagaaaaggaacgaacgaagatagtgtcgatctccaacaggtaccatgataattttttttcaaaggaaacacatagattcgacaatcaatttccag

SEQ ID NO: 430067 - DNA, 135 bp, Oryza sativa
taagggggttaactcacaaaaggggaagcacaaagcagaggaaagggactgcagaagaacacaaaccaagaggacaatggggcaacgaaagaaatggctaaagacaaaggtgaaagaatggaacctagagaaaaa

SEQ ID NO: 430068 - DNA, 388 bp, Oryza sativa
atacaagaaatacaattatactcaattctaaaataccttttaatccctttagtgtagtagcaaattcggcatgagacaaattcggttcctagtcatctatcatccaatgcaaattgccgcggttcccagcgaaacaagacctttttttaattttaaaaaaacagcgacccagaagttgacttagctttaggcaccgcttattcttcgaattatctcatcgaaacttaatccctggttttttaaccgccgttaatggccaacatatcttccctcccttccccgcttcgactcgaactgtcttccgtcttaccggctaatccggcggccaatggaacgggcgttgggcctcggcgtgcacagggcggtgggtacaacgtcggggagcggg

SEQ ID NO: 430069 - DNA, 491 bp, Oryza sativa
atgattaaacttgaacgaggttctatgggttaatctgggatgtatgaagcatatgttcggggtgaccaggacgtattgtttccgaaccgatcggtgaagcggagacctgatgcccttcagggactagcctcctttcccaagcaagttttcagccattttggagtaacacccgaggatcgtggttattaaaaaccggtgaaatagtcgactcccaacgctttttataattgtctttccttgagtaaagtcccaagaaggcagtttccaccctcaatcaccaaagcaggaatccaccttctggctttccgcaagtttgggagaattcgtggccattttccctgatagaaaaggttattctgattaactcttgcttggcttcatttttaagaagagccggcatttgttccaatccagatttccctggttgcttttttcaaataatttcaaatctcagccatagcttggtttctaactttttcgcaggtaaacag

SEQ ID NO: 430070 - DNA, 121 bp, Oryza sativa
ttttttttttttttttttttttttttttttttttttttttttttttttttttttttttttttttttttttttttttttttttttttttttttttttttttttttttttttttttttttttt

SEQ ID NO: 430071 - DNA, 141 bp, Oryza sativa
ggaaaaaaaggccaggcccttaaagtttgaaaaatcaaaacatgacaaatcccgatcaaaagctgcaaaaaggggatgatgacccgaaacctggatggatgctgcccaaaggccgggttcgcgtctttgcccgtttccacc

SEQ ID NO: 430072 - DNA, 493 bp, Oryza sativa
gaaaaagaaaatgatcgtattttattgactgatcctaatgttttctttaaaatataaacaagctacaagcgaaagaaaatacatgcacctgaaccaggtctatgggttaatctgggtgtatgaagcatatgtttcactgatcaacagactgatacgaacaacactgtactaaacctgatgcctcagggctagctccttcccaagcagtttcagcatctccctaaccccgagatagtgttctaaaaccggtgaatagcgatccaacgctttatatgtcttcctgagaagtccaagaagcagttccacctcatcaccaagcagatccacctctgcttccgcagtttggagatcgtggcatcgcctgatgaaagctatctgataactctgttcgctcattttaagagagcgcatctgttcaatcagatttccctgttgcttttttaaaaaattcaatctcagcatagctgtttctaacttttcgcaagtaacagct

SEQ ID NO: 430073 - DNA, 63 bp, Oryza sativa
ctccacagtttttattattattatttttataaccgcgattttaacacgtaaccaaacttgaaa

SEQ ID NO: 430074 - DNA, 140 bp, Oryza sativa
tttttgtgtgttttttttttttttttttttttttatttttttttgttgttttatctacggcgcttacaccggacaattggcgaacgacgggaaccagaccggagaggagaccggcccaaaggacggaagggctccagaca

SEQ ID NO: 430075 - DNA, 93 bp, Oryza sativa
ggtattccaaaaaagcgaaatatatttcataatgaacataaatctgcttctacaaaatactcccatcagtaacatgaggcaccaaaccacaag

SEQ ID NO: 430076 - DNA, 77 bp, Oryza sativa
ggaaactcaaagcatctgacagccagaggcgagaagttacaccacaggcccatgcataacatgccattcttccttcc

SEQ ID NO: 430077 - DNA, 244 bp, Oryza sativa
ctggccaaaacaaatctattttgtctcggttaaaagggaaccttacggggaaaaattaggtttacagtagtgttatttaaccggggggattaacaaagatatggggcttctgaaaaactggacaacatccacaaatttgacaactaaggccagacgcataaatcttaactgggtacatgaggggattgaaaagggttcgaaagggtccttgggagttagcatggtgggcatgcaatgttcaaag

SEQ ID NO: 430078 - DNA, 183 bp, Oryza sativa
attaacttggttaatgttcattacacaaacaaaacccaccactgttcatagggggaaaaaaacaaaaaggggggccacacaaacaaatgttgggagaaaaaactcagggagttgtggtaaaaaaccaccacccaaagaaaaatggagcgcccgaacaaaaaaaacggtccgagggggggggaa

SEQ ID NO: 430079 - DNA, 278 bp, Oryza sativa
aggtaaacaagcaattgatttattagtatccatccaattaaaactgtgtgttacactcgaaataaaattttctgttcgtaacacctctgaaaacaaaaaatgattcctacacaaggaaaagaatcaacgaaacaatccttagcaaatgctacaggagcaacatctcctggggaaccccctctgtggttggactgctggaaagtagcttgaagtagaaaaaccttcaacctttcatcagctctagtcccatcttaatattcaagtttatcatggggaaa

SEQ ID NO: 430080 - DNA, 495 bp, Oryza sativa
aataagccataatatcacagacgttttcaatatgaaaagatgttaggaaaaaatgaaggggaccttacagggtaacagtacctgaaaggtcataggatgcacgggtggaaaaagttaattaagcctgaaaatgatcaaatacagatgttgcactaattacaggttaatacatgataaaaaaaagtactagtagggtctaattaatccatcttctcaagctgacatacatgccggggcacagaacaatgacacaagtacttagtcaataggaacttcaacctccatattcacatcagaattgtcaagaatcttcataaagtctggcagagtaaaatttgaatcttttgtatagccagcttcttttaaaacatggatcaaaactttctgcctctgctgctcagtcataaaagaaccagtcagatcccgcaagatgctcaagatatcatcaaatgccaccttcccattgcagtcggtgttataaaccctgaaaataaa

SEQ ID NO: 430081 - DNA, 277 bp, Oryza sativa
ttcttgtttttctttttttttttttttttttttttttttttcttttttttctttttttgtttttttcttcttttccttttttcggaaaaaaaccccgagggcgtgccccacgggcgcgataccccccccaaaaaaagggcccggggctgggccggggtttttctcctccacgggcgcgcgtctctgcccggagggggaacaccaagcgggggacccaaccccgcccccaatttatttaggaaaacaccctctcaccccggggccccccaaagggggg

SEQ ID NO: 430082 - DNA, 480 bp, Oryza sativa
ttttttttttttttttttttttttttttttttttttttttttttttttttttttttttttttttttttttttttttttttattaaaattattatttattattaacaaaaaaaaaaaataaaaggaaaaaaaaaaaagaaaaaaaaaaaaaaaaaaaaaaaaaaaaaaaaaaaaaaaaaaaaaaaaaaaaaaaaaaaaaaaaaaaacccaaaaaaaaaaaaaaaaaaaacaaccacctaaaaaaaatgaatgaccaaaaaaaaaagaatacacacaaaaaacacaaacggaaaaacacaaaacacacccaaaaaaaaaacacaaaacacccaaaaaaagaaaaaaaaaaaaaaaattatttcaacaccacaccaccaaaaaaaaaaaaccccacccccctgggggaaaaaaaaaaaacacaacaaagaaaaccaaaaaacgcacacagaaacaaaaaaaaagaaaaaaaaaacacgaaggg

SEQ ID NO: 430083 - DNA, 51 bp, Oryza sativa
ggacggttatgacaaatagaacatgcagaacgtgacaacaaggaaggaaaa

SEQ ID NO: 430084 - DNA, 89 bp, Oryza sativa
ggtttggtttttttttttggcattttcttattttttttttatatgtttaggccaaaaaaaaaggcaagcattccacgggttattaacat

SEQ ID NO: 430085 - DNA, 331 bp, Oryza sativa
ggacgaaaatgaaacccatgatttaaaaaaactaggtgttccttttttttaaaaggggcccaaaaaataccagtattaatttttttcaactgatctaaaggacccaactagtttggaaccaccaaaggtacagaagggtgttacaaagttggaacacacccctattcctactttatttttaaactgatgtacagaacgggccttaatatactccggggatacaaaacaatgcgcctgaattccaacattgcttatgggggagtacatttttgaacttgatgcttcggcctactccttaacagggggatccacccaacggccattggccctt

SEQ ID NO: 430086 - DNA, 161 bp, Oryza sativa
acacattgactttttttattttgttaatatttttgttttaaaatatttttttttatttttttataaaaacttttttctgagacaggaagtcagcaaaatcggtgatcggccgccagaagaaaagcaccaagaacttccagaagaaaacagaccggagcaca

SEQ ID NO: 430087 - DNA, 380 bp, Oryza sativa
ggaaaccatggtttatctaaagaaggcccattacagccaattaacattacctaagggaattacaaaccatcccatttggaacttggtaacaacgcaaaccgtattctatacacatcaatcagattgaaccccttggaagctttacattgggcactgagaaaacggatctgctcttacatcaaaaggaataaaatctacacacatttatcctctaactcctagaccaatatgaaggaactctttttagctggaacaaaatataacacctgctatctaaccatgccggaacgcattctacttttccattgtattgaacctgtgccggaccatgggaccacctaacttgtagggttacaatggcttgaggtgacaagctaagc

SEQ ID NO: 430088 - DNA, 267 bp, Oryza sativa
ccacgcccaccaataaagggggaactcgaaaaaaaaaaccggccggagagggggggaagagaaattaacaaatgggtaaagggcaaagcccatggaaaaggtccataaccaaatgggaaaaaaaaaaagtacggcatagttatatctgggaactacaataaacatggcccaaagaaaagctgcatccaactaattaggggcgggaatccaccagcggaaggctgagcctaagttaagaacgccaaaaaactcattaaaaccgggggg

SEQ ID NO: 430089 - DNA, 93 bp, Oryza sativa
acattatcaaaccaagtgggatggatcctttattgatctttagctatttactgacatactgcccacgcctgaagctgcaaaaaatttacttcc

SEQ ID NO: 430090 - DNA, 142 bp, Oryza sativa
ttgttttttttcttttgtttttttttttctttttttttcttttttttttttcttttttttttttctttttttttttttttttgggaaccgcgccccgatgcatccaatacatcaaaaaaatgaggcatccccccgttattaa

SEQ ID NO: 430091 - DNA, 427 bp, Oryza sativa
cgtgcacgccgcgtacgctgcatgctctctagcggcggcctcctttttttttttttttttttttttttttttttttgagatacaaaatcccaatctgtttaatatcatatgaacattgattcatacaactcgtggcattcacattggcccatgtttgaatgatcttatctatgtatgcaccatgacatattggggggcatcaaatttttgttcttctgctggtgctgctggatgacaagagctggagcctgaacatgctacagttacaccagtctttggctcctttcacagattcagcaacaaacaaggatctttacatccctggggactgaaagatctgttacgaaatggcagcagcttaaacatggaggccgacaagggaggccttagctccatccttgaggccgagcaaggcatcttgctcccc

SEQ ID NO: 430092 - DNA, 73 bp, Oryza sativa
ttgttttttattttttctttttctgatacatcctttttaaaatcaataccatttttatttttttattcatctt

SEQ ID NO: 430093 - DNA, 111 bp, Oryza sativa
gcaggtgaaaatttttttctcttgtcacttaatccaaccattttttccacacacttattccactctatcaattggatagtttcatatttcatgagaccatgcgccagaaac

SEQ ID NO: 430094 - DNA, 494 bp, Oryza sativa
tttgtttgatggtttgctcggttaatattcatcaatgaaatttgatgtacaaggggtgtgtcactgataagtgatcttattagcataacgtgtttaactctaacatgagtaattttaagtaatctgtctatgaaatccaaatggttcagagaaggaaccattgcaaaacaaatcatagaaaacacatgtaagtttgacaccatcttgtatatccagcaaggaaataagactattctaaatcctgaactctgctggtctcagttgtgacctttgccaacaactcaggaaaatgggaaacgttgagcacagttacaggtaccttaagagcacaattactgattatactgcatgaccttgctggaattgacggtttctgcaccatgttctgagacacagatgatgcatttacccaaaggtataccgtgtttttaccatgtaaatgaaggcaaaacataggtgggataggagccttgcttgcggcacaatgaatcgat

SEQ ID NO: 430095 - DNA, 340 bp, Oryza sativa
aaagttacaactaggtcacatccggtgggaaatgactcattcctaagaaatttatacatttcagttaagcttactgatgtagaaaagccaacaaaaaaaagactaacccctaatatgtgcaaaaattacgcctaattcggaatgaaatagcctatgctgattaaccttgctagtgagaaatgttactagagagaacagtacgcattgaacttagtcagaccatctagatataaactgagatgatggcatgacccaccatgaagctcaggtgtttggagttcttcacaaagatttgctggcctttagaaacaggtgatattccttgagcatcatctccccg

SEQ ID NO: 430096 - DNA, 186 bp, Oryza sativa
tttttgtttttttttttttttttttttttttttttttttttttttttttgtaaaatttaatttttttgtttacggggggcccaaccccaagggaaaaacattttcccgggcaaaaaaaaaaaaccggcccgggaaaaaaaacccgccacaatggaacaaaaggaaccccaccatccaaaaaaagaa

SEQ ID NO: 430097 - DNA, 206 bp, Oryza sativa
gacaaaaaggaacctgttttggccagaacactcctgataatcgccaattacaaaggggtgtctgacggatcgcccagtttatgcagattgttctatttcttgaacccagggagcctccctggaatcattaattaagttcctacctgggtttttctagggggactttactatctacaccccagtattttaacaagagattcctagcc

SEQ ID NO: 430098 - DNA, 415 bp, Oryza sativa
ggaaaaaacaatttttttgcttacggggggcccaaccgcatgggataattattttcccgggcgggccacttatcctgggcgggcaaattataccccccacatggaacaaaagaaaaccaaaaataaaaaaaaacgaaaattgggggcctggacgcaaccggccaccgaaacttgttggatctgggcggggcccgttcgtcgcccccttgccggtcgttgccttgccacccccgcctggtcgccgttgtcgctgttgggcccgtccccttcgacagcgaaggtgaagggggcccttttgggcccctgcggggagtccgggcggcaaaaccaggggatgatggaggcggccttgcggacccgggggcgcaaaaggaggggccctaagaaccgcccggcaaggggcaacggcaaggtg

SEQ ID NO: 430099 - DNA, 369 bp, Oryza sativa
atagagagaaagcacagatacattccattaatgaaatagcgcgatcaaaatggccccacatggcttactcacatacgtccacgactcactacatgcatgacaacgagccacagaaccggatccgggttccttacctttgcatcctgcagaggggagggaatataacctccctcgcctccactggcatacaagcaaaataccattcctcctaaggatcaatctcggttctgcaaagggacattcaatgtacgacctttaactattccaggagaaagcttgtcgatctcattctctacgactgaacatttcgatcttccaatgcttaaacatagcaaaacacgccccagtatacacaccgtttatctttga

SEQ ID NO: 430100 - DNA, 220 bp, Oryza sativa
acaaaaaaagggcaatcccttgattctttgggggattaacaaaagggcaaagatgcaacaggggcacaaaccatagtccatattcccacacacaccacaaacttattttcctccaaaaacgtaaacaactttttttaaaagaaattaagtggtacaggtacaaacaatggcgcgcaatttaccccaccaaccatgtaacaaaaactcgggggaatgaaga

SEQ ID NO: 430101 - DNA, 84 bp, Oryza sativa
tgttgggttttttataactcttttgttttttttaattatgtctttcattttttattggctgtgatcggaaccctaaaaaggaaa

SEQ ID NO: 430102 - DNA, 157 bp, Oryza sativa
ctcttttttttttttgtttttttttattttttttttgtttttttttttaaagttattttaacaaaatctttaaccattttatgatttctccccccaaccgcccacaacgaaaaggcgacgggggcccgcggcccggggccggagggactcaacgtcc

SEQ ID NO: 430103 - DNA, 386 bp, Oryza sativa
tttttgtacaactatgctttcatttggatttgaaggcccgacaaggtggcactactatctaacacatgtattccgaagaaccactgtggtacgcaggttgggagtaactatatgaacaagatcggcttcgggatatggtcgacaaaatgaaaaccgaaaactagggttacaaacaaattgcagagctctgtatgagctgagagaactgcttctactaaacgcatgcacggagcatctgaccagacccgtacggggttatgaacctgaggaggaaggaggcggaggtgcaaggtacgttggtcgatgtaatacagggtgccggccattgttctccttgacactatgaggagcttattgtcagggaagcagttgtggtcgaaggccag

SEQ ID NO: 430104 - DNA, 400 bp, Oryza sativa
gtatgttgatgaggaatatattacacatgaattgttgcatggacacgatcagttacacacgaacagggcgtgcagtggcttactacgaaacagagaacataaaggaattttacccaccgcagctcctttgcactttattttaaccacccccagggccaatctttattaattaatacagtacccagcaaggaccccttgttaagcgtgcggccatctagttctctggaactgattacagctaccaatactgtgaccaaaggttcacgccgaactttgaccaccatctcttgactttgcccaccaaaaattttaaggaatttgaaaagaattaaatttattatttgaatagggaacaacaaattatttttttggtaaattaaccttgggaaaaataaagggt

SEQ ID NO: 430105 - DNA, 205 bp, Oryza sativa
gaacagagaaaaaattaagaatgtaacttacattgtttgaaccaccctaattcattgataactgaaaaacgggcaatgataagctttatttcgatacgaagagatcatggacataatcaccatggggatcctttgcactttaacctaactaccatcagagccatctgtactaattaaaacagtcctaggtaggacacctagctaa

SEQ ID NO: 430106 - DNA, 245 bp, Oryza sativa
atgggcaaaatgaaagcaaaaactcttgtgagctgtatattgagaaattgtaacacattattgagagtttgaccagattcagaaccaggtgcagcataacactgagggaacacattcctttgttaagggaattacctcaccatggccgaccaaaaacagaatgtactcctcacccaatgccgtgttggtaacattctggagaacatactctgctaaatgacagctagaaataggaggtatatacg

SEQ ID NO: 430107 - DNA, 421 bp, Oryza sativa
gggggcccaattccggggaaagaaaaaacaggcccttttttaaaaccccccccaggggttttttccaaaaatttttttcccaatgggaaaaaccccaaattttttttaaaaagggttttaaagagaaacccccttttttttttggggaaaaaaaaaattttataggggggaaaaggacaaattgcccctcttggcccatctaaaaaaaacggccccactattaatgtcctttgggaaaaaaattaggaaatttgggagaaaaaaattttaaaacaatgggccttaaacacggaaaaaggggggtccaccaccaaatttaaggggggcccccgaaattcccttttataatttttttagaggggccccaaaaaattgggccccaattgccctggaaaaaaaggggggggccccggggggccca

SEQ ID NO: 430108 - DNA, 419 bp, Oryza sativa
cttcaaatgccatgtctgcattgaatcaacaaggggcatctataaaaccaatgactgacaagcattaactaacaacgactaacacaagaagtcagggaaggacctccaagcatgtgcacgaaattagctactccacatgccatatatacactggtaatggccgaaaatgaaccaacacttaattgttggtcagatgaagtgagaacatgaagaaagccaatcaaaaggtttattttgtccaatgcatgatcaccgggccaccggagcttcaactccaaaccttaacttggaaaaattgaatgacagcaaatccaatgagggaaccactatcgaaaaataccacggacgttgccatgaactaaccaaacatacatccctaatcaacttcaacatgcacccttagaccaggaatataaagc

SEQ ID NO: 430109 - DNA, 408 bp, Oryza sativa
  unsure (1)..(408): unsure at all n locations
aggcgccactattttagagctatgcacgtctgcatgcagcgcgtatcgtaatgctctggatctctcttattgtcgnggccgccgtacgatctgcgacgggtgaggccgtcttaagagcgcgaaggcggcgccggtgagcgcgaggcgggagcagtagaccgtgaggtcccccgccgcccacgagaagggcagcgactccgccagcgactcgtactcgttcaccggcagctgctccggcggcacggggcaccactccgtcccctgcgacgagctcccgttccgcgacggcgggaccgcgaaccggcggctcccccgcccccgccgccgtccgcgggagcccccggccatcgtcgggaggagaggcgggaggaggaggaggcgcgcgtggaggggaggaggaggtttagc

SEQ ID NO: 430110 - DNA, 296 bp, Oryza sativa
cagaaaaactaccgcagttttcattagaatctttggacgggaaacaacaatggattggcatggcctagaccaccaggacagataacccccggggacacagccgccagggggaagggaaaaaaaaacacggtgggcaccataggaaaaataaaccctggtttagacccccgaaaccggacccttaaagaaaaaacaaccacttctagctggcaagaagagacccatccatgaaacccaaaaaagggcaagcccctgaaggcgggatgtgctcaaggttaaaccctagagcccccccc

SEQ ID NO: 430111 - DNA, 363 bp, Oryza sativa
gaaaaaaacaaacagacttagggggtttcctttttttagataaacacccaattttggttgtttcaggaccaggtgacggaattaaaaccctagaacctgggagcaaaaaaggcctttcaatttcggtgggaatccatggataaaacaccttttccggggaagaaatgaacttgggaatttaattaaggccagtttttttgtgccacccagtatttcgctcaaaaactttgcccaaatacccatcccccggtgccaaagccatttaaaaggctgactcatcaagaaccccctgggggggagattttcctttttaaaaaacctaaggttggccctcataaataaccttttgttgataaacaaaat

SEQ ID NO: 430112 - DNA, 292 bp, Oryza sativa
ggggcacaaaaatggttggttgggaaaaacacatgaaaataaaccagggggaacactcgcctctgggggaaggcacaccaaagaacgtgggcccaaaaaaagaattcaaacccggtttttgaacccaaaaactgacaccccaagaaaaaaaaagggaaatacgctttgaaaagggggcccccctattgaggcccaaaaagggaaaacccccgaaagggggggctgtcacaagtgaactcggggggggcccccaaatatgaaaaagccccaaggaaaaagaggaaggatcccc

SEQ ID NO: 430113 - DNA, 326 bp, Oryza sativa
gggggggaacaaaccgggttttttgaccgaaccgaaacttggttttacaggttggcccgactcctaacttaagcccctttgacggggatccctttgtcccaaagttttgacccccggaaaaaagatctaatttccctacatggataggtaggtaggaactttctcatgtcaagggggggttgccaaaaagggggtccaacttggcattgtcaccttcggacaagaacctggtgcaaatgggggccccggcccccatgagtgtcaacatggcccgcaagattgagcctaccccttttccccaaattaacccccactccaaaccccga

SEQ ID NO: 430114 - DNA, 412 bp, Oryza sativa
cgtcttttcttttagtgtcgactaatagcgcgaatggcagttcctttgagcgcgaggctgtagcattagaccgtgaggtcccctttcgtccacgagatgggcagttactccggcagcgactcgtactcgttcaccgttagttgttccggcggtacggagcaccacttcgtaccctgtgacgtgctgctttttctcgtctgtgggaccgggaaccgggggttcccccgccccctccgtcgtcctcgggagcccccggccatcgtcgggaggagaggcgggaggaggaggaggcgctcgtggaggggtggaggagggttagcggtgtatttttaagagtttcctttaaagcatgctcttttgcatatggggtccaagctcttaaaccatggctgttttccgttgacgtgttttc

SEQ ID NO: 430115 - DNA, 302 bp, Oryza sativa
gtaacataaaaaagaccgatgttttcattaaaacccatgaaggccctacatgcgtgatcggtagggctagccatatgacaatttactcaatgtcaaaagttagcccttccaaaaccaaatgaaaagattgctagaccaattgaacacataaaaattgctttgttttcccgaaaacagacgcctgaagaaaaataaaacgcgtacaagctgcaatggaggaagaatctaagaaaactcaaagggggaaagcccctggtaaccggacatgcttaagggtgttcttttaacctgctgaataacat

SEQ ID NO: 430116 - DNA, 372 bp, Oryza sativa
tttttgtcagtaaacaggaccataggcgcggagaattactaagtctatcggattactccggggatggggacataatacatatcacatcttgatcaacacatcatgtgttcctggaaatcttaggaccggatgagaattggcatactatccgggtcataacaaaccctgcaagcttaactaaaacaaactgtacaggggagctaacgctcccagttgcgaagagatgaacacattaggaaccaaactttgcaaatgttgaaatattaacaagaaacaaatggaaggtacatttatactaaaaacagcacgtgaggcgatcatgttttctgaaaccaagaaatgatatgcatacaagtgatttagtgattttga

SEQ ID NO: 430117 - DNA, 144 bp, Oryza sativa
gattaatactcctatggaatattcattttactaaaattatcgaaccagaacacaaagaggaatgaatggcatcgagaaaatgtcgccagatcagcatggagatgcttttgggccacgcctcggctaggttgacccccgggcggc

SEQ ID NO: 430118 - DNA, 347 bp, Oryza sativa
ttttgggttttttttttttttttgttttttttttttttttctttttttcctttcccgaaaaagggacaaaggaccgaaaaaaacgaaaggaccggaaaaaaacagcgcccagaggcgcgggcacaggaaaaaaaaccgggggcaaccaagccaaccaaggccacgaccacaggggcccggggggcggcttcagaaaaaaggaccgaacccccgcccgcaaaaaacaaacggggggggaaacaacaaaccccaacaagcaagcagggggggaagcaaaaaagacacccaggggggcaaaagcacccaaaacccgcaaaggcccaaggtaaaccccccgaccggccgca

SEQ ID NO: 430119 - DNA, 326 bp, Oryza sativa
tttttgttttttaacactaccacaacaggaacgttaccgaaaggaaggataaaagagggatgttttggactcatcaaggaatcaaacgaatttaattcagagaagcagagtatcagttacatattatctctaacacccatgtaacaaagactgacgggtccagagatcctagcataaccgttatatagtgcgggacctaaggaaggaaccagctgacaggcttgcttcagatagcttccacacgtaccatgacggtcgcaaagagggggaccaacagaacgaacaagatgcaaggaggcgaagggaccactggtcgaatctgcact

SEQ ID NO: 430120 - DNA, 219 bp, Oryza sativa
actaacaaggagatcggagcatagcgaattcgaggaatactgtgacggacggggacatacatgagagattaaaccgctaatgcaacgatggacgcgacattgaggcctttacggtgctcaatgacttaagctacaaggtagcttcttggtagcaattcatcatgctcttagggagggaacccgaatggtaattctaagaccagaacactgggttctacc

SEQ ID NO: 430121 - DNA, 242 bp, Oryza sativa
ctgaagaaaaagggtgattcctattaggggaccgcttcacaaactgtccgtttgggcagacacgagttcaagaaaggggaacaaggactggcaccccggactctgacacgggatccctgacaaagaaaaggggacagttgtcggcttaacacgaaaggccccaggggtatccccccaagacaccggtcattagaccctaggagtgaccaaaggaggaccaattgcgcaaaaaccgctcaagg

SEQ ID NO: 430122 - DNA, 332 bp, Oryza sativa
gccgagagcgggacccactaacattgattcactcgttcactggatccacggagaggagacgagttctatccatgcgatcaaacacacaccatgggcggacacactgggaacactacacagatgggttcccacaaataggcctgatgataccgtgccggctgacacaggaacgaccctgccgtggtttgatacataaccctgtccatgatggcacaccaccgcatgagttacctacagtttaccgatgtgcgttagaacggagccgacggatcacgtgaaccggcgccttcatatccattcaccacagtcgaggcgatagtcaccgtcacccc

SEQ ID NO: 430123 - DNA, 287 bp, Oryza sativa
gttcaacgctacgaaactatcattcttcatctatcaatcttgatacacaacacacagtaggctggaatagaaccgaaaagtccacacctgagacagacaccccgcattcaacgcactcacttgtgaccccaagggggtctcttatacccccactgttacaacgaataacccacctgttctttcccacaaaaccctatgataccggagaagctgcaagctaacataacttcaactcgtgcctgaaaatccggaaacctgaggggcccccccccaaccgtctatttcgc

SEQ ID NO: 430124 - DNA, 352 bp, Oryza sativa
gcgtacatgaacacgtgagacccagcttggatggtatttacagcacctgaatactgggggctaccacaagactgaaaagacttggattaccgacaataatgcccaagataaagacacaactttaaccctaggtatgaagcgtggggcccatccaatacattctgcaatcctctgtttagaacttggtggggctgagggccatcatgaggtgcttactggcttaatgctccatacccttgatagaatggatccttatggttgtgtacgaacactggcatttccgagagatggctccaggtatctggcaccagagtagccacaattgttgtgcgatcctgcgctggccatttgg

SEQ ID NO: 430125 - DNA, 378 bp, Oryza sativa
gtgattgtatttacaacaacacatgacattgagcaggctaaacaccagaacagcaaggcccactaccggagcagcacgcagcatactttgaaaacgggaacaacaatccccgcgggccacacaaatacgaacacatattcggtccacggactggcaccaacgcggaccgagaacacaaaacgcccactgatactgcagatgacggcgcagcgaagctcacaccaagggtagacggagcaagaaggccgatgcgcacgaggagtgaagaacggaaagcgagcggccgctcaattggcggggtacgaagcaggcggcgcaggcccaggcgttggtgacgacaggacagcacacggaggagcggcgaggcggacagagggg

SEQ ID NO: 430126 - DNA, 419 bp, Oryza sativa
ctcataacatatagctactcaaaattccatgctcactggcatggccaatattgttgtggaagccattccaagggtttacaggatgtttcttcattaactatctaccattcaatataacgcaaggtgacttccacttggcaaacacaacatcccaaccagttctgaccaaaaatttcttaacccaacctgattgttcacaactaaaactaacttcttcagcttactcactcgggattactgtttcgcttctttgggcggaccttgcttttcttggctttacgacgttccctctttaaccccttaacatcgtttgataaactcattctttgcgattagctggcctggactgtagaccttgccccatcttgccatgccctgacttcttccggacattttttcatttctttagcatggatcag

SEQ ID NO: 430127 - DNA, 466 bp, Oryza sativa
acatagtaatgaaactaacattctgcataactcaaacatcacatccaacagaaagtgaactggtatagaagcatcaaattcaaacctgatgcaaataaaactcattcaatacactcaattattcttcaaaatgggtttcttataccatcactgttacagggaataaccaaactgttcttttccacaaaatactatgatactgtagaagctgcaagctaacataactttaacttgtgcatgaaaataaggaaatctcagtgaactcctcctaactattcattttgcaatttcattgtgaaagttaagctcagcaccgcgcttcgaggtctagtttgctcatgaagattgctactggctcaccaggagaaggcggggtcttgtccagcatagaagcatgcacgccagctttagcacgagcagcctcatcagaagcagacaggacctctgcatgttcaaggcctacctg

SEQ ID NO: 430128 - DNA, 357 bp, Oryza sativa
agcgtggcaacctgggaatacgtccctgatgcattctcataaaacgtacacagcgatcgccatcaggattgacaactcattaattaccaaaaccaccagcccacatgacaacatagttttgcacacaagcaaaaatcatataggcgggccaatacaataaattaaccacttattcttagatgccaaagaacatgaataacgtgtgcaaaatcaggaacacgggaacaagaccagacaggaaaacaagaaacttggggaaccaaaaaacaatggattggaagggaactgaacgggcatatgggcacacgaactgcgcagcgttgaggtctagtcacttggcatggtatgtcgacttag

SEQ ID NO: 430129 - DNA, 104 bp, Oryza sativa
acacaatgtcaaaaactttataactatgaattataaaatggaacaataaaaaagactccaattattaaaacaaaggcaataaaaaggcaagactaacaacttaa

SEQ ID NO: 430130 - DNA, 162 bp, Oryza sativa
gttaaaaatggttggagtaggatgaacccgggaatcaaaaatctaaaccccatgaataaacaaaggttatcttggacataatttaataacattttacaaataaagggaaaccttctgcaaaaaggggggagcctgagagcaaacctggaagggttattgaca

SEQ ID NO: 430131 - DNA, 489 bp, Oryza sativa
tttttgttttaggttattttttttcttatagtttttggctgattgttttgttttattttgttgtgttagtcattacaagggtttacaggatgtttttttattaactatatacgaccaaaaaaaacaaagaggaaactgacaaaagggaaaagacaacatgccaggcagtaacgaccaaaaatccttaacccaacctgaaaagatcccaactaaaaataacttcttaagcttcttcactcgggatttatcttttgctagtttgagatggtccttgaccaagttggattcaagacagtccatcttcaaccggttgacatcgattgataaactcatatttgcgacctgctggtctggaatgtaaaccttgcccagcttgccatgcactggacccttcgtgacatttaacatattcttagcatgagcaggagtcttcattggttgttacttcaagatttaaactggatacccgtgtcgactaactactaaatc

SEQ ID NO: 430132 - DNA, 418 bp, Oryza sativa
acacaatgtcaaaaactttattactctgaattatcatatggaactcttcaactgtctccgcttcgttcaacagaggccatggaaaggcaagcttacaacttacaagctgcgttattacaagaacactgttggtataattttccgtcgatgcactggagctatgcaatgtctgaaaagagcctatatttttatgttccttgctcctggctccataacgattccgtaaaggaagcaccggtttcaggatccggtttcattcccttctttttcctgccgaaaaggaatgaagagcaatgcttcttccagctcaacaaatggcaatttcacaccttttacattgcctccaatttcccggcaaggagctttttgacgtacttgccgagtttgtcggcctcgaggtttaccttgttcccaacct

SEQ ID NO: 430133 - DNA, 52 bp, Oryza sativa
ccaatccataagtgcaaagagggcgcaaccacaaagagaagtccccctgccg

SEQ ID NO: 430134 - DNA, 177 bp, Oryza sativa
tttttagagagaaccggaccatgattaagtgttacaagggacagttcacatggtacatgtagttatactggagtaacagcccaattggactcgaagaaggattatatcataaactcctgggagtagacatgtgaaaagttcaagtacaggagaagaatcatcagtcataataatgag

SEQ ID NO: 430135 - DNA, 309 bp, Oryza sativa
cttgttgggggcggcctttttttttttttttaccagattctgaagggacagggcaccataatgtcccttatgaaataaggatcgacaccgtgcgagacgaattaattacagaaagcgtgctggagtaacacgctggcagcatcatagggataccgtagaatggggggctaacaggcgagcgcgaaaacggagctttgcagggggcaaagttacgaatcaggtgatagtaactggccagttacaatgagaataaataagggacaacatcaggatggaatgaatacaggagagacaccagtagagttgata

SEQ ID NO: 430136 - DNA, 206 bp, Oryza sativa
  unsure (1)..(206): unsure at all n locations
tcattagtagcagctgctgtcgactagtcgatcagccggctgatcagctgataagacgtcttgtggagtactcctccttcatgtatgtatggggngcngcngcntctcntntnntntctgtttttttttttttgtggatgtattttgttctttatttncaaaacatgtgtgtctatatatatatatttctttttctttgtatatat

SEQ ID NO: 430137 - DNA, 443 bp, Oryza sativa
ggatcctcctatttgggggcgcccttttttttttttttttgttttttttctcttatttgttttcgggttgaaacctatctgactaatgctagagcttgagcgggcaagataccctcacaccattctaactttgatgcattcatccacagcaaagcctcactgcttgagccacaggtgaactctgaatgactagagcagtgcaaatttaaccggagcttggaccacccagagttgcagtaaaagatattgctatcgacaaatagcagttggcagcccaagtggatatgaatgtaacctttgtattcaaatgctaggggtttttaactagcaaaaacctgataaaaagatcaaaagggtgaaccctcatcggagctatcaagtcctcacccggtaactcttaggcctatgtgcgcagaacttcctgggacgctggaaactgaatc

SEQ ID NO: 430138 - DNA, 192 bp, Oryza sativa
tttttgtttttttcctcgcagcggaggaaaaccttaaaaaataccttaaaatggattgcagtcatgcacaacaacatttaacagatgaaactacaagcaaggttaagtagacaacttacaggaacttacacaacttacgcttaaaatctaacataattggtgcatttactatgcacaaataacctggtgagc

SEQ ID NO: 430139 - DNA, 368 bp, Oryza sativa
ttttggtgtttttctttttaaaccccaaaagagtaacagaagaccagactagtctattgactggctggggcaggggccaaatggacactacaacatttcctgactataggacgacacatccgaaatttgaaacggtgccagacggtaaatcgaaactcgaagcattgcaagtggaaatcttgcattacatggggccagtaatgaagagcgttgcagcaatgtcaagaaaggacgggtaaggagtgagcaacatggtgaagcggacatgacattgtgacgaggttgacagagatacacagccgcgtgtcctgatcttactgcgtatcagctagccttgagcgaaggatctaatcatctgcactcacaca

SEQ ID NO: 430140 - DNA, 387 bp, Oryza sativa
gaaaaataaccagaacggagtactagcactatacttcatcaaaatgattagcttaagagtcatcagcccatacgcaatctcaccaaccttgtacgagtacgacaccgccataactgccgagacgatcccagccgtccaaatccacatcgacggctcagtcttccttttacccaaccaaatgccgaagttttttttaaaaaaaaattcccagaaagccgaaaagctttgcgttagaaagaaaaagaaaaaaaaaaagaaaaacccaactccgaaccctttcttttgctccaagcgcgcgcgccgccactggactaccgtaccaccaccaccggccgatcgagcgcggcggcggctgcggcgaggccggcggaggaggccagaagagga

SEQ ID NO: 430141 - DNA, 349 bp, Oryza sativa
acatagataacaaagagtaattgctatattagtccgcctgggtagacgatggcatgccaacacattatcgactgaaccacgatcatgcccaaacattggtaaaataccaatgccataaagtaaaccccatgcgcaggtgcatcccaagagttacataggcacggcctaatagtgaaacaacaaatttaggacccttagtgggaacacataaaaggggcttattgaccaagcgaaagacctactgaacaaacggacagggctcggtccctgaaatatggtgtcccatccgaccagtgggaccccacttgcctagtttcaagggcccaagctgatgataatctgtgaaaat

SEQ ID NO: 430142 - DNA, 127 bp, Oryza sativa
cgacactatatgaagatgctgtcgacgtcgtgatgcacgtcgcgacgtgaagcgttggactcctagtagtatggcgggccgctcctgtgactttgctttgtggtagtatgtaggtggttggtttgtt

SEQ ID NO: 430143 - DNA, 362 bp, Oryza sativa
ggggaaaaacctcaaaagagggcagtgagagcctgttttcattaaagatgaagacacttgccccacgttttccggggaacccgcccccaagaaccttacctaaggacggtttcaaggggaaacctgggaaaccccccacggagaacaaataaaaatcttgggacggcacaactggaggggaacatggttcatcaaaccgaaagacctctaatggctatgaccagaccacagacaacttagagcagggtcttcaagaccagtcctcccaggaggaaacagggcctttaggataaagaaacgaccgttggcaggtcagaacagggttttcaccccaagaaaacggggaaagcaaataacgaagc

SEQ ID NO: 430144 - DNA, 267 bp, Oryza sativa
gaacgctagattctccctcataagtctgaaaataggttaggtaagtgcaatgccgttattcaagcatttgctgtaataaacttggatacataatttcatatgcgaaatatacattctaaataataagtataataaagttaacattatagatctagtgagatcaaagatgtgccgctgatttttatctctttgagcgtgtgttagggccatattcacgggcgtgtcaatgcgacggtggatggcccactctgttacagaaacagaggt

SEQ ID NO: 430145 - DNA, 86 bp, Oryza sativa
cgtgcgcagtgcagcgctgtcacgtagcgtctgtggactctctcatttgtagcggcgcgcgcctcttttatttctttgttgttttt

SEQ ID NO: 430146 - DNA, 146 bp, Oryza sativa
tttttggttttttgagaagtataacaacaatcccctgcatattgaagggccataaagacggcgttatcagccacctcctcctcatagatgaggacacttttccccaccgttttcaggggaaaccggccccaaaaaccttacaaaag

SEQ ID NO: 430147 - DNA, 368 bp, Oryza sativa
  unsure (1)..(368): unsure at all n locations
agttaaaaaaacccccccccttttttttaatattttttaagcttccatgtagataggagattgtaagcaggaccagaaaatgcgactagagggagaaaantgaaggaaaaannaaagaaagtgatattgattactgaaaaagcagcaatcgttgatttattacgcgcaacccgaccagctgtagtgatgaacggggtgacaactattccgggaggaggagatcagctcgacccggattacggaggcatcggtaggtcttacaccttgaacctaaagttgaggaggaacttgtttaggccgtccttacagccgtcgacggaccgttgattgcaggcattgcaggtcgcgacattcggcagctcaggccg

SEQ ID NO: 430148 - DNA, 110 bp, Oryza sativa
acatatcattctgttatcatcattgttgtggtattaaaaaagaggatatgcagctgaaaggaatgcacatccagcacagcaacaatctgcatatcctgtaaaacagaatt

SEQ ID NO: 430149 - DNA, 400 bp, Oryza sativa
gtctacaaaattccacgtattctttaaaagcaacggaagctaaataacatttgtgggtgggtgtggggggttatgatggaagaacgcgagactgaatactgagcaagatacaaaatacgctggagttactactgtcagtaggtacaaataatgtccacatcagttgccagccaacgacataattgtacaccggacgaattattgtgagctgctgcgcacaaacaggactggaagcctgatggatggagaacgcgttggtggtaatggtatacatcaaagccacatcgtgccggactgctacatgggccacaactctttcacaatagttttctaaacagattgtctccaatgttatctttgaaacaaattgagttaccaggctcatcatgcatgtaactta

SEQ ID NO: 430150 - DNA, 422 bp, Oryza sativa
accctaaaaaaacatttcagatatgtttcatcttttttcaggttcgcatggccaccagaaaccttgcaagtcacaaacaaccctaccgcgtaaaaaaaaaagaccaatttcacaatatgttcttctgggtacatatctcaccagaaaaggatcttttatgccctcacaaaacaattgccacacaaaaaaagggcatatggcatttcgacagttaggcacattgctttgacgatttatgccggaggtatgtcatggcattacaggtacctataaattgatcgcccagctcggatcagtactctaaagaaaactccagcgaaaactgagaagggactcctctaacgcttgcagagtgatgacatgaggcccattgtatgaaacaatgacatgacccctggaaataccaactctcccagcagtgg

SEQ ID NO: 430151 - DNA, 336 bp, Oryza sativa
tttttgtttatttttttttgtttcttttttaaatggaatggaatgactaaggaacatttgtgggagggcgagggaaagtgtgaagtccatattattacagagtattgctgcatgtttagaactaccataacattaccgaggactcaccatcccaaaaagcacgccgctactacttgcatcaacactagcaaaagctcgagatgaggccaagtaagtcccatttgtcgaacttgatgcagacccactcatagggcccttgctcatagcacgtcctgagcctgcctggggagattccagccggataagaacacgctctggcactatctcaagatgagc

SEQ ID NO: 430152 - DNA, 318 bp, Oryza sativa
ggaatatatatatatatatacataatctatattgggtagactctcgagtagtacaaaaacatttttccttttcttttctcaaacaaaaaaactgacatcatctcacccttgcatatacaatgttcacatatatcacaccactaatatatcagatgcctatgggtaaaaaccactgccccaatcgatgttggatcacaggcttcctgccgagccattctcggcgatgtgcaccgacggcgcgccgctcctgaacctgagcctctgcaccatgggcttcatcttctcgatgagccttgccatgaccaagaagagcaccct

SEQ ID NO: 430153 - DNA, 189 bp, Oryza sativa
aattccagtttcatgcactgcggaagtgggatacctaaccaccccacggacgaatcgacagaagcacatgtaaaaccacacggcagaccccacaaacaaaacgaaacaggcagagggacacagcaaaggccgataacaccacgaagataaaagatgactcaatgatgaaaccagtcccaccacaccagg

SEQ ID NO: 430154 - DNA, 91 bp, Oryza sativa
ccgacactataaaaagagaatacagcacgtgcacatgacagcgcgacacgaaaagtctgtgagtatcccttatttgtaggcggcgcgcccc

SEQ ID NO: 430155 - DNA, 258 bp, Oryza sativa
cactgtggttttgggtttcttagccacaggaaggtgaaacatgcaaaagaacccaaatccccccaggaaaaaaacacccacaacgaaagggggggaagaaaaagaaccggaacgccccccgggggggaaagaccacacaagaaaaacagtcccaggggcggggaacctgggggaggaagcaaccccaggccgggggcccaccaaaggacccgctgtggagcatgaagcagccgagacccaccatcagcccaggggggg

SEQ ID NO: 430156 - DNA, 403 bp, Oryza sativa
cagttgttcagaattgccaactgatgcataaagatgggatttggtatggccaaaatttcttcttttacatcctctctgttcacgaacaaacaaaaactggaaaaaaaaaagctaatatgcagacatgtaagttttgcagcaactaagctagctagtcattgacaattgtctcgtctatgattgacaaatattattagacatgacacatagaacacatccccttcaaatcaaagcaatcgcacaaaaaacatatatgagacaaaccaaaaaaaaaaaaaatctttctgccacataggttagacattgccacatcattaagactgggagattcaagagctgtggatgcctcttcctttgttacccttatgtgaaaatatgctggatggttgggtttaggcagtgt

SEQ ID NO: 430157 - DNA, 309 bp, Oryza sativa
ttttattataacacatccttcaacaactcaaggggggtcttcactaacattgagagggactaaatacgacatcagatcaacaattttcacataactaaacacgtcatcactgttattagctcacgataagttctttatctcagacctttggtttctatagataggcccatctaagcaattctcacatggtatacacttattttcttcttctccactatcctggttcaacaataacacaaaggtgccttcatgaactgcttattcttagttctttggataccccttaccatgcaatcataaatgcactta

SEQ ID NO: 430158 - DNA, 73 bp, Oryza sativa
attttaataaaaaaaaaaaaaaaaacgccccccgggcggtattatataaaattgcgggggggtacatacaaca

SEQ ID NO: 430159 - DNA, 67 bp, Oryza sativa
cttaccttagccgacgccgcagccgcatcctcgggcgggcgtcgtctactccgcgcgggagctcctc

SEQ ID NO: 430160 - DNA, 428 bp, Oryza sativa
gattgttgtcgcgagaactcgattccggatcggggggggtgcattctgtgtccgcaggggtgccccctgcgctcgtggaatgcaataataagcgccgcttctgtgctcgttgataacctgctgcgaccggtggctgacagagggatgcatatgtggcgcgggcgtgtcagacctaccggcggtgatggaggccgtaccacaggttcatggccgtccccggctgggcgagctgccgcagctaagcgcctgcaaggggctgctgcacctggacgcgcgggagatatgccggctcgcgcggttgatccgagcgatccgcggcgccgacggggccgacttactaggggaagcgaaactgccggagaattacagtgattttctggactttggctatggcgccatagatggctttggaagatgaagacagagga

SEQ ID NO: 430161 - DNA, 58 bp, Oryza sativa
cccggcctgccctccccgacccacccacccgtcctgatatcctctccttcaccacccc

SEQ ID NO: 430162 - DNA, 470 bp, Oryza sativa
atcctccttcctccccatccccaagcgcccgcatcccgctccccctgccgacggctgctccacatcggcgcccaaaccctaacctcgccaccagccgatctgccacatacgccgccacaaatcgccactgccaccgattcctccagatcaggcaccgccgctatcatcgccctaccgccgtcgtcgccgtcccgctggccgctgctcgcgcccctccgctcatcctttcccctccccccaccaccggcgaaaccctagaaccacgccagtcaggacggaatcgaatccgatccccatctcgcgagtcgtgagcagagcaagggaggtgaggggcatcgtcgttccatcgcgtcgcatcgccccattcgacgccgccgagatcgccgtcacccgaatcctgcgacgccgccgagatcgccgtcacccgaatcctgcgacgccgccggacccttctcacgtcatcgtcccct

SEQ ID NO: 430163 - DNA, 508 bp, Oryza sativa
aataaaccttcgctcccatcccataactcccggactgcgctagcctaccgccgcctgccggagccgctcaccgcctcctcgcacgcgcccgccggacagccaggcgccgccgccagctccgagcgcgtgcccgccggagccgcgccccctaccccgccgcctcctcgcgcgcgcccgacgctcgccctaccccgccgggttcgccatcggccggcgccttctccaccgccgctgccgcctcctcgggcacgtactctggagagctggggttgccgtcggccggttcctcctcctcgcgtgcgcccgccggggagccgtgatgggttacggccctacgcagcacatactccagaggatggaggaaatatgatgtgcccaatcaaggaccaagaaaccatgctattgatctagtctacgatcgaatgccacaatatatgtcaggcatataacacaggggagtgcagaaatcctgttattttcactcaatctgggttatagggatgaaatc

SEQ ID NO: 430164 - DNA, 322 bp, Oryza sativa
  unsure (1)..(322): unsure at all n locations
atcgtttttannggctacagggaggcatctgggggagatctgcatgagtgaggacgccaagcacgtcaagacaaacctaaggctgctgacaaacctggccganananacgcagacacacaacaggacagacggacagcccttgatatcaacatacggcgnnntnatccgccgacggccggcgtcctcatcaccggggccagcgctcgagcgcttccgggcatccaaaaataccgcgtgaggaagctggaaaccctgaaaccacaccagggaggacgggaaggagtccgacccccaccgggagaggacgaagcagaagccggc

SEQ ID NO: 430165 - DNA, 534 bp, Oryza sativa
ggatttggtattctattccgtttggatgagagctccttggcatctcatctaaatgaaaggagggtcaggggtgaagacgaggaggcccttcctgatgttgagtctcagaagctggaaagtaatgctgaattggatggtgaacttgacagtgatagtgagactggcaaggagaaacatgatgatgaatcaagcttggataatatcaatgttaaaaaaattgacaatcccatcccttctaatgcaccttatgttaaggataatgctgattcatctgagcagctttctgaaatccgaactgtggtaaacagcactacttccacttccaagggacaaacaagtgatcgcactgtttcatcacaacttgaggatctgcttgataagaatcttggtcttgggccaactaaggtgttaggcagaagctctttgctcagcagtaattctgcaagcgtggcagatgacattgatgatcttgatacgaagaaaacatcagtaagagataaaccatacatatctaaagcagatagaagaaaactg

SEQ ID NO: 430166 - DNA, 403 bp, Oryza sativa
tcgttttaaaaaataaaagaaaagaaagaagggatagttaagagagatccggggaaatgacagagccgtcaccgccggcgctggagccggagatcggccccgacggcctcgccagggagaaccccgtcatcgcctacaccgagaaggtgattttggaggagcagctgcagctgaagaaatacattcaggagaactattccaaaattcgtgatgttgaaaaggagctagagaatctgagtttagaaatgaaactaacagctgggccaaagaaagcagcacttgtgcatttaaggaaaaagattgaaatatcaacagacagaatacggttggctagggtgaaagaggaacaggcaaagaaggcctgggaagctgctgcacaaattgttaaacacgaagagaatgc

SEQ ID NO: 430167 - DNA, 473 bp, Oryza sativa
aattacattcagttgcaaacgagccatctctctgcattctcgtgcccctcctgtctgcgcgcattcctccgccggaaaccctggttcatcggcgagcggcgaggctcggggactcgattaccctgcgaggaatccaggtcggaccgcgggtggggaaggcgaatatggcggggtccatcgatcggccctcaggtgcaggatttgaaggcattgtgcatgatgatgataagaaagagtggaaatccgatgaggacaactcagaaggtgacaaaaaggccaaggcagtctccttcaagaaccgagctatcagtgctggaaataaatttaggcgttccttgagaaggaagagaagaaagagggtcggcgaccatgtagcctctatagaggacataagggatgtcaaggagctggaagctgtccaaagatttcaccagtgcttacatgatgagggcttggtgccagaacgtcatgat

SEQ ID NO: 430168 - DNA, 346 bp, Oryza sativa
attttgttctcagagacaccgttgttgcatatgtttgcaaatgctctcatgtatttcagtgccatactgagtgagtgatccacattgagattcaaaaaaaaaaaaaaaaaaaaaaaaaaaaaaaaaaaaaaaaaacaaaaaaaaaagaaaggaaacaactcaaagcgccgcaaaaaaaaaaaaaaaaaaaaaaaaaaaaaaaaagggggtctgtttaaacgaataaaactttattatgtggttctacaccggcaaaaattattaaaatgggcaaccaaaaaaaaaaaaaaaagggcggattttaaccacttcaaaaagggaaaaaacaacagctttccaaataaaa

SEQ ID NO: 430169 - DNA, 306 bp, Oryza sativa
gttttgctcgctgcaggcaacacagatcattcggctagagatggcacaacgatttgtgtggtcctcggtcatggggggatcatatatggtgataaccttgagcctgctggcgctaatccattcgcacaatacccaggctatactgttaaccgtcaacgcactcttgtgtatgctccaaaccatgtccaaggagctttacaacacacaacttctttatatgcctaacgttagcgctgtaaatgactacctcatgatcaacatcatgaactgtgactatgacattgttgtacaacacggggtgggcac

SEQ ID NO: 430170 - DNA, 491 bp, Oryza sativa
ctgcgggaccgatcccggaattacactgggtcgacccaccccatcccgttttgatttatagggttttggatgtttattctctgggacgatcgaaaaaatgaacgagggggaggtgcaccggacgcggattttctcaaagatttgaagaccaacaataaggcaagccactcttcgatcatattgctcctagtttataaaatgtgttgattgcaaatttgcatgtagttgcattattttccgtaggaacttgttaaacttaacccttgtcgctccaccacagcagtacctcgatacttgcgctctttgggcgtaggtatccttttgcaccatttgtttatgtcaggtttatatatggttatcgatgtggaaaaacttgggttgtgaaaggtttataaaacccgactcggggagtcggtgactttgaaaacaaaaagggtttatgggagaaaacttgcggtgcgaatcctctcctgtgtgggttggttttttag

SEQ ID NO: 430171 - DNA, 98 bp, Oryza sativa
  unsure (1)..(98): unsure at all n locations
ttttctacccaccccccccatctggtttttaaaccacaatcaaattccccccccgggtctatttaaaacaacnacggggggggaacaaaaaatctcca

SEQ ID NO: 430172 - DNA, 183 bp, Oryza sativa
aaagatttgaagaccaacaataaggcaagccactctatcctcatattgctcctaggttctacaatgcgtggattgctcatttgcatgtcagttgcattatttgccggaggagacttgctgaacttaacccttggttggtacaccacagcagtacctcgatacttgcgcttttatgggcgtatg

SEQ ID NO: 430173 - DNA, 459 bp, Oryza sativa
  unsure (1)..(459): unsure at all n locations
cttatatgcaatctcatttgtttgccattgccggtgtgattaataaatatatggaatccctgtgattcagggcttcctgatttgaattttcaaggaaagcattgacattaggtggttaatactatccagcttaactctctaatcagtcacgcgcaggctcgatttagagtgtgtttggttactgccctgagaatcacgcctgactcaggcatcgatctcagcgttcgacttcggcggctggatcgacctgcctgagagtactcaggtgagggcaacaaccaaacaacctcttagaaatttgtgcttcgtatgttcttagttcaatctatgtttttactttgtcttgcgtttttacaaaatgttgtgtataagttnttagttcagaataattaaacgaacatgactacttctaatgttactgacaaattcagtggcaccctatgttgattgttattcttt

SEQ ID NO: 430174 - DNA, 176 bp, Oryza sativa
tttcttattttcgatatcctatcatctccacggggggggttcattaataatatgggggcttacactttcagaaggatctctaggctcgagcacaccggggcccttcgacgctaggtggcttagcattgctctctcaactatccctacatacccacccactacattacctacatgtg

SEQ ID NO: 430175 - DNA, 486 bp, Oryza sativa
ggccgcttttttttttttttatactaagaggtaggccaattatagagaaaccagtccgggtgccttaacatgcatgatatttgcccttattattttctttcccttatcattcataaactgttatattctctgtgcagacctttcgaatttttggaccgatttctaatgcatgagtttggtgaaggaagtttacatcctttggagtgtgcacagagctgatttcctattgcttaagttttgctgagcttacgggaaaaagaaggatatgcatggacggtgacttcatccaagagataagctgttcatgttttgataggagtgaaactgcaaggccttgctgcagttttaggcttggattattgattaatgttggcacacctccttatgcggtgtctaagcaggcgtgttgttgcttgagatgagaataaacagctaaatgctgttgcctgctggttgggtataatgattgatctctggtacgcaatg

SEQ ID NO: 430176 - DNA, 454 bp, Oryza sativa
gcctagttagagaggacgcgaaggcgactatggggtggagggggctagcgagggatgcggcggcagcatatctccggcggggcggcgctcccgcgcacgtcttctccgcggcctcccgcgctccgggccccgttgtcgccaaccctggcggtgagctccgcgcgttcgggttgttccggtcgccgatggccaggcgcgccgatgccttcgaggtcccttcggctgctgggaggcacggggcgcagggcgtgtggtcgcgcagctcggttccggcgttggttcgggctggtgcccccaactccagagctctccctttcctcgtggggagagtggttcgtggattctatccgcagctgtcaggtcacaagctggtaaagggacttgggatgggctccacccttgctgtgacgttttgttcacaaaaagttgcatatgctgaagaagttgctgaaca

SEQ ID NO: 430177 - DNA, 377 bp, Oryza sativa
gcggtttgaggcaggggcagcgagagattgcagggcgggcgacggcctctatgtgcgacggcggcggcgcggcggcctggatgcgcctcgatgtgcgacggcagcggcatggcggcctcgatgcgcgacggcagcggcagcggcggcctctcttttcctcctttctgctatgaattttgttgacggcggtggcaacgacggcctgtctcttcctcctttctgctgtgaattttgttgttggatttgctgaaccaaatgtaaatggctaaatggttgattaccagcttactcttgaattgcaagtttcgtattgatgaataaaaaaacaaggttcagaaattggatctgctgtaaataatatcgattcatgcgaaaaa

SEQ ID NO: 430178 - DNA, 491 bp, Oryza sativa
attcccggggagctctgaaagcagatcatgtttaccatgttgtcagcggacagaaggatcttcatgtgacaggaatcagggacttggttaggcagaagagaacattccatgaagttggagagcatccagctcctattgataaatctgacactaagtcctggatcaggaagcgacatggaagaaatgtgatagtttttgacactaagtcatcatcttggaagaaacagaagctgtgattttagagaagttagtcatatctatttgtaaagacccattgtctcgatctatagtttcccaccaaaacaaaggtttcttagaatgatgagatgaagtatcatcatgaaagatgatatggatcgagtaacttaatctgctggcgtacagcaattgctcataatttgccttgggaagacaacaaagtgattcagattcatatttcaatgataatttttgacgttgttaagagtaaatcgcggcggcggcaggaggtg

SEQ ID NO: 430179 - DNA, 327 bp, Oryza sativa
gcttgagtgatgtacagacaatttcctgaaatgggctaaatatcacctttctacatgcaaggaaattctgagcccatcaattgagcgaatctgcacatacgtggataatttggcggttctgcagtcaagggacgtgtcaacagaacatgacaatgaggaactatcagaaaagacacgtccacagagatcccttgcggaagaatcttgggcaactgataagaagattgtaattgcctttatcatcactgatcacatgaagaagctcttttattctgaacatggggttaagtttaagagggatgatgaggacgacaggatcttattttc

SEQ ID NO: 430180 - DNA, 373 bp, Oryza sativa
cccacccgtgtgagttaatccgctacgagtcaaacacaccaaacgggtattcttgaatggaggaggggttgctcctaccttccctgctcttttcgagctactcgcagggaggagaatgaagaccacgacgaggaaatgcaagctaatagtcgcctccgactacgagtccttctgatgaataagatcctgggcgcctggaggaaccgatagccccacgccagcatccaggatgccacagatcggatcaacaagaggggccactcccgggacgacggaccaataagctggacgctgaacttgcccgctacaaggaccatagcaagatgaccaggccaggccccgtccaggaagccataaaaggacacgtcatgag

SEQ ID NO: 430181 - DNA, 419 bp, Oryza sativa
atcatcgttaagcccacctcggagatctcgagtttgatggtcgtcgtcgtagctgtagaggtagttaattatctcgttttagatgagctcactgacggcggcgcagttccggtcgctgtttgagatggcaggaggggaggatatctcgtttctgtttggtgatgatgaggcggcggcggtggcggcggtggcggcgccggtggagttgcacgggaagagggggtgggggaggttggatcacggataagtccaatgtcgccgttgagggtacttggccccgctagctaccctaagtgcttccccgatacttctagacaagttcccagatgaacaaagaaactcggatgacctgtcgaccaaagcgaggtccaaagtcagcatattggcttcgggggttaagcttagcccatgtcactaag

SEQ ID NO: 430182 - DNA, 195 bp, Oryza sativa
accgacccgtaacgaacggctcgacccacgcatgcgtttttatcattactgaatatcctcaataccgcggggattttaatgcaatgtgggggttaagaaacatgcacttccaacctttcaaagggaaatcaatggcaatgatatttgctcaagccgtcaatgagaacccgtgtttcatttgagacaggactcttt

SEQ ID NO: 430183 - DNA, 466 bp, Oryza sativa
tattcctttattcttccctcgcatcccttcctccgccgcagcgccggcgtcccgtagattggaaatccatccggacttggggatcgatttcgttccctccggttaacccatccggtttcttctcgattttcttgatatctatggagttggtagggactttcatagagggcgaagtatacggggcagtgtgaagttccctgttcgttcagccattcatacttacatttctcaagtcttcaacaagatttcacagctgtgtgacctgtattgtgtatttaggtttacaatgatgagtgcgaaattgctccggagcatgagcgtgaggaggctcctaggacagcaaagaaactcagttggtgggcacttagttttagcctttctaatgtttggtgtaaggtgctcatcttgtgtatataagtataactgagagtttggtgtctgttgcttttagagttttacagaaaat

SEQ ID NO: 430184 - DNA, 250 bp, Oryza sativa
catgcacttacgtatgatacaatatcaacatggaggggggtttgctggatctatatgggggaacataaaaacaccgaaacccaatatggccattatgccgcacctagcctagcttgctgaggacatgggcaagagcagatctggccaacgtgaagaacttctccacattttcggcgcacttgatcttggctgcatggtcttccccactaatcgtggccaacagctcgccggtgaggtcttcgaggccctt

SEQ ID NO: 430185 - DNA, 448 bp, Oryza sativa
gggtgcgtttggcggtggcggtgtccagccgtgccacgggcttgcggtgttccacgtgggggtgaaccatcaggtgagcctggtgccggatgcggcggcggcggaggcggccggggtcggtaacggcgcggtggtggacgtgggcgacgactaggggggcgagggggcgaggcggatgctgatagtggtgacgacgacgcggggggagcggcggcggcggcgcggcgagctgttgcggttggcgcacacgctgaggctggtgaggccttcggtggtgtgggtggtggttggagcccgctgcggacgcggcagcgacggcggatgtgctgcgcggtacgggggtgatgtaccggcaccttgcgttccggcccgaggagaactttaccaccgtcgacgccgaggcgcacgcgcagtgcaacgccgagctcgcccacgttgagaagcaccg

SEQ ID NO: 430186 - DNA, 440 bp, Oryza sativa
tcggttagaatgacttatattgcgaaacggagggagtagttaatcgttaaacttcacttctagtctctaccattagtcccaaaataacttcatttctatcctcttacggttttacctaccctcggttcaaaaatcgatgagctttattcttcaataagccttaccaactccttacctaaccatccacccaccaatactaccttttctatctctacctttttttgcacacccaaaactaaaaatgaagttattttgggatggagggagtactgtttgcattattagtcttggattgattctgtattgtttttagtttgatctgcaaagttgtattctctaatatgggcccactagtgtacattgaagattcactcgagattctgagtcctaagaattccacctgaaatgctggatttatgtttttttgggaggcttatttt

SEQ ID NO: 430187 - DNA, 422 bp, Oryza sativa
ccatgcggattattgtctctcttttatccaccgcagggagggcgcacatcgcgactagccgtgcgtcagcagtggtcgggtcggtcggttacaagatgatggcttgcagggccctaccgctgctaacgctgccggcgcccttgcgtctattgcgtccgtgcgacgacttgctcgcgcggttcgaatccgtgcgtcgacgagcctgtgcctacttattggtccggtgctgtgccaacctcgtcggtcccgtaggccaggaggatccggcgtaagacgccgtgctcatggccatatcccaggtatagaactctaaacgtgaggctgatacagatgacaaatgttgacatgggtggaactgtgacagacgatgctagacatgtagggcttgaattggataagcatgttaatgcatagcctacagt

SEQ ID NO: 430188 - DNA, 459 bp, Oryza sativa
gttgatgtgagacgattagtggctcttacctgggcgtgggtctggaattcagtgtgctgacctacgggctggggattgaacgagagaggacctggtagctcgctactcaagctgggaagggatcatgacctgctctaccttcagtgtgtagaaataaccaccgggtcgggaatggaggggcaggaaagaatgcactcggcatcagcaaggagaggcactaatatccgcgaagatgatggcactggtgggcgtaacgacattcgcaggttctcaaggaggaagtgtcatcagtgcgcaggactctgggcgtggaatgactgttactgccagcagacgaatgctaggatatgatgacatgaggtgtactgcgtgcactctggggtgtctaactggctgcagtacaaggtgacggtgcaggggttcgtggagccgacaaggtggtgaagcgggtgcaggcga

SEQ ID NO: 430189 - DNA, 89 bp, Oryza sativa
tgatattcttcctcatgtagctgattcgttctgggggtcgagtactaaagatgggagaaatcaactggcgcctgtccgtgtttggattc

SEQ ID NO: 430190 - DNA, 96 bp, Oryza sativa
gttttcgccgaacacaccccccccacctcgggtggggacacgcctgcggctgctggcaccgaaccgtctcggcgcgagcgcgagggagagagctcc

SEQ ID NO: 430191 - DNA, 457 bp, Oryza sativa
  unsure (1)..(457): unsure at all n locations
ggctactggatcgagtaggcggtggaggagatggagagggcgcggcgcgggaatcggcacccatcgtagagatgcgccccaccggcggcgagtgaagccggaaagcgggaggaggaggaggcgggacggtgacggttgcaaggtcgacggtctggtcgccgtcgacgaagacgatgggcagcacggccgtgggcggcgggggcggtggggggaggcacgtggacgcgcccgcgcagaccttcgcctgcgaggacgcaaggacgcaagcggccgtgactggcggcgccggtcgggagtagggtggcggcggcgtgcggggctacagggcgctagcgttgggcagcgcgaggaggggcgtcggcggcgcgcggggccccagggcgcaagcgaaggatgccgncgcccccatctctagtcttctacgccggcgcccccaactcgccaccgaggcagcctc

SEQ ID NO: 430192 - DNA, 372 bp, Oryza sativa
  unsure (1)..(372): unsure at all n locations
gggaatcgcgtttcgaggttttccttctaaaagcgtgggcgggcggatggccaccggggagctccactccgccggcgcgccagcgggcgtggcggcggcggatgagggggagggggaggcggcncangggttctcgttcagcatctggccgccgacgcagcggacgcgggacgcggtggtgcggcggctggtggacaccctgggcggggacaccatcctctgcaagcgctactgcgcggtgccggccgccgacgccgagccggacgcgcggggcatcgaggccgaggccttcgacgccgcggcggccagcggcgaggccgcggcgaccgcgtccgtggaggagggcaataaggcgctgcagctctactccaa

SEQ ID NO: 430193 - DNA, 415 bp, Oryza sativa
cttgtttttgcaattctaggccttctttcagcacgcgtagatttatgaagatgcagaggggccccttcctcctaccaacactaccgttttaaggcgggacgtggattctttgctggaacctcccttagatgtccttctcgaccgccctggtgaaagtctttttgagaggctcatatgtgttttccatgcattacttggcaatggcaaaccaagttggctgaagtcaaagtcagtttctaagtcgaccactagaactccaagagatttccctgcatttgatagtgaagcagctgagggcttacagtctgcactagatcacctggagatgcctggaataatcaggcgaagaatccaagcagctatgccagttctcccaccttctcgccacccttgtatatcatgcccaccacctcag

SEQ ID NO: 430194 - DNA, 467 bp, Oryza sativa
ttcttctctaataattggtgcaggattggtctggtgaaagccttggaagcattgggtctgaaatctgtggtctgattgttgtgttgtctggtaccattttgttacatgtgacgaaggattatgaaaggattccgcaatcaagaagtttgtaaccctaacaatccctttctacatggcatcagacattcagtctcctttcagtaatgcctataatcacataaattttctcacgatgtaggtatatacgcaccattgtctccctccttgacagcaagattaaacggagacttactgaagcacgtcgaggatgataggaaccccgatgaagaaaaagccttgagaaggcaagagatgtactagctccagtctcctgaagctcaaaaaaggatgaacaactccgattgagctaactagtgacatcagtgattgctatggtgtgttggtctgtacataatcaggcatctgca

SEQ ID NO: 430195 - DNA, 556 bp, Oryza sativa
  unsure (1)..(556): unsure at all n locations
gcctttttggccttgttgaacccactataaacactaaagaggcaatggatgctatcagtagcatgtttttggagccattggaaccagaaactaagctcaagaggcgctcaaatcgtgataaaccaagttttaatcaggaagcaagtgcatttgagatctttgtcgatgaagatgaacctaacaagagtggacccagcaaactccaggacaaaaacatgaagcaggataatccaaagttaagtcagcaggcaagcgcatttgagatctttgtagatgaagatgatccttactgcaacaaccaaaatatggtgcagcataggcactttaataaggagaacacacaggtaaatcagaatgcaagtggatttgaaatctttgttgatgaaaatgaggctcatggcaatggtcgtaatgccatgagccataagagtagtggatgtcctccaaagccatcgcgtgattcaaagcagcaagccaattttgacttccagaaaccattcgtgggagggttngcaatactgcctgatgatgaagataacagctngagaaaatgata

SEQ ID NO: 430196 - DNA, 371 bp, Oryza sativa
ttcttctcgccgcgcacccctcccctccccaggtcgctcgccttcctccccgcgcgcgttgctcccgcagcttcacgcttcccccgcactagtacagactcctgatggtggtggaggtaaacctcggcggctaacccatcgtacaccgcgcgcggcggctctgtttttggtttgggcggcattttggtctccttgggggtgtggatttgggttgggggggcaggaaagatttaaaaatatataatgagttggctgctggacccgttccgacaaaggtgatcaatgggcccaacttcaaaaaggatggggacccctttaataccagcataagttctttttgcatagcctcttaaacacctacaggctttaca

SEQ ID NO: 430197 - DNA, 342 bp, Oryza sativa
aaaaataataaaaaaaaaaaaaaaaaaaaaaaaaagaagagttttaaaaaaaaaaagggggggtaacccccacaaaaaaaaaaccaaacggccccccccctacaaaacacaccttccctcccctcacctgcacccaaatacatttcctctacccaccccaaacacatttctcactccgcaaccctacacctctcccacttttaaaaccctcccgctcccccccctttttcccctttaccacacccccccttatccccctcccgttacaacacaaaacccccccccaatctccctttcaaaaacaatccccccttccattgtgcattagccccccccccttta

SEQ ID NO: 430198 - DNA, 472 bp, Oryza sativa
  unsure (1)..(472): unsure at all n locations
ggatatttgatctttttaagctgcggggttggggggaaatttggatcttgagggtacccgagcgcgaagcctggtttcttccggtgctccgttgctgcattgccttgttgcccccagatccgagctgccgtgcgagggaaactcggatctttgcttgcgctctccccaaatccgcccaaaatttgggctctggagcaagctgtgttcgtggtagccccccgtgcttcaaatccttttcagaaagttcatttgtttagttgggggttagatatggcagtgatgcggactactttatgaggtgtctcctgccatttttttttagagtagattcgtcagtaatggcggatcttgccatggagtagtagtagtagtagtagtagtagtagcagggggttccttcggtgatagcgaanggtgcttagccattaagcggcggcgatgtctctgaagagcattgtgcgggagctgaggg

SEQ ID NO: 430199 - DNA, 487 bp, Oryza sativa
  unsure (1)..(487): unsure at all n locations
gtgtgaacgaattgcaatggattgcattgctaaatgccaacgatcttcttgcaagatgaccagccaaattgctagctgggatacgaggtttgagttgggtacaaaagcatcattgttgttgccattttctcctattgttgttgctgcggatgaaaatgagcaaatacgagtatggaactatgatgatgcgctgccagtgaatacttttgaaaaccacaagttatctgacagaggcctatctaaacttttgctgatcaatgagcttgatgatagcttgttgttagttggctcaagtgatggaaatgtccgcatatggagaaactatactcaaaagggaggacaaaaacttgtaactgctttctcatcagttcaaggctatcgaagtgctggtcgcagtattgtatttgattggcagcaacagtcgggttatctgtatgcatctggtgacatgtcctctatccttgnatgggatcttgacaaggaacaa

SEQ ID NO: 430200 - DNA, 390 bp, Oryza sativa
  unsure (1)..(390): unsure at all n locations
ttcttcatgctcttcatctgcatatgctttccggttgcagctgtgccttcattgaaacaaaataaatggttctattattttttttttgggggacgggaatatgaatttcgcatttgcattcgctgctacgttcttggaagaaatattttatcgcgtgtatgttcttccattggactggtggtttccgttgctctgagcctcggtccaagccgaccgcgatgtaatgttgtcatgttgcattcggtggtagcaacgttccgtttggtttttttctcctggacctggtaactactttctcagtccaaaatatttgttttttatttttttctaatactatttgcattgaaggtggnnnnaanaacatnaaaaaaaaaataaaaaaaaaaataa

SEQ ID NO: 430201 - DNA, 516 bp, Oryza sativa
  unsure (1)..(516): unsure at all n locations
ggttgcgtgggaacgaaacgaaacggagtagattcccccaaggccccaacctcctcctcgccttcccacctgtccacctccccccctccgccgccgccgccgccttcttcccgggggcggggcggggagaggaggcgcgggggtgcgggggtttagtatctcctctcgccggtggccgcgcggggaggtgacggcctgagattctcgccgcgtccgcccgtcgttctggtggtctcctcctccgccgccgccgccgcccgcgtgttgggggagagcggtttggcgtgaatcgggccggggtgagcggacgccgccgccgttggtggctgcttcatggagtgcttcctgctcagcctgaacccgttccggttcaagccgatttggccgccgaggaccgcgcccaaatctccctgaaaccctagggtttcccctcctccctgcccggngatttcgagaaaaaggaagtcccgggcggcgcttacccccaacccctcgttttttttttgggttcatctc

SEQ ID NO: 430202 - DNA, 273 bp, Oryza sativa
cgttactcccccaactcctctcctcagatctggcctcgcctccaaaccctagctgcaccctcctcctccccctccgatccggcagcggtggctcccgcggcggcgatgcggggttccattgcgacctaccgggagagcctctcccgcctcgccggcgaggtcgacgacgccgcggccgacgaggcggagccccaggcctccgccgcgtcgtcgcccccagcgcggggcgcagccgatcgctcccacacgacgccgccctcgcgggcggggggg

SEQ ID NO: 430203 - DNA, 110 bp, Oryza sativa
ttacatagtctgcagcagtgcatcttgtatcttggtacctatagcctatagttggcttctgaatttaacatcggaatccagggaattgaactgacgacaaacttttctgc

SEQ ID NO: 430204 - DNA, 69 bp, Oryza sativa
aataataaaaaaaaaaaaaaaaaaaaaaaaagagggaaaaatataaaaaaaaaaacgaaaaaaaaaaca

SEQ ID NO: 430205 - DNA, 508 bp, Oryza sativa
tcatgaaccaactatggcgggcgacgggcttgcgcgggatcgcggtggtcggcgccggcatcttcgcgcgcacccagtacatcccaaggctccgcgagatcgcccacctcgtcctcctcaagaccatctggagccgcaccaaggaatccgcggaggccgccgcggagctcgcccgggacttcgcgcccgagatccagcccagatggggcgacgcgggcctggaggagattatgggagacgcttccatctccgccgtcgccgtcgttcttgctggccaagtgcaggttgacctctccttaaaaatgctcaaggcaggaaagcatgtgatacaagagaaacctgcttctggatcaacaatggaagcagaaacagcattgtcagtttacaattcatttccaaaccaattcccatacaaaccaatttgggctctggcagaaaactacagatttgaacctgcatttgtggagtcaaggaagttgatgagtgatatggtgatatgatgaacatc

SEQ ID NO: 430206 - DNA, 190 bp, Oryza sativa
tcataatcaccactctcactccgcctcttaccagcgggtttttaaacatctgcgggttcttaaataaactgcaccttcattatcacacactttaacaccaacccttttcctcttttacctttcactgactctttaccaactcattcctctctttatctctcttttgcctgactctctccatcttttttct

SEQ ID NO: 430207 - DNA, 391 bp, Oryza sativa
cgtttgctttggctcgagcccaacacgatctttggggggggttactttaaaaaggggggggctagcgacagcatcacaggcaggaatggcggcgctcaccgtgtcggcttacccagctccggcgcccgcgttcttccggccggcagctgcggcctatcgcttctgcccgtatgcacaggttgcaggacctgctgccaattttagaacacgagtttgtggactgagatgtttgatcgctgcaaagctgaagttccggaagaccttgcagaggcatggatggcatcttcgaaggaatctagaagtccgagccaatgataaagtgcctgattgggtggaggctacaccactgactgagaatataatgtcttgggacgtacaactcgcgtatgat

SEQ ID NO: 430208 - DNA, 212 bp, Oryza sativa
tttttatttttaaaacacacacaaactccccactgggggggcttatatattatatgggggggctacacaccccataacaatttctatactccatgacttattaccacaggattgcacacttgatgacaacggcagaactcactcaacctgtccatcacggaacttaatggcatctcagcatctcctactatcacctcctgacctacttggat

SEQ ID NO: 430209 - DNA, 340 bp, Oryza sativa
ttcatctgcaggaaggcgagaggaggaatcggggggagtttttcggattcgagggggggacaagccagcgtggtgcacctagaacggcgcggctagcggcggggaggagagattggatcgacgccgggtagttaggaagggagcttggagagatggcggcttccgcgaggcccgtctgcgtcagccgggagagggcgacgagcttcaccatggcgtgcaggctgctcagccgctacgtccgccagaacggcgccgtcgccgtcgagctcggcctcggcatcagaggtgaaggtgaggctcccagggccgcgcccgcgactatgagcttgctgcccgggga

SEQ ID NO: 430210 - DNA, 278 bp, Oryza sativa
ttgggtcatctacacgggcggcatcaaccctcgctggtgtcattcgatagccggggcgggctcattcaacctgcccacctacgacatctagctcaccccattcctccgcctcctggtctacagcaacgcccactagatctggctcatcgtgttctacgggatcacctagtggcctcgctacaccaacctggacctttggctggaccccagcacggcggacatgcacgccacgctcggcgcgtaccagacacctggccttgaaatctaacgccactact

SEQ ID NO: 430211 - DNA, 148 bp, Oryza sativa
ccacaaccaccaccaacaccttctgacctacatggtaatcaaacaaggcgaacacttgaggaacacacatcgcggtacatagcgcccaaaacaccccctgcagctcatacacctctaatgagagcaccagctgcagcaaatactcctg

SEQ ID NO: 430212 - DNA, 428 bp, Oryza sativa
  unsure (1)..(428): unsure at all n locations
gggtattctgatgggtccccggaagaagatcatgggtgggttggaatctacagcgcggggagggctggcgtgtaatgtacaaaggctgggcgattaagaattgcatgctcctctgcttgcttggtaaacccaaagggtccgcatgtcctggatacggcgcaagaacaaaagcgctgggcgtcttgtaatgcgtcttctgactagttgagcattcccgattctcagccagtttaggatgttttagaggctggatgaaggctgacaatgtagtattattagtctcctgttaatttttatctggtcggctcgcttggctcgtcnttaaaagacgactacaagaacaactgatcacacgtcatacctaaattatacatatgattaatttgagatcaaagaatttacagagttaatacagccggggcgacctc

SEQ ID NO: 430213 - DNA, 55 bp, Oryza sativa
ggcctcctcctaccgcctcgggaggggaggcccggggggcctttttttaaatatg

SEQ ID NO: 430214 - DNA, 259 bp, Oryza sativa
ctcctcctattctcctcttctccaagagttcttgggggggtgctggctgatctgggagagttatacaaattacagggctcaagtccttgtgggggggagagaacagatccagagggatgctccgcaaatcggagagtgcgaagactgatatagaggaagagatcgatcgttttgtgccagaaaaggtcgagatggagacccgtaatgcccatggggacctcaacttatagtgcttgtaaaaaaaatacattttaccggg

SEQ ID NO: 430215 - DNA, 281 bp, Oryza sativa
cgttatttcacggctattaagacctccaaatccgggggggatgaataccaaatcctggagcggtctcagcaactccttcccaatccttctactcatcttcctcgcggcggcagcatccgttccccagatcgccatgtgggacgagcagtctgagcaggcggaccccgcggcgcatgaggcgaccgggcagatcgtctacctggaccgccccgcgggcgccgaccccgaggagttccacatccgcaccctcgcccccgtcctcggcagtgaggaaaaggtta

SEQ ID NO: 430216 - DNA, 300 bp, Oryza sativa
gcgtggtcgaagaaggcagcaaagatgcggcgaaggatggggatgttctcgctcaacaggaggcgttggccctgaagcttttgagtaaaatgcatagttaatttaatggttttgtaccgcgtgatgttaatgtaggcagctctctgcaaccggagagtgaaattttgatcagggctagtctagtttcccgggagttgatttttgcataggatctggaaatgtatcagtttttggtcttttagtttttcgttcagaatttttgtttgaatacttgttgttcctttattattttcttacttt

SEQ ID NO: 430217 - DNA, 62 bp, Oryza sativa
tatatataaaaaaaaaaaaaaaaaaaaaaaagggaggattttatttaaaaaaaggggggggt

SEQ ID NO: 430218 - DNA, 87 bp, Oryza sativa
ttacttcgtcatctccaagtcgtacatctcgggcggtgtcgaatgactcatgggcgagctcaatcaaacagaccataccaggccttc

SEQ ID NO: 430219 - DNA, 172 bp, Oryza sativa
tactacaccgtaaccgccactttggattccagggtgggtacatccaatgccgaggggaatccatctccccgtctcggactagcgctcctcttcctccctcgcggtgtctcggatcggaaatggctatcttggtgcatcctttctatgggatgtgtaacctatgtgatgtcta

SEQ ID NO: 430220 - DNA, 279 bp, Oryza sativa
agcccgcactcctctaccaccattccccgcatctcggaggggggggcttttttaaatacccaggggggtaatacaattagaaacacataaaccctaccctttatcctgaccctcatatttctgccttcgccctgcaggttccacatccccccacgaccatgatgacctgcgaatcccaacttcattcccgatgaaattacaccaacccgagccactcacggattccaccgctgccataaccaatcctagcaggcttcctcctgtcccgatccaccaacc

SEQ ID NO: 430221 - DNA, 502 bp, Oryza sativa
gttttgcttaattgttttgtgcttcgctgtgcgctgtctctatctctctctcttgcaaaaccctaaccctagcggcgggcgggagcggcggaggaggagggcgcggcggcggtggggtggtagtggtggtgggtggaatggactgaggatgaaagcgagcaaatccgagtgtggaactatgatgatgcgctgccagggagtacttttggaaaccacaggtcatctgacagaggcctatctaatcgtttgctgatcaatgagcttgaagatagcttgttgttagatggctcaagtgatggaaaggtccgcatatggagaaactatactgaaaagggaggacataaactagcaactgctttctcataacttcaaggctatcgaagtgctggccgcagaattgtatttgattggcaccaacaatcgggttatctgtatgcatctggtgacatgtcccttatccttgtatggcagctcgacaaggaacaacctgacaacaccatcc

SEQ ID NO: 430222 - DNA, 540 bp, Oryza sativa
ttctctctcctctgaattgttttccagtgtgggagggtcttgtaaagatcacggggcgaggctttccagtgtgttgtgtagtgctttagtgcttgtgtggtggtgtatagctttgcttgtgttgtgttgtgccaaccttgagttgaataaagcttggggctttagagtttgctcttctttttcacatccaaggtgctgcatatattcaggctctgggcttttggactctagtaattgctggttgctacctcaactttcggcatcaagatccaagaaagatcagtagccaaaaaaaaaaaaagtcttgagctgcaatcatttggatttggattgtggagattctcttgtagcttactccttctccccttactgttcttgctctggcatttggatcaaagagtacactgtttctcaagggagaaggacaagctcaggaagcagcatgctctcctcaaggagttgttttggaagaagagattcaggtcatagaggagctcaacaatcataagttcaagtggtgaggaaaaaagcagatgaagc

SEQ ID NO: 430223 - DNA, 456 bp, Oryza sativa
ttgttttggtattcccatacactttgttccgggggggctttagtgtcgagagaggccgacaggatagagacggagaggagcgctcccaatcatccggagggggagagctctctgttctacctgcaggtccctgatcgatctgcgaccaagtggaccggggcatcatacctacattgccgaggtagttatatcacattgacgcgctcatggggtccagggggggcactcagatgtctagcagcttgcgtcactccctgatgtacgaagctgctacctgctccagcatccgaggacctgcgacctgccggtcgggtcaagaaggtcacggtctgctgcttactccaactgggccaggaagccctcttgatagcccagttggctccctcgatctattagtgcacggactactatgacttctcgggctgggcttgcttacatctatctggctagctgctt

SEQ ID NO: 430224 - DNA, 447 bp, Oryza sativa
cgcgccgccgctccattctttcattccaatcctcgcccctgtcggcatcgggaacggttggaagtgcgcgtgctgatgtttaatcatgcgatgccaatgatgtaagcgcccgacactgctgcgccctgctgcccgtcctccattacctctctctctctctccccttgccgttggttcctctgagctcaagctcgatggtgagaggccgactccgtccgtcggcgacgagtcagtctatccggctttcaatctggttaggtctctgtcctctgcatcacctcgtcgtcgatttacctatctccacaatccaagcccattctgccttcagatctggtgacggctgccttgcagtagccggatttggcgagctcggggggaggggggaggagcccacgacggtggtggagctgaagcggatgacagccaccgtggtggtgtaggctgatt

SEQ ID NO: 430225 - DNA, 557 bp, Oryza sativa
ctattcattcatatgagcatatgatttcctcctgagtgattgattaatcactctgttgatgactagttgactgccaatttgcccatttcttcatgcaagaactgattgtgtttgttgattgatttgttttctttcttgataaatcttcttgtgtttctgcatgcatgcaactcaagtgagcaagcttgataaatcttcttgagcattaatttgggatccaatattaagctcaagctagcttagcttagcttctcaaagtgctactactagctaacttgatcatatgtttgcttatcactatttttattagttatttttaaaattactagctatatggctttcaagatcatgtcacatgctctccattagcttaaagctgtatatttgtcttaaattactaattagataattctgatagccacagcataggtacaaatcagttaaccagtcaagtactatgctagaatttgccaataaataaaacaaaatatacccagttcaacacaaacttcttagccataactaattaaccgaggagcatcatacaaattaacaca

SEQ ID NO: 430226 - DNA, 416 bp, Oryza sativa
tccacgcgtccgtgctgttattcttggtgtctcgtcgtctgtctggggggtggtgtttttatgctagagggtcgatctgattcaaaggaggtgctaaaagcttcaatacctgaaaatttagtttgtgaattttaatttcgttgaaatgctgatacaaattttatatttattgtatgtatacctataattttttattgtttattaaattaaattacttactatatttttaatctattatattacttcatatatatactagttaatattttttaaatctattttatttttttattaataatatttatcttttataacataatttaattttcttatattttaattttataatttattttatttttttaagaatatttttaaaaaattttactttacctctaaatttttatatattatat

SEQ ID NO: 430227 - DNA, 555 bp, Oryza sativa
gcgtccgctcttttttaatctcgctctcaagtcgcagcagcactcagcatcgtggcggtcggtgcccggggcaacggctactaggcggtgcgccgtcagcgcggtcgcatcggctccaagcagatactcaaatatttcctgttaattagagtattttttccctttctttggtgtataagaaataatttttttttgttttgttttcttctttattttttccatttgtcttatggacatgttagtttctttttatttattttttttctatctatatttattttattcttacttctttttatttttattattttattattatttatttttttattttttatttttattatccatttttttttttatatttttttttatatttattattttatttttttttttttttttttttttttttttatttttatttttttttttttttttgtattttttatttattattattattattttattattttattcataatatatttttttttttttattattttttttattatatattattaattatattttttttattattttttt

SEQ ID NO: 430228 - DNA, 234 bp, Oryza sativa
  unsure (1)..(234): unsure at all n locations
cccactcgnccggcctgctgccaccaaatcacaaagtggtgtacctaaaactcctgcgagtaaccaaagtcagggaactgagtcagcaaccctttttatgggcaacctttctttcaatttaaatcaggaccaagtgaaggaatttttccaggaagttggttaggttaccatcgaatgccttcctacatttattttcttttctcttctcctttcatggaatttatctgatatgtt

SEQ ID NO: 430229 - DNA, 254 bp, Oryza sativa
ttattagcataggctcatctagcatgctagagagatcatctgaactacatggcgggggctgcaagaactcccaaataatccattatctgctcccaccatcttagaggactcaggccattgatccctttcctctctcgatatatcttcttgaaggtggtccctcataccacttcattgaccgtgactagacaaattcttttcagcattaatttgggatccaatattaagctcaagctagcttagcttagcttctc

SEQ ID NO: 430230 - DNA, 507 bp, Oryza sativa
tgtgtaataccaagagagaaaaaaaagagagaataatttcccccttttctctcttccgtgccggagaatcgatggagattagggcacaactattccttgagatgttggcacatagtctagcaatcaatccttcaagggctgctcaatgtccggttacttcgagggcgtcgagtgcacccttgggacttgtctcttcgttggccttcagcaggggacgtaaggaaagtgttaaacttttcatcaatgtggatagatacacaaagtatagtactcctttctgttatgcaccgcgaaacaccagaatcacaccacttgctactgcatcatttggtgacacagttgactcgtcaactcccatctttcctagaatccatgtgaaggatccctatcagcgacttggaaatagcagggaagcatctgaagaagatattcgagctgccaggaattttctgaataacaagtatgcagggcataagccaagtgttgatgcaattgagtctggccatg

SEQ ID NO: 430231 - DNA, 513 bp, Oryza sativa
  unsure (1)..(513): unsure at all n locations
tgtctctcgacgacgacgccacaatgatggccggccggcgaagcgcccacgttgacgccgccgtcatcggcgccgccgccctcctcctactcgccgcgacggaggcggagggcgccgtgtccagctgggagtccaactgctgcgaggactaccacatcttcgtggacaaccgcgtgtcggacagcatgcacctgagctgctacgccttacaggggggcggacggagcgagttctaccacagattactgggcatcgatgcgaggggggtagaactgctttctgttatgcaccgcgaaacaccagaattacaccacttgctactgcatcatttggtgacacagctgactcgtaaactcccatctttcctagaatccatgtgaaggatccctatcagcgacttggaatcagcagggaagcatctgaagaagaaattcgagctgccaggaattttctgttaacaggtatgcanggcataagccaagtgttgatgcaagtgagtctgcccatgacaga

SEQ ID NO: 430232 - DNA, 291 bp, Oryza sativa
tgtgtgatgagagccccctcctctccatggggcgggccctattcctgcctggggccaccttcgccgccaccaccaagcacatcgccgtcctgcacccgcccgtcgcatccgcctgcaggccccacccgcccaggctgatcaggtgcggagcctacaacacgcacgccgaggagtgcctggcatgttattacagaacccgggttccacggcgaaaatacatggaagtgggctagataccctaaagctgtagatgaaaaccctgttctgaaggcaaaacacgatggccacatt

SEQ ID NO: 430233 - DNA, 450 bp, Oryza sativa
ccgtctttttgaaagaaaccacctgatcgagcccggatcttttcagccgcatgagaggaggacgagtcgttcgttgtgcagcaggaggcggcggcgaaaatgtcttggcatacttacttttactatcacctgttttgctagatcgagggcctccacctatctttcgcgtctttgtttgccatttcttgttcccttctctgtttcattttttcacctcttttttttttattctttttcctttcttactttttatctctttttcttctgctctttttcctttatctacttcctttttttcttttatatttttctttttcttttcttttctgtctaattttttgttcttcttttttacctttttatttttatatttttctttttttttcctatcttccttgtgtgtatagatgttatttctcattttctttctctcatgacttttcttttttt

SEQ ID NO: 430234 - DNA, 191 bp, Oryza sativa
gtcttcgtcggcggcggagcggaggagcacggcgggctagtttctctaccttggaggggcgactgttccagttaacccaaaacctttgtgtagctgacgcagcaccagcagtcgcggtgaaagggacacgtctcgccgccccagcttaccgacttccttccatcccgccgacgaggacgcgtacaagccac

SEQ ID NO: 430235 - DNA, 78 bp, Oryza sativa
cgcattgtcatatgatatgaagtccctaacagtggggattattgtacgactactcgggggaatggattctgcaagagc

SEQ ID NO: 430236 - DNA, 68 bp, Oryza sativa
ggatgactcacaagacggaggccacatccgatgggggggggttacaataattgggggttataatgagt

SEQ ID NO: 430237 - DNA, 146 bp, Oryza sativa
ccggccttcccggctggacccacccacgcgtcctgactcatcagcttcaaacgcccacatcacagggagggtttcatatcaacagggggccatggcgtccacgctgaccaacgtcggcctgtctaccccggcggcggcggcgtttc

SEQ ID NO: 430238 - DNA, 147 bp, Oryza sativa
  unsure (1)..(147): unsure at all n locations
tgaggtggtttagcagaacaccaagaaccactttngggctattttatactaccttggaggggcgactgatccagttaacccaaaacctttcttgaacaacctgacagggaagcctgtcattgctaaacttaagtggggtatggaata

SEQ ID NO: 430239 - DNA, 263 bp, Oryza sativa
  unsure (1)..(263): unsure at all n locations
tcatttcatgtgaaaaaaaaaatagtaaaagggggcttttgaaacttgctgggcggtagctaagcagtcnaagccaatgaagtaagcgcccaacccttgtgcgcccggctgcccgtcctcaacacctttctctctctcaccccttgcccttggttcctttaactcaaccccaaggtgaaaagccccctccccccccctgggccaagagacactctatccggctaacaatctggggaggtctctgtcctctgcatcacctcggc

SEQ ID NO: 430240 - DNA, 201 bp, Oryza sativa
gtcgcatacagctacaaacgcccacatcacaggcggaatttcgcatcaacaggcagccatggcgtccacgctgaccaacgtcggcctgtctaccccggcggcggcggcgttcttcttcgttaggccgatctcccgttttggcccgtgatttattttctttttgtcttcttttttttgtttctttttttcttattcctattt

SEQ ID NO: 430241 - DNA, 158 bp, Oryza sativa
gagtgagtgagagctgggtgaatgaacagctgaagatccccttgcctgtggagcaggcagcaagcatcccatctgtgaagatctcccctgtgcacaacctgccactgacatgggcttttcttggccctagcacagatgaggaattattgtccggcctg

SEQ ID NO: 430242 - DNA, 145 bp, Oryza sativa
cactctatacactcagaccacgcacgcgttctagccgggtgttcttaataaccctactgggggctcttcaaaacccaccacccaaagatctcgccctactctcgtaaatctcccactcttctggccctacggggattagagcgcg

SEQ ID NO: 430243 - DNA, 78 bp, Oryza sativa
gattctactctatacaagaaatggaaagctcacaggaaggtgccatatggagaggcggggacgctcccagaaaacacc

SEQ ID NO: 430244 - DNA, 177 bp, Oryza sativa
tcttattctaaatcaacaaaaaaaaaacaaaagggtggttttaaaataaaaaggggggtcaagcatcccatctgtgaagatcatacttgggcgccccctctagaggacataggcttatcttcgcccttagtacaaatgaggaatttttgacccgcctcccctaaaacttaaattatg

SEQ ID NO: 430245 - DNA, 123 bp, Oryza sativa
ttaatcttgtctgtgcaaagaatctaaagagggacagtttcattcacagtgcggggtgtcaaagcaatcaggtctgcgcagcactttatattcattgagaaccagttttttattgtgtttatc

SEQ ID NO: 430246 - DNA, 102 bp, Oryza sativa
tgtatgggatcatgaattggcaatgcatacagggggggcttctgtttgaaatagggagccttttgtcacaaaggttgactttttataagcctaaggtatttg

SEQ ID NO: 430247 - DNA, 388 bp, Oryza sativa
  unsure (1)..(388): unsure at all n locations
cagttatttttttctttttcatgtttgcattntcagtttagttttatatatataacggtgtgggtaaaacaatgattttttaaaatgaaactctaatatcctttttgcatacttctgttaaaaaaacaaaagattattgtgcaatcctctctttatatttagtaacttctcctttttgaattcccgtatgattgtaatgctacatttaattctgcaaatcatacaacctactggcaccaggctacttatctatagggaatcaatcaccacaagcttatctatttgtactgcatagatccagcacaatccttcagaaaaatgtttcagttaaaagttttgccttacaagggacaatattgacatatcccacatggctgcagaaactacc

SEQ ID NO: 430248 - DNA, 306 bp, Oryza sativa
tgagtggtggtggtggtcaaatcccaacggggggggtttatattaaaagaggaggagtcattaaaacgggaagacggccacacaacagtatactaactgttagtgggcacattcacacggtgctaatacgggaatgtgtaaacgagctgagaaacaaattattcaacaaactccatatcttccacgtgcatatctcaccaagcctcacatatctgataactcaaaacacactatctttacaactgcagtaacaaacatagctaatcttattattatactaattttagagattattttcgatctaaa

SEQ ID NO: 430249 - DNA, 368 bp, Oryza sativa
  unsure (1)..(368): unsure at all n locations
aacctaacgtcctccccaaacagacccaaaacccggagnaggcatatttgaaataacaggggggtcaaaaaacacgcactagacgctcctttacccagcaacaacccaaggccacgcctacggcactcgccataccgcgcagcaccgcaatgcacatggacacaagaccgacacaccccacgctcgtggcgcactagcgaagaacccccagcatatccaagagcacgcacacacaaccggatgcccaacaacactaccaagagagaatgagcccgagcttctacgagctgctgccctgggcgccgccgccgcaaagacgcccccaggcgtccccgacccactgaatgcactgcacgcggccgggaagg

SEQ ID NO: 430250 - DNA, 505 bp, Oryza sativa
ccgtttccttatctcactcccgcttgtgtatccgggtgcggaatctcaacggcaaaaacctagggtttgctcttccaaatccccaacaccccatcccccacctcagacctccacttccatctctccaccacccaccctctgcagcgccgacgacacctcctcctccccatcgccggtgaagaagacgcggaggattgcacacattgggcttgtgatacaggaaaaatgctaatctacatgccctgaagatttacactaggaccaccttacaagatgcgaatggtcttgatggagtgcattgccttgccaagattgatggctcttttggtgacaaccttgaaaattttgtcctacttagtttggaccaataattgtgctggtggttaaacatgttttctcagggatttgctgggttccatggagaactgcaggccatcttactctgctgccaccgtttgttttgaaacagtgttgctcgattatatgtcagtaggatggttggctc

SEQ ID NO: 430251 - DNA, 415 bp, Oryza sativa
catcttgatctcatataacttcaagccagctgatagggagagggtccagtctatagggagtgttgctaagcaaaatgccatagaaaagcctcaaagtgaaattagtgcaactgaggcttcctttaaagatcataaatatgttgagtgccttcaggagagcattgatggcgggaatagcccaggagttgatccatgtaatagctgtcctaaccatgaccagcaaatagccataagtgaatctgatttaatccaaaggggcagcaaaacacctctccacagcagcgtcagtattaatgtggagtctgttccactggaatctgatattgtagctcgacgcaccctttcagaaggacagtttcccaggttatgggatggttctaatgcgcttgatgccaaatggacaggtgaaaatgat

SEQ ID NO: 430252 - DNA, 350 bp, Oryza sativa
  unsure (1)..(350): unsure at all n locations
tgttcgaagccggattactgaaactgggtgacagaataatgtaaactaaaggttctatagacaaacgaaaataaactataaaatgagaaaatgttagtgatggagagctgtaatttttcactggagggaggattttatttcttctctggtttttagctgcagaaatttaccagcccatttaccaccttgggcatgtgtatttctgaccctctgaagattcgcagtagaatgtcctgtaccgggttccaggtcttgcataggagttcatcttctgcacattgtaaactcattgcagtgtacttttgctgggactactaaaaagcttaccacttgggagtggagccagnggg

SEQ ID NO: 430253 - DNA, 334 bp, Oryza sativa
gcattatctgtctgggaagcactgaggcatataagacagggggttgtattattggtaatggggctgaagcacaatacggacatggagtgaaatatgcgatgatgtttgcccacttacagcagcttgagcgtatagttggcatgtactgggatgatatgaatggcacaaacattatttgagcagagttcacattaagcatgagaactatgatgaatgaggaatcatataacgccagcggctttgttgttatcgctgttgacacatcaagtatagacccctttgttgttgacagtggcaaatttgggaaaacacctttggcagatccaaaggctga

SEQ ID NO: 430254 - DNA, 302 bp, Oryza sativa
gatctctgtaaatatgaataaccgcgactggtatcgtcaagttgcttttgggttgcagtagttctaatcttgatgttctgctgggaatcggaagatgttatgcagtatgcgtattgttggggtgtaaccgtgtaagcgcatctgaaatgaagttacgggcgatggtaactgggaagcaacttacgtgtgatttgctacaggagttcttttttccctaatttcatggatataccggatgcctttggcatgggggtgagactgttaatgtcttcttcaatggtggcttatttccgccttgtttt

SEQ ID NO: 430255 - DNA, 377 bp, Oryza sativa
  unsure (1)..(377): unsure at all n locations
ttccatcctcgtccattgtcccgccggaccagccaggatcgatgtgtccctctcactggggcantcagttccggtggcgccgttgcaatgggatcggctggtgtacactgcacttattgacagcaaggacaactccaccggtgtgtttgcaaaggggatgaacttccgtccgggtcgtctaggtgtgccatcacggtacgagtgtgtctttggccgagacttttcgaagccaaagcttggtggcacctccccaggggcttctgctgctcaggagaattccgngtggtgacaccagtctcgattcgaccgtacgctctgatgactaccggcggcaaaaacagcgcaaacaatgatgacacgcctatgtgtggtctcca

SEQ ID NO: 430256 - DNA, 361 bp, Oryza sativa
tcccggtcacccacgcgtcgcagtattttaatctttttcatgtttgcatggtcagttagttgttatatgttgaacggtgtctaggacaatatttttaaaagaaactctaattccttttgcatacttctgttaaaaacaaaagatattgtgcaaccttctttatatttagtaacttctcttttgatttcctatgattttatcgttcattaattctcaaatttactcctattttccagtctctttttttttttattcacttcctcattctttttttttttacaccatttatctttacttttccctatttactttttctcctttttatgcttttttttgttatattctctttctttttcatttc

SEQ ID NO: 430257 - DNA, 293 bp, Oryza sativa
ctctctccctaccccatccctccccgcccaacgccggcgggacccgttgaaatactccgtggctcccaacagccgccgtcgtcgccgccgtcctcccaggccgcccgcccagcaccgccgtccatcgtcgccttccccgtgctccccatccccccgctcgagttgcgggtgaagaggggctcgaagcggctgatacccctagcctctctgctccatctaacacggtgaggcctagattgacggagacggcgtgttgatagccgcctacaactcctgtgtgaggcttgaacacc

SEQ ID NO: 430258 - DNA, 107 bp, Oryza sativa
gagatcgatagagcgacagtgtataagtagtggctggttggttggtttcaacactggttgggtttaatcaaccgagcgagatacccatacctccactgtgagctctc

SEQ ID NO: 430259 - DNA, 140 bp, Oryza sativa
gtgtgctaatcctacccctaccggatcggggcgggtctgaatttaaacggggggagggttaaaaaaaacataaaacagaaaaaaaaagggaaacaattatttacgaataacatccaacaacattaaaaaaaaaaataaaa

SEQ ID NO: 430260 - DNA, 480 bp, Oryza sativa
ggccactgtgcgcgctggagagcaacgggtgggtctactgggcgcactgctcgttcagcctcttcacggccgacgcggcgtggcggtgcctggacggcaagtggctcttcttctggggcgactccaaccacgtcgacaccatccgcaacctcctgaccttcgtcctcggcgtcacgaacacgtccgccgtgacgcgccggttcgacgccgcgttcacgaaccccagtggcgggccggggactgtgaggatcacgagcattttcaatggccactggaacatgagcatgaactatcttggtctgcattccctccggaacaaggggttccagcgtcttgtccgttcatacttcttggctgaggaccgtgccccggacattgtcatcctcaactctggcctgcacacgggtgctactggaccagcgtccgcgcatatgtgcaggctgctgagtatgctgcacaattctgggctgagttatggct

SEQ ID NO: 430261 - DNA, 358 bp, Oryza sativa
gcgctgcctcggccggagcaggcgaggccgaccgggatggcactcctcgccgccggcgccgccgcccgccgcttctttcgcagcctccgccgcttcagctcctatgccgcttctggaggagaagaagcaggaggagtgcccgcgggcgtggtggagcccgagtcccccgtccgcgcgccgccggacgagcagttcgctgcgtgggtcgcgcggctccggccgggcttcacggcgggggatcttgccgaggcgatctcctccgagcgcgacccggacctcgcgctcgcgctcttccgagtgggcggcgctccgcccggggttccgccacgcgcccgcgtcctacctcgcggcgctgacc

SEQ ID NO: 430262 - DNA, 424 bp, Oryza sativa
taagttcattgcccaaacagatctttgttcatgagggtaccagagaacaccaattcaggattctggaaatttgaagctactcataaggtaggagatggatgccgaaaacttttgtgcaaactggaaactgagaagagaacttccttaatagttgcggtgataggggggagaatatgcatcggtggataacatttcactaagttggaatatccatcttcagcctctcactgtcactgatcactgtacttatctatgttgtatcatgccctcttggcatactgcttagtgtgcttaatgttggctctatgttgtagcggcagattagacttgagagtagagaagtaataagcctattgtttactgtacttgaaaaatccgtatgtcctggtatcatgtgctgtaaatcttcgtaattacccctcat

SEQ ID NO: 430263 - DNA, 144 bp, Oryza sativa
tctctataagtagcttacctcctggctgcttttgtggtcattattgcaatccattggagtcttgaacgaggtcaatgggctaggaggtggccttgtcccctcctactggtgcgtgggcgtttggctacacgacctcgtggagat

SEQ ID NO: 430264 - DNA, 474 bp, Oryza sativa
tccttccgaaatctcaaattctagtcatgacaactgtgtggatccagattctgagcggttcttttgggataatttcgaggatccagagataaagagtgcacttgatgaagtccttgaattcattcgagtagaaaaaatggagcagaccaagagagttgggtctaagaatgaaaggaacaatgatgataatgatgccaccaaggaagttccaaatgggcagaaacagccagttttaggggcacgtgcaacctgtgcaagcactgcaattcaagaaagtggactccgtgaacatgcaaaatcctataggctgtcaaatgcaatccatgcaagtaaaaacatggacattcccttcagatctcatgaaaagggcattaaccataataaagatgatattggtaaaagagatgtatgcagatcattggcagttgcaaatgcattagagcttctgaagctggcttttctcagcacctcatc

SEQ ID NO: 430265 - DNA, 106 bp, Oryza sativa
acggtatcctgaatccccacccacccgcctcctcctcctctggtccgcccctcctccgatggcggcgtgaactaacacctagctgatccgtgcctcctactacccc

SEQ ID NO: 430266 - DNA, 137 bp, Oryza sativa
  unsure (1)..(137): unsure at all n locations
ctgttcgctcncgccagctctgctcttctagacactgtgagctgtctacatctcatgtggcatggacactccaatccttgctgtgccaaaaatccgcccatagtcacccgtaccaccctcacaacccctccattctc

SEQ ID NO: 430267 - DNA, 128 bp, Oryza sativa
  unsure (1)..(128): unsure at all n locations
ctcttaccctcaagaaacaagaaagacaacaccaacaaaggagctagctcaccaatggcctggttgtcctccttccggctcgccgtggcagnggcggcattgttggtcgaccacatattgcgccactg

SEQ ID NO: 430268 - DNA, 344 bp, Oryza sativa
  unsure (1)..(344): unsure at all n locations
ttcgacctcacacctaccgcaccttttatttatgaatatgatggaaattcttcaaagtcaggttactaccgagatagtgatggttaataaaaaagttngacactttatctgggcaccttcattagctggttatattttttttttttttcttatatatttccgttttttataattttttaaccttttacttttttatttattttcatttttcttaatatttatttctcgttcatatatttcttttatttactaccattcctatatctttactctttatatattttccatttcattttcttcttttttcataatattattctttaccttttattattttttttttt

SEQ ID NO: 430269 - DNA, 235 bp, Oryza sativa
gttcttgatgaatctgatctcatgttcaatcctgggttggggacctattagaatatcgatgggcatcatcaccataccagaccctcttaccttggctttcttcttctacacccaacccataggcgagcatggcagtcacacacttgacacctgcgctctctgcaccaaacagctcacgagggacagcgacatcttcatgtacaagggggacacgcccttctgcagctaggagtgc

SEQ ID NO: 430270 - DNA, 172 bp, Oryza sativa
gcgattagtctgcttgagagggaggaccgctttccggacggtcttaacttcaacaaggggcccgtcctcaaacggggcgccgctaaggatgttaattttgttttacttacactatactcctcttactttctttttttttcttcatccttatcctatcttttcttatactccc

SEQ ID NO: 430271 - DNA, 112 bp, Oryza sativa
  unsure (1)..(112): unsure at all n locations
tctcaatactaatatttatgtttgtatgattggtgngggttcattttaaaagctcattgggtttcctaaaccattatcatatacataatgctccaccccctccaaaggtccc

SEQ ID NO: 430272 - DNA, 112 bp, Oryza sativa
gcgggagctcgcggcactgaacgggacaatgagggacgattattataaataggactgggggttataaaaatcaccatcagtactcttgccctaacatgacggaaacattcaa

SEQ ID NO: 430273 - DNA, 175 bp, Oryza sativa
tctcctctcgtccgattttttaagtgttcctcgggttggttcaatacacatggggtatgggcacattgctattaactctaagagcaagataagggctaaagatcaaataggttccagcaatgccaaatatttcaccatgttacaaacaccaagatcgattaaaggttctaaggat

SEQ ID NO: 430274 - DNA, 477 bp, Oryza sativa
gcttagttttgaagaatggagcgtgcagcttctggcgatccagttactgttcctgggggcgtcaaccgtgatcgtgatgcgggtcgtaagcaaatccggcggcaaggagtacccgccgcacgtacctgtcaaggcaaccagactcctgctcatggaagtgacggactacaagctggacgggctggacagcaacgcgatgccgtcgcacctcgccctgaccgtccgcgggtctctgtacccacggcccgaggggaggaagagcctgaggggccacgtctagatgagcgtcggcttcaacctgccgccggtgctcgcgcttgtgccagagggcgtcatcagaggcgtcagcgagacggcgagcatttttcagcaccttcgctggttttgtgcaagcagaaagagatggtatcatggtaactggaaagatcctctacacgactctgtcctctgatttaaatgactgggtatgggtcccac

SEQ ID NO: 430275 - DNA, 386 bp, Oryza sativa
ccttgtgcgcctccgcctacgcatcctacggctggggctcctccaccggcggatgcggcggatgcagaatggactagcatccgtatcctgctgcgctcccactcttctccagctggcctccaatcatcggcgaccccgaacaatcagttcatccaccaggcaggcagtccagtccacgcgcaatcttggacgagcacccacatcttagactcgggtgatagattccgccatcacatctacgcgagagccatgaacggcggctactcagcagcagctgtggcaacgcccagccaccggcggctggcggacttcctccatagcgtgaaccttaagtacgtgaagctggggtaccactacctgatcacccacctcctcacgctcttgct

SEQ ID NO: 430276 - DNA, 456 bp, Oryza sativa
ttaattgaagttcatggctgacatgctctccggaggaggaatggtacaaagttgctggagtcagacgccctgatattatgtgatgcagtacattgaaattttaaattagattaggcggttaaggtgtgggatgtgaaaacagatgtcatccaacaagaatacccgtccgctgatcattattggaggtaaaagctcagcgaagttattatttactgatgagctagattaaagcatgaaccatcaaaggactctgcatgatgtctgaatcagagctagcaaggttatacatttattggagcaatggatattcctcgcatcatttccacgtcagatcttggtagacattgctggaatatagttcggtaggatacacatttgtttagtaaccttgacgacggatcgactgacgttcaaacattatcagcactaacaggagggggttcccagagataacat

SEQ ID NO: 430277 - DNA, 499 bp, Oryza sativa
gtcttaatttgtggccgccagccccacactgcgaggcgggccctgacctatccagggggccgtcaccctacggcgatccaccgctgcctgcgccgaagccaagtcgcccatactcgctgctcgatcctcccgtcgccagatcaccaccaggccgctgaaaccgacgaagaagctggcgggctcggcgtagccaagccgatctcctccgtgccgccagaacttcatcacctgttctagaaatacgatgcacactgacagagagagaaaagagaagaagaaaagctgcaaaagccggaaaagaattgcggaggagacctcctcctaatcggcgggaaataaaaaaaacagagagagtggttcttgcttcgcctgcaaggaatcctctccggcctgtgttccaaaattttgatatgtgatttgaacctttgaagtaggactacccaactaaaattcctgactactgttctggtactacacgcctgcacattcctacatgcgg

SEQ ID NO: 430278 - DNA, 498 bp, Oryza sativa
  unsure (1)..(498): unsure at all n locations
aagaaaccttaccatttccgttggtgttttgatggagtggatatgataggattgggttctttctgttattccctgcaagtttcgtcaagctcagctttgcgattagttactatgagcttattacaattttttacctttctacaagttattcattaccgatttttgtacctaataatgtggttcaatttgggatttggaagtatgcctgcgattttgtctggtattaacaatttagctctcaacaagcaaaagcaaccttttgaggctagttgcaggctgcagcagaagcagagtgaattaagggcattcaagtgtaaagaacagaggcaatggcttcatcttcggacccatggatgaaagagtacaatgaggcatctaggcttgctgatgatatcaattccatgattgccgatgagggtctcttcacaatcaggcccggaaattatacgtcacacatcagccattcgaagaaaaataactatnctttgtactagactg

SEQ ID NO: 430279 - DNA, 476 bp, Oryza sativa
tactaacaaaagaacagagactagagttgaatgcccgtcgtagggttgcaaggcaatctatgccagatgtggaaatccatgatatgaatgcttgccgtagatcaagacgacaaaatgttactcctggggaaagatctgctcatctggcacgacgtaacgcactctatgcagctaggcgtgacaaaccatgcgctgaatccattgcactagagtgccctgagggatctatcccattgttgctaaatccaacgccttgcttggaaacaaccggtgatgtgccatctacatcgagcctgcaaactgagcatgctgtagatcatcaagcgcgatcatgcacattcaatgatggtatcatctatatatgttttcattcgtactcgcaatttgggggaatttaactatattccacttttagatttggcaactatccaaatgcccttcttaagtttgctcttaattttttgcccctcttagat

SEQ ID NO: 430280 - DNA, 485 bp, Oryza sativa
tctttttacacccctccacttgctggtgcggggctgctggccgactaggccgggaaggaattttggactttgatgagggagctgctgattgtgagtcaagaacagttgtgaagagtgagaagaaagctagagaagatcaaatggcagctgaatcctacctggttccacaaacctcctctgaatcgattgcgcagaagatgggcttcttcagggtccctgaccttcttgtcaaactgagcagcaaatgtttgattgagctggatgcagtccgcagcccaacatcgcccctagacctcatattcttcccaggcctcggtgccaaatcgccgaggtcgtctttccttggcgacagggttgggcttggactggaggattcacttactgatgatagctacactcccttgggcagcaggaaggttcttattggatctgagatgatgattactgataatgtaacttccaagaacagcttcactgctcctgtc

SEQ ID NO: 430281 - DNA, 463 bp, Oryza sativa
  unsure (1)..(463): unsure at all n locations
tgacacgttactgctgcataacaaccggatggacgtgtcaatgtgaagacgggtcgtactaacgtgctcagctgcttcactgaatattttaatgacatgctagcagaaattattcctagagattttagaatacgtatatcaaggaatcaaatatcatggattcgttttgacttcaattcagtaaataagaagcacgttcctccaaaagaactcttgtttttcttttaaatatgcagaggagagcattggatgcaaatctcatgccgtcacatagtcgcatacaaagcctactgaactggtatgccttttgccttcaccgattgtaactctgcgttcctgcaaatatgaactgtttattcttaaagagctctttgtaatatcgtgtaaataatgtagcgaatatttatcagttatgggtctgctaaagcctacacgcttcatccggcnnnaaaaannnnnnant

SEQ ID NO: 430282 - DNA, 498 bp, Oryza sativa
gtgtgctagcagaggcgccgtcgtggtcgccgtcgttcgtcctgctgcttccgccgcatgccggtgagcatccatcagttacgcgcatcctcttgctcatctctccctacccacgcgctttttcctccaatttgaacaccctttgtttctcttctagacctggaagctcttctcttaatttgccttaaacctcaatactaatagcagtttgtttgttcccccagatccgccactgctgaacggggtgctttcgccatgtcgaggctgcgggcgctgtggcaagcctccgttaacgccaccaggcgagccattgtgtggaattcagaagacctaatcccaccaagtgaaaagtacatcttcaattttaattcaaaagatgagctgaaaaggtggcacttgtattcagattccgagtatggaggtttatcatctgcatcattggagataactgatggtggtgctggtggggatacttcataactggtactctgatgtttg

SEQ ID NO: 430283 - DNA, 409 bp, Oryza sativa
ttttttttgttttttttaaattttttttgtggttttttaatttttttttttttatttttttttatttttcattatctttttaaaaaaacccccaaaaactgtccaacgtataatcaaaccgaaaacacccgttttttatcctcaaaaaatggggtccctttttcccttaaaaaaaaaaaaaaacaaatttgggggggaaaaaaaaaccttttttcttaaataaaaaaaaaactttttttttttaacccgaaccactgaatcaattaaaaaacccctgataatccttaaaaaaacccccttaactttaggaaaagttcccccttaaaaaaaatccccatttatcccattcgtttgaggggaaaacttccaatttaaaaaggggtcttttttttttgccaaaccccaaggg

SEQ ID NO: 430284 - DNA, 425 bp, Oryza sativa
ggggttttgggatccgttggctcgtggggtggggggcggtgcggtgcggctaccgcgccgagcccacgctgagatctgagccaccaccgcgcgatggatggatgattcgtacgtttgtttcagttgagcttttgatttggtttttggtttggggtgctcggcttcaccattaccatcacgagatttgtgatttgcttcaatctggggcgccttcacacacgctcgcgcgtggctgcttggatgctcatccatggctgtgcggccgtggtggggggctggaaccctagatcagagcaggtttaatagtacagcagactaatggctatcagccaaatctggtgagaaaattgcacatgtaccatctgaagaggtgatttgctggaatggcatgactttaactggcattcgatgtaatgccattcact

SEQ ID NO: 430285 - DNA, 240 bp, Oryza sativa
atgcgcacttcttttgcttccattaagattcgtcatgctggttggttcgctagggtagcctggaggcctgtacacaatgacgctgtcttgtgctcggtgggcagctgcacagagccacagattgttcttgttaggattcgagagaatccatccataacaacattgtatcgggaacaatttgcacaagtggcctcgtaatcagtgctaactcatatgtatctatttgaatgaaccctgccc

SEQ ID NO: 430286 - DNA, 493 bp, Oryza sativa
ggttaattatggaaagctagaacgcggcgaattacaaggtttcatcgttggtattaactttgaagatattgactggaacagtaaccttgctgcagatcaagtcatggctgactttgatacatcacggaaccattttattgaaaagggtgaatttgttaatggaatgttgagatggctggatgaagctaagcgtactgttacatctggtgcctactcaaaaaagttcttgaatgattttcatgcgagaacaagggatgaacaaaccggtctgctcgacaaggatgaagaggaaggtgaagctgatggaaatccaacctggacttgcattaaggccatcttacttttgcttctgggaactgcaatggcagcagcatctgcagatcctcttgttgatgctgtgcacaatttctcaaatgctacacatattccctcctttttcatctccttcattgtaatgcccttggctactaattccagcgaggctgtctcagca

SEQ ID NO: 430287 - DNA, 488 bp, Oryza sativa
cacaaaaccccccctcctctcctcctctggctccctctgccacccagccaccacaggatggcatcctcctcctcacctccactcctcctcctcgtctccctcctcgccgccgtcgccgccgccttcctcgcggcgcaagctctcgcccaacaccaaccccaaggaaatgatacggcggcggcgggggaggggtggaggccgaggctgaggaagacgtacgtggagggcggcgccgccgggatggtgccgcggcggcggaggctggtggggaggttccagatatgcgcggtgtgcacctgctgcgggggcccgcacggggtgtgcatcccggcgccctgctgctacgccatcaactgcaacatcccgaaccgccccttcggcgtctgctccttcaccccgcgaacctgcaactgcctcaactgccacctctagcagatatgcagcacagcacatcagccaagaaaatcagagctagtatggttcttctc

SEQ ID NO: 430288 - DNA, 482 bp, Oryza sativa
atatcatttaagaagacatggatgatgatactgagcactcatctggtggcagtgaatgtgacaacaacattaagaccagtgtctctgatgacaaggttaaaagcaataactctggcacagcatctaatggcaacgatcagggtttacaacctcctaagaaagcagcaagaacaggacatggtgcggtaagggaagacacctgccaaattgaaagcaatgatacatccaatcgaaaacaagaattatacgaatcaaatggatccacagaccaaatagaaaagttaaatgttcgctcatcatcagcaagagcaaaatttatggagaaatcaagcagctcaagaaataagagcaaaaagaccttatggggccgtacttcagcaagaaaagacctgtcagcagaagagattgactattgcagtgatgacgagactcttattgagaagcttgagaacagcaagacagatctccaatctaaaattact

SEQ ID NO: 430289 - DNA, 184 bp, Oryza sativa
ttcacctgtgggtgatccgttttgggatgtggtcttagtaggagggattctttgatcaaaggaatcccttctttgtaattgtaaatatttcttcttagtgaaatgaagcacaattctccagtgcgcaataaaaaaaaaaaaaaaaaaaaaaaaataaaaaaaacaaataccaaaaaaagaaaaa

SEQ ID NO: 430290 - DNA, 372 bp, Oryza sativa
cacttcgtgagccgacaccgacgcgccgacgctggcgttccccaccgagccgggcgcggcggtaaaggattccacggtctgcctccgcctctcgtacctcctcgccctgacatggcgctacttatactcattttagtgtccccgactcgccaatggcgcgacctgcataaaatgctgcacccccaacttaaacgcctgtgccagcatggcctttatgtcttgcgcgacaacagggaggacgcacgtggcgaacggcgttcccaccagctgcgtagactgactcgcgaatgcgaccgtgcctgtaccggactattaagcccgcggcttccgtgagcttcactgcatggctaccgctataattagcaccgacct

SEQ ID NO: 430291 - DNA, 500 bp, Oryza sativa
gctttggctcagctgcgtcgggcaccaccactgccgcgaccgctgctgcctcgacaccgtctttcggcttcgggttgaacaccggggccgctgcatcgagtaccaccactacttcggcttcctctccggctctagggtttggagcaggcaccggctcggcgctgtttggatccactacctctgcaccactcttcagcaccaccaccgcctcgtccccagcgaccacggccacgaccacggcgtcctttggcttctcatcgtcgccagcgaccgccgcctctgctccgtcgttcggcttcacaccgtcatcggcaaccaccacgaccgcgagcaccgcccctgccttgttctcttctgcatcttccgctcccgccttctccttcacgaagagtagctctgctgctcccaccaccgcagcgtctgctccatctactggcttctccttggccacttcgccggcagcacctgctccctcattgttctctaacaccagtgcagca

SEQ ID NO: 430292 - DNA, 397 bp, Oryza sativa
cgtttcctgtaaacccggaaccctaaccatagcgggctttctaacggtcaccgggggggttcgacggcggatcatctcgatggcctcctggaccacgacgacaaaagacgcactgcgccggatcgatgctagaaagggaagaggacgtggacacgcatgcgctggcagcactgtcgctgatggtggggttggaaactgaggtcaacgcctaggtggatgccgtggtcgaggtgctcaaggcgctcaaggtggaggcaagagccgccacacggaggcttgaggcggccatcggggctaccgggctagaaggcagagacctgctggaggacatgcgccagacgcgggggaacacgctggagaggaagctgatctacatatgttgctgaagatctacgag

SEQ ID NO: 430293 - DNA, 357 bp, Oryza sativa
catgagtaaattgcttgcactctcgggcgatccaggctgtcaaatgagcaactagcgaggcataagctcgatcactagctctgatctgatcttcagctagcgccggcagagctgcagaggtctccatccatggcgccggcggtcagcgcatcacatggtgacatcatgcggtccctgacgagcaagctcgactcgctgctgctgcaaccgtcacagtcgccgacgactgcgcaaccgtagtggttgctgagggggagaggacaagatcctcctactgaaaggcgatctccgacaactgctagatgactactacctactcgaggagccggccgtcagacaccgtgccaccgtcagact

SEQ ID NO: 430294 - DNA, 281 bp, Oryza sativa
  unsure (1)..(281): unsure at all n locations
tgctcctcctgcctaacccaccaccgctttggtcctcctacacgcttcgtccgccgccgccgccgccgnagaagnagttgttgacggcgaatatgatgtctgacagtggctactacgacctcgacgaccacaaggtctccggattctttctgaaggagacggggccagatcagatgaccatcaagttcgacgactataacctacagatcttaccgccttccgagggcaagtgaaagatttgcggcgaatatcgaccgaacactgacgaggatgatacgtta

SEQ ID NO: 430295 - DNA, 411 bp, Oryza sativa
gaagaagaagaggaggaggcgagctccgtttggtgcgaggcgccgccgcgcgctgcgggcctctactactacacgggcgctccactccaccatgcttccgagccggcagagaagcatcttccatctaagagaggagggtggcggggccaccaacgccgagcacctaagagctgaccactgcgacagccatggcgatacaccgtatcatcagtatccaccagcaacgccttccagacgaccggctgcagatcgtcctcgaccagacgaggcaccaccaccgtcagcagcacggccatgtcggactcaagcacacgcagatctgagtccccggcgccggcgggcacgtcaccgacggaagctgcatccttgcggcgactacttaggcgcgagcgtcatatgcatgctggagct

SEQ ID NO: 430296 - DNA, 494 bp, Oryza sativa
tccttttgtgccatttacagctcccaatggggcccaaagccagctcgtctgctttgggtgccgtccagccagagcaacgtcggtttgctgcgcggtttgcagtaccgtgaccgctgtgcctgctcccgagcagaaatctagctgcaatgttcacaaaaatgtaaagacaaattaaaggggaatacaaacggcttcagggctccgcaatggcgcgcacgttgcgttgatggtgcctatgctcaggccgctcgcgaagaagtacacactagagttgttgttcgcatcttcgccgccgtcggtgaccgctgcggccatgaaggagtgtgtgcttgatgagtactccaccaagcacaggatctctatcgataggtttctccagctgaagatatttgtcaaggtgcatgatcgggcttaaaggtcactgcatacgtgaggtgcttgagcagtaggaatctgcatctaccatggatgttgatgctacacaaacaaaacaa

SEQ ID NO: 430297 - DNA, 242 bp, Oryza sativa
tgacttatttcatgaaactcgtgctgaggagaacatagattgttctgaaatgaaatttcgggattaggtgatggggaaagtattacaagctatggggggtgctgcctactgggcactactggacataccatttatgaccaatgttaggtgcggaatggttaggactaacattcctgatgataggtgtttagggcttgatatgatggcaaacatgcctgccaggttatcgtgactctgttgat

SEQ ID NO: 430298 - DNA, 367 bp, Oryza sativa
ttgcgcgtgggcgacgaggttggctcgcatgcggaagctcaagatgccatggggtgctgtgcacaaggatggatcatgcccttcatgggaagccatggttctcttcggatttggtctgcgccgggcataggtcggagatatcatctctggcatactgcagtagccacaacaatcttgcacaatgggatgatctctgcagaagatgcactgtagcaaccaatgatgtggtggacacatggagatcgaaatccaggcagctgagttcttgctgctcggagccattcaccaaggcgcgcagtgcgcataggatttctgagactgccagtgattctggggagatcaaccgggaacatattcctgcagatca

SEQ ID NO: 430299 - DNA, 492 bp, Oryza sativa
cgctcccgcacgcgctgacgccggaaactgctcgggcatcagcgctcccatcacgacagcctcgccgatctgccccgcaggtgccggctcgccgcagtctacatcgccgcccactccgtcgtcatcgaatccgtcctcgggcaggaatcacgtcgccgccggtgccctccgcgccgatctgttcctcaccgccaccgatccccgctgccggctcgccctccaccgaccccccgccggaagcccttctgtcgccaggtctccgccgatgcattccacgccgagttgctcctcgccgccaccgatccctgctgccaggtcgctgtcgacgccttccgcaccgagctgctcctcgccgcgccgccacggcgacgacgatagactcctcagcaagttgctcctgccgaccacctagctagctagctaacgtctcgacgatgtgtttgtggctagctagagctctgatgcggcagcttggatggtgtgggctggaga

SEQ ID NO: 430300 - DNA, 445 bp, Oryza sativa
  unsure (1)..(445): unsure at all n locations
gctgtcgcggaggcggatcccgaggcggcgacggcgactgtcggcggcggcggtttggtttccctcttgtttgtattttaatccgtcgtgggtgggtgatggaggtggagcgtcgtggtggtggggaggtgaacggggtggtggagatggaggacgcggnggggatactggtggactacctggtgcggccggcgctgcggaaggggagcaggatgacgcctgagaaccaggccgacgtcacgcgccaggttcatatggcagtcattctgtataactattaccaccgaacgcagttcccacagcttgcttttgctgatccaagcggctcttcaaatgtgcatctgttactcttggtgacagttcggtcgcgttctccaatatggtccaccaacataccaagagttctcgaaattctttagaggttgtgaatttctttgtgactgac

SEQ ID NO: 430301 - DNA, 81 bp, Oryza sativa
  unsure (1)..(81): unsure at all n locations
ctcgtcttttcctctgcacttctacaggcgacggcngcggctaaaacttgctacgccagctacagcctcgcttggaggagg

SEQ ID NO: 430302 - DNA, 254 bp, Oryza sativa
gtgtaatgttagaatgacttacgttgtgaaacgggggaagtaagtaggacatgctgctaaatgaggatcacagtgttttgtcctgactagtggcggatcgtgagcctaggcaagtttaacaacaaatatagtatacacaaatctatacaaatttgtagatcattttagagtgagcatttgctttgctattttacactaaatcgttataagtatgtacactatatactattgttgtttcaattcatacggtgatt

SEQ ID NO: 430303 - DNA, 446 bp, Oryza sativa
gctttaacttcaagtctatcagagattagttaagaggatccatatcattcagaggcggaaggagccagccaaggcacatcaaattaagctagaagtcgttgtaaaagctttgaaatggcttgaaattgacatggacgtggatgaggtggagtgcatcatggcgtgcctaatatacaagaatctcattaaaggatactttgctcataagagcaaagttcttgtcctcagcaaacaagatcctttcccaaagttgaatgggaagcctgtctagttcatagtcgcccctgaaaagaattaactatctcctattctgttgtattcggcacatgtttttgtaaaacgttgaaaaactattgcctgacagtaacatttgtattattgtaacagtggtgtttgtactagtgtaacaaagagaccatttcgcacggtaataaatgacacttatc

SEQ ID NO: 430304 - DNA, 398 bp, Oryza sativa
ctcgtttttattttaaaaaaaaaaaaaaaaaaagggggaatataaaaaaaaagggggggaaaaaaaaaaaaaaaaaaaaaaaaaaaaaaaaaaataaaaaataaaaaacaattgggggggcggcctttatgtttaaaacttgcttacctcctcggggggccgcgtttttagtattccctgtgtcccccccccatttcctcggcgggccgttttttttttgggccccggaagtaaaaatcgtggggccccctttttaacccgggtgggggggaaacccccgttgttcccccattttatttcgttgggggccccccccttttttccctttcggtgtataaggatagggggcccggacattggccctctttcccagtggcgtccccccggagggggggggg

SEQ ID NO: 430305 - DNA, 499 bp, Oryza sativa
tggaagtggcgagtgccaatgcccttttatgcccaatttctggctgtggtgctcatctagattgcctggagaactttgaggaccactatcgcacccgtcatactgcttcatgctctgtatgttggagagtgtatccaacttcaaggctgctgagtattcatatttctgaggcacatgattccttttttcaagcaaaagttgcccgtggttttccaatgtatgagtgtttggtggagggtggggtgaagttgaagagctacaaaagtcggcagcagcatcttcttgataagcaccagtttcccaagtcatttgaattcttcaaaaaagcacgcccttcgcaacgccagcggaacaagaaccagaagcaacggcaaacagttcacaagggagacgagacaagcgaaacactaatggatgttgatgggaagaagagctcaaggtacatgaattccagatatcggccaaaagcacatgatggaaaagagtcaaaagaaaatga

SEQ ID NO: 430306 - DNA, 478 bp, Oryza sativa
tgtgaggataggtgatctggcaagtgctgtttgatgtggctagtgtaaaattctcacattaacactaaccaaattggtgaatacgaagaaagccatgaagtcccataagtttggtacatgcagctctgcattgcctgaatatgcaaactaggtggatctaggtttatgtgatgagatcaaaagaatctgatgaaagatccatttccagaaagcaaggccagtgggttggaaataacaccagaagttgaagtggatgtccagtgacgctgctccggtggtccttataatcgtttcagtcatactgatcactatgaactctgaaggcatccatgaaattcggctgttgaacaggtgtgaaaataacgtgtaaccaaacgtggatcggctgttgtacatggcgttgtgaaaacagcagccaaggggaacgcaacctgtcttctccttaatttaccggaacagtgtagtctgttggtttaat

SEQ ID NO: 430307 - DNA, 346 bp, Oryza sativa
atggaagagctgcacctggggtgccccgccccagtattccgggcgacgccaccacgcgtgctgtttgggactcatacaaaccggacatctccggtggacaaactaagctaaacctcgcgcgttgcgtctattccaacactcaccaacggcaagccgctacccatggcggctgctggctgctgtcgcacgagctcagcctgaggggggatggtggctctcaagatcatactcatatgctacgcccaataatgctcttcatattttatatcgaggccaaggcgaaggccgtcaccgactggctgaagctcaacgactaggagtttaacgcctggacgcatacaagtga

SEQ ID NO: 430308 - DNA, 497 bp, Oryza sativa
gtcgctgccgtcctccccggcactcccaatccctgtctcctccatgccgcaccgcctccccatcgtcgcagccgccccgtcgcccctgctcgcctgcatccaccacaccgcctccctccccagtcgagacggcgtcgcctcctcgcccccttcgcagccagattgacaccgcgccgttcaatccaccgcctcaagcaccatgcatcgtcgtcgttgcaggcgtcagcacgggcgcgggcgctgccgatcccgagtcgagacgacgtcgtccgctgctgcttctccaccactgacggttgccctgcgtatatcctccctattatcgcggtccccacctgctcctgaatcctgatccacaaaaacagcggagcgccgtcggcctctctgcctccctgcgaccaccagtggcatctgccccgccgtcggctctccctcacccgcgactcgccgacgatggtgctccacaaaccattcaggccgtcactggtctccggagc

SEQ ID NO: 430309 - DNA, 459 bp, Oryza sativa
gttccgcgccgcgccgcgcggcgagggtggtggggggtgagcggagagccgagcggggccacgggcggcgccgcgggaggcgtcccggcgagcggaggggaggggggcatccgagcgctgggggaggtagctcagcgggaacgggaacggggcgatcccccccggcgttctcctccccggtctctcctgtagctagctagctagccatggcggcgaatggcgagggtggcggctacccggcggcgcggaggcggtgggatctgacgaacaagggtgccgagagcattccaatggtgaaagaggctgtggaaatgtccacagacgaagaatcagacggtgtcgttatatgtccaccagatggcaacaatgatgatcgagaggaagccattagtagtaataatcatgataattgccaggaaggcgaagtcacttgtgttaaagacccggttatagacagtg

SEQ ID NO: 430310 - DNA, 482 bp, Oryza sativa
cacactcgggtgcctcttttgtgctttctgtaaaaggtggtccaaaagttggagttggcattgagtacacaagtcttaatgtggaaactgtagaagttcaaaattctactggcaagctgtctgcaaagactgttggaaactctactatgcgtgcagttgctttttcaaatgaaggcaccttcatctgtgaagcttttggaagagttgaagtggatatccctgtggctatgatattgagtactcaaagtgaccgtctttgtgttggttgcagcatgcccatctacccttctctgcccaagggagatctattttccttttatgaaacttgccaaagttacacttgggttatagaagatgacaaggtggctatgtttcaattagctagatcttggcagtatggacttgatcaagggctatattcggaaggaaagaactatccatggttttcgaatggaagtagcaatgcttttattaatcatgtg

SEQ ID NO: 430311 - DNA, 377 bp, Oryza sativa
gtctactgcagcaactaataaacgatggatcgggcgaaccttgccgagcccgtggtggggctactggcggcggtggccgcaacgctgccggcgccgtcatggcatggtcttcgacctatatcatgcccggcgaccccaaccaccgatactgcggcggatgagatgaccaagaggtgctgatgaaccacgaggagtacctcgagaagaaatctctgtacgccatcaatgccgactgcgacatcggaggtaagaccatcgacgcaagcctttacacggccaacgaggccaatgtgacgtctactgttgaccacaatgggactctcaacgacaccaccttcaccaccatcgaggctgcgctcgagaaggtccccctaggg

SEQ ID NO: 430312 - DNA, 402 bp, Oryza sativa
aggggaaaagaaagcccccccccaaaagaccccaaaaaaaaaccaaaaaaaaacccccgagggggaaggcaaaaaatttgcccaaaaaaagcccctgaagaaagggtcaccaaaaaccgggccagggagggaagtaaaccccgaaaacccaaagcaaggggataaaaaaaagggtcccccccaaaaaaaaggaaaacctaaaaaggggggcccctaaaaaaaacccccaaaaacaataaaaaaggggaaggaacccaagttccccccagaaggggaaaaaaaaaaaaccccaaaattcccaccaagcaaaaaggggcggaaaaaaggcttccccccaaaaaaggggggggggggggggaaaaaaaaaaaaagggggggggggaaaaaaaaatggttcccccc

SEQ ID NO: 430313 - DNA, 405 bp, Oryza sativa
gcgctgtcagtaccaccgtattcacaacttgaagataaggggaataatgctacaggcaagggatgtaggagatcgaccacacgggaacacagaccagccgagacgggaacgacggtgtagatcgcggcctcggcacacaggcaaacacgtacgaatcatggtagcagcttcgctggagacataaatcgaggccggtagaacgccggagaggcaaacacaaggatggcgcgacgccggagacgcggacgtgcatggcggcggtagagcaggtggcgccgtggcggcagggagccgatcgagcatccggtggtggcgagttgaaaagaaagttttcccctgctatttcccctgttaaccaagcaccatccggatgacatgggggtttaacacccaacgtggaaaggg

SEQ ID NO: 430314 - DNA, 322 bp, Oryza sativa
aaaaaaaaaaaaaaaaaaaaaaacaagggcaaaaaaaaaaaacaaaaaaaaaaaaaaaaaaaaaaaaaaaaaaaaaaacccacagggggaaaaaaaaaaaaaaaaaaaaaaagggggggtggtttacacacaccccggaaaaaaaaaaaaaccccaaaaaaaaaaaaaaaaaggggggccgaaaaaaaaaagggggaaaaaaccgggggaaaaaaaaagccccccaaaaaaaaaaacccccccgggaaaaaaaaaaaaacccccaggcggggggggggggggccaaaaaaaaaaaaaaaaaccccgaaaagagggggggggg

SEQ ID NO: 430315 - DNA, 430 bp, Oryza sativa
ggtgatacaaagctaccttaataaccgtcagcaatagataatgttctgctggaattaaggtaagttcgtagtttagagtagcatggcgacgttattactaataatagcgttctaagtctagaaagagtagaaatatacagcaagttcaagctgcatggcaaccattatatacatgcactaatggattgcagctgatcctggatcgagcttaccacccaccattgccggagctcccacccttgctgctgctgttccatccgccatctgccttgtcccaggagctgccgccaccacctccttgggtgcccttgttactgttcccgccatccgccttgtcccaggagctaccgccgccacctccttgggtgccctcgcacttgctgctgttccatcctccatccggcttgtcccaggagctgcctccaccgac

SEQ ID NO: 430316 - DNA, 480 bp, Oryza sativa
tttttgtttttttttttttttttttttttttttttttttttatttttttatttttttattgttttagattaaagaaggtaagaaggaaaaaaaaagaggggaggcaaaaaaaaaacgaacacgcgcaccaaaaaccaaaaagggggggaaaaaaacgggggggggggccccaaaaaaacaaaggggaaaaacccccaagggaccgaaaaaaaaacccaaaggaaaagaccaccaaagctggggggacaaaagggcaaaaaaaaagggggccaaaaaacacgggggaaaaacagccggggggcccaccggaaaaaaagctgaaaaaaaaaccgaaaaggaaggcgggggggggggcccccctaaaactgggggggaccccggaaacaacccaccggggggggggggggggccaaaaagcgcggcccgggggaaaaaccaaccggatagggaacaaaaggggggagaccaaggggaggaccc

SEQ ID NO: 430317 - DNA, 411 bp, Oryza sativa
aaagccccttgggggggctaaattcggggggccaaccgcaaaaaaaggaacggggccccccaaaaggtccaccaggaaggaaaacaaacccttaaaaaaaaaaaggaaatgggcaaaaagggaaagaaaacaagggggccaaaggagccaaaaagggggaaaaaaaaaaaacaccccctggggaaacaaggggggccaaaaaaaaggatccccccttatgggggaaccccctaaggatgggccgaaaaaacccctggacattttatttaaaaaccaaaacccaaaacaggggggaaaaaaaccaaaaacggaaacccccaaaaaaaggtgggaatcccccccctagaagggggggggccaaaaaccacacccctgggtgggtggaaacaaataaccaacccggatattaac

SEQ ID NO: 430318 - DNA, 376 bp, Oryza sativa
ggccctgcaaaagtagaaccccaaaataagcccaaatttggatttcattcttgggcttttatggcatatatatatatatatcagggaaaaggtgggtccatcgaagggaaagaaaactaaaatcaacttgctgcaatttcgacggggggacaaaagcttcaaaatgaggggggaagtaggttgggaacaaacacccagctttccttattccgggtacctaaaactttgccggggaggggacggcatttatatacaagggactgggcccaacctttatatatacaagttatcaaggggatatgatttcgccacgcagttcagggggccgagggcctcaggggggggggggcagccttgataaaccggaaaaattcct

SEQ ID NO: 430319 - DNA, 122 bp, Oryza sativa
ggggcttactttacatatatttactaattactacatatacggaaggtaacataaacgcgcactcaaaatacacaggttacaagggaggaccaggagcagtaggcaacaaaaccggaagaaca

SEQ ID NO: 430320 - DNA, 373 bp, Oryza sativa
ggggaaaagaggggcccaaatatcaaatcttcagcggggatgggaaccctttcacaatcgactggggcaacaaaagcttcttccccaatgcccgtaaaagaaacccggtttaggcccttttttttccccctggcatttgcaaaggttctatcaacaaaaggggttaagcctaaaaaaaggggaaaaaaaaccatcccatttctgcagcatgggaagttttgcactatcacccccccgagggcaaagccaacttgggtttggcagccgtcccttaaacagggggggggtttatcggcaattcagctctcaaatgcaacacccccccaaggaaaaaaagggtgtctccagccatgaacccccaccctgggatcgc

SEQ ID NO: 430321 - DNA, 352 bp, Oryza sativa
aaaaaaaggggaaaaaaaaaagggggataaagggcccaaaaagggggaaaaaaaaaaaaaattcctttggaaaaaaaagtgggccaaaaaaaaaggatcccaatttttggggaaaacccaaaagggggggggaaaaaaccccggggaaattttttaaaaaaacaaaacccaaaaaaggggggaaaaaaaaaaaaaatggaaacccccaaaaaaagggggggatccccccccaaaaagggggggggaaaaaaaaaaccaccttggggggggaaaaaaaaaaaaaaaaacccgtataaaaacgggaataaaaaaaaaaaaagggggcccccaaaaaaccaaaaaaaaagttttt

SEQ ID NO: 430322 - DNA, 486 bp, Oryza sativa
tttttttttttttttttttttttttttttttttttttttttttttttttttttttttttttttttttaaaaaataaaatttattaaatttaaattacaaaaaaaaaaaaaaagagggcaagaaaaacaaaaaaaaacaaaagcggcggggactttgaaattcaacatgaaaacaggaacgcaaaaaaaaaaaagggccgaaaaagaaaaaaaaggcactcaaacaacaaagggggagagccaaaaaaaaagggaaaaaaaccacaaagacaaaaaagttcaaaccccacgaaaaaaaaggaaaaaaaaaaaaagctgaaaacccccggacatacaccaaaaaatacaaccaaaagaaaaaaaaggaaggcaggggcctccaaaaaggcgggggaaaaacccggagagggggagaacccatgaacccaaaaaaagggggaggatcaaggggggggcaaaaaaacaggggggggcaaaccccccggag

SEQ ID NO: 430323 - DNA, 412 bp, Oryza sativa
aaacccccaaaacaaaggaaaaggggggggaaaaaaacaacaggccgggccgggggccccaaaaaaaacccccaggggggggggaaaaacggggggcaaaaacacaccgcattcagggggggggctccttaaaaccccggggaaatggccccccccccgggggggggcccaaacaaaaacggggttggggggaaaaaaacccggggggggccccggggttgaaaaccggggggggcccccccccggggggcccgggggggggcacggcccaaaaaaaaagcccggggggccccccaacgggggggcccccggggggggaccccccccccggggagaaaaaggggctgaaccccccaaccttgggccccaccctggaaacaaaaggggcccccggccggggggggcgccccgg

SEQ ID NO: 430324 - DNA, 560 bp, Oryza sativa
tttttggttttttttttttttttttttttttttttttttttttttttttttttttttttttttttttttttttttttttttttttttttttttttcccggaaaaaccccagggggcccccgggttcccccccccccgggggcccccggggtccccccccggtccccccaaacccgggcacccaaagggggggggggcccaaaaacccaagggggcccccccagggtcccgggggggccccccccccaaaaaaaaaggggccccccccccccggggggggacccccccccgggggaaaaaccggcattcaacggcgccggcccccccaaaaggtccccctgggtaaaaggggcgggaaaaaggggccggtgggggcaaaagcccccccaaagggcagggggggcccccccccgggggagccctgaacccgaaagcggggcccggccccccgggggggggggggtgactgggcccccgccacgagttggccgggggccgggcaacgggggcagcggaaggaccgggggcccggggggggggaacaacccgaaggggcccccc

SEQ ID NO: 430325 - DNA, 80 bp, Oryza sativa
caaacacacgcacacaaaagcggagacccaatctccgcaccccccctaaaaacaacacgggaaacaaaaaaaaccacgag

SEQ ID NO: 430326 - DNA, 378 bp, Oryza sativa
caaaaaggccccacttgtatcacttatgggggtaagccataaaccagcccggtttgaccagacaattaaagggtggctataaagaaaggtaaaaaccataagggttaacaaaacacactagcaattaagttttactcccattggaaaaaaacataataacttttagagaaggattacataacattcatccttccaaatagaggggggctaaaaaaacaccaatcttaaaggtaaaccctactggatagggggaaaaaaccatggaagttccacatgaggcaaagatcatttaaccttcatccgtttggggctttcctaaccctaatttccttccaccattgcctgcatgcctttggagagctccaagtttgcagggaa

SEQ ID NO: 430327 - DNA, 412 bp, Oryza sativa
ccacagaatcaccaaaattgatattccttctaatgggtaagaaggggtgcccgattgagcaaatgaacttactgccatttacaaatcaccacgtgacacaaatcggggagcccatatccaaacaattatcttgtgtgaatcacagcttcccctggacggcgtatctcatgaagacgcccgatatggaggggtgcgcggcctgcttcattgggcggaccatagaggccatcgatggccggaggctcgggttctcgccgacgcacgacgccgccagcgacgcccaagtaacattcattttagcggccaaagccctgaaggaatttttggaagggactcaggaccggctgtttacagaaattagagtgccattgttcgtctttcgttgatccaaacccaggcgttggagaatttt

SEQ ID NO: 430328 - DNA, 344 bp, Oryza sativa
gggaacgagggaaccccccccaaacaaaaaatattagggccccccaaaaaaaaggggcccaggtacgggcacggacacacacaactggggggaaccccaaaaacaaacgggcggacaaacaaggggggaaaaaaacaaagacccaaggggggggtcgatcccaacaaaaaggggccccccaccgattagtttacaaaccgggcgatcttaaaaaacggccccaaattttttttacaaggaacaaaaatggatggatatggggcccactagctaggcgagcttaactaggggtgacaaacccggagttttttttgacccccccctgggccccggtgagggggccc

SEQ ID NO: 430329 - DNA, 514 bp, Oryza sativa
gaggtgctcgcccactaccccgctttgttctaagctccacccagtaggaggggtccacgtgtgcaggtgacgccagatgacgtcatcgtcgtcatcgcaagttacagctcaccaaaagccccccagatctaagcgcctaggattcgacacgcctcgtgtgaatcacagcttcccgtggccgtcggatctcctcgcgacggccgagatggagccgtgcgcgccctgctccagcgcgcgcaccacgtcggccatcgatggccggaggctcgggttctcgccgacgcacgacgccgccagcgacgccacggcggaggcctcgccggcgtcgtaggcgctgcccagcctctcgtcgaccagcatgcgggcgtcgcaggcggcgccggaggcgggcctgaggcgcggcgcgaggacggcggtgaggaggcggccctcggcggcgcagaaggcctccatgccggtgaggagctcgaggaggaggacgccgaagcttgacacgtcgctcttcttgtcacca

SEQ ID NO: 430330 - DNA, 385 bp, Oryza sativa
agggaaatagaaactttattaaataggagagggggtgacaactagcaaaaaaaatgggaaactccaagctagttagttccaacagcagctgggtggaattcaatctcccccagggggacctttagggttatgggggggggtggctcctggcgcccgggagtaattcacccccacaagggggggcgccgccaccatgccctggagggacatttctttccctgggggacctttaggggtatgggggggattggctcctggggctggggagaaattcacccccacgtccggcggcgttggcaccatgcccgggaaggacaattctttccctgggggacttttagggataaggggggggatgggtcccggggccgggtagaaattcacc

SEQ ID NO: 430331 - DNA, 539 bp, Oryza sativa
  unsure (1)..(539): unsure at all n locations
ttttttttttttttttttttttttttttttttttttttttttttttttttttttttattttttttttttaaataaaaaaaaaaaaaaaaaaaaaaaaaaaaaaaaaaaaaaaaaaaaaaaaaaaaaaaaaaaaaaaaaaaaaaaaaaaaaaaaaaaaaaaaaaaaaaaaaaaaaaaaaaaaaaaaaaaaaaagaaaaaaaaaaggaaaaaaaaaaacccgaaaaaaaaaaaaaaaagggaacccaaaaaaaaaaaaacaaagaaaatgccaaaaaagaaaaaatcaaccaaaaaagaaaagcaaaccccgaatgccaaaaaaaagggaaaaaaaaaaataaaagcaaaggcaaaaaaggacaacagggggaaaattgaaaaaaaaacaaggcaaaaaaaagggaaaaacaaggacaagaaacaccgggaaactntaaaaaaaaaaaaaaaaaaaaaaaaaaaaaaaaaacaccacaaaaaaagaaaaccaaaaaaacaaggtaaggggaaacaaagaaaaaccaaaagagatcaaggcc

SEQ ID NO: 430332 - DNA, 373 bp, Oryza sativa
tttttttttttttttttttttttttttttttttttttttttttttttttttttttttttttttttttttttataaatttttttttttttttaaaaaaaaaaatttaaaaaacaaaaaaaaaaaaaaaaaaaaaaacaaaaaaaaaaaaaaaaaaaaaaaaaaaaaaaaaaaaaaaaaaaagaaaaaaaaaaaaaaaaaaaaaaaaaaaaaaaaaaaaacaagaaaaagaacaagaaaaaattatcaaaaaacaaaagaaaagaggtccaaaaaggtaaaaaaaaagagcaaaaagtcttttaaaaaaccaaaaaaaatggaaaaaaaaccaaaagaaaaaggggataaaacaaaaaaaaagaaacgtttgggc

SEQ ID NO: 430333 - DNA, 392 bp, Oryza sativa
gtcccacaacccccaaaattaattaacggcccaaccccaacgggaagggcccaaaagggccccaaaaaatttaaagggggaggccccccccaaaaaaaaagcaaaggggaaaaaaggtatgggccaaagggggggcccaaccttaggggggcccccgttccaaagggccaaagccccctttctaaaagcccaaaaaaaattttggaacctccaatttttttttcgaaaaaaataaaagggacccccccaaatcccaaacgccaaaattttccccccccccacaaaaaccaggtgccagccaggggccccccagtgggctttaaacccaagggccatcaaggggggagaagaaaaaaattgccgacaaacgggggggaacagggggcccaggg

SEQ ID NO: 430334 - DNA, 418 bp, Oryza sativa
gggggtaacccaacgggggaagcgcaagaaacagtaggtctcaacacagaagaagcacacccgtccagcaggagcgcatgaggggccggaagcatcaaccggtcatgggaaaaggagccctgcgagcaccttcgggtcccggcaagggaaacccacctatctaggtagacacagggaggtaaagggaaccagaggtctggccgaaacaaccgggggcttcggcggggaaagaaacctggatgaacggtgagccgcccaaaaattggatccccgaaccggaatcacatcagggagggcctcaatagaagaggggacccgccactcccaaggtgagacccccgggtcttggttttccgggtcttctggttctgatattagggagggtgactccgggtcccggtcttcccccccttctggt

SEQ ID NO: 430335 - DNA, 381 bp, Oryza sativa
ggggggaaaatttggttcccattggattggattggttgggcagctgtttcaatgtccatgaatgaggaaggccggccggccaattgttgaagagaaaaaaagccttttaggagtaggggggaggggtcccccaaggacttcagctccggcagggggggggccgaaccgccaccgccgggagccggaaaccccccaacgcccaaaccagggggggaggagccccccaaggggcctgccccggctgaaaagggggaaggcaagccaccgtcgtcgtcggaagggttcggtctcgacgacctcatgaagggggcccagtccctgatggaaaaaaaaggccgcggggaggaaaacccccgcagcggcggcccccccggggggctg

SEQ ID NO: 430336 - DNA, 310 bp, Oryza sativa
aaaaaaaaaataagaaaaaaaaaaaaacaaaaaaaaaaaaataaaaaaaaaaaaaaaaaaaaaaaaacaaagaaaaaaaaaaaaaaaagaaaaaaaaaagggaaaaaaaaaaaaaaaaaaaaataagaggggagaaggaaaagggcccaggaaaaaaggcaaggaaaaaaaaaaaaagaaaaaaacaaaagaaaaaaggaaaagaaaaaaggaaggaaaaaaaaaagggacaccaaaagcaggaaacgaaaagaaaaaaaaaaacggagaaaacaaactggaaagacagggacccacaaaaaaggcacat

SEQ ID NO: 430337 - DNA, 320 bp, Oryza sativa
gggggggaaaagggaattgaaggtgaaaaacccccacaggggggaatttaccccgggggggtggaattcaaccaagacaacattttcattatcacaacatactattttacaaacagattatttgcccctaacatatggtacaaaaacatgctacaagaacctaaaattctaacttaaaccaccctaatccaggacctgaggccgggcttaaaaagggagggacttttctgggaccacaagggggaccccgggccctcataaacaggagccagcttttaggaggggcccaaagcaaaaggcgatgcaatgttgaatgcccc

SEQ ID NO: 430338 - DNA, 404 bp, Oryza sativa
aaacaccaactttttttcaacgatttttgggggggggggcaactgggtgggggaacaaaccccaaggtggcccccaaaagccggccggccgcccccggggataggccactaaaaacaaaggggccccggccccaaattaaggccccccggggaacctttttaaggaattccccggggggcccaatttttaattcccatttagggggagggccccccccgagggcacgcccgccttattagctagggccaaaccgggaacaggtggggtctggtgcaggggacagccaaaggggcccggggggccttggtgcaaaactggggggggccccccgggacattatggggcgggggtaacccgaatgaaaatccgggggccccgagaggggccccccccccaattgggg

SEQ ID NO: 430339 - DNA, 272 bp, Oryza sativa
aattaaacgacagtcctaaaaagagcagatcgacagaacccgtaggcacaaaaaccaggaaaacaagcaagaatcttgaggagaaaaagaaaagaaccaaaaaaaaaaaatatgcagccaactagacagaaagaaaccaatcgtagaagaaatcgaacaaccagaacgataaacgccaagggaaggagcagaccatatgcaaaagaggcacaccgggaatggaataaacacaccagtccgcaatattacaaggaagacacaaaggagcggat

SEQ ID NO: 430340 - DNA, 402 bp, Oryza sativa
aaaggggaaaaaacccttggggggaatctgggattctttgaaaatcccccccttgaaaaaaaggggtttgaaagggaaaattgccaaaaattacaaaaatggtgggtgacaaaaaaaaaaattttttaggaaaaaaaaaactaacccctgggcctatgaaacaaccacctttttttgaaaggggaaaaaagaacctaaaaaaaattgggagggttacaaaaccaacactccaagggagggggagcccgccccaagggggtttgctacaaccggaagggttggaaccccgggaccaaaatggaagggggtgtttggtaaaccccctctttggggaggaaaaagatttttaaagggccccaatttttaaaccagggtggcaccacaagggtgggggaaacaaac

SEQ ID NO: 430341 - DNA, 375 bp, Oryza sativa
attaagagctgcaagaatttttttcagtgggcatgcgaggtcagaacaggcaatatgaaccataaatccaataattggaaacgaaccactctctataccttgcggtcgagctgctccaataactcccatacaacaaatttaccatatcaggagggatgaaccatgtacacaaatatcgcccttaaaaaaggaaccactgctaacacgtgacaggctcacatttcacagatcaccgacaccaagccttgggcatgggcgaactaccagcatgggtactaaatggtaaggaccatgtccaaacggctctgttggatggaaaaaccacgcacttcgaaccttagctggggaaacccacccgactaaataaggtccaat

SEQ ID NO: 430342 - DNA, 433 bp, Oryza sativa
ttttgggtttttatttttttttttttatttttctgattttttatttcattttttttcttttacttttttactattagcgtttagaacaacaccctgggggaaagaacaaacggggaaaggcccacacagggggcaagagcaaaccccacacgaggcaacaaaaaaacccaaccgaacacacgggggtaaaaaccaaaaacaaaggtggcccggacccaaaaaacagacaccccaaagaccattaaaaaaaaaaccccaaggcagaaagccaggagaaaccaaaaaaggggacaaaccccccccggagcaagcgcccctaaaaagcgggggccgaaccccaaacaacaaggatgggccccgggggacaaacaaaaggccccggggggcctgggggcaaaaccgggggaggcccccggggacaaaaagggggggg

SEQ ID NO: 430343 - DNA, 525 bp, Oryza sativa
tttttgtttttttttttttttttttttttttttttttttttttttttttttttttttttttttttttttttttttcttttttttaaaggggcaaaaaaaccccttggggaaaacaacaaatccccccccttggaaaagggaaaactaaaaaaccgggggggggcgggaaagggaaaccctggcccccccccccccccatttcccacaaaggtttttttttcttcttccgcccccccggtttttggaaaaggaaaaaaaaaccggccccaaaatccccaaccccaaaaaaataaaagaacccacccgggaacccaatccccccaaaggggggggggttttcccagcacccccaggggggggaaaccccccccccagggcccccccccgggagggggggttcaattgccccggacaaaggggcgggaaaatggggggggcccccaattggccgggatgaccttgttgggaaaaagggttttgcccgacctcttgggaatgccgatggaaaagggggcccggaacccg

SEQ ID NO: 430344 - DNA, 332 bp, Oryza sativa
gattatctattttctttttttttttttttctttttgtctcacaaaaagggcccccttaaaaaataaaaaccctgtacaggaaagggctcccggaaccaggataaaacggaaacaccgaatggggggtgtcaaaaaccccaaaatttacccagccttgtggcccccccaattttggcccaacttaatgagggtgcctcctggcaccctaaagggaaaggccacccgacccgatggccttgtttggcaataccatcggatattttagccccaacctgaagcaaggcagctggcccacccgtggaggatgttctccccaagtccggaccgaacca

SEQ ID NO: 430345 - DNA, 411 bp, Oryza sativa
gggggaaagcaaaactaaccgcggggaccttaactcagaaggggctgcgctcaacattcgggccaaacaaaccatgaaacaaagcgaaggccccccgaggccaaaaaattggcgttcacacgggagcccgccgctgaaaaaaggacccaaaacccactggaaatgggacaagctccccaaattttccttggattgggaagccaaacaaccaaatcaccccggggggcaaagagaacaacctgaggagcagcgaatccctggggaaccctttcctcccttgggggaaaaaacaccggagtctttccttgacaaaaaacctcttgggggctacccaacccctttcaaaatacccctaacatggggacgtgagcagggccactatagagcacgagggaatggggcatgtaagga

SEQ ID NO: 430346 - DNA, 305 bp, Oryza sativa
gcaagaaagtaggagtagtagtatactcctagcttaaagtttgctctcaacaaattcaggatagtatacgatcaagtactgtactatcctgtgcttaattttggcgttcttgtactgctactcctactatactgtactgtacttagttttggcattcagtatataggtccagaaggaaccagccaccaggaggcaggagcctttttgccttcctttttttggtttaacctgcagttttaataagggcctctgaatctctgacatcttcagtcatgtttttggggtttcattgcttggaattatat

SEQ ID NO: 430347 - DNA, 435 bp, Oryza sativa
  unsure (1)..(435): unsure at all n locations
tttttgggggtttttttttgttttgtttttttctttttttctttgtgtggcgttttttgttgtgctttcttggggcccaagcgggggccgccgcgaccaccggcccatgatatttggagggacaggagaacacaccgggccccccaaaaaaagggggaaaggcgggcccccccccaacggggggggaaaagagcccttggccctgggcggggccaaaaaaaaaaaaaacggggggcgccaaagggggggggggggaaaacccgcccttgggtttctgcaaccccaaaagggggggtttttcggggggcccccccccgggcgggattccagagggggggggccccaaaaccagnnccccgcggggggggcccccgaaaaaagggcccgggccccgggggggaacccaaccccccccagggggggggggaaaggggg

SEQ ID NO: 430348 - DNA, 377 bp, Oryza sativa
aaacacaacctggaacccccatagggcaagggcccaaaagaatttacgggttccccctccttaccagtttttccaaagggggcaggaaaaatgggggggaattcattcaacccggtatttttctataccccacactttcaagaaaaaagtttcccaacaattttccagattaatggcccaggaaattaattcccccggggtgggctggcaaactatgggccgagctagaccggggggaaggcccctccggcatggccccccctggggggaaaggggccccggggccgcccggcccgggggcggaaaaacgggcaccctggggggccccggagccacttgccgaggcccttggggggggaaggggcacccccccccgg

SEQ ID NO: 430349 - DNA, 422 bp, Oryza sativa
aaaattattattttttttatataaattaaaaaattttttaaagatggaacaaaagatggaaaagcaaaaaggaaaaaaaggcaaaaaagggaaaaaaaaaaaaaattttttaaaacaaaaaaaagaaaatttaagaaaaaacccccgggggggcctttaaaaaaaaaaaaaaacggcacaagggacaacagagttggccctgaacggggccaaaaaagggcggaaaaaaaaaaaggtattgggggcgaacaaaaaaaaaagggggaaacggaacccaaaaaaaaagggggggggggccacccggcccgaaaagggggaagccaccacccttttttgaaaaaaaaaaaaaaaaccggggggggaaacaaccgaaacccaaacgggaaggggggggaaacaaaaaaaaagacgcggaaagaaaa

SEQ ID NO: 430350 - DNA, 426 bp, Oryza sativa
ggggagagtattttcactggattgacccgaaaatgatttagcaaaatttactggtttacagttacccacatactagtacgaggcctaactacagattccattattatggggaaatctcacttgggcacccatgctagtatgctactggatcattgacccggaatatgattcatgattgattggcccatctacaaaaatttttgggtaatttcaactcatctgaagctgattttctaatggaaaaaccacaagctttggaaaccaccgatcgatgaaatacggttgagatcgagccacgacgatgaattattcgggtttgaacacccttgatctgagccgttgattctttgatcggatgaccaacaagggcccacgttgttcactcccccttatgggccaaatgcctcctagtcctaggggaacacc

SEQ ID NO: 430351 - DNA, 430 bp, Oryza sativa
ttttttttttttttttttttttttttttttttttttttttttttttttttttttttttttttttttttttttttttttttttttttttttttttttttttttttttttgggggggaaaaaaaaaattttttgggggggtataaaaaattttgaaaaaaatttgggccaaaaaaaattaaaaacccggggggaaaaagtttaaaaaaaaaggtgaattgtttagggggaaaaaaaaaaaaaaagggggggggggtaaaaaagggtttaacaatatttagaaaaaattccccgaaaaaaaacttgacacctttttaaaggaaggtttaagggttacaaaaaaaaattttgccccccggggggttggccaaaaagggaaaatgccaagttttgcagcccccattttttttttttttaggaaaaaaccatggtg

SEQ ID NO: 430352 - DNA, 323 bp, Oryza sativa
gatctctgttcagggtgtactacgaaacagagaacaaaaaaaaattttacccaccacagaggcataccactttattttgaccacccccagggccaaaacttaataatttttacagaggctaccgcaaccaccttactcaaccacggacaaattgctccgacggccaccgagaaggacgagaaaaaccacaaggggacattctaaccagaacaggaaaaacacgggaggaacccccagggggaagcgcttgggataaaagcaaactgggcagaacatggactttggctgagcccaccgcaacagctgcaaaaccacccaggatt

SEQ ID NO: 430353 - DNA, 422 bp, Oryza sativa
tttttggtttttttttttttttttgtttttcttttttttcctgggcccccccccccacccccccacggcccaacaacccccgggagagcccgggggcggcaaaacacccggggacacccggggacccccccccagccgccgaagcgcccagcggccccccaaagggccgcacccggccccgggccagcaaaaaggagcaccccccccacccacccccaaagggggggcccccccgggggcgccaccaaagggggggggccccccggcggggggggacggggggggggggggcgacacgggcccgcacctgcagcgggggcgggaccagcgggggccgcaggggcagccgggggccccccgggcggcggggacccccccaagggggcccccccggggggaacgaccccaacggccgaacaggg

SEQ ID NO: 430354 - DNA, 297 bp, Oryza sativa
gatcgaaacatgcacttttatttcacaatagcaggtatccttacgaagcaacacattattacaacgccagggggcccctagacaggcaaaaaggggaaaatatgaaacgaaaaaacccgaaaaaacaaccaggtaggggcacccaagcgggctaaacaaaaaaacggacgggctgtctgccggaaaaagcaaggggggggggcccccatagggaacaaagggaccgcatatccccaaccctttggctcaaaaaagggggggccgggggcccaaggccgccagggccgcgagaaaccc

SEQ ID NO: 430355 - DNA, 325 bp, Oryza sativa
accaaaaaatccaccaaattgaatatcacaaatgaccccaaatatacagaatgaacaagatttgatcaagtaaacaaaccccatcagacaaaaagagggggctcaacacatccccttaacacataatttaaggccccaataaatactgggggagtatatatgaactaggggtatacacaatacacacaggacatcatatgggatgaacaccatgcatgcatgatcgatgaaccaccatgcttgctcataaaaagcacatgtcgggggggcagcagcagcagagggcagcgcaaaatcctttccagaatcctgtcgcctggtggtg

SEQ ID NO: 430356 - DNA, 138 bp, Oryza sativa
  unsure (1)..(138): unsure at all n locations
acatataaaagtggccttttattctgcacagattcagaattgggggggggggggggggnaacacacaataaaacattaggaaacccttaaacaaaagattattcgttgctcattcctcaggggcggttcactgtaacc

SEQ ID NO: 430357 - DNA, 156 bp, Oryza sativa
aaggcttaaaaggtccatcgaacgaatcatgatttcacaacatgcattcagccaaaactaccccatggggatcagccaaaaagggtgcccctgataaactgaacccttacattgcaatcatacaggcctgcgatactactacacgctcttggaaag

SEQ ID NO: 430358 - DNA, 329 bp, Oryza sativa
ggaaaggatatttttttttttttttctttcaaaacaaaatccaaaccggggaaaaaggtaaaaaataaagggttaaagtacaaaaaaaaaggggggggccaaaaaaaaaaattaaacggctaaaagggaaaaccaaggaacggaaaaccccgaaggggcccaagaaggaaaaaccccttttaaggggaaaaaaaattaaaaaaatggggggaaagaaaaaaccccccagaaaaaatttttctcaaaaaaaaaggggggggaaaaacggcgggatgccaaaaaatgtctttagaggagtttataaaaaaaactttctctaaccggggggg

SEQ ID NO: 430359 - DNA, 370 bp, Oryza sativa
aattgggggggggcggaaaaacccccaaaaaaaaaaaaacccaaaaaaaaaaaaaaagcaacccccatttggggcccccacccctttttaaaaaatttttaaaaaaaagggggaaaaacccccccactttggggaacgggggacgaacctaaaaaaaaggcaggggggggcaaaaaaaaaacggggggaccccgggaagggcagggggaaaattaaaaggggaaaaaaacttaaaattaaagggaaacaagggggaaaaaaaaaccacggcccgggggcaaaaggcgagggcccccgaaaacaccggaagagcactgttccggggggcccggaggggagactggacccccacctcggccgggaggggggg

SEQ ID NO: 430360 - DNA, 317 bp, Oryza sativa
cctattattgtaaagtaatagtccttcatgtttacaagcattgatataggaaagtacaaaagggggagagaaaaacacaacggccccatggggaaaaaagcactacacaacagtgcttggcaaaaggaaaaaagcgggggcaacctgttttgaacaaaaaaaaagctgccacccccatagtaggggaaacaggcctgggatggacattggaacaggcaagggcggaagaaaaaaaaaggccctggggggccaccttggaacaaaataagggccccggataatcaaaccaaggaacaggttttgttatatcccaaaac

SEQ ID NO: 430361 - DNA, 119 bp, Oryza sativa
aataaaagaacaagggggttagtaacactagaacaaagaagatgtccattggcaggggatttggacggattaccattaggagtctggcttttacgggtacaacgccagctaattttgga

SEQ ID NO: 430362 - DNA, 146 bp, Oryza sativa
cctgatccgggctattccaacatgcacggataacaatactcaaaactttattggagctcctgaacggtgataacccaacgctggcgggtaatactgacactactcatggtgacattgctaatttgcctgccagactgtgctacccc

SEQ ID NO: 430363 - DNA, 371 bp, Oryza sativa
gttgtaggaccacagacccacaagctatattgatgtacgtatttacatatgtaggtcctgggatacggacctggtaacctgactacaattacggtactcgcaagcacacaaatgaaacgaggacacattatgttaaaatggagcatacctcaaaaccggatacaagggcacatacgaagatggacggaaagactctatctccacacgaaagctatgaacacaggaaaattgcctacttggtttactctctttccccttatcccatcaacagaaatacgggaaactgcattgcgacagggggttgatacatagtgaccgagtgaccgaaattttgaagagccctatgacccttttacgtttttaggttttta

SEQ ID NO: 430364 - DNA, 257 bp, Oryza sativa
ggattcgtcaagctcatttcaatctgaacccaaacatggtacaggcaggagggagcatcacaccccctttggaattggaccgggcaaatttgaaatggatgggatataaaacgacagggtcacaactcacatgggcgggtattgggttgaacttcgggggtacagaaaccttgggggggggaataccggggggaaccatttttaagctcgcccaaaaaggggcagccaaaccctggattgaaaaaatcagggccccc

SEQ ID NO: 430365 - DNA, 446 bp, Oryza sativa
tttttatcaccaatctgcttcaccaagaatggagttagggaggcagagccagtggctaggagttggagggaacggggatggtgcctcttcttggctgcttcagttcttttttcctctcggccacaagcaaatcagccaagactctgttttagatggcgccgaaggccacggtgaggcagggttcgacagagggatagccgtgacactgtacatgagggcaccagaggctgccattacgccttcgaggaggtgggggatgcttccatggtttttctcgcaccggtgggcgaggcagccgtgatatctctcctggatctcagtaagcaagcaagcacgttcccagtgctatcgaggaggcagtgacaatgaccctgatggtcttcagcgaggcatatatgaattcctttgacgcaggtggcgatgcagtcccgacgctaatcatgttg

SEQ ID NO: 430366 - DNA, 329 bp, Oryza sativa
agggaacccaagactagtttattgcacccagggtcatttacatccacccacacacatagtacaagctaattaacaagcactagctaatgcaccatcagttcaattatagtacaacaggtcaaaaaatatatacccaaccaaaactttttacattaaccgcactagaaggctactttttttggtggttttttttagggaattagtatagtctagtatgagcactagctccctcaagcacaaccaaggcaaatttaatcattctactaattaagcgaacagggacagcatgtcagctaaacactagcacatattggtgcttcgtctttttg

SEQ ID NO: 430367 - DNA, 339 bp, Oryza sativa
gggaaaggaaaaaaactggaaaattttaaaaaagccaaaaaaaaggggaatggaaaaaggaaaaaaaaaaaccccgaaacattagggaaaagttttttaaaaaaaaagggggaaaattaaaaggggggggttaatttgacaaagggcctgttttaacaaaatggcccaaaaaaaggttaacccaaaaaaactttccctatgaggaaaaaaatttttagggtttcccaccaccgggggaaaataaagggcctttaacccccctttgggaggaaccccccctgaaggggggttttagaaaatttgcccccccggggcttttgggcttttttaaaaaccggg

SEQ ID NO: 430368 - DNA, 383 bp, Oryza sativa
aaacccaagcggggatggggattacccccccaaagggaaaaaaaccccgaaaggggggaaacccccgggagtttttcccccgggaaaagggttccccccaaacccccttttttgggggggccccagcccctgaaagggccccgcaggttagctgaccccgcccgggctttggggggcccaacaaaaaccggaggctccttggacccggggccccagaaaagatcgcccccccccaaaaaattaattccccattaaaaaaccccaggggcccccaaacatggggggacaaaaaaaacccccccccccccaacaaggggaatattcaatccaacgggggggggccccgggcccggccctggaccccccagcctaaaagggggggg

SEQ ID NO: 430369 - DNA, 177 bp, Oryza sativa
gcagttgtgcttgtttttcttataattcatttcttgcaagctccaattttgaaaggcccacttccaccgccaaaaaggagaaaggatccaaccaaccggaactgggccaggggaaaaccgaccccaaggccccccgcaggccaaacagaaagcccccccccgcgcgagtcccgaaag

SEQ ID NO: 430370 - DNA, 94 bp, Oryza sativa
gtgtgaaggatcaaccagccggggttggtgggatcagacggtcacgctctgttcatgctgaaactgttcttgcctgttttacgcgccacgccca

SEQ ID NO: 430371 - DNA, 316 bp, Oryza sativa
ggcaaaacaagaaattatccattaacttaccaccaaaaaaaagccgccccccgaaaggtaccccccctttgggatatttaaccagggcaggacgctaagtttttttacaaaacagcccttccattctccaaaataaaaatcctagacctagagctaatttcaaaaaaaatttcagggggaagattttccaacatgccggcttttgagggaattctggcttcagggcccaaacatggttttacccgggaacagggcccccaaggatggggcccccataaacagccatagggggggcaaaattgggttgaagccggcc

SEQ ID NO: 430372 - DNA, 131 bp, Oryza sativa
aataattaatttttcaatcgaaaaaatcaataacatgggaaatgcccaaccaaaagatgataaaggacaaccagtgcaaaacaattgagaaaaaacacttcaacaaaagggcgaagtgccaaaagagacaa

SEQ ID NO: 430373 - DNA, 303 bp, Oryza sativa
tttttttgttttttttttttttttttttttttccttttttttttttttttttttttttttttgggaaggccacttttccttaatgcactgaactcttcctgaccattgattaccccctaaaagcccagcccactggacccacacacaaaacaaaacaggtttaccggtccatattactccgaaaggaccggcttaatacctttctcccgggggggcaaccacaagcgggggcccccacaatggaggggccaccctaaccccttacctaaataaacagccctaattaaataaacacccctccgg

SEQ ID NO: 430374 - DNA, 78 bp, Oryza sativa
tttttggtttaaagaaaggttctttttacttttttcttttttctttttttttttttttcaactcgggagcacaaattt

SEQ ID NO: 430375 - DNA, 118 bp, Oryza sativa
gttcagggacggtagaattcaaaacagacagcattatcatcaggggcaacagactagtcttagaaaaccagattgatttgccacataacatagggttacatcaaaccatggcctacaa

SEQ ID NO: 430376 - DNA, 298 bp, Oryza sativa
ggccaaaaaaaaaaatttatttttaaaggtggcccaaaaaaaaacccttttaaaaccaggggggaaaaaaaaacaaagtggaaaatttattggggggggcaatttataaagggaaacaaatttattaagggggggaaaatttttaaaaagggaaaaaatttacttaggtggaaaaaaagttaaggggaggggttttggaaaaaaaaatattaaaaaaatcttgggggaatccaaacccttaaaggggaaacaaaagggggggcttagggaaaaagacccccaaaaaataaaaatgggg

SEQ ID NO: 430377 - DNA, 176 bp, Oryza sativa
aaggtgggggcacccaaaagagggatttaagggctgaaaaaatccaccaacataccggaccaaaacctcgtgcattacaaaaccgagcactgacacaaataaggccaggccagaggtttttaagagcaggaggtaccataagggtaattcagcaacgttataatatcttgcacagg

SEQ ID NO: 430378 - DNA, 296 bp, Oryza sativa
attattagggaaaaaaaattgataaaaaagggaacaaaaccgggcaccacagtcacccaagggaccaccaagggccaaaaaaagctaaaaaaagggcacggcgggggggaaaaaaatgacgaaaacaaggggaaaaaaaaagactggccagggacggagaacgcccgaaaaaagaccggggccggaaaaaacctaaactggggccgcagcgccccaataaaaaacctctaaaaaacccaggggaactcccaggaaacgcccgggcatactccagggtctaccccaggaactgaaag

SEQ ID NO: 430379 - DNA, 377 bp, Oryza sativa
ggactacaaaaggggattctttaagccttaatctcgaaataatccatggacaagtcttgccattgtaatacgtctcgtacgctaacgaagcggcctttccttgtcacaatgtcacatgtaagatggatgtatacttggaaaattacatcaacgaatccgggagtaattcggcctgaaaaaccgtatatccaatcctgactaatacaagcaagtatggcagttccctatacagttatcgtgaagaaatagagtttcagcaaaacagccaatcccaactgcaacaagaatatccctgcaacgatcaagaaccatcgctctccagaatttacaatgtgagcgcgcaaattcatagcaacgaaggtagcagacataaaccc

SEQ ID NO: 430380 - DNA, 272 bp, Oryza sativa
gtaaagatgttgccgttaaaatcacttgccttcataacttgggagtttttttagcctataaattgtgagttacatgacaagttacacgcccagcgcactgggcaaacacttctcttgattctttggtaaatctacctctacagtcggaaacaaaatgagaacgtaccaaggtgatgtcacaaaaatttggaccaccttcctgcaaaaatcatttgcacagaaaaccttggccaacccaacgaccacaggtccacaggtgtgaaggaaacccc

SEQ ID NO: 430381 - DNA, 436 bp, Oryza sativa
gtatgtatgcttttaatattaatcgttaatcgcattgttttttggctcacatgaagaaagacttacaatgttttaaaagatacaacccctgccactgattattttcctacagacagggtggcaccaatctaaacttagcacacatatggaacaattttgctctgcccaaacacctacagggggaccttcgagacactagctgggccaacataagaatgatcgaacggccattgcggaggcactggtaggtatctgcatcctgacggacagtaatggaaccgcaacaacaggggccgctgcaaaccagactgtccactgaaaaactgagagtcgcacttgcgggtatgcacgactgcaaccattaggccgcgttcagagtgcataccccctaaccacctgggatggcgacccactgaaactggggcgaaattccccc

SEQ ID NO: 430382 - DNA, 299 bp, Oryza sativa
ttgggggtttttaaatttttttttttttggctagcaaaagaaaatccccaaagaagaccccagggggcatcagaggtgagcatcacaaacacgaggaaagggccaaaccaggaaaaagggggccccccccaacgacaaggacgggtccctccgggtggccaccctaacaggttaccaagacactccacatttctgcatgggggatggtaaaagaaggggacgggggcaagggcaggggggaaaccggcaacgggcccaaggaacgagaacgggaggggacccccctaagtatacccccg

SEQ ID NO: 430383 - DNA, 455 bp, Oryza sativa
gtaccgcatgaacaatttgattaatcagctggtcctgagtcctgacaagcaagccgaccagataaaaattaacaggagactaataatattacattgtcaaccttcatccagcctctaaaacatcctaaactggctgagaatgcggaatgctcaactagtcagaagacgcattacaagacgcccagcgcttttgttcttgcgccgtatccaggacatgcggacactttgggtttaccaagcaagcagaggagcatacaattcctaatcgcccagcctttctacattacacgccagccctccctacgctctcgattccaaggcaagcatgatcttcttccggggacccatcggaatgcccaaagctttaagatcactgtcagtcatgtgtcttagggctgccatgtcaacctcttctgcctggaaggtaatcgagtacttctcaagtccaagagatt

SEQ ID NO: 430384 - DNA, 174 bp, Oryza sativa
cccaatgatgtccccaggttgctatcagggtgtgcattcgttacactaatgaaaatggctaaagaaaaaaacggggacaaacacctacactttgtggataggacatgggggattgggtacccgcgtccaaggaaaacacccatgttccaaacaaacactgggggcgtgggcaaa

SEQ ID NO: 430385 - DNA, 284 bp, Oryza sativa
gaaagactactaaatattttataaattcaaaacaacaactactccgtagtagggtactactccacaagcgattgaaagccaaaaaaaagatactactaattgattgattggttgattgattgattaaggggatatatgtgaatgaagaatcaggcccagactctttttttggggataagggcgaccggcttgaccttggctatgcgagccgggacgatgaagtcattggcggggaggccccccgcggagggcgtcttgaggtcggccctgacctggttgggggc

SEQ ID NO: 430386 - DNA, 394 bp, Oryza sativa
ggtatatacaccaattctgaaaagtcactaaggcacaatgtatgcagacagaaggtctgcttgacagaatctatctttctgaagaaagaaaaaaaaagatcatgagaaaagggcaaagactgactgcaaaagcgcatttgtatgccactacatccacagcattccaggtagacaagatcttgtatgatgttacccgtttaagccctggataaaatgtgacaaaaggtactacaagaacaaacaaacacgacccagctaaagaataaagcactgccaaatgctaccgtcaagttagtcctggagaactagtctttgggccgagcctcatccaacgaaagagccatggccagcattatctgttcttcgaaactataaggaatactgccagcaccag

SEQ ID NO: 430387 - DNA, 332 bp, Oryza sativa
acaagggggaaactgtttttgcttattattcaacttttaaactggggggtcactttggaaaggtgggtccaaacacaatgggtggtcaagaacacccaattcccttagaaaaactagcttagaagggcttattcactccacaaggtgttcctggtgcacacagggtaccaaagggttcttaagaagcccaatggttggtggttaagaaaacaacctgcttagggaagtgaccaaaagaatctggtgggttctcatggacaagattaggcctgggagagctttccaggaggggattttcttttcaccaatttttcccagggatcggggggttt

SEQ ID NO: 430388 - DNA, 457 bp, Oryza sativa
aaaaacaacatggcaacacggttattcagccgaattaaccgaaaaaaatccccaagatttcagcattggaaaagccaacagggaaggacagtttattaaaaaaacagaccccacgcaacagggggggccctcaaaaaacctcccgggcaaataaaaacgggggggggaacaaaccgagggggggggccttctcccggccgaagtctgggggcatccaccggggggggccctaacagaaacttcctgtccggccggccggggccctcgcccggaaaagggaattcggggccgatgcccttgaaaacaaggagggggccggcgagccccaaggggccccccacggcagggctgggggggccccaggggaaggggaactcggggttttgggggccggggtcccactcctggacccactggttttggggccccttaaggccgccccccattttttccggtc

SEQ ID NO: 430389 - DNA, 290 bp, Oryza sativa
aaaacatgggaatgcgaatccaattgtttatggacagggaaaatggattaccgtctatacaagattgtacagtctaaaaccatgaacagaaccaaggtagccaaacacttatatggagcctgctggaaggtcaacaaaagtacacccagctgggtgaaccaaactcctaacgaggatcggggaaccaccaaccataacgctgaaaggtgaaaaaccggaccaatggtaggttgaccatactttgcactagctatgattgaggagactaccattttaatttcaccggggag

SEQ ID NO: 430390 - DNA, 294 bp, Oryza sativa
aaaaacaaggcaatgcgcaactcatcatttatgtacagtaataatggtataccatctttactcgactgaacagtcagcagccatgaaatgaaccaatgtaaccaaacatgtaaatggggcaagggagatatacatgaaatgtacaccaaactgagtgatcagaattcctaacgttcaccacggcaccaccaaccaattagagaaacctacttttttccaccaatcgtaggttgaccaccatttgcactacccatgctagggggtacgcccatcttattttcaccactgagaccc

SEQ ID NO: 430391 - DNA, 341 bp, Oryza sativa
aaggcaaaaccagactatgccttgggtcaagggccaagggcccgacaaagacttgcccgccacccaaaagctaaaaaacgggccaagcaaaagccaaacatccccctggttgcgggcctattatttgtcaggccgcatatgccagagaaccctgggcgacaacaaatcaaatcgaggaaggacactcatgttctattcaaacggggaacaaacttggggcaaaagcaaaaccacctggatggggagggcccgcttattttattatgggactgggatgcacaaaatttggcaaacacttcgggggggccacaattttcaggagaccggaattatggtttgga

SEQ ID NO: 430392 - DNA, 341 bp, Oryza sativa
aaaacagagcaaaggcatttgggaagcaaccctttgatttaaattaagcgcaagaaaattagacccaaaatttgggccagggccgggcccaaccaacccccaggatacaaccaagttttgttttggggttcggcgggcataaaaccctccataatttaaaatttattctgggaggggggttaatctactttttttggggggaaaaaacaactcccctggttttgcgggcccccatggggggggcccgtctaggtggggctgggcatgggacggaccagggcgaccacacgggggggggatccccattggggggcggcccaggacacaaggttaacgaacgg

SEQ ID NO: 430393 - DNA, 540 bp, Oryza sativa
aaaaaaaaataaaataaaaaaaaaaaaaaaaaaagaaaaagaaaaaaaaaaaaaaaaaaaaaggaaaaaaaaaaaaaaaaaaaaaaaaaaaaaaaaaaataaaaaaaaaaaagaaaaaaagtaaaaaaaaaaacaaaaaaaaaaaaaaaaaaaaagaaaagaggaaaaaaaaaaaaaagtaactggtccacagaacaaaactttaggtataactaaaaaaaaccttgcaaggataaaaaaaattagattaaaggtgaaatcaaatagaacaagaattaaaaaaaaaaccaaaaaaaaagagaacaaatagaaaaaaacaattccattaagggaaagggggagcctaaaatcaaaatcccaacagaaaaaaagaaaaaacttaatccactaaaaaaaaaaagatgggaaaaaaaacttaaagttaaaaaaaaaaagaagggaggataaaagacaaggaaaaaaaagtgaaaaagaactttacaagaaaaaaaaaactcaaattattttaaaaaaaaaagaagggggaaaaatatgggaaaa

SEQ ID NO: 430394 - DNA, 362 bp, Oryza sativa
ttttttttttttttttttttttttttattattttttattttttattttttatattttttatacaaaaaataaaaaaattgtatattaaattaatcatggaagaataatgtttttaaaaaaaaaaaaaaaaggggtaaaaataaaaaggaaaaccaaggggggggggggggattaaaccaaaaaaaaaaaaggctgggaaaaacaaaaaaaaaaccaaaaaaggggagaacctcagggggagccaaaaaaaacaaaaaaaggaggggtataaaaaagaagggggaccggaaaaaaaaagggggagggtttaaaaaaaaaggggaaaacagaagaaaaagggggcaaaaaaaggagccacacat

SEQ ID NO: 430395 - DNA, 404 bp, Oryza sativa
aaaaaagaccaaaaatacccaactaaagggaacaacacaggggaacacagggcctttgcccatccaagaaaaaataaactttaaactccgtttaaaaatcaaaggggaggtaaatttttttaagaggggggggggccttaataaacaaacagggggggggcccgttatttaaaggcgcgggggaacaaaaatggggggggggggggcaacggtataacttaacgacgggaggggggctcgccggggtggacaaaaccctaaggccgggggggaaccacggacggtcacggggggggggggttttccggaaggggggcgaaaaaccccggggggccgcgggggaatccgggcccggggccggaatcaatggggggaaaaaaggggggaacgggggggggtgtaag

SEQ ID NO: 430396 - DNA, 336 bp, Oryza sativa
ggggcacaaaccaagagaaaaaaaaatgggaaccccaaatttttaaaaaaacacaaaagggaacggaaatccaaaccccccaaagggtgaaaaaaccgaaccggcgtttaaaaaaaaaaaaaaccgcctcccccacagggtaaaggtccaaaaaaccccagggcccaaccacaaaacttggaggctcaaaaataaaaggcccacccaggaaaaaaaccccccccccttttagggggggagcacctagccgacccggggggggatttgcccggggggggtgagcaaaacgggaaaattccatagcctaagggaccttggcctaaaaagcataagggg

SEQ ID NO: 430397 - DNA, 539 bp, Oryza sativa
aaaaaaataaaaaatttaattttaataaaaaaaaaaaaaaaagggaaagaaaaaaaaaaaaaaaaaaaggtaaaaaaaaaaaaaaaggtggaaaaaaaaaaaaaaaaaaaaatgggaaaaaaaaaaaggggaaaaatacgaggaaataataagaaggaaaaaaaaaaggttgttaaaagggaagaacacaagaaaccagtggaaaaaccaaaaaattttctataaaagtggcggctgtttttgggggggggggtcggaaacagttgactaaaaaaaaaaattttataaaacagagggaagggaaaaaccatgaaaaagaaggggagggaaaaccctgataagaaaatcaaatttgtttaatgtaaaaaaaatggccaaataaaaagaaaaaaaaactcgggaaatttaaaaaaataataaagaaaccccggggtcaaaaaaaaacggaagaaaagagtcaaaaaaaaaaaaaactgtttaaaataatggtgggggattgaaaaaaaaatttaaattatttattcccccccctttttttt

SEQ ID NO: 430398 - DNA, 389 bp, Oryza sativa
aaaacgaaccttaaaaaatcttttgggagaaaaaacagggttaaaccctaaaattcagcaggaacccgggcccgaatatttccgggggggcagggcccccccgctaagggcccccccaaaatccgaaaaaaaaggggtataaaaaagcccatcccccaaggggccccccgctacaggggcaaaacggggaacaaaaactttccacgcaaagaacaaggtttaaacggggggctaaattacggggatatttgctaaacgggggccacaatttgggcaggctgcaccacgggggccccccccaggggcgcagcatacggggggggcccatcctgggacaacaagcacatgaggggggccccaagggagccccagaagttgccgaagagggc

SEQ ID NO: 430399 - DNA, 330 bp, Oryza sativa
gggaaagaaaggaccttgacattagggttccaccaggcccaaatgggggccccctgttcaaaacacacaggcaggaacaacaacaatactttggacacgaattcaaatttggaagtacaaggctacaaaaagaatgggggcgaccatttgggggggccgattaaccgaagccgtttgggagacactcccaaaagggccgtttgcaggaaaaactttggagctcccagggaagcccggaatattgccgccagccttcccaacttctggggcaggttatggaccaaggaataaaccttggtttaccggaattgggggccccccgaggggggg

SEQ ID NO: 430400 - DNA, 373 bp, Oryza sativa
tttttgggacaattgaaactcacgagtggatcaatagcacgatgtttgaaatatatccgaatgcaccaatcctgtttttacattacaagcacgcttacccaaggaaaaactgaggcaggacgaacgaacatgagtacacagaaaacacagcattagccctggcagatggtctatttcatgcctgatagatggaacattgacctttatgccagtaaagtagcggggggcgatgccggacactgaaaacgcgcactaaaagaaggcgaaccgcacactttgttccgtgccgggaatacttcctattttggaagaatcgtagtgacgagctctcagagtggtgccagaattctttttgacaatcagggcaaattca

SEQ ID NO: 430401 - DNA, 331 bp, Oryza sativa
ggacggcggcggtggggcgctcctcgtctcctcgcgcttggacagcctggggagccgctcggagatgggctggtggcggggtcggcggtggggtcggcggcggcagcggcggggtcgatgacggcggcggggacgggcgacggtggcggctgaggtgagtgcgccgggtggtgatgtgggtggcgacggctttgggacggcggtggtggaggccgcggatccggcggcggtgcggcgcccggcggtggcgtgagcacgcaggctccccgcggcggtcactggcgtcctccggcgcccctttaggcgttggcccggcgttggtggtgagggg

SEQ ID NO: 430402 - DNA, 287 bp, Oryza sativa
tttttgttttttttttttttttttttttttttttttttttttttttttttttttaaagaaaaaaaaaaaaaaaattgggggggcaaaaaaaaaaaaacaagcaaaaggaaaaaagaaaagaaagagaggaagggaaaaaaaaaaaaaggaaaaagaaaaaaaaaagaaaaggccgggggaaggaaagccttgacctttcaaaggggggaaagggaaaaaagggcaaggaacccacccgaaaaaaccaacctcccgggccggccgggcccggaagcccgggggggggg

SEQ ID NO: 430403 - DNA, 387 bp, Oryza sativa
ggggacgagacgaacgtacggaggactttcattacaaaaaaaaaagggactggaaaaaaaataacaaatttggggggacaaatgccccgggggggagaaaaccaacgacaaaaagcttaaaaggaggtgcatgggcgaacaaaaatcccaaaaggttaatgggaaacagaaatcatggggaaaagggggaccccctccggttaaaaaaaaaaggcattttagcattggccgtattaaaatgggtggtaaaaaatctggatatataaaaatgcccaagggtaaaagggtttacattatgagaggggggaagaacatgtgggaagggcttacaggggatcgatcacaagggactggtgtttttccgggctgaaaggcccgcggaagctg

SEQ ID NO: 430404 - DNA, 354 bp, Oryza sativa
aaaaaccaacggaagggcctttatggggaccgaggcccccaaaaaagcaggcaaaaatttttatcccgggacgggggaaaaggcctttctgggccccaacaagcccagggattgcaaagggggctggtccataacaaaaacagccaggaagggaagcatcagtttaaaaatcccccgggcggccggtttggcaggcctgggccacccccaccaaaacttaagaaaaggggggggctaatcttcaacgggggggggaaagaccctgttggcaggggccccctgggggggggggcccccaacccccagggaaaaaaatgtaaaacccgggaaaaacccaactttgcccccaaaggg

SEQ ID NO: 430405 - DNA, 345 bp, Oryza sativa
gggggacaacccaaaggggaagaaaaaaaggaaattggattggaaaaaaaaaaaaataggcgggggggttttttcctttggggaaaaaaaaaaaaggggaggccaaatttttgggacaaacaaaaggggggcccgggaaaccttgaaaaattgcaatttgaatggggaaaccgaaaaaattggggggtgccggggttgcgcttttttttttgaagctggtgcgggtgcggactagcgcgccggggggcctggaccaaaaccctggggaagtgaacccttgggggagaatgtgaaaccccccgggggcggttcccgggaaaaaaaaggaaaaacctctgggcctaa

SEQ ID NO: 430406 - DNA, 536 bp, Oryza sativa
aaaaaaatgattattacactgaaatgcacattaaatcacaacgaagctgcacagaagtgataattttacagacacatcaccacaacaattcaagaataaaaaaaattaacacacattccagcattcagtaagcagcgactgtggcagcagagaaatggggatgtggcgaccggcagtgttcggtgagcgacggtgtccatatggtctctgatagtatcagaatcaccatcagctattccgttcagataacagccctgaaaaattgaagaacaattcacaatctatcacatagataacaccagaaatttactaatgaaaatgaggaatgaaacacaatgtactattaagtgtcgtgcaaaaaaggatgcttaccgtgatattaccacctaacgacactcttcacaagtgccatgaacagctgtaaatttgattggggtatgtatagtcagagagcaaaggccactcaggaataccttgttgttaagcaacaacaatacgtttagcgcaaaggaacatttaggcacaattgttagaga

SEQ ID NO: 430407 - DNA, 416 bp, Oryza sativa
gcaggtagcaatgtctgccacaaacctacagcatttgattagaaagcatcttacagtgcacacatatttacaagtacggggaaggaagaacgccaaagatttttggcagcctgatttaaccctccctcacaaagggaatctgcatcctagagagtttgttcatcacagatcagctcataccgacgacattctcgaatccattctccttgatcagatcagtgaattggttcaggtagctcacaagcccacctagcgatttgatcagctcatcacctttttggcgagtggtttccatagaatccgatgagatagcaaggttatggttctcattttcgcctgccttctctttgagtagcatatggatgtgctgagcgttctcttgtaacttgttggccagtttacatgcatcggtttgg

SEQ ID NO: 430408 - DNA, 375 bp, Oryza sativa
caattcaaatcatacaatttttttgcagaatttttcatataaacatgttcactttttcacatgaatcttgtgagaattttcggtggtttaaaaggaggcctaataggcgccgtgacacgtcatgcatgcgtcatcacatcccggcaggtctcccgtctttcctcgggtcgctgacggcggtgagcatcccgtggaagacattctcgtcgccggcggcggcgaccggcgtcagcaagtcctgcacgatgaactggcagacggcgccggagtccgtgctcgtcagccggtggcccctccgccgcaggaactccctcgcctcgccgttgagctcgaacacctcgccgtcgaccaccgtcacgttctcgtcggacgcgt

SEQ ID NO: 430409 - DNA, 496 bp, Oryza sativa
gaaaacaaaattatctctctctttctcctgcgctcgaacgcagccttagaaaacaccagagatcaaaaaagaaagggaagaacacttatcccaaactaattgcattttacagttactacaccgccattttacagttacccctctcgcccggttgattccaactaagatattcagacaactctggcgctccgtccatggccatacccatggccaatggcgcggttcagcgccactctggtcgtctcgtacaccggcagctcgtcccggtacgcggccccggcgggagcaatggcggcgaagttctcgagctcgaacaggtcggagctcgcgtcgctgctctcgtcgtcgtcctcgtcgctctccatctccatccgctggagcagcatctgctgcaccgcctccacgggcaccctgcggcggtcgaccaccgtcgacgacgccagggactccgtgtcgctgtccaagaaccgcacggtccgcttcgcctgcccgcgcg

SEQ ID NO: 430410 - DNA, 459 bp, Oryza sativa
ggggaaccaaaaagcagcagatgcagcagcattccttttagagcaaggccaatatgaagctagcactcctaaattagctataagcatatatggagaagagatgagaggaggggagagaagagagctacagatttgttagctggagtatgggctacaagacagtactgatggggataggatttttttatatgaaactattatatggggagactattagattaacaggggatggggggccaatttttagagctggcagttgactatacaattaaactgggtcttaaaaaaaggcagcagcattaagccgccggcgacgataccggcataagggcggtggtggaggggaaggtatccagccatgggagcagcttggcggggacgaggtccgggcggtcgttgtgggggcaggggccgacgccctccaacatggggagcgtcacgttggggagctccctgggg

SEQ ID NO: 430411 - DNA, 354 bp, Oryza sativa
aaaatatggaggggatgattttggaacattacaagctttggggacattaaccaccacaaacttcccaaaagggaaggttactttttgaatcacaaaagaaggcaacagaaacagccatacatagtttaaggtggttttagcctaagttaacaatttaacattactaaacctaataaaaacttaaggcttactaccaaaactgggggcctcctcatacttacagaaggggttaatatatttttggcccccattcattaagagattcagaacaacatcagactgacagggataacaaggccaagaagaggcccaatttttgccttaaacccaggagtttcattaaagccccaaacg

SEQ ID NO: 430412 - DNA, 566 bp, Oryza sativa
ctcgaccgttcccttctcaggatcatggagatgaagaagattgcctgcgccgtccttgtcgctgcctcggccaccgtggccctcgccgtcgaggcgcccgcccctgcccccaccagcgccgccgccacctcggccgccttcccggcggtcggcgcggtgatcggcgcctccatgctgcccttcttcgcctactacctacagtaaggaagggaggaatgatgaaggtgttgcgtgagtgcgggtgtggaggagataaaaaaaaacacttttttggggccacccgagggaccacccctggcggcccctccatagatcaaaggcgcctcttattattccaaaaaccccccctaatcataagtcgaggtagaccgattgatttgtttggatcaccagggaacatttttcccggggtggatggcaccccttggcccatccctgatcatgagggtggttcctaggggaatggcccaatttttttttgtttttatggggggagtttttttttaggtgggagggtttaataatgggggggccctgaaacccaaacaaattttttgtttttttcc

SEQ ID NO: 430413 - DNA, 308 bp, Oryza sativa
aaaaaaaacaaattttaaaaaaaaataaaaaaaccttatttaattgaaaagggtaaaaacccggaaaaaaaaacacaattccggaacagattaaaccttttttcaaaacatcggaaaaccaaccccggggggcaaaaaaaaacgaaaatttaaaaggaaaaactacctgcattaatggaaccgggaaaaaaaactgaaaattttatgaaaaaaccccaattttacaaaacctaagtgggttaaatgaaggggattcctcacccggacccgggggtcaacccgtaaaaaaccggccgggccctggcggg

SEQ ID NO: 430414 - DNA, 231 bp, Oryza sativa
tcgcgatctagaagcttctctcctctctctcaactccggcgagaggaggaggcggcggtggggcgttcgtcgggagagagaccagggccggggggctagggttcggccgttcagagaggcggcggctgaggaggaggaggaggaggaggagggggtgaggaacgatagcacctctcctcgagtacaacattgagggggagtttaccgttgccctggcgctccccctccgca

SEQ ID NO: 430415 - DNA, 329 bp, Oryza sativa
atctcaaaaaccccttttatatttatgattcatagcaacaatatcttatttggatttgatttataaccgggggattagcattttattgcctgaattattgggggtattatttatcaaggctttgaacctaaatcatcaatgggtcctacaatatggaaacctttgggcacccaatacaactaaatatgcccatcaactgggtagtctgcagggggcttcttgattggttccctcaacaatcgcttttgctcttttagggtggagggaacttcatcataaacatcagggaaaagttcagcgggggggggttttggaattttttttgctac

SEQ ID NO: 430416 - DNA, 365 bp, Oryza sativa
agttaaagaatatgttttaattaataatccagatgctacagggttttggggttcattcagtgtaaacacgatatgatcggatagtgtgatactgaatgaagtattcctgttactacgaactgaagggacagggccagctatgaggttttacaaacctacaccgggtacttattctgttaattggccagacattaataataaggatcggaaccatgtttgctgtgaaagaacaacaccctgtgttgaactccaataaggctaggcaaccgcaaggttgcgttttgaaaaacataggattggattggcctgtaccatggctgtgaaggcgacaaccaggtacgacacccttactgatacaaaacttg

SEQ ID NO: 430417 - DNA, 408 bp, Oryza sativa
acggccggaacacaattaaccaacaggaggttggatgcaagggccggagatgcatcacagggaacaggttcacacccccccaggcggggcagggtcatattcggcccgggaccaaatttttggggtcaacaacaaacattccaaacaaggggggggggggattattacaggggggggccaaacaaaacaaaacccttagttggggccaggcgggggaccacacctggcggccccttcattgaacaggggggccttttattattccaaaaacccccctcacttaaatggagggatagacagatagatttgatttgaccaccagggaacaattttccagggggggggggaaacttgggaacatttccagagcaccagggggggtccgtcgggcacgccggggggggcctt

SEQ ID NO: 430418 - DNA, 304 bp, Oryza sativa
aggacaaaaaaaaaaaacaaatggttccgcaaacccaaaaaaaggaaagtaagtatgggccaaacatttaggggggccaagcaaccaaaagctgggggggttttttaaaaggattaagctcaaactcccaaacagggaaacgaagggtgggcccaacccccacatgaagcccaaaagggggaacggccacccaaagggaggaaccaaaaacccggggacggcaaaaaaaaaaaaaaaggacccaaggaagggaccccctaaagactggacccccttaaccccctgggagaacccaagggggggt

SEQ ID NO: 430419 - DNA, 352 bp, Oryza sativa
gggaaagaagcactttttcccccttggaaaagggggggggggaaaaaaaaggccagaatttggctttccattcaccaaaaaagggggtcctgggtcctaggtaaaccaagaaggggagggtacggggccacactaaccccccaaacaccccggcgggtttcggtaattacacgggcctttaaggagaaacgcattaacccgcagacaaacccccaccccacctggatactgggggggtaaaccccggccatgggggggggggctcatactagggcaaaatccgggggggggcggccgtcgtcaaaattgggggggtatctgagcgcgtcgtaagggaagctgaaccgggggg

SEQ ID NO: 430420 - DNA, 77 bp, Oryza sativa
gaattaaattccattttttgtagattaacacatttctttggattacaaaatgcgataacaacaagaaaaattaacca

SEQ ID NO: 430421 - DNA, 145 bp, Oryza sativa
gcaaattgaaagccttattaattaaagactctactgtgtgatattacaccatggagcaggggtacaaatacgccagatcgttaaaagagggacagatctagcaggctccatacaggggaccgattaatttatcgaattacagaat

SEQ ID NO: 430422 - DNA, 429 bp, Oryza sativa
ggggtctcaaaataatgggttgaaatgcatagatatccatgttcagttaatcgatttgatgactgtagtacatggaacaagcgaagataccaatttaagaaacagctacaatcgagatgaaattgaacattactaactatgcctacatgcttgggcaaccaaaaagtcgtgataacccctctgacgattagcaaataagccagctgactaggagaccctgagactgcataaaaaagtatattaatgatgacagttgtacatgtataatagcactaacaaaaacatagtgaccctgtgaccctgagcaactgggctttacatcaaagcactttcatgtgtccgccaaatacatattgatgactagtttcataatatcacttgtaaaaacatagtttgaatgatcaatacaagttggaaacaaggtaatca

SEQ ID NO: 430423 - DNA, 345 bp, Oryza sativa
ggggcccaataaccccttcccaagtccggtttaggggaggaaaactggaccagttaaaaacccatgggaaaaaactttcccccaaccagtttattttttttgcaattcccccaaaaaatccctttccaaaaaagatccccccgtccatttttttaccaagtttttttccggtaaccccaaaagacgatttgtccaccacccacctttttggccctccaattgggtttttttaccaatttggcttcctcaacaatcactggtgggggggaaacgtttacaagttcttctttggcggggtaaaaagagactcccctgggcgggctgccaacccacccccctgccaaa

SEQ ID NO: 430424 - DNA, 330 bp, Oryza sativa
attgatactgacattttacacgtgccgggccgtggactccaatgaaccacccgtgcagcacaggcgggggacccaaagtgaggggggcgagccacccgcaccgaaaactagaccccaacaaaagggacagccggagggagcgccaacattttctccgaccaaagggaaacgcaaggggggggagaatacactttaactgagacgacatgggtaaaacgcggggaacatacgccccagagtaactaccctggccggaacgaacataggagaaatgggcatgcaagtgacccgcccagcaaacaccaggcagggagcttccaggagccggcc

SEQ ID NO: 430425 - DNA, 358 bp, Oryza sativa
aacccaaaattttgttttaaaccccaaaaaaaaaaaagaaaaaaaatttaaaaaaaaaaaaaaaaaacccccagcggggggaacgaaaaaatacaaacacccccgggggggggaaacaacccccggggggaaaaaaaaaacccacggaggaaaaaacccgggcccccgctccccccccgggggacaggggggacccccccaaaaaaaaggcccccgccccgggggggccccaattcttctctaggggaatagcaacaaaaaagggggaaaggaaggaaaaaaggttcccccggggaaaaataaagtaccccacaagacaacacaaaaagagaacccgcaaggacaaaaaagaaaacgg

SEQ ID NO: 430426 - DNA, 409 bp, Oryza sativa
aatggaaaaccatatagtatatcccttttgattggggagggggggagcaaaaattttgggtttttattaaccaaccaacccatgggtatacaaaaaggggggggggattaatttattacacaaaattccacacgggatatatataattcccggccacagggaaccccaaaatttttccgggaaacccaacggagggggggtttactaacgaccctgattcacctaaaaaatttttggaaggaccctttttagggcaaaataataaagggcaatcggggaagggtaagcattacctatttggacggattgaaaccgcttttcctggccggggtgccgacccatttccgtgaaaaacgcaaacatgctagaaaggtttatttggccgtttccgaaacaatacgttgccacc

SEQ ID NO: 430427 - DNA, 315 bp, Oryza sativa
aacagcccccttaatagttttaatttcaacacaagcaaatctgattccaaagtccgggggcgggtgtactcgttcatttgttactgcccccatttccaatataatacaacagtgaaccgaatgtacacgtacaacaatgttgactatagttgattgtaactacacaaatgatcgttacttgctgtaagctctgccttttgtgtgtaggcaggtaaggggggaaaataatcggtcatccaaaattactggatcgttgcatatgtttcttgtttcattttcattaagttgctctctatgcctcttaacacaggtcta

SEQ ID NO: 430428 - DNA, 421 bp, Oryza sativa
tgcacgcgcgcgtgcgcgaggaccctcgttcgcgggcgcccttttttttttttgggtcgattgatgctcatgggtttcccagattctggcaatgttgaactgccagggcaacatttgcatgcaattcatgcccggctgcccctatcaaatactccatgcacacagcattcgaactcttccatcatacataacctggagataccggtccatagatgctaggatcagggacatgcaacaggtcgtctaacccaccaagttcttactactaacttgttgctggagagtacgcatcttacacgctaagacaacggcgcaggaaaagaccggtcgcctcagcggtcttgacaacattccttgaggacattgaccaggttagccccggccctggcgctctcacccatttggcattgaccctcactct

SEQ ID NO: 430429 - DNA, 374 bp, Oryza sativa
ggggggaaatttggctaaaaaaacaaccccgggataggggccccatggaaaccccccacccttcctgaaccggaaaagcctgaaaaagggaaaaagggaagggcataaacccccaaagggcccaaaaccttggtgaaaaaaaaaaacgggcaaaaaaaggcccggaacccaattggaaaaaaaaaaaccggggggggagtttaaaaccccccaaaaaacattgggaaaaagagctccgggcccgccccgggttgaaatccaccgaagggccccttggatggttctcggccccccttgagctttaaaagggaacccggggcccgggggatttcccaatggattaaaacactttccggttgccccaaggggggggg

SEQ ID NO: 430430 - DNA, 389 bp, Oryza sativa
tttttttttttttttttttttttttttttttttttttttttttttttttttttttttttttttttttttttttttttttttttttttttttgggggggaaacaaaccgggtttaaagcccgaaccgaaacctggttaacccgggggccccaaccccaaaccaaagcccctaaggcggggaacccaagggccaaaagttttgccccccgaaaaaaagaaccagttcccccccagggaaagccagctaggacccatcccaaggcagggggggggcccaaaaaggggcccaacttggcattggccccccgggacaaaaacctggggcaaatgggccccccgccccccatgagggtcacactggcaccgaagaaacggccccccccccccccc

SEQ ID NO: 430431 - DNA, 430 bp, Oryza sativa
aaaaattaaaattaataaaaaaaaaaaaaaaaaaacaaagcaacaatgaatagtactacaatactaaaactatacaccgcaggtaagcaaatcacctggcggctaactaatcatgcaaaaaggaaacctgggtacacataatgaaatatgggccagcgagccccacatgggcaactagggacaaccaatcgggccgggtaattctgtctatgtggtcggcgactaaatttttgggttggaccactaccataatttccctggatcctgaagttcacctttaaaccagccaagcatcacaacaacccccaatggacacagaaccaggtaccgcagcggaagatggccacgcccgcccatgaggaccagcccctgaccggcaagggaaaggccaacaggttatgccaccggcagcggactcgtgggccgaccc

SEQ ID NO: 430432 - DNA, 396 bp, Oryza sativa
cccaaaccccccacagaggccacaggggcccgggccacaccacccgggcccccgggttttttaagacccccccacccccggggccccccccccccccctttttttgggttaccccggaaatccttccccccctgggccaaaaaaccccccggatcccaccgggggcgggggggggggcagggtacccccccccccaaaaaggcccccggggaaacaacccccttttttcccggcccccgaattggggggcccccccccaaaagggggggggggtgggcacccccaaaacccccccccggggggggggccccctagggccccccaccccctctggggggggcccagggggccccggggggggagcaggccaacccggggcccaccccccggggaacc

SEQ ID NO: 430433 - DNA, 366 bp, Oryza sativa
ttttggttttttttttttttttttttttttttttttttttttttttttttttttttttttttttttttgttatgttggtgttcaagggcaaaacctagggaaaaacagggaaaaaaaaagccccccgcggaaaaaacaggggcccaacaccaaacccggggggccccaaaaaagggggggaaaaaaaagggggggcggaaacccccgagggagggggacacggacacggggcctagaagggggggaaacaaaacacaaagggggctccgagcaaaagaacccggacgggggaaacaacacacttggctcctcccacaggagggccggcacaaccccccaggggaagccgggggcgcccctaccccc

SEQ ID NO: 430434 - DNA, 427 bp, Oryza sativa
gggaggaaaaaaaaaaagaaagaaaaaaaaaaaaaaaaaaaaaaaaaaaaaaaaaaaagggaaaaaaaaaaaaaagaaaaaaaaaaaaagggaggggaaaaaaaaagaaggggggggggccgacccccccggggggaaaaaaacaaggggaaaggaaaaggtggggggggggggggggaaaaacgggggggggggggggttttccccggggggcctccctgtccccaggaaaaaaaaaaaaaagaaaaaaaaaaggaggggcgctgggccgcccgttgggcgggcgaaattttaataccaaaacgggggccaccaaaccgaaacaaaaaaaaattaaaaaccccgcaaaagggggcgggggggggggggaaaaaatggcccccccgcgcccccccccaagtaaggaaaaaccaggggttactaaaaa

SEQ ID NO: 430435 - DNA, 384 bp, Oryza sativa
aaaaggggaccgaaaaaagggccccgggtttttttttttccccaaacacccagggcccaaaaaaaaaaaagggggggggtaacgggccaaaaaaaaacaccccccaaaagggaaaaaaattgggggggaaaaaaaacccggaaaggggccccccagaggggggccccccccgggggtcccccaaaaaaaagggggggggccctttggggggaaaaaagggggggggggaaaccccgaggggggccaaaaaaaaaagggaaaaaggggggaaagagccccccccccccaaaaaaaaaaaaaaaaccggggtcccgggcccaacgggggcccccccccttttggggaaaaacttgggaaaaaaaaaaaaaacccggggcccccaaa

SEQ ID NO: 430436 - DNA, 359 bp, Oryza sativa
cagaaccgcaacccaccagacagtatccaaccacaaaaggagcctaacgttattggactggtagaacgctcagcggtgtgtgatcaacaagttggttaatgcgtacacctctcaacgttagcactggggagtaaagacagtcgaaactctttcgccatccaagatatattcaacgaaacccccatacgtgttctctcgacttactccgatccgctacgggaaggtagggggggtcggattcaagtgaagaattcacacttgaccggcgtgccggtgggatcgatccatggcttagcgtgcaggaagttgccgactgagaacttggacgaggccgtcttgctgatcaccttcttgtaccc

SEQ ID NO: 430437 - DNA, 437 bp, Oryza sativa
ggccgaaaagatagttctcaggttgacaacagcacaagactagccaaaacccagttcaacattttgggcatattacaatgttactggctgccacagggcagtaagcccctagtaaaaacagagtaactggggtcaattacaaccggatcaactgactggattgatcgcaagaaccggggacgctgcagcgaacattatccggaccaggacctaagtttattttttaagggggaggggggcactaagctgcaacatgacaacagaagcaactaattaacatcacataaaaacatgggtatctacatgcatgcttggttatcttatggcttcaacaacttgggctaccaattctccctcatagcctgcattgcatgaattggtttgaatcaaaagaagaaccaacccattggaatcacaagtgcactccaaattctaga

SEQ ID NO: 430438 - DNA, 328 bp, Oryza sativa
atgttattatgggggtaaaatagttggggggacaaaaggaaaaagggacaacccaccaccccacagggagggaaaaagaaaggggggggaaataatacgagagggaaaacacacaacccctaaacgaccgagaaagaaaacaaaagagagggaacaaagggggggaaacaaaacaaaccgcccacaagaaaaaccgcgaaacggagggggcgaaaaaagagggggaaataaaaaacccggaaacaaaaaaaaaaccgaagaggggggggcaacctctaaaggaaatatgaggcctggggaggaagaaaaacgcggacgggaagggccc

SEQ ID NO: 430439 - DNA, 388 bp, Oryza sativa
aataaaaaaaaaaaaaaaaaaaaaaaaaaaaaaaaaaacaaaaaggaaaaaaaaaaaaaaaaaaaaaaaaaaaaaggggggggaaaaaaaaaaaaaaaagggcggggggaaaacccggaaaaacccgggcggggccccgagggggcccaaattttccaaaaaaggaggggaaaaaaaggggggggaaaaaaaggcaaaaagggtacccgggggaaaaaggtatcccggcaaaaaaaccaaaaaaaaacccggggggaaaaaaaaagggaaaaaacgggggggccaaaagggggggcaaaaaaaaaaaaaaggggggggccaaacgcccctataaaagagggaaaaccgggggggaaaaaaaataaaaaaaaacccccaaagggggggg

SEQ ID NO: 430440 - DNA, 307 bp, Oryza sativa
atacgcaaaaaaaaaactgcagaaaaaccactgcagaaccccacttagaaaacacccaatacaaagacgccgaaaaaccccaaaagaacaaaaaaaaagcggaaaaagggaaacggccccccgggaccgcccaaaccgaaccaaaaaaacctggacccacagaaccggaaccaccgaaaaccaaagggccaaaaccagatggaactgacagccaagggctcccaaccaaaaggagaatgcggacatggacctccacacctggggccggaaaaccccgaccgccaaaaccaggcgggccaaaccatga

SEQ ID NO: 430441 - DNA, 279 bp, Oryza sativa
gccatggacatacataaaagcgtactgacgaaatgcataataacaacatggaaagcacctgcgcaaaaaaaaaacccaagacagactaatgcagccaaaaagccgggctaccgctccaaaactgagcaaaaaagcattctggtatcccaggacgcatgcccaaaaagagaccagaccagccagcactgaggccagggaagaccgaagaacatcgaatcatggcaaaggcccaaaaaaccaccgccggacgacaaaatcgacgatgaagcatcaggacac

SEQ ID NO: 430442 - DNA, 291 bp, Oryza sativa
ggggaaaaacgggcccaaataggggaatttaaacaaagggccaaacccccggagggcgggaacccccccgagaaaaagagaaaaacccgggccaaggttcccaacacccccaaaaaaaaattgccggaaaaggggaacccggaaaaaaatccccgggggccccgcgaaacggccccggggaaagtcctcccaaagggggggcagggccccttggacacgctggcggggcccagcgcggggaccatgccattgttggactggaggagctgcagcgagaaggagtccgggacg

SEQ ID NO: 430443 - DNA, 421 bp, Oryza sativa
aaggaaacctagggtggtgataaaaaaacagcagcacaggggggttgtttggttggtggtgcttttgctgacaggacaggccttgtttcaaaaccaagatccagccccaaaatttgcccaatcagtcacaccgccccgggaaggaaaaacatactggtggggcatacggattcatggcgaaacccccatacagaacaggattttcagataatttaagcaccccagttttcaagcttcaagggccccccctcctggtttcattttaaaatcgaccacgcccacgggcgggaccacggaagggccccgggccttcgccccttttttccctggcacgtccacgggctggagggggggagccctttgggttttcaaaggattcgccctgatcttcataatagtcccccctggcgccataaccgga

SEQ ID NO: 430444 - DNA, 173 bp, Oryza sativa
tttttttttttttttttttttttttttttttttttttttttttttttttttttatattgaaaggaaccaaggaagttaaagaaaaaagagaagaagaagggggacgaaccagacgcgacccaaaacaggagaaaaaaagaaaggaaggcgccaaaaaggcagaacacaggccc

SEQ ID NO: 430445 - DNA, 372 bp, Oryza sativa
gggggaaaaccaaaaattcatggggggggggaaaaaaaaggccctggggaaaaaaaaacagggggcccggggaaaagccgggaaatttggattcccgggcccgggttccccgccaccaaaaaaaaaacccgagggggggggaaccccctggaaaaaacgggggggcggggggggggaaaaaaaaaacggggggtttaacccggcccccccaaaaaaaaaaaaggaaaaggggggccccccccccaggggacaaagggcctaaattggccggggaccccccaaacccgggggggttaaccccgaagaaggggaaaaaccgcccccgcccaacgggtgaaaagcccatggggcaaccaagggccccgggggggc

SEQ ID NO: 430446 - DNA, 392 bp, Oryza sativa
ggttctgtaaacttttcttctttctgtatgacaatgcattggattggacaaaaaggtcgctcttgattccagtgacgctgtctccagcccacaattctgtgggaagtaacaaaaaacggaatatacagaatctggccctgaaagtgctccaaagctacataaccgctagagctcccgaccgagatacagactgatgggggaagatcgatgcatatgtgatccacgcagacacatcttaaattttacaacacttacttgggtggttttaaaatgccacccctattaataatatcggctactcccgaccttttttacgaatacttttccaaaccggtttcgttcccgccccacatggtgggcccatttccccatttttttctccatccggggcg

SEQ ID NO: 430447 - DNA, 443 bp, Oryza sativa
aggagaactaaactttctccctccattattggaataacataggagaactaaactttctccctccattattggaatcataaccagagatctaaataaaataccttggtagctggatgaaaactattccataggagaactaaactttctccctccattattggaatcataaccagagatctaaataaaataccttggtagctggatgaaaactattccatgtcaatatgaagcgtacttcgaggcaaactcagcaatattcttattcgagctccctcctttcttcatgggttccttagctttcttcatcccctattagcatttttcctgtactctggcttcctctcactctctagaacctctctgatgcatctctccacctcttcttttctcaccatgccttccttgtcccgatgtacgtgtacaccatttccccatgcactttc

SEQ ID NO: 430448 - DNA, 387 bp, Oryza sativa
actcacttggaaggggtatttagattccttttttttaagggtaattggatccatgccactggaactttgggagaacaaaaaagggaaaattagaactttgccattataattttacaaaatttaagatatgccatcctgacccacatggaattgactcatggggattctacatgtcattgagataccgatgacatattttaaattttacaaaattataatggtttatttaaaaaggccactcctattaaaaatatggggtactcccgtcccctttttcgactactttcccacaccgttttcgttcccgtcccacatgtgggtcccatttccccattttttccttcatccggggcgaccgcaaaaggacaacggcagcagcggctcccg

SEQ ID NO: 430449 - DNA, 99 bp, Oryza sativa
aagggctcattttatttaaaaaataaaaaagaaaagaggtcccaccaaccaacgcttttcaaatcagaaaaaaaggcaaaggtgggccccaccccaaaa

SEQ ID NO: 430450 - DNA, 407 bp, Oryza sativa
ggggacgaggaaactcgattggcataaaaactgaattaggtgattttacatcacaacaacgggggcggccaataaggctttcctagggaatcaacatcccgggggcaggcaggtgagctacaagaacccagtttaagcaaaaaaaaacaacttgcctttgaaaccaggtgatctcaattttaaagctttaagcatggggcccaaatggcccaaagctaacaaagtttttaagggggaagtttaacaaaaaccttggggttatttttggaaaaaaaacaccaaagggggcctgccaaatggcatgggattggttaatttcactttttttttgaggctacctttggtgcccatgcttttccaacgtttgtttgaaatttccctggtgttgactggaaaaactcttttag

SEQ ID NO: 430451 - DNA, 402 bp, Oryza sativa
ggggaaaaggcaagggtcaaaaaaaattggttcacttggcccaaggcccaaaaaaaaacccttggaccctgacccggggggggccctgccccccccttttttggaccccccaagggcaagggtgcaaaaaaaaacaagccccccaaggggaacccccggccccccctggaaacccttaactggggggggccgggaacccttgggaaaaacaggaccccccccccgggggaaaaagacaaatttttcccccccccaattgcccccccgggggccggggacccccggggggggcctccccccccccggggaccttgggaagggggccccccccccaaaagggggggcctcttcccgccgggggaccccccggggcccttggggccctcccccttcccggggggc

SEQ ID NO: 430452 - DNA, 375 bp, Oryza sativa
cagtaagataaaacactggtgagaccctgggaaagtttaacccccggggggtctggccaaaaaaaatttaccacttaaattaccccctcacccatggattcagaaccatggaggggggaaacaatttcccaaaaaaacacagggagggtgaattttataccaccccaaaatgtttttttttccgcccccccaattaattaacatactgagaacggtttccccccaaaaaaaaaagggagaaacatggaggggacctttttcatgggccaaaaattgggttaaccaggctgaacgcataaaggtccttgagaagcccggggcctggtgaaaaggaacacaccctcaacctgacaaggtttggaagatggggttggg

SEQ ID NO: 430453 - DNA, 201 bp, Oryza sativa
gggggaaatcttaaaaacggaaaaaagggaatggaaaaaaaaacgggaaagggaaattttaaaaaaaaaaaaaacaagggccataaaaaaaaaatgtttttttttaacccccaaaaataaggggggggaaggcacctaaaaaaaaagggagaaaaaaattttggggctaaaaggggaaaaaaacccccgggggccgggaaa

SEQ ID NO: 430454 - DNA, 378 bp, Oryza sativa
aaaaaccccaaaaaactggggttgggggggaaaaaaaaaagaggaggcagtcccgggaccagaaaaatggatctaagggggaaaaaaaaatttttaacgggacccaaacaaagggtggggggccccccccggggccagggtaaggggatttttggcccttttttaaaaccccaaccagggggggccagggtttaaaaaaggaaatagggggaaaaccactcaaaattggggggggggacccccaagggggggggccaagattcaccccggggggcacagggggggcacagggcccccaaaggtggtttgggggccccccccccaacccaggggggaaagaaccgggggatttcccccgcggcccaacggggggggggg

SEQ ID NO: 430455 - DNA, 441 bp, Oryza sativa
aaattaaataagcaagcaaggttttcataaaaccataataagtagaaattggttgattgcataccaaaatctaaaataaataatacttccatgcaaagacttttatcacggaataagtagcccatgttaaaatgcctcaggggcttttgaacttctcctaaatgagacatgacaatatcaggaacatttgacaacgttaggaagcatttatccaagtactttcctagatgatacctatatgacacatgacaatttttaaatgcaagtgctttcctagagggtacctagatgacacaggacaatatcaggaatatatgccaacgctaggaaggatctatccacgtacttttccttaactgaagaacacaaggcatagggctccactttacaaatgtagccaccattggcgtgcccaggatagcaatcggttcatcaatatca

SEQ ID NO: 430456 - DNA, 320 bp, Oryza sativa
ataacattatgttcaattgttttctaaacttttgaaaaaaaaaaaaagaaattgtggtgggccctaaaaagaaaccccctggggggaaaccgtttaaccccacccacaatgtacccccgggggaaaaaaaaaaaaatgggcccctccaaaaagccccacaaccccaaaaattttcccagggggccggaaccttaaaattttaaggggggaaaacgggggaagaaaaaaccacaccctgggtccgggggggacacccgggggggcaaccacaaccccaaaggtgcaatgaattggcatccataaagccaccacgccggagg

SEQ ID NO: 430457 - DNA, 428 bp, Oryza sativa
  unsure (1)..(428): unsure at all n locations
aacttccaatcactggaactaaactttgacccacactgggctcaggtgggaaaaaacaaccttgctttttaaattaccctggaaaccaattccattttttagggaaatcccatgggcccctaaagcatcattcactagctggataacccacactactacaggtctatatattcttgcccctaaagcatgccacatgcatttggaggtgggcccgcccccaattcgaattccatttttttttacggggccgggaaacacaagaaccagaggctggcctagctttatatatatatatatatatatatatatatatatatatagggnaagggaaaacatttttcatcatagaagggggggtagccccagcagtagctgttgcagtagcaggcaaacattgctcaaaagcctggttgcttggccccagcctt

SEQ ID NO: 430458 - DNA, 188 bp, Oryza sativa
tttttggttgttttttttttttttttttttttttataacttgtttgtttttttttacacgacgggggaccacgcaggaaaaggcgggggccagcaacacaacgccggggagaggccacgaggccccagggccagggccgaccggcagcccccggcagcccgggcccaggcgcaaagggcaagcggccc

SEQ ID NO: 430459 - DNA, 479 bp, Oryza sativa
cataaaactaatagtaattaaagagaattttttgtattacatggaaaatcatcctcataagtcatgacattaaattttgttcagaacatcatgcacaaatgtaatctaaactatagaaaaaaaaaacatgcatctgaagttgccactatcattgccaccatcttccacattacagtcatcatcatattcacaagggatctttagatgacagttgtccaccttgtagtaaccatattgccccagatcatgatccatttatcttgtcaacctgcaactttgcgtgttggatcacagcttacaattgaagcaacaaccacattcttatttcgatttttccagcttttcaagaatacattagttccaatctccaatgaattggcatccataatgtccactatgttgcactgttgtttcttataagcattagaattattcttcccttgttgcatgtgatcattctggttcatgtttcctttatt

SEQ ID NO: 430460 - DNA, 296 bp, Oryza sativa
cgtgggaagtctttctaatttgtattgaaaataaattttgttcaaaggatccagcacagaggaagcccacactaaggaaaacaaaaacgtgcaccggacgacggcactaacataggccccaaagagcacattacagagaacagcagacacacaggggatccttaaaagagagcagatcagcttggaggaaccatattgcaccaaaggatgaaccattttttcagacaacctgcagctgtgcgcgccggtgcacagctcacaatggaagcaccacccgcattctaagcaccacccta

SEQ ID NO: 430461 - DNA, 101 bp, Oryza sativa
ataaaggaaaggaagcctgcccaagggaatttcaagaaaggcaagttccaaacccaaaaggggggccagaaaagaagtaaacaaacggccgggggggccac

SEQ ID NO: 430462 - DNA, 257 bp, Oryza sativa
aaaattgataaaaaaaaaaaacaacgaaaatagaaacaaaaaaaaacaggcaaacaaaaaaaaaaaaagaagaaaaaaaaaaaaaaaagggcacacacaaaaaaaaaaagggcagaagcaagaaagccaaataagctcgcccaatgcacctgcccggcggccgggcaccagggtccggcgagcaaacgctcaagcccatagagccaaacggaacggaaaacacccgacaggcaagagaagaacaccacgcccgcgac

SEQ ID NO: 430463 - DNA, 329 bp, Oryza sativa
  unsure (1)..(329): unsure at all n locations
tttttgttattggaaaaacattgggtttttttttaccgccccagtgttcgacttactttttatggacatcacttaggtaaaggcacccaatttggtccaaccggaaggagggcgaacgagactgtcacaaaannaaacagccaccacgaaccactgctaggcaaaggaaccccacttcccccgccggggccgaaaaaaacagaaaaagaccaggcggtgaaagcacaggagacggcgaggaggccccagaggccccggggggaggaccaacaacattccgaagggccggcccacaatcccaaacagaggagcatacagggcgggggccg

SEQ ID NO: 430464 - DNA, 338 bp, Oryza sativa
ggccgccctttttttttttttttttttttttttttttttttttttttttttttttttttttttttttttttttttaaaccaaaggtataatatccttttataaacaattaaacggggcttggaagggttaacaacgcttaaacacaaaatgttcctttgattaacccacgctaaattttgctttataccccccacttcaacgttacagtaattaccggcttttatgcacaccttgccgtttccggagccggagaagacgagacagtttgccctcgacgcggcagtaggggggggtttggaacttggggcccttggccccgggttagcctttgcccccg

SEQ ID NO: 430465 - DNA, 184 bp, Oryza sativa
ataagcaatgacattaaattttgttcaaaggaaaaagagcaaaggaaattaaactaaagaaggcgggaacacgcaacggaaggggccagaagcatggccaccagcacccacaggacagaaaaaaacacacccacacgggaagggaaaaagacagcggtccaccaagaagtaaccaaatggcccc

SEQ ID NO: 430466 - DNA, 354 bp, Oryza sativa
cgaattcctgtatcaaaaccaagaaccacccgggggccaatttgcgaaaaaccagcactggctttcttaagtcccacggcaaacccattccatctttacaaggaaagcccactggtccctaaaacagcagtccctagcgtgcaaccccaccctagccccggactttatatctgtgggccctaagaaggccaaatggatggggaggtggggccaccaccaattcaaattccatttttttttacagggaccggaaaaacaaaacccaggggctggcctaacccttgataggaagccatatgcccctacccatactaaaaaaggtaagggaaaacctacttcctcctagaagggggg

SEQ ID NO: 430467 - DNA, 403 bp, Oryza sativa
ggcacccctatttagcaacaaattgaagcttactcaaatcttacaaaagaagaattggcaacaacccaaactaactttaccaaaattttagcaattgccaaaccttgccataccaaaaaaaaaaaattgttaaggcaggggctagaataaaacaggccctgagcctttcaggcctttttgggcaccagccacgggacaacactaatccaccaagggccaaggttgtaagggacaggccctttgcaaccggcagctgcaaagggctagattgcccaaatttccctcaaaactagcaactgtttaaaggaatgcctttgggctagaaacaactgggcctcaagttttggttaatgcagcccatcgcatggacattagcccctcatttaacccggaagagagcccc

SEQ ID NO: 430468 - DNA, 383 bp, Oryza sativa
gtagtaaggaacatcaaattaatatatgttcggtaagaaatgcataaaacaagtcaatacataatcgcctgctaaaattcattactagtagtagatagcacactacaccatgttcttttcatcaaccgcacacataaatgtgaaatatattaattcatcagctatatgcaaaaacaataacataagacaagataacttacaatacagaactggctacatactaaaccaatgcttttccaagccacaagagtcgacctttacgcattgcaaggtttagttgacttcaatgaaattccagtgacaaactcatgagaaaaatgaactcttttatcaccactgcagaaaatcttacaagatgtaatgccatcagaatcattttgaca

SEQ ID NO: 430469 - DNA, 242 bp, Oryza sativa
tttgttttttttttttttttttttttttttttttttttttttttttaataattttttttaattaatttatattagaatactcattaaggtgaactgaaaaagaaagaacagacaaaaaagcccaagaaaaaaaagacgaagagaaagaaccattaataacaaaaaatgaaaaaaagaaaaaaaaatgaaataaaaaaaaaaaggggacataacttaagaaatgaagaaaaaaaacagaggaa

SEQ ID NO: 430470 - DNA, 57 bp, Oryza sativa
gtttgttttttttttttttggtgattctttgctacctttatttccgatagtaataga

SEQ ID NO: 430471 - DNA, 320 bp, Oryza sativa
gtttgtttacagcgtactgtatactagtattatatatctcggaaatacaatcactagtataattggctgctactgctataatgctacagattatactactatatatttgtacactggtgctcatactactataatatttgcaggttacacattgcatgaagctgtatatatgtaatggggaacaagagaaaagacagtgatgcacttcttccttcatcctaaaatataagcacttttaattgtttaaaattatagacaagttattatattttaggaggcataattttaaaatatgggaaagattagccagtcagctggcg

SEQ ID NO: 430472 - DNA, 261 bp, Oryza sativa
ttggttttttttttttttggggtggcccattgtagcaggtttagatggaataatacttaacttggaaacggctccaatggaaaccttccatggaatttgggggaaaaaaagaaaatggttcacaggtactttccctatagtgacattattattttccaaaaatgatacttttactatgttgtcaaaaatatttcactctgacagtaatttggatgccactaattataatgccttatgcacaacttgttttaaagcattcat

SEQ ID NO: 430473 - DNA, 375 bp, Oryza sativa
gtggcaaccacgaaccggaaggggaatggaaacaaaaaaaagggtgggtggtcaaccaaggccacgggatacctggggacaactgtttgaaaagacaaaaaaggccttggggcgccttttttgggggggtaaaaaacccttttaacgggggggaaaaaccaggggggcggggtcttaacgaccaccaaacggggggagatcagggttttcaagaccgggtccctacaggggggaaaatccgagccccggaaacaacaagttttgtgggggaaaaaaaaagccttgtgttagcaaaaagggggaatggggttcctaactaaaagggccaaaagggggcaggacacctttttttgaacaaaaacggaatggggaaaa

SEQ ID NO: 430474 - DNA, 216 bp, Oryza sativa
aaaatatataaaataagaacaaggaggagaaacaaaaaaaatgggcaaataggcaaagaaagaaagcaaaaaaaacaaaagaagagggataccaaccggaaaacaatagaaaaaacactggaaaaaaaagaactagggacaaggaaaaaagcagaacaaagaaggacaaaggaaaaaaggaacaaaaaggagcgcggagcgttgctaaaaaacaga

SEQ ID NO: 430475 - DNA, 328 bp, Oryza sativa
ttttttggtttttttttttttatttttttaatattttttttttatatattttattaatattaaaaattttatattaataaaaaaaaaaataaaaaaaaaaaaaaaaaaaaaaaaaaaaaaaaaaaaaaaaaaaaaaaaaaaaaaaaaaaaaaaaaaaaaaaaaaaaaaaaaaaaaaaaaaaaaaaaatagaaaaaaaaaaaaaaaaaaaaaaaaaaaaaaaaaaaaaaagaaaaaaaaaaaacaaaaggaaaaaaaaaacaaaaaaaaaagaaaaaaaaaaaaaaaaaaaaaaaaaaagaaaaaaaaaaaaaaaaaacaagcataccc

SEQ ID NO: 430476 - DNA, 329 bp, Oryza sativa
cggggcggggaatcccccatatatataaaccccctaaaaaataaagaaggccccccccattttgggcccccaccctttttttaaaattttttttccaaaggggggaaaacccccccccctttggggaccgggggaccgacctaacccatatgcaggcgggcgaccccccaaaacgcggggccccaggcatgggctgggggaaatttaaagggggaccaaccattcaaatggaggggggaccagggggcaaattaaagctggggctggggggcaatggcaggggccccgggacccacccggttgccgttgttctggggggcctcgacccc

SEQ ID NO: 430477 - DNA, 356 bp, Oryza sativa
caacaagagggtcaatcaattctttgtagttcatctcaacaaaaaaaaatcgttgtacttaattttctaacacagcacaatactggataagtcatccaaatcgttgaacatatctattctttatttctattttctgaaccccacaagacaaacgggatgcccccatttctgaaatctgaacaactacagtagtactcctcggtaatgctaatttgcgtgccgagcagtgtggcaccgtatcactctcgtgcgatggcgacgagctgttttccgacattgcggccggtgaagagcttaatgagtgctgccggtgccgcatcgagcccctcgacgacgtcctccacgtatgccacctt

SEQ ID NO: 430478 - DNA, 481 bp, Oryza sativa
ctaactataaagtaaaagtagagtaaatgactcgtctcaggaagaatacagcaaagcaacgttcgaaaaaaaaaagcaatagcaattaaagctactatgttctgctcttggtaagatcatgcaaaatcgatgccaaagaacagcacagctcgagtaatttcagccacaattaaagctttattcagagtgaaagcatgatttagtatgttgggccattgggctgaagagggcttggttggcatgggagtaggcgaggtggctgaggtcaccaagctgcacggacaaggcctgctcggcgccaccaggaagcagctgagcgctgaccagctccgacgtcatccgactgccggccgccaacagcttcgctgacacctccaaaatcttctcgaactagggtggtgcggatggggcaaccccttttttctcgctggtccaccctggatccaggctttcaaccaccaagcttgcggcggcaagcttt

SEQ ID NO: 430479 - DNA, 432 bp, Oryza sativa
agagctgaagacaattctgataaacagagacatgcatttgatttctgcaaaatgtgagttaagtagaaaacctttacagagatgaaacctcatgaaaccttatacactgatgaaattcaaggcaaaaggatctacaggggtccttgcttcccatcatctatcctaaatctttgcactaatttcttccatgctttgcctttcttccttctttttatcttactcgaagaggggaaaaacgtacaaatatacagcttctttcttaagaacaagcacactctctcctttttatttccagaggccctcctttatttacattaaaggctttcaaagcttagcttttccgatttaacccaacaagactacaggtaaggcttgcctcgctatttgtctgtacaggtgttattttgtcaaactaaccattgcaatctcacg

SEQ ID NO: 430480 - DNA, 361 bp, Oryza sativa
gtgcactgaaccatttttatccaacgtctaaaattgcaagttggatatacgtagacaaacttttattcatatatatgcatatgcatattattctcgtgccactgggtcccgtatctatatagagaaaccaaagtactctggaacaattaatgacctggctaacaatatattcgtacgttccgactatttgatcaggacaggcacggtcttgacaggcacggaaagcacattggcagacttgaacttttcggacacgtccacgttcctccgccgtcatgccgccggggagctttcactcgaacctgtgcagtatttaccccaggatgaacggtacgacacgcttagacagcggtagcccggg

SEQ ID NO: 430481 - DNA, 399 bp, Oryza sativa
atcactgaatagttattttctgggaataatagggcctgatttatcaagggagttgcaccctgaaaaatcagccaataccacaccacagtttacagggcccgatcatcactcattatcaatttgtatctcacagcactagcaagtcctccgttacattttacaacagaccaggtctagtcttttggccaacaacaacaggcattttttggttctgaagacgagagagaatcagcggtcctttttttcgggacacaagcagggcacctacaatttatccacattctacgagcccacagataatttttagcagccttgcacgtctctccacttgaggtataccagtccagaatgataggggggggatgctccagcaacaacttacacatgaaaaagctgggg

SEQ ID NO: 430482 - DNA, 341 bp, Oryza sativa
ccaggaaggggttatttccaagggggccattaatccaaaacaactttttggaaaaaaaatgaacccattttgttaaaaaaaaggggttatgtccccggaccacagggggaacccggaggggaaaaccgaaccttaaagcctgccaggggctttgatgggaaaaagtttaaagggggaaaaaaaaaaaaggggcccgggaaataggcttggggtgaaaaaacaaaaatttttcttttaaaacacgcttaaccggcttttgaaaaaaaaaatgggggggaccccgggtttaaaatttggggggttggaaaaaacctttcttgggctttttttcgggtttaaaa

SEQ ID NO: 430483 - DNA, 153 bp, Oryza sativa
tttggttttttttttttttttttttttttttttttttttttttttttgcataattaaattggtcggttgttcgaagacaaaaaaaaaaacctgaaaaaaaaagcccctttggaggggaactaacacaagagaagaggggcaaaagaaaaggcc

SEQ ID NO: 430484 - DNA, 271 bp, Oryza sativa
ggaaaaactctaaaatcacccctctaattaaggttcttttattggggttcaattttttcccggggaaccgcaggggtaaatttaaaaataaatggccctttttatttttggccccaacgggggccacgaatgggccaaaaaaaaaaggggggggggggctgaaaaacccaacccaaaaggccctaagctaaaaccccccccttaggggggcaacgccaaccccgggggaaccgggggggggggggtaccccccctggtgagcccggacggg

SEQ ID NO: 430485 - DNA, 90 bp, Oryza sativa
ttgggggtttattttatgtcggagcttttttctcttgatttttttttttcatttcttatcctttttctctttttttaggacaaaaagggg

SEQ ID NO: 430486 - DNA, 414 bp, Oryza sativa
acggcgggggaattccccgaatataaaaaacccctaaaaaataaaaagggccaacaacatttttgccccccagccttttttaaaaatagttttcaaacaagggcaaaatacccccccctttttgggacctggagatcgatctcacccataggcaggcgggggaacacacataacgcgcgggccctagaaagagccaggggtaaatttagggctgaccaacctttcatttgcatgggagaaccgcggggaaacaaaagctagggctgggcggaaatggcaaggggaccccaaaccccccggccgacgatgctacagggggccctaagcccaaggttgggatccagaccccgcttttaataagcgtgcccaaaaacgcgggggaagggggaccccccaggcattttggcgaaaagg

SEQ ID NO: 430487 - DNA, 313 bp, Oryza sativa
tttttttttttttgtttttttttttttttttttttttttttttttttttattttatttttattttattttaattttaaataaaaaaaaaaacaaaataaaaacagaatgaaaaaagaaaaacaaaaaaacataaaaaaaaaaaagaaaaaaaaaaataaaaaaaaaaaaggggaaaaggaaaaaaacaaagagaaaaaaaaaaaaggtaaaaattcaaaaataaaaaataaaagaaaaaaacacagacaaatgaaagaaaaaaaggaaaaaaaaataaaccaaacgaggggggacaacaaaaaaagggaattt

SEQ ID NO: 430488 - DNA, 301 bp, Oryza sativa
gggccgagggggaaagggattaaaatggaggaaaaaattaaataatgggaaaaaattttgggggggtaaaaaagggggccttataaaaaaggggaattgccccattccaggggggaaaaaaaaaaaatttggggccacagggaaaaaagggggggggccaaagggggaggggtaaaaaaaaaccccaattttccaagggggggaaggggaaaagggggccttgaaaaaatttccccccaaaatgtgaaaccccctttggggaaaaaacggggggggcttccccaaggaaaggggacccctg

SEQ ID NO: 430489 - DNA, 364 bp, Oryza sativa
gattctaccgaggcatttttatttaatttgttcaaaaccacttttttaccgactaccacttttgcatgggtaaaattaaccaggcaccacggggggaaagaacagaatttctaaaagggacacaaacaggccgaaacatcaacggatttccccctcactctaactacaataaatctcaccgactttcaaaacctaggcaaaatcttggcgtaaggagctgtcaaacatggtagccgaaagggcccaactcctccatgtctacacccacaagcatccatgccctctgcgactaaattggatagagctcaaccttgacaaggcccggatggagccgacaatgccttccccttagccagaccggggg

SEQ ID NO: 430490 - DNA, 335 bp, Oryza sativa
aaaaaacaggcaaagaaaaaactggacgcccctttttaaacaaaaacaaaaaaggggggaacaacacccgatcgaccattttggggaaggggaaggtctaaaaaccaaagggcccccttaaaatggggggggaacaaatttttttgggggcttttatttgggccaaaaaaaaaggggaaaacccaaaagggaaagaacgcaacttttttaaacttttccatgggggaggaaatggggaaagggggggaaaatgtaaaaaataccaacccttcgggggaaaaaaatccccggaatattgacccccaaaaaccacattttttttttgggggggaaaa

SEQ ID NO: 430491 - DNA, 94 bp, Oryza sativa
tttttttttttttttttttattttttttttttttttttttttttttttttttttttttttttaaaaaaaaataatttaaaaaattttattaatt

SEQ ID NO: 430492 - DNA, 347 bp, Oryza sativa
ttttttgttttgttttttttttttttttattttttttttttttttttatttttttttttttttttttttttttgataaaaaaaaaaaaagcaaaaaaaaaaaggggaaggagtaagagaaattgggaaaaataaaaaaagagaagagggcgaaaaaaaaaaaggaacaagggggaaaaaaagaaaaagcaggaaaaaaaacgaaagaagaaggaatgaagaaataacgagggggaaaaaaaaaagaaggggaaaaaaataaggagtaaaaaaaagggacagagaaaagaaaaaaaaaaaggcaaaaaaaaaaaggaaatcaaacaaaaaacaataaagggggtatgg

SEQ ID NO: 430493 - DNA, 329 bp, Oryza sativa
ggagggggaaattaaaaacctaaaaaggaaaagaccctgggagggggtataacaaaacgaaaaaagggggtttaaaaccccggaccattaattagggcacaaaaagggggggacaaaaagggttcctttaaataaatggaataaaaaaatttgggtagccaggcaaaaaaaaacgggggaaaataagggcctaggaattaaaaaaaggggggcaaaaaaaaaagggccaaaacccaactgaaggggggggcaaaaaaaatgggggggacaataagggggggggccccccaaaaaaggacaggaggggggcgcattttggggcctaaaat

SEQ ID NO: 430494 - DNA, 405 bp, Oryza sativa
gagggcaatggcatggatgattcatctgcacacccgtgcggtacatgcgagacgtgcaaaactatttgcaccaatggttttaaaacaacaacaataataaatacaggtacagatggaacttgaaacaaaatgatagcttacaattacatgcagtggatgctatgtttagctaatctggacgtcgccacaaatgctgtgccgtatgcagtatatcaagatgattaatcaacggattatttgctgatcgatatgcttaatccttcgccaatttggatgtccaggggtcaaacaggtgtccgcaagagaagggtggcaaccagagattacaatgctcttgagcgattggggaagcttgggcagtgtcatcatgttgggacactcctggacgatcaattccctgagtgt

SEQ ID NO: 430495 - DNA, 494 bp, Oryza sativa
ataaaactggttaaaactagcattggaagacttgagtgtttcagttcatctaagtatattcaattccatccgttgctatccaacgtcacaagcaacctatgagaccacgaaataaaattacacttattttattgactgacttcaaatctctttgacatacactcttgatagaactctccatcctaatgctagaaggcaacatcgcctccgatagcccatctgtacccatattaattttctcaggcgccggccatagcccatctgtacccatattaattctcaggcgtcggccatgctgtgcttgtacctttcctctttaacgtataatgacgtaatgtaacccctttttatagcctggtcttagcaacgatcattatgataaggtgactgcacttaagcaacgtgtaagctgaacctaaagtacattcagcaacacgcaaaatctttatccgtgccgtgttgatcacataaatcatagctatggcaccgacaaa

SEQ ID NO: 430496 - DNA, 398 bp, Oryza sativa
cctgtgaaaacacattttttaaaaaagataggtactcgagttctttttttggcaaggaatggaaacgcgaaatccaaacatgctcagcccacttgggcaggttaaacaagagcggttttactggcctttaggaagcctggtgtatgataccttccaatacctcctcaagtcctgactccaatacttactcaagtactggctaaaaaggaactctgggcaaatacttctacaccattacaacaaatgcaagggccacagttagacttacaggaaaatgcagataagtacaggtgaccatggccgactatcatcaatggcagaaaaaggccaaaacagtattttataaaaagaatgagcaaattcaaatcaatgttgagagaatacctgaacatggggtt

SEQ ID NO: 430497 - DNA, 367 bp, Oryza sativa
actgacagacagaattgcaggcttgcagctatacgaaagaggagctgaacaaaaaagaaggaaaaaaaagaaacccctatgctgattttacaacacaactatgaaatctacaagactacaagcagcattagccgacgcacaaaagatctcagcattcacataaagaaaactgcgttatgagccaatcaatcgctcgtatctccaaagattctgctatagacagttttagagataaattaattgcattctccaagctgtcaggcaacgcaaagtatgagcttgtaagaactaaactgaccgccccttaacgcagcaaggggcccgctcaagagagcctccattcctgaagtgttagttccacaattgt

SEQ ID NO: 430498 - DNA, 129 bp, Oryza sativa
tttgtttgtttttttttttttttttttttttttttttttttttttttttttttttttttttttttttttttttttttttatttttttaatattataatttattatatcttttttttattttttataaac

SEQ ID NO: 430499 - DNA, 492 bp, Oryza sativa
tttgtttttttttttttttttttttttttttttttttttttttttttttttttttttttttttttttttttttttttttttttttttttttttttttttttttttttttaaaaaaaaaaaaaaaggggaaaaaaaaaaaaaaaaaaaggcaatataaaggggggggtgtaaaaataaaaaaaaaaaataaaaaaatgggttggggggaaaaaataaaaaatccaggggggaaaaaacaaattttaaaaaaaaaaaaggggggataaaaatttaaagggcggtgtaatttttgggccaaaaaaagggggggaaaaataaaaaaggtgggaaaacctttttttggtaaaaaaaaaaaaagggggtataaaggttttaaaataaaaaccttaaaaaaaaataattgggggggaggtaaatttttgaaaaaaaaaaagggggaaattgaggtaaaaaaaatttttttttttaaagaaaaacccagggtttaatttt

SEQ ID NO: 430500 - DNA, 451 bp, Oryza sativa
tttttttttttttttttttttttttttttttttttttttttttttttttttttttttttttttttttttttttttttttttttttttttttttttttttttttttaaaaaaaaaaaattttggtttttaaaaaaaaaaaaaaaaaacccgaaaaatttttaaaaggggaaaaaaaaaaaaagaaaattgaaccccttaaaaggggtgggaggtaaaaggaaaaaaaaaaaaggggccaaaaattttaaaataaaaagaaaagggggcaaaagggggggaaaccttaaaaaaaaattttaaaaaaaaaagggggggggggggcggggccaaaaaaaaaagggggggggggaaaaacaacatttttttggggggggggggggggcccaaaaaagggggggggtgaaaactgaaaaggggggggaaatgctcaaaaacacaaaggggggggggg

SEQ ID NO: 430501 - DNA, 334 bp, Oryza sativa
ggacattgattttgagaaatttaaagggagtttttttttaaacatgggcttttaaggaaaaaaacatttttataaaagtttcacctaaaaatttatttatatttccggaaaaggcgttttggcttattagaaaaaaagccaaacgattgggacctcggggtttcggacccttggtgacggggaggggccgtttgggcccttttaaccgggggggaactggggaggatcataaaaaacgggcaaaaggtccttcattatccaccacacacggggggaccaggcatgagttgaaggggtaaaacaagtaaaaatttggggtttggccattgggggg

SEQ ID NO: 430502 - DNA, 81 bp, Oryza sativa
accaaaaggcttttagctttttttaggtaagaaaacggtggcaattgaaattttttcataagaccttggcaacaggcgggg

SEQ ID NO: 430503 - DNA, 355 bp, Oryza sativa
tttgtttttttttttttttttttttttttttttttttttttttttttttttttttttttttttttttttttttttttttttttttttttttttttttttttttaaaaaaaaaaaaatttttctccaaaaaaaaaataaaattaaaaaagagggaaaaataaaaaaaaaaaggggtggtttattaaatattcaaaaattgtaaaaaaaaatattttttatttggttaaaaaaatttttaaataggggaggaaaattttgaaatagaaaatattttcaaaaggggaaaaaaaaaaaaggtttaaaaaggggggtgttaaaggagaggttttttttattaaaattataaataaggggg

SEQ ID NO: 430504 - DNA, 274 bp, Oryza sativa
aacaaaaaggggggattcaaaaccaaaaaaaaaaaaaaaaaggaaaaaaaataaattaacaaaaaaaaaaaaaaaaaaaaattgagcctttttaaaggaatggaaaaagaaaaaaaatcttaaaagaaagggaaaaagtaggagaaaaacaccttgggattaaaaagggaaagaaaaaaaaaaaatgggttgtaaaaaaaaaaagggtgtaagaaatttgaacggtaacaaaaaggaggtggaaataaaaaaaaattgtaaaggttttttttaa

SEQ ID NO: 430505 - DNA, 421 bp, Oryza sativa
  unsure (1)..(421): unsure at all n locations
acaagatattggctagttcaattttatactagccagtgtcatacatataatggaggtagtatatagtacttcaaatacacacaacacaaagacaagattacatatgggttaaatgctatttatttccttttttttctcacctttacaaacctgcaaactcatttctgcaaagaaaaaaaaatgaaaatatgttgcagagtattcctaattgcctactatgatacaagaaaaaagaaaacacacactgaatttcagtttcaggctttcacactgaatttgaggccttaactgaatttcaggcggtttcggaggaggcgatctcaagcttngnncaccacaggggcttttccctcggcgccgcctgctccggcgacaaannggngatgccccttaccagcctcgccaccttgcccatgcttat

SEQ ID NO: 430506 - DNA, 271 bp, Oryza sativa
ggggggaaaaaaaaaaaaaattttttaatttttaagaaaaaaaaaaaaggggcaattaaatatatataaaaatttgggaaaaaaaaaaaaaggcggtttaaaaaattgtttttttttaaaaaaaaaacaaaattatgggataaaaaaaacaaaaaaaaattggggggggaaaaagaaatataaaccccccaaaaatctccctgtattttttaaaaaaaatttaaaaaggggaaagggggaaaaaaacaaaaatcccaactctttttttttt

SEQ ID NO: 430507 - DNA, 410 bp, Oryza sativa
acagccaacgggctttgctccgtgcctggggccaatgcgtggaaaatggtgcgacggagatgtcatcggccaagagtcacgctatacagcaagtgggttgacgtaatgtaagataggatacatggtacttgtgtatgaaatggagcaacttgctagagcacaagattgttatggtctctcctattcctcagttttttttcccctccttttggccaccagatacgagcaactaggtcagaaaccgaagcacatggtttcaacataaaaacgcgagttttttgcgctaaagtgtgagccttgaatagcccaaaggtggcaaggtgtagtatcttccgagctggggtttgggaaggggctcgattgatccagtgatttacacaggctgggcattttcacaattggcagttagt

SEQ ID NO: 430508 - DNA, 109 bp, Oryza sativa
cgaagtcgtcgttgtcctccaactcctcctccggctcacatacctcgccgtcgaaggctcccagtcccagcaagtctcccgagaagtccggcaaggctcccgcggcttt

SEQ ID NO: 430509 - DNA, 53 bp, Oryza sativa
cacatcataaaggaaggttttgtcccttgctggcaccagttaaaaatagaaat

SEQ ID NO: 430510 - DNA, 113 bp, Oryza sativa
tttgtgttattttattttttttttttttttttttattttttttttttatatttttttttttttttattttattttgggggaccaaactaaaaaccccacctcccttgaaaatg

SEQ ID NO: 430511 - DNA, 458 bp, Oryza sativa
agaagttgaatgtagaataagcatatcatctttgttccagataaaatggttaaactctacaggcactctcagtagcttataaataaacaagctactgaaaatagagaatgaccttcagaaacagaaacaaaactccctctcccattgtcacatccattggcatgttcaccccttgcattcttgaacctcttgatcgtccctctcccatggttcgtgagcgagcttgatgataccagctagtgatgttcccttcgatttgcagattgtttgctccgcaaaaggagatggaaccctaaagtactgaattgcttgatcgattgatccagaacgggacaatatatatgcctttccgcgtgatgcttcttccacctgccaggtcgccaatgaaacggaagaatgatgatgatgcaggtatatgcccatggaagatgtaatcacatatgtaggagaggatttga

SEQ ID NO: 430512 - DNA, 123 bp, Oryza sativa
ttttttttttttttttttttttttttttttttttttttttttttttttattttttttttttttttttttttttttttttttttttttttttttatttattatattttttattttttttttttt

SEQ ID NO: 430513 - DNA, 274 bp, Oryza sativa
ggttcttcttgtccgttttttcctatccaacaccttgccaaagccaaccggccacctgctttgcatggacaacaagcatagcagattagacaggctgcatacgacatgtgcagaggtatatgaaccttgagcatcctataatacaaggaaaaacatcaggatcgtcatggaaagatggagtgtactcaagccaacacaacacggacttatacgtgagacacctgtagcttgactgtactaggaggactgtcaccacttattgggggtacctatg

SEQ ID NO: 430514 - DNA, 338 bp, Oryza sativa
ggggaaaaaaaacttttttttaaaacaaaggttttacaaaaaaaacttttaaaaaaaaaagggggaaaccccccatttttgtttggtggagcccctggtggtggttggttggttttttttaacaaaaaaaaggggggggaagggatccctggacattggtgtttggcaaggggggcttgaagggccttaggtcttcaaaccaaatattggccttgtgggaaatttaacgggggggggggaaaatattttttttcccataaggccccttgagggacaagggcaggtcctcccaccataaaatgggtaaaaccctaattttttttttaaagaaaattagg

SEQ ID NO: 430515 - DNA, 362 bp, Oryza sativa
cattggcaacttatttgctcattttataaaaagggagaatgcgtaaatgacaggctgtctaggctgtttagcgaaagtagacaaaacttcacttttttaaagggaaaatgggacttcactttttttaagggaaaatgcgtaaacaataggttgtctagcgaaagtagacaaaacttaccaaatccaactttatgcctattttacatcacccctgctgggccggggttttgttccgggatttagtaggatgtaaaaggctcccctataaggaaagaaggatcggtttgatgagttttgctcattatcctttaaaccaaatagcttccttccccaccccaaacattttgccttggggagaaaaa

SEQ ID NO: 430516 - DNA, 179 bp, Oryza sativa
agacagaagctcagtaatcttttgattttttacccgagggcatgagtggaaggaaaatcggctgacataacatagccgtccagactgcaaatcaaactcaaccatatgatggtaaacgtgactgacgattaacgacctgcgcctatgacagtgataaggaggataaacgctgtgcacca

SEQ ID NO: 430517 - DNA, 336 bp, Oryza sativa
ttttttttttttttttttttttttttttttttttttttttttttttttttttttttttttttttttttttttttttttttttttttttttagggggggaaaaacagttaaaaaaaaaattaaaatggggaaaaaaggcccccccttaaaggaaagaaaaaaatttaaaaataaaaatggaaaaaaaagggtggaaaaaaaaaaacagaaaagggaaaaaaactctggattaaactcccagggatgaaaacccccttaatataaaaattccagtttaaaaaacccaaaaaaattatctcgtttttttggaaaaatagggcccctttgggaatatggc

SEQ ID NO: 430518 - DNA, 440 bp, Oryza sativa
tttttttttttttttttttttttttctttttttttttttttttttttttttttttttttttttttttttttttttttttttttttaagaaaaaatttttttaaaaaaaaaaagcaaaaattaaaaggggcacacttggggcccggggggaaaatcccaacaagccaaaaaaatgggggggaaggaaaaaaatagggccccccctattaattttttagggggcaaaaagaaaaaatcaaccttttccacttaaaaaccccgggaggggggttggttatctaaaaccctaaaccaagaaaaaaaaaatttgggaaaaccccaaatggtggggaaaaaaaccaaagcctccaaaggggaagggggattttttaaaggggtggaaaaggccccccctagggaaaaaaacctggaaaaaaacccggaaaaaattaaagggggccc

SEQ ID NO: 430519 - DNA, 80 bp, Oryza sativa
ctgcggttttctttctcttcgtctcttcctctttcttttcttccgtcttttcccactccctctccttttttttttttaac

SEQ ID NO: 430520 - DNA, 101 bp, Oryza sativa
atctatgttattccctttcggttttttaaaccatgttctcattccaaaaaggccactcaaaccataagtgacaaataacaaacccgaaaggggcgcccccc

SEQ ID NO: 430521 - DNA, 491 bp, Oryza sativa
caacagatccattctatgatttcaagtctcaatagaaattaagtgttcctttctcctcataccatacaattatcctcattcctaattctacagatgcacaggtcattgttctatgatttcaagtctcaacagaaactaattgttcctttgttctcttaacataacagttattatgagaggaaggcagaggttaccgttcaagaacaacgatttttttgggtgtatcctgcaaagcatgtttcggaaatgcttttttgaagaaatcatcatttgctatgagatccccaccctcgcaccagatgacatacatgcaagctacgcaaaacagatcaagcagtacatgattgaattgtaatgtgaaacgatcataataacatcagttgaccttatgttgacatgatgaaacccaaccaggcaactgaagcccaacattcggcagaatctattataatccatacgaaaagcctgggatttgagagagaataactgtc

SEQ ID NO: 430522 - DNA, 302 bp, Oryza sativa
ttttttttttttttttttttttttttttttttttttttttttttttattttttttttttttttttttttttatttattaataatatactgggaatgaaaacaaaaaaattaacaaaattaacaaaaagaaaaagaaaaaaaaaacccacaaataaaaaaaaaaataaaaaaaggcaaaaaagtaaaaaaaaaaagaggaagggctaaacaaaaaaacgagagaatactaatagaaaaaaaacctaaagtgcaattctcctgaaaacacacatgaaaaaaaaaaaaaacaataggggggttct

SEQ ID NO: 430523 - DNA, 362 bp, Oryza sativa
gaaatgggagatcttgattctcaaactagactttgaaaaagcatttgatacaatagagcatgccaccattttggttaaagttttttgcatggtctaatttcgaagtaagcttttgaaaaggatcaatttgtcaaaaaaaaagagggggaccaatccaagcaaccaagtataggtaatacaagtaccccagagagagggagggagggggagagagaggccatcagtggtttgaggccaaaatctttaacgcagaaacggttacagtgcaatgttaagtctaagcttctaacactgaccagttaacaggggtatcacaatttataacttgtttgctttaaacgaccaattatattgtatatatg

SEQ ID NO: 430524 - DNA, 311 bp, Oryza sativa
atatatatggagaacaaaggtaggctgaatgtcccaggagaactattgatgtacaagctagctgatcacaacataagggatggaaaggagaggacctagtgagggagctgacatagatgaaaactggaaatggcactgatttttttctagttctgaaaccggttgcggctgatgtatgaaaggatgcctccatgggtgaagagagccagttcgacctttgggcgaaagggaagagttcattttaacgattgacacgggcaggatgtgactgtcatgcactgcctaggactgatagagttgacgtaggccgg

SEQ ID NO: 430525 - DNA, 482 bp, Oryza sativa
aaatatgaacataagtactgcaagttaaaaatacaaattacaagttcctaaaattattgtaagtgcttattcatacaaattacatgttccacaagaaatttaaacctgaaattacatttgattcaaactccacaacccatcggcaacccagtcccgatattgattcattacctgcgagtccaaatagtctgttgcatcatttgatggagaagacatttttccagccaatggatcatagttttcatcttggtcacaatggttgaattctgtatcggctagttgactgtctttaatgaaattatgcagtactattgcatgcgacaattattttgctttgctttttctgcgagtaacttgctaaatgaaacaaaatcctccacttattcttcaagactccaaatgacctctttatgacattccgacacgaagaatggcagtaattaaagcgctcttttttttcctctgggcattatgcattcgtt

SEQ ID NO: 430526 - DNA, 468 bp, Oryza sativa
gttgaaagtaagataactagatcaattaagcacagctcaggtttggttcagatcatttaccgcctgtacaaatagatatccctaacaccaattaaatagtaccaggagaagagcaaaatctgtaagtgatgacaaaaggtagtccaaaaaaatgtgggaagcccctgatgcatttagcatctgcatcaggacaagacaactaacctagagagcaattcagtatgtacactcgatagtcgataccttggttgaaaaacattgggaaacagtcggtcatgattcgtgactaaccatttctttcgcctgagattttgcacagtaaccatttttcattcttggaagctgcagaatattttttgtgcagttggccaaggctacaaaccacaccaaaactgtgctataggccaacgcattttacccacctgaatgcgtgtcccatcttgaaaggaaggtcataagcttttatga

SEQ ID NO: 430527 - DNA, 385 bp, Oryza sativa
aaatctggaatgctacttcttttcactgaactcattttgtgcatttgtacaatggcgatgcaactgcatcctgaggggaaaaagatacatacagaaagggtgaaacagaaaaaaaggaaccccctttggtcttctaacttatggaacatctttcattcctgtatacaaagtgtgtttgggttttctacaatcttcttggagaatcaaatggtggtgctttcagttgagagatttcgagccatggatctggaacatggttgcttggtctttttgggtagagtgcattgttgatagggctgtagttagctgctccagctgaataggctggatgaggaggcgacggcatgcaactcccattcgactgccggtactgccgtaatgggct

SEQ ID NO: 430528 - DNA, 326 bp, Oryza sativa
aaaaacaaaggggcagggatatttttgaactttcgcttacccatagatggcaggcagtctaggaggggaccaatccggccttttgcccccatacaggcactcacacgctactacgctttttttacagggggaacatatacctatatggggacaaaaaagggcatttgacatataattggggggcacatgggggcatgctgctgctgcatgccgcgctagattattcgttcgcagcaggtagccaaagtgggggaccagttttggcagggggggcccggttcaccaggaagagccgcgggaaccttagggggggccgggaattcctg

SEQ ID NO: 430529 - DNA, 284 bp, Oryza sativa
  unsure (1)..(284): unsure at all n locations
ggggagcataaaggcggggcaccccttgaaaaaacgggggtgatttttgccaaaaaggggggggggggcaatagttctttattgggggtaaaaaaaacgggggggccccgggtaaaaaccaaaggacaactcccccgggttttaaaaaatgtttccaaacccccgggggtgtttttttacccaccccanaaaaagcggtgggggggggccttttttttgaaaaaaaaaccccccggggtggaaatataatttttttgggaagggggaatttttacccgggggaa

SEQ ID NO: 430530 - DNA, 309 bp, Oryza sativa
tttttttttttttttttttattttttttttttttttttttttatttttttaaatttttaaaatttttaatattatttttatttaaattattaaaaaataaaaaaaaaaaaaaaaaaaaaaaaaaaaaaaaataaaaatagaaaaaaaaaaaaaaaaaagaaacaaataaaaaaaaaaaaaaaaaaaagaaaggacacataaaaataaagagaataaaaataaaaaaaaaaaaaaagaagcttaaaaaaaaaaaaaaaaaagataacaaagggaaaaaaaaagatcaaaaaaacaaaaaaacaacaacac

SEQ ID NO: 430531 - DNA, 414 bp, Oryza sativa
ggctcaataaatggaaaacggtggctttaaggaaaacaggaaaaattaatggggaattggtttaaaaaaaggaaagggccccagtttaaataaaggggacgaaaactccgttaagataaaaacaaagttatggaaaaaaaacaaagtgtgaaacaaaccgtccacattaatattttacaaggccccaaaaaaattttccgtgttgggaattttgatggaaaccaggggcgaaaaaaatggtcaaaaatttttctcggggggaaggccattaaagtttgggttttttttaaaacccccggggttggggttaaaggaccctttggaacaaggggtaaaaaatctatccggcttttttttttttggaaaatatgggggggtttcgctactttgaaaaaattgtgggttgtgttaaaa

SEQ ID NO: 430532 - DNA, 318 bp, Oryza sativa
ggctgccacataaatttttccctttttaacccaattccagagggaaaaaaaaaggggtgaaatgaaaaacccgggaaccgttcttcaacccattaaaaattgtttccagggattcccctacttacaaattcaagaagccttcacatttgtccactaaatccgaaaatttcagggctcataaaatctccactgtttccaatgctgggactcaagttgttagttggggattcaatttcatccactgcaaagcggtttggaatgcaagttcctttaccaacaaatccctggttttttcctcgcccttgatcacgggctttt

SEQ ID NO: 430533 - DNA, 404 bp, Oryza sativa
ggggggggcaattgctcgaatcagttatgttttgtacggctcagtgcattgtacaaactgtaagacggttttccaatcttattagtgctttcgacaatctctttcaccataagaaatgaaactttggctctctaagggaactcatcttgcaaacggacggagcacacatgggaaacatttgctgcttctttgtaagaactcgaacttctgttgttggagggattgagtgtcacactcttcgatgctgctccagaatacaagtgtggttttgcattttctatgtagaccgggataatcgcccttactgaaatgcaaaacattcactatctagggccccagaccaaaattggccacttagggtcctttattggataaagggctttctttttgtcaacaattttccc

SEQ ID NO: 430534 - DNA, 364 bp, Oryza sativa
aaggacaattcaaatctttattatttgcagaaacagaaggatttgtaactatttacagaaatgttatataggagctaacattggttaggatcattcatagatgcaggaatttacaatacaatcgtgcaaggacacattttggtagcttggacacgttatgcaacgggaactagacatcgtttgctagtagacagtagcagctagtaacccatggagttgcagattaacagcattgctgatgatggggatcatggccaaaaagatttttatcaacggcttggttgagactttcacttggagattactttcaaaaaccggctcacggaactaaaaacgcccaatacaatggtcaaaaaagatgggg

SEQ ID NO: 430535 - DNA, 249 bp, Oryza sativa
aaaaaaaaaaaggggccaaaagggggggggggggtatttaaaaaaaaggggggggggctctattgggaaaaaaaaaaaggggggggggccaaaaaaaaaaaatttaaaaaaaaaaaaataaaatgggggcccccccccgaaaggggggaaaaaaaaatgccccctttttttaagggaaaaaaaataggggggttaaaaaaaaaaaaacgggggggaaaatttaaaaaaaccctttttttcacgagaaaa

SEQ ID NO: 430536 - DNA, 85 bp, Oryza sativa
attttttttttggttattttatgttttttgtgttttttttttaccttttttactttatttcttttcttttactatttattttttt

SEQ ID NO: 430537 - DNA, 116 bp, Oryza sativa
attagggttacagtataccaggcggactttcattaaacaagcatacctagaccgacacaaagagccttgctcccagaaaagacacatatgtcccttatgtcgatttcgagcctcat

SEQ ID NO: 430538 - DNA, 344 bp, Oryza sativa
ggggaatgcaatttcattctttttatttaattaatttaatttttttcgtacttcactaaaatgtgtgttcaatgaggtgccgggcaccagggttaaacaagaaacatgcgggggggggaaaaaacccggggccccactaagagcacaccaccagggccaaaaaaaacggggggggaaaagctaacccatcactaaaaaagggggaaacggcggctgggaaggttctcacccctttacaggccggggagagggaaaaaccaattaccacccttccttaaaaggggttggaaaggccccccacccggggggggacccggaaaagggggacccattcccgggaagcg
